United States Patent Application Publication US 2007/0083945 A1 - sequence listing, part 41

SEQ ID NO: 278221 - DNA, 391 bp, Glycine max
agcttctaggatccataataaacattggagattttacacgaccctagttcatctcttagagacaaaattcttcaaacatctaatattaatttgaaaaataaaggagattttttagtttgcagattaaacagaaataatagaaacaaagtttaatagaatcaaatgcagaaattgtcaacccaaggatccaattttcgtggtaacaatcacaatcccagattaagcatgaacccacccatccacccacacaacaatacaaattatataagctcaccacccaacatgcattcatgaatgaagattcacaatcacattactcaatttaccatgatttcgagcacaacacgtattggcaagctatctatcaataaccaagattaatcattcatat

SEQ ID NO: 278222 - DNA, 493 bp, Glycine max
  unsure (1)..(493): unsure at all n locations
natgacagttacagcgtccanaacatctaagcttgccataaccatttgaatgagacagacctacaacggtcttgaacgcatttttatnagcccataatgcatcatccaactggcttgaccaatcctttctagtggaggctacagatttcttcagaatcttctttggctangtgttataaactttaacttgaccatatgtttgtgggtgatactatgagactactttgtgtgtgacattgtaatggctcaacatcttctgatagttgttgttgcaaaaatgataaccactatcactgattaagaccctctacaccccaaagcaagctaaaatatgctgnnnnaagaactcactatagttccagcatcgttctttgtggcagccaccgctttatgccactaggagaataatctacannnnataagatattatatcttcaatgaatacttgttgggctcctcttttcgttgtaccaaatcctcccactcgaggggt

SEQ ID NO: 278223 - DNA, 449 bp, Glycine max
agcttgccacccagctcgcccaggcgagcatttttcttcctccagaagcaacagccttctggaggaatcttctggagggcccaggtgggcctggttgctatttgcaccaccatttttactaagtacacccccctgcctttttttggtgattcttttttcgtaaagttatggaaacttacgaatttcgtaacgatacttgttttctttccgtaatgttacagaaccttgtggattacataatcatcccctttttgacttacggaatgttacggaacctcactaattgtgcaacgatgcctccatttgatttccggtgtgtcacagaaccttacggattgtgcatcaatattttcttttgtttttcggcatgtcccggaatttcacaaattgcctaatgatgggtgccaagcacctcacaaggaccaaaccaaagttgcatgtcatcaagc

SEQ ID NO: 278224 - DNA, 77 bp, Glycine max
atctattactaagatgagtatcaataccaagcttttaggtataagtccgagatgatgatctagattgccaatgggat

SEQ ID NO: 278225 - DNA, 417 bp, Glycine max
agcttcatcccttagttgctataaatagggtttatttgaataagaaaagggttcagccttcttggcacatctctctctctcgaaattgctgaggaaaattatttccgtgaagaaaatccaagccgaggcgcttccgtaacgtttccgtgaataattacgcgaagattctcgaccgttcttcaagattcatcgttcattcttcgttttcttcagtcttcaacgggtaagtacttcaaaccgagcttttcaattcattctatgtacccatggtggtccacattttgattcatgtatttttattctcgttttcattcgcttcttatacccacttttgacgtgcttcagtcatttatataagtcatttcgcgcctaatctaaaaataaaattaattcccgccgatcattcgaattgtatca

SEQ ID NO: 278226 - DNA, 325 bp, Glycine max
  unsure (1)..(325): unsure at all n locations
aagctntaaagcacaccaacacagaatctaggcgagcaacaccccttcattcaatgtgttattctaggcctgaaaggcgaaatatagaacgatgtatatccaaagctaactctcacctcacacaagttcataacctcaaaatatacagctcaaactgaagtaacacctaaaattccacacaaacaaatattgactcttaaacacacaatattgacctaaatacggctctaggctcactatggtcatttgaattaatctctagctcagccaaaccatgctcacaagtactaaatgacaattcaagctagtaataactcactctaac

SEQ ID NO: 278227 - DNA, 440 bp, Glycine max
  unsure (1)..(440): unsure at all n locations
agctntgtccgtagatccctcatttacgacttggcttagatcaaacaacattattgtaacaacatatttgaaaccaaaacttaatacacagatccctcatttaagactaagtttcaatcctgcttcaatcaagttctaaggcaacagtacatttcccaatgctaaagtcacctaactatgcacacaaatgggtgatcagacaaagagcatacaaaatttaagcactgaaagaagcattgaacaatataaacacaacaaattagatattaatggaattacatcaactgttctttagaaatccccaacaagggtgtttagccagccattacagaaaaaccctaacaataatgagattaagagtagagaataattgctccatacacaagaagggggatccctcctnctcttctcagcatcttacaatcacctctacaactcac

SEQ ID NO: 278228 - DNA, 428 bp, Glycine max
  unsure (1)..(428): unsure at all n locations
cttgcttcacgtcaccatgctaaggtaatttctcctttgagttctctcctttcatgatctaactcgcatcgtggtgttcccttcccctgcaactgcaaggcttctcatgagctgttagatgcctctagttgattgtgcatcttccactatgaggtcttgggtntttagttttttactgttgacctaatagcaagcattttagtgaattttgtgtgattcaattttaattgtgcatctttgttgattgtgtgattcgattttaattgtgcatcttccactggttgattgtgcatcttccactgcttagatggattcggttttaatgattnttgtgtgattatctttgttcataatcaaatacatatgtgaattctttaatcgtaggtgttagtaaccataatctttgttcgtcatcaaatacatatgcg

SEQ ID NO: 278229 - DNA, 366 bp, Glycine max
cataccggcgacaactaactggggttccagtcttcatgattcccaccctcaacgtgctaagttgcttcaattttcaaagactatttttcagcctagactccttagatgtgcaatgcacgccacacaaacgttaaatgcttgattattttttcaaatagaaaattccatataaacaattatgcatgaatccatatggacattgtgtttaactatctctttacatttcaaaacttttcatgctcaattaaactgagaaaattgtctaagctctttgattaatgcgaaagtcaatttacttcgtataaaatccaagggtataacttactttcctgatttgaaaataattttttcactaaaatttaatgc

SEQ ID NO: 278230 - DNA, 567 bp, Glycine max
  unsure (1)..(567): unsure at all n locations
ttacgcacccctaccaatactactatgnagtggcgtaaagtagtgcttataactactgcctcaaacaacgcnnaacnnnnnangagtttgtgacctcgtggaacggcagccgacananacaacccgcacgcaggcaagcangacgagcacnaacaaagaccgacttctgttcttctaccctacaccatttctcagagacaaaaccctccgcgcgcctaccatctgtgtccaacatcaaggaaagttcccagcccgcagagacacccgaccaggactagcagccagcgatatgaggaaaagcaccaatcgttgcccccaggatccatagtcggtgccatccacaacggagcgtcagaacactgatccgcctcattccccacgctacggagaataatattcctctgtccacctcaccgacttcgagtgccgcgcccgacaccaatcgctgtctgaaccaagcccgagcacacacgagggacgactccgcttcacacatgcacatatatcgatcgacgacagaagcactgctccacacaagaaacgtacccggtcgggcaccccctcccg

SEQ ID NO: 278231 - DNA, 226 bp, Glycine max
  unsure (1)..(226): unsure at all n locations
agctntgaagagttgaagacacaaactcatcttgctaatatttaaaatttggtgttccttcttctctaagctctttctttgtaaattcgtaagttgtaaagatcttgaaacaccttgtaaatcctgagagaaaaagattgagtgatgaacttgtatatccgtctctaagatgattaagctatgttatgtgcaaacaaacctcaacatatgtgctggtatataagag

SEQ ID NO: 278232 - DNA, 313 bp, Glycine max
  unsure (1)..(313): unsure at all n locations
agcttataacatcaacttgggaaagagttcttgggtcatgatatgataagcaatcaagtatgatgttgctttctttacttaagcgatgatccatctccacacatatgttatcaatagcaacataaaaaagttttgcacgggaatgatgaagattaatgatagttctcccttctgctcttgaacgaccccgaaccggtatttcttcatccatatttggtaccggaatacttttagctacacaatatccttggacatcggcaaaaaaattatttcagccactctcttctcattgtgcccaaccgagntttgacaa

SEQ ID NO: 278233 - DNA, 582 bp, Glycine max
  unsure (1)..(582): unsure at all n locations
ccgcacgcgcactctnacagacntccntaaatcnacntacgctcactacacttanattcaggttaagacannncnncagggtggacgacgcgnnannnnntttggacctgagaccacgcananacggaccnatagacactcaagctcatgggcagcncaagccatcaacatgagaagttgttgatcattgaatatctgcgcaaaggaagcgcgtatcactctatatttgactggaacgtcttcacagagcaatccgattcgtagaaaacaataagctatatgaaataactggcacaggattcaaaagtgaatctagatgccgctacgtccattacgaggatgggctacgcaatatataattatgggtggaatcgctcgaggactgttccatccttagtcaagactctagactgaaaatcattgatagggaactcaacacgagcaatgtgcgactcgatagaatatgaacccaaaatatcacatcccgtatggcaagcaatgtggataaaccaaatgaaccaacaaaacagagtatggaaacacgagccctctcactcgtgtacgttacctacagcattaccg

SEQ ID NO: 278234 - DNA, 130 bp, Glycine max
cttcttctctaagctctttcttcgtaaatcccgaagttgtaaagatcttgaaacaccttgttaatcctgagagataaagattgcgtgatgaacttgcctatccgtctctcccatgactaatctagtctat

SEQ ID NO: 278235 - DNA, 323 bp, Glycine max
ctggatgcgatgggcaacttggaaacccagttggccttgtatcatacatctgaacctgtcgcaagggtttgtggattgtgctcctctgctgaccaccatacaaacctttgccctgccatgcgagaatctataacaattcgaccatccctgtagctgatgcaccaaatatatacaatatacctcctcaacctaagcagcaaaatcaaccacagcagagcaattatgaccttttcagcaacagatacaaccctgcatggaggaatcaccctaaccttaaatggtccaggcctcagcaacaacaacaacagcctgctccttccttc

SEQ ID NO: 278236 - DNA, 185 bp, Glycine max
agcttacagatcatatgagctgagcaatattttgacttatcttcgattctgggcgacactggattcttcaataatacttactaaaagctgtcaagacgtcattatatcagactcagactagcattcaacgaacttctgcgtgcaggtattactctgccataccaaactaaatactagaacctaca

SEQ ID NO: 278237 - DNA, 452 bp, Glycine max
gtataaataacaaataactcgtgattattcattattcctttggagatacaaatatgaccaagtttcagaggatagaatgacactggccgtttacctaaagttcaatatgtaacacactaaacgactcagttcaccagatatatacaagtttatagctttaggaactcaaacctacacaacactaaacacgatagctcattcaacttccaacatgctgtatatgattcacaagatggattccttatctcactgataaacatcttacggtcttcttccagagacattcctttcattgttatttataagattcaaatttaaaatgatatgttttaataacactcaatctataatgttccttatataaattatgtttacaccagagatatttctctctaaaaaaataaatataatgtattaataaactattagaagagtagaaagaagcactaatg

SEQ ID NO: 278238 - DNA, 255 bp, Glycine max
  unsure (1)..(255): unsure at all n locations
agcttntgncgcgaatcccacagagttattatgtatatagnccccactatcaacgcaaggatgtctcgatgcgctcatcgcttccatctgaatctataaccagcatgccttaggtctgatcactcatctgtgttgatagccatgattattagcattgtaaaatgttctgaatccttagcacaatctccctgtgatcgatactcggttcttaccaatatatattacttgcgatttagacaccaacttcacggactc

SEQ ID NO: 278239 - DNA, 242 bp, Glycine max
  unsure (1)..(242): unsure at all n locations
agcttgcttgcggnctcggatctgtgtcctttccatagatctctttggagtagaatatcatcaaagctccacaagtaagagctattatggaatgaagaacacacataaaggtatatatagaagaaaccatttatccgaattcacttcaaaggcctctaattgctttcttacttttaactcaatggagcctctgccctctataccaacaatggtatgtgaaattccaaccacttctttctagt

SEQ ID NO: 278240 - DNA, 293 bp, Glycine max
tctccaatttacaaatcatattctacatcatgggcatctaccgagacttggtgagcacatgtttggaataaattgcaagagatggggacaatgtggcatgccccattgcttcaaaataaagcataggcctaaggccttctcattcaaatcctcaactcaagaaaacaagaataaaaactaaccacaactgccccgcaaatataagcacattctcacaatttggagctcctaaagatgaagaatatataccaatgggaagctaacaacatcaaggattgaatacttacttgttg

SEQ ID NO: 278241 - DNA, 215 bp, Glycine max
accatttttccgctccaactctttgctctctattgtctaggaggagcacatcaccctcaaaattctgaaacctcatcatgataaaagattatatttttaagtatggtggtgcaatgaaacttaagaacaagaacaacccatgatttaaaaaaacaaaagggtacctttgaatttgaaggaggtggcggtgcggatgtgatgtgataatggaggcc

SEQ ID NO: 278242 - DNA, 402 bp, Glycine max
  unsure (1)..(402): unsure at all n locations
acacttaaatctcagcttctaaattgcatctgctggtgtacaaaacattgtgtctattagtcaagctgatatcctataactgaatgctgtctaaatcgaaatttatcactgcttaacacaccaataaaaacaaagatacaggtagtaaattcctatgcaaattcagtttatatgtttcataagacagaccataactgttgtttagaggagaaagaagacaatccatatcttatgaccaaattgaacactccttaagacacaaaagaagacaccagactgaacatccctatttgtattattatctctgcttcaagtgtaagacatttacatttttttgtatgtgagaaagaaactaatttgaagctgctacaggttgctaattncctacaacacaaacacttt

SEQ ID NO: 278243 - DNA, 585 bp, Glycine max
  unsure (1)..(585): unsure at all n locations
tctcttgctctaccttctactgtcatatagtgtatctgctatctttntagactacttgattactgtnntcncctggagngntgtgtgnnnnnnnnnttttgagcttgtgacntcggtatgnacngacacnananaatactcaagctntacatagcccnagacgccatcgggaatcgattcttcattatcttttatcatcagtcactattgtcccgagacaatctatggatagaatctatctcatccaattctgtgatagtagcttccatctgatacatagtccgacaatggctacctatgctgcgattgtcgcggattgagcattaaacatacaagaccacgtggtgactgtcttctacttcaaggaatgacatagatgagagaaaccttatatagaccatacagatatttagaggtgcaagcataaggatccctgtgtggacaacattatctatacgaatgataatagctgtcactattcaccccttatacacagctgatacgatcgactgaatgtacatgtgtggaatcattgacatggcaaactgctcacatatttctgacataaagcatacatacattgct

SEQ ID NO: 278244 - DNA, 195 bp, Glycine max
ccacgccgacagccaggcagtgcaccgccaccaacactaaacccaccccaaggaacgccgaccaccccgcccccaacaacacgaaccgcacggacgacacatcgagcagcaggcccgcgactagccgagaaaaccaaacaccaccgcgagcaccgcaaccgcaaccagaaccgcaccaccacgccaagggcaccg

SEQ ID NO: 278245 - DNA, 52 bp, Glycine max
agcttaaacactctaataagacatacgcggttttatatccaatgtagtatcc

SEQ ID NO: 278246 - DNA, 316 bp, Glycine max
  unsure (1)..(316): unsure at all n locations
aagacanatatttattatgccacctcctcccctaacaattacgcacaaattaatgtagaggaaagtatatatacaaccattcgtacaaatattttccagaagatgtgcaactcgtgtattattaataaatgcaaggatatatattactaattattggcttgtgttattgttttcattaattgcttcttcaagacttacagtgccttgtgtctactataagttgaaagctagccgaaatagtcaacgcttctgatttatgtagactatgtagcgagatgatctatcttaatatatcctatggaggaatataattata

SEQ ID NO: 278247 - DNA, 440 bp, Glycine max
agcttgtgatgtgaagaaaagagcaacacattctgtcatctaataagctgcaagtattaaaaaaaactgtaagtataaaataaaagtgtgtgtgctgctaattaagaaaaagacaagctaagttcgaaaaagcaagtaatagagctgtaataaaaagaaaaaggttgatctaaggatgaatgctttcccagaacctaagctcttgcatcctagaaaaaccatgaattgtttgcagcccagcctcattacaagcctagaaaagtcctttggattcaatttgtgtgttcttgactgtatggcatgagatgaattgcaaagattgagacttgtgttatttgttgattgttgaataagcctatatacttgtgcttgagtgaaacagtgattgtgaggctatggttaatgatccttccttgatatctgtcatttttactagctta

SEQ ID NO: 278248 - DNA, 353 bp, Glycine max
  unsure (1)..(353): unsure at all n locations
tgagatgangaagtgtngaagggtgagacttcttgcttctattcgttgatcacagagcggcacctggagatatgtcgcaggggtcaagagaccttgtggacgtcaagtggggtgctcatgtccaaaaccaaacttgaccaatccctacccaaccctggcataagtagtcagtgagaacctgtgatgtacctaaacaagcgaacttctggcattcaacagataaaatgaacaaaaccacaaagcaaggatgctcgtgtggtggctgaccanctgtgaatcttgtgtgatatatgagttatgggctctggtaattcgataccaagggtgggttatcgattacaacgcttaaaaat

SEQ ID NO: 278249 - DNA, 401 bp, Glycine max
aagtcacctgcggcatgcaagcttataagaaccaaaattcctcaatcatttccttttatgtttgtgaattaggaagcaccaacaagaatcaagccaatgctattgtgcaagcaatcaatggggcaaaacacaccaaatgattatgatgatggatggttcatattctcacaaaggtaaactcatcactttctaattgagctttcaaaactatcatgacatgtataggagaatcaaggatttcaagtcacaaaatgtcaagaacttttattttcaaaacaattacccatttcttgaacatatcctataattcaaagaaaaacatgcaaagttgtacatgcacacagaatcgacccaaaatatttaactagaaatcctacgaaactatacaacattatcaaatt

SEQ ID NO: 278250 - DNA, 445 bp, Glycine max
agactaagctagaggattatggtgtacccgccatatgtggcactaggtggttatcggtctattgtgcaaatcaactctagcacattcacaaataatacatgagcccaccatcctcagttgcccgccttgaactaagctgacgtacccccatgtcacccttattccttttcagctccgcatggtggtctcatcaacccctttaatgtgccacaccatcctcacatcatgaactaccctgatcctagaataaagggctgaggcagagtactctggccaaaacacattccgataccacagttatgcctactcaaatgcaccaccaacataatattcgtgacgattcgattaccggtggagcgactcgaagattttactggaggtccataggatataataccacagtttgaccgttgggattagctagatatgtccatacacaatttga

SEQ ID NO: 278251 - DNA, 394 bp, Glycine max
agcttatggtaaaatctgggacctagccatgttagtattctctacagaggccattgcctccctcgcccagtattatgaccagccattgaggtgcttcacctttggggacttccagctatcacccatggtggaagaatatgaagagatcctaggatgccctctaggggggaggaaaccatacctcttcacagggttctatccctgattagctagaatttccaagatagtccaaatctcggcgtaggaattagaccacaggaagcaagtcgaaaatggggtactcagaataccgagaaaatatttggaggtaaaagcaagaatcttagcagataaaggcgagtggatcccgttcatagatattctcacactgttgattttttcggcgggggggggg

SEQ ID NO: 278252 - DNA, 530 bp, Glycine max
  unsure (1)..(530): unsure at all n locations
ttccacactctgagaaagacgatgagatagttgcacaaatatagaaagtcttcctatcaaaatatcttcatgacaggtggacgcttctatctatnagacgtccgactcaacagaatgcctcgctataccctcattccaattgccacactatgagcagatctccataagcataaacaatgtgaagcaagcagtagaatcgagaatcttacagactcttcaaaataagtacgaggttatacagtacctctcactatgatgaccatcaagacacaaatctgaatgatatgcacgagtctcctaaaggagattgngcacgccacacaaaacgaagcttcaacggcacatataaaggacatcgcattggtgcaaaaatagtatcaatcatgagatatgtgtaaaacgcgttctctcacatctcctgtagaaactgttacgacgctatgtactgctctgtatacacttgcatctattaagaacaataaattctgataatgccttgctagagctacgagcatcagtcagtgtcagcn

SEQ ID NO: 278253 - DNA, 363 bp, Glycine max
  unsure (1)..(363): unsure at all n locations
gagttttaataaaaggaaaaaaaagaaatagcttgagcatganacggancnaaggaagagaggagaaagggagagttgggaattaaggaaaaaaaaagaggagggagaaagggataggggaaaaaaaaaaaggtgaggagagaaaggggaagaaaaaaaagaaggagggaagaggggaaaaaagggaaagaaggggaagaatatgaagaaaaaagaagaaaaaggaaaggaagagaggtgaggaaaaaaaaaagaagaagaagggagggaaaagagagaaaaaaagaaagagggaaagagagtggggataaaaaagaggaaaaagaggaaagggagggaaaaaaagagagaaagaaaaggaga

SEQ ID NO: 278254 - DNA, 579 bp, Glycine max
  unsure (1)..(579): unsure at all n locations
cccacttctcccaacctatctatatatattccattaattatctatatctcaacacnnccncgcnnnngacggttttnnttatgaacttgtacntcgcaanacggacacnaagacacnaaacnngaagggnngagcccaccaacacnncaaactgttaangtgtctactatcatggccatcaaaatattcttcagcattgaagagccacttgaacagtcaagactctccacctttgggcgaaaaatattgaaagaattgtgccccctttctgcacatgttctgtatttgcatactattcaaatacatcatactgacactgtctaaagaaggcaaccactaggtccttccaataatggactcgcgaaggttccaagttagtgcgccactgaacaactaccccagtaagaacttttcggaaggaatgaatcagcaataccgtcatcttatcgtacgcccccatctttccataatacatcattagatggattctgtggctnnngattttcntaaacttgtaaaaggcaacacctttaacataggtagggtgaagacatgagagaatacggacaactcntatag

SEQ ID NO: 278255 - DNA, 139 bp, Glycine max
agcttgtgcaaatcaaatcactcctactattttatctctatcatgcattgcatgtgcggcccggcctttgtcaccggaagccggaaggtccatatcacctatttaaatgtacacatggggcactacgccctcaaaagcg

SEQ ID NO: 278256 - DNA, 308 bp, Glycine max
  unsure (1)..(308): unsure at all n locations
aatgccccataagtgactccttttgtcgtcctcataagcacaaacaaggacaaaagacattgacagttttgagatgaagacattgtcgtctttgaaagcgtaaatggctgaagacattgtcgtctctcgaaatataaatgaaggcattgtcatctttcgaaagcataaatgactgaagacnatgttgtcttctaaatgtacatgaacgcattgttgccttttgaaatcattaatggctgaagacattgtcatcttctaaatgttaatgaaggcatcgcaccttttggaagcataaatggatgaagaca

SEQ ID NO: 278257 - DNA, 386 bp, Glycine max
gtgcctgtatattgatgcgcctgaatcggacatccgagtgaaaagttatgaccatttgaatttctcgagagctctctatgtttaattttgagcgtctcgatatattatacgcctgaatcgaacctcagtgtgaaaagttatgaccatttgaatttctttagagcatccggtgttcattttcgagcgtctctatatgtgatgcaccttaatcggacctccgtgtgaaaagttatgaccatttgaatttctcgagagcttccgttgttcaatttggagcgtctcgacatattatgcgcccgaatcggacatccatgggaaaagctatgactatttgaatttctggagagcttccggtgttcaatttcgagcgtctgtacatgttatgc

SEQ ID NO: 278258 - DNA, 411 bp, Glycine max
agcttcgagcaatttcgcctacttcaatattttgtatttttcacttctcaatggtaagatcattacattaacagtttcataaaataatcaaatggggatattgaagacttgtcgcaagtattagtgcaggcaaagcaaatgcatttggtgggcattaaaaataaacctcatgagaatcatcacaagcaagaaaagtataggctcccttagttaactatgcacataatgttgataagggttctacaccttctatctactggtttaatattagtatctccagagtctccttatcaatattcgttgttctttttaattattttcacataggaaacagaaaaaggatcaggagatcgacttatcttaacaagagaataatcacctgcaaacatattgcacagcaagtattatctg

SEQ ID NO: 278259 - DNA, 353 bp, Glycine max
tatcaatccagtcaagttcagctccccttctagaatattatgttataagccgagatgcacgagcttgcggcagagcctcatgtcctcacgaatctcatcagagagcgtgtcctgagacatatcaagatgtgtgagttcattgagctgcgagaaattcttaaatatctcaccaatgatgtcactattagaaaggtctatgccaaccaccctcttcgtagcactgcatgaaattcctttccattcacaaagattggagctattggtgttccaatatatgtaccctcctctgactgcaagaatcttgctgtccaggtacaatttcagctttagcagaacctctttgtctttgtcca

SEQ ID NO: 278260 - DNA, 317 bp, Glycine max
  unsure (1)..(317): unsure at all n locations
agcttgactccatccgctcaaatctttcctatgataatttgcattgagcgtaagataaattttttacgtgataatattatcaagaataatgctatatagtttttttttataaataatagcgttacataaaaggaagtttttggcacaaaagtgtaatggaatttgattgacgaatagggtaggatttaagtagttttatgaaggaaaaaaaattgtttaaaagcatgggcactgtactggtntttcataacataacgggttagtgttggaataaaaaaaagttaaaggcatttgtgtaattttattgaaatctctaa

SEQ ID NO: 278261 - DNA, 457 bp, Glycine max
  unsure (1)..(457): unsure at all n locations
ctaagctgcggcaatgaaaagacttggtagtttttagcatctctgaaccactgtatcaggaaaaaaaacaaatatatataagatatcacatgcaaaagaagaaaataatacacctttaaacgactgaaacaatttatataagaaaaataaatgggcaaaaaaacttcaaggaactngattgtagaaaaactagtgaattctaaagccatatgtctttacttaattctatttatctatcctccaatccagattgaagtacttgcacttcatgttctcttggtgtgttttcttgcaagtactttgtttaagtttctaacctattctcttaatcattaaatgtatacttgataaatccatttggaagtccaaaacaccctctaaggtctntttttttctttttgaggagagatatatagtaagattaatacacatcgttgagagtttatgagatataggc

SEQ ID NO: 278262 - DNA, 211 bp, Glycine max
tgcttacagaaatcgagtatgtcgaccctgttatattgctgttcctctacactcaatcctacaacagtttgctgctacgcacgcacaagaactctgccgatgacgctgatgtatggccttgcatcttcaccttccacgactacttgctgcatctctagaagctcaggcgaactctattttccagctggtgtacattgctataggttttgtc

SEQ ID NO: 278263 - DNA, 604 bp, Glycine max
  unsure (1)..(604): unsure at all n locations
ccacgcgaacgaacactcnntctcgaaaatttacaactccnntntctactcaacatcacantnatataaacaacnaacgnannnnnnnnnnnntnnnaacatgtccctgatgacaccgcaggacnnacngacncnanngganacncaagcnaggagggacacggggngcaacagcacagcgaagaacaacgcgccggacgggcgataatgcacgacacacgagacacctccaccaagggcgcaaaaaacaaaccaaacgcagggcccaacatccactgaggagacgaacaagcacagaacccatataaaccaaaatgcacaacagccgcgcccaagcaaactagcacagaatacacgacaggcaagcaagagaacatggacacagaacaggctaacacaatcaagcaaagcaaagcacaggcggaaaccgcaagcaggacaccaagcaaagccacacgcgggacggacgaaagaccgcagacaggagccctccgaaccaagagaaaaccgatggacggcgaaggnnngtnntgggcgccgacacaaagaagcgcacaaatggaacgnagagaactgccacgagccaacaacacagcatgcaaag

SEQ ID NO: 278264 - DNA, 432 bp, Glycine max
  unsure (1)..(432): unsure at all n locations
agcttcttagttncagatgatgcatatgggtttgtagctacctcatgcacttctctaatgactatggcatcatttctggcgctaaactgctgggagttggaggccatcttctcaattaaatttctggctttagcaggagtcatgtctccaagggctccaccactggcagcatctatcatacttctctccatattactgagtccttcataaaaatattggagaagaagctgttctgaaatctgatggtgggggcaactggcacatagtttcttaaatctctcccagtactcatacaggctctctccactgaattgtctaatacctgagatatccttcctgatggatgtggtcctggaagcagggaaaaaatnttctaagaatactctcttaaggtcatcccagctcgtgatggaccttggagcaaggtaatac

SEQ ID NO: 278265 - DNA, 308 bp, Glycine max
  unsure (1)..(308): unsure at all n locations
accatcacgattatcgtctcccttattgcacatgatctgtanacgcatcctattcggaaccatatcacaatagtactgatactgtctaaccaatgcaaccattaagtccttccaagaatggactcgtgaaggatccaagttattgtaccacgtaacagctaccccagtaagactttcatggaagacaacgattaaccggttcctcatcttagcgtatgcccttatcttccgacaatacatctntggatggttcttgcggcaagtagtcccctcgtacttgtcaacgtccacgtccttgaacttgggag

SEQ ID NO: 278266 - DNA, 302 bp, Glycine max
  unsure (1)..(302): unsure at all n locations
agcttagagaaatcgattatgtcgaccctgatatagttttgttcctctacattcaatcctacaagagtttcctcctacgcacgcacaagaactctgtcgttgtcgctgatgtatggccttccatcttcaccttcgacgactacttgctgctctctcgttgcttcaggtgaattcttttttcgagctggtgttcattgctattttttttgttcgttatgattcttttttgatttctatattaaattgttggcgagttcattttgagtgattttgntgacttgatacaaaagatattagttcta

SEQ ID NO: 278267 - DNA, 380 bp, Glycine max
  unsure (1)..(380): unsure at all n locations
ngcctcgaagagatccaggaaggataaggcggccgaaggaactagttctcctcctgagtatgacaatcaccgctttatgagcgctgtacaccagcagcgcttcgaggccatcaagggatggtcatttctccgagagcgacgcgtccagctcagggacgacgagtatactgatttccaagaggaaataagtcgccggcggtggacatcactagttactcccatggccaagttcgatccagaaataatcctcaaattttatgccaatgcttggccaacagaggagggcgtgcgtgacatgaggtcctgngtaaggggtcagtggatcccgtttgatgcggatgctatcagccagctcctgngataccctntagtgctggaag

SEQ ID NO: 278268 - DNA, 392 bp, Glycine max
agctagtacgtcaccctgtagcgctataaattattttcattttatgtctgcatcccatcatcatgcactgcactgacaaatgttgcaagtaataagagataaattttgtgggctctcgcgtccataaaatacatttgtgtcatgcgccgaataagcatctcttcatgcatccattcgatgatagatgttgaagtattgactctaaccggattcttcattctagtaaacatgggatcaaatcaaacacctcttctcaagaaaaggttctatcaagtcaaaatcaagagcttagaggtcactagtttacgagagttggggcaattaatgggtcaacttcaatggcaagccttccgcatagcctatggtaagatttgggacctatcaagggtaga

SEQ ID NO: 278269 - DNA, 369 bp, Glycine max
  unsure (1)..(369): unsure at all n locations
tccttaagaagattccttaagaagctagaagctanctacatatactcttttaatagctaagctcacctccttgagatgagaagctagagcttagctacacaccccctataatagctaagctcacacccatgacaaatacatggaaataactaataaaaggccttattacaaagacaactcaaaatgccccgaaatacaaggctaaaaccctatactacttgaatggccaaaatacaaggcctggacgaaggaataacctattctaatatttacagagattagcgggctcatacttagcccatgggctcaaaatctaccctaaggctcatgagaaccctagggcgctttgttggatctctagcccaatct

SEQ ID NO: 278270 - DNA, 62 bp, Glycine max
agtgatcctcccaccttagccttccaagtatctggttctgtttgtatgcaccatcatacttg

SEQ ID NO: 278271 - DNA, 62 bp, Glycine max
caagtatgatggtgcatacctgcagtcccagctacttggaatgctaaggtgggaggatcact

SEQ ID NO: 278272 - DNA, 151 bp, Glycine max
actaagcttaaagacaggtgggtcaagccctacggcaatcttgaagatctctgtagcaaagagaagttcaagtccatatccatcacagtctgacgagagtatgatgaactaagggaagtcaatattgccaccgatgaagccttgtaatgag

SEQ ID NO: 278273 - DNA, 288 bp, Glycine max
gcattggatcaaagacctcaacaagattatgctagagatgcaggacaaggccctaaggctctcatgatccgtagggtacattatgagtccatggactaagtacgagtccacttatccttggacaactgagaataagatttcataactgttggacctcgcatttacggctccatagtataaagagggcaccctagtaatgcaggtattttagcccttatatttgagaacacagagactaatttttgtattacgggtagctttgtaatttcacatacattaagtgcacta

SEQ ID NO: 278274 - DNA, 279 bp, Glycine max
tcatctatcatctatctttcaatctatcctctcacaatctactttcatctctttccacagatctatctaaattattgctcttcattattctaaaagtctttttcaacactttctcttccaagacaagctttgtgtacacaaacttgtgctattcatctttttcattcacttatccctttgccaaaagaaccaacgactaatcccctgaatatcttggtgtctctcttctcccttacagaagatgcaaaggactaaccgcctaagaattctgtggattct

SEQ ID NO: 278275 - DNA, 337 bp, Glycine max
  unsure (1)..(337): unsure at all n locations
agctnttataccacaaaatcgcttgattcctgttcaaagtgtccaacgccttaaacggtctcttttacttttatcggttaaaatgaaccttttaaaagtttaaaatcaaccctacgcataaatttcttgctttctaagaactacgtaggtttgagttactcatcgtacttgaggatacgtaggagcaagagccccgctcttgtcgaccccataaagataaaaacatataaaggggaaaataaaataaagattgaagtcatgattttacacatttgattaaaggatgccatcccttgtgacagacgtatggggtgctataaccttactcgtgcatgaa

SEQ ID NO: 278276 - DNA, 379 bp, Glycine max
  unsure (1)..(379): unsure at all n locations
gcttgtacgctaagcggatctcttaatcgctcaacgctagcttcactgcacataaaatacatgatttttgctaagcgggcttaaatcttggcttagcgagagttgcatgttttatgatctgcagatcttactaagcgggagatttaactcgctaagctaagtatttgtgtgctaaaaaaaaacccaaacgactctcctgcttagcgcgagcttcgctaagcagctagccttggaaaaccaaacgactctcttgttgctaagcgagagcgtcaaaaaagcattggttaagtgtaactttagcacaatgacaaatgttgagtgtagggatagctagacaattntgcataaaccatatcannntatctccctgcatacccta

SEQ ID NO: 278277 - DNA, 345 bp, Glycine max
agctttaggagataccataataactaatgtattttttaaacaaaaatcaactgaggaagctccgccaattatccctattgaaaaacccttattcaaacctttcaaagttagtgagaaggctaaacgaaaatttagggaacttagaaaaactatatccttaattgaaggcgtaggtgataaccatagtgaattacttaacaagattggtagtttacttaaagtcattccagatactcctcaagcctcggaaaatactttcaaaatggtaacaagaagaacctccaaattacataatgttattaatgaagatagtgacccaaactcagataacaccactgagatagg

SEQ ID NO: 278278 - DNA, 352 bp, Glycine max
  unsure (1)..(352): unsure at all n locations
ggaggatagagacttcccaagctacntagcttctctctcattgaggcgctctaactttcgagcttacttactctaagaaggggacccactcttgtctcggaacgactcactctacggaggctcactcaagctcgaggatcgagacttcccaaactatntatcgcaaaaatcctcccaactactacaaaaatctcctctgtactactaacccactctaataatatgttttctaagctatggataacactactcaatcgtcaactatatctgcccctatcttcaatggcgaaaatcatgatacctggcgagctaaaaaggaaacaaattgttcatctcacgatcaatgggacat

SEQ ID NO: 278279 - DNA, 173 bp, Glycine max
  unsure (1)..(173): unsure at all n locations
agcttttgagtaaagacactaacactgaccgttcattcttaanccacaaaggccataacaaatcccatcaaaatgagcatatatccacacactattcctatctcttctcataaaaagatatcagtttgagagcttgagacaaatcctttgctctctagagcttagcataaatt

SEQ ID NO: 278280 - DNA, 608 bp, Glycine max
  unsure (1)..(608): unsure at all n locations
ccactcactatccacctacgtcctntcncatcacacaacttaacatagtcacttgctccaaacatacatnacacccatacggcgnacgacgacgcnnnnnnnnttttgatcttgacgacctcgcannnacgngacacnannaganactcaagctangccacaccctatnngagaagtnctcgcaagcatgaatatgttttcatacatcggnacagaagcatcgaactttgtgtctatacccatcgcgcgagcacngaatagcgcgacgaacaaggtgccagcctgtacaaatggatggaccattcgacagactatatgaacaaaccatcgctgagagccacctaagcaacctgcctacaaagacctatggacaggttactcaacaaacgtagaagcacgccgataatcccggcaccaacaatggaacaggcctcttcccaaccataaccggatggaagataatagatccatctgagcagctaataaccaacaacgctgagactccaatatctgcgaaagcatatgatatgagcccgccataatccatacacatacacccatcgacgacacaactccatcgagcctctcatctcaacaaaacagtctnc

SEQ ID NO: 278281 - DNA, 313 bp, Glycine max
  unsure (1)..(313): unsure at all n locations
agctttacaacagattntagtaatggtccactatcctataattaaaataacttaatgtcattaacctagggaattaaaaaaaaacttaatggctgagtctaactgaaattgtggcaaccaaaagtcacccccagcagccaacaagtcaaccaccatttggtctcccaaaaggctgatgcctaggttgccaattgggcccttattacatcttgaactaaacctactaaagtccttttagttgattaacccaaaacatatttttgttcagccaaccttacaaggattgggccattcttatactaactaatcattc

SEQ ID NO: 278282 - DNA, 444 bp, Glycine max
atgtaactcttcacaattgaatttgaattctcaacgttcagatgcactggtaatcaattaccaatatcttgtaatcgattacaccattttgaaatcaaactttgccactagtaattgattacaggaaactggtaatcgattactggagagtaaaaactcttttgaaaaacaaaactatgctatgtttgttttctgaaaaaatcttttcaatacttcccttgtgaagtcttcttgatttcttctcttggaacttgaattcatcttttcttgaatcttgaaatcaaacttctcttgattcttgaatttgttcttgatttaatcttgaaatcattctttgggctttttgtcaacatctttgtcattatcaaaacttcttgaatcaacttgattcatcatcatgaagcttgcttctacagcgagccttattgagaaaccaaacgtctc

SEQ ID NO: 278283 - DNA, 431 bp, Glycine max
gagcgacccgcggcatgcaagcttctagtctcaattctatcgtctcgattattacccaactcaaccggacatccgagcagaaaggtgttgtcatgggatattcctacgagctatcgttttcaatttggagcatctggatatattagaggacttaaccggacatccatgtataaagttatcgtcaaatcagtttccttacagacttggattaaagtcccgagcgtgtggatatattacgggactcaatccgacatactagttataagctattgtcgttctaatgtgatacgagcttttattttcaatgtggagcaacctttcgatcaattaccgatcatcctgtcgggcatacgcacactaagtaattgtcgtctgaattttataagagctgccgcatacaatccggagcgtctcgacatattacggaactc

SEQ ID NO: 278284 - DNA, 174 bp, Glycine max
agcttctagccaaatggacttaccttgtatttattcctttgacagcccttctgagccttgttctcctttccttgtgttgaagctcactacaagccttaagtgaaaaaccatgatattaccatatccttaaggaatttcggagctttggaatcgtattgggaatacgcgtggggg

SEQ ID NO: 278285 - DNA, 337 bp, Glycine max
  unsure (1)..(337): unsure at all n locations
gagggtaggggatctgccctttattttctanggattactttgcttagcacccttatgttcaatatgttcgataaataaaatatagttttttttttctgttatgtgcatgagagttttaatgctagtttgtacacacatgtattacacaaaagttcctatcacataaagagtggctttgctattcagaatgctataagaagttttagattgtgtggttacattctttggaaccaaaggcattgcatggaaaaattaccacatacccatatctatcgggaatgtctatttacctgctcgccttttttgagggagatgtcaccacatgttatgcatgatg

SEQ ID NO: 278286 - DNA, 361 bp, Glycine max
  unsure (1)..(361): unsure at all n locations
agcttaattaacttgtgttctgaacatntgttatcatttaattttaaatacaataccatgtaaaatattcctaattgtgccattggggctcctccacatagacttcagtccaaattctctcactcgggtctcatctgaaaatttggaagggttaagataatatcagttctgcacaaaaatgataaatcatgattatgcactagttgccacttgcagtgcactatgtaatatgaacaaaccagtacactaaatctagcataacttctgactatggaacaaagtagtctattaattcatgagtcatgatacagaattaacacatttatagagaagaaagattgagtgagaagatattcgtatt

SEQ ID NO: 278287 - DNA, 234 bp, Glycine max
cttatttctacaatttactgttgaactgacttttttcctcatattcagtatatgtaaaatattatattaattaaacattctttatgaactgtttcatatatattaaagtagatcttatttaaattattctcaaatgtatccaattatgaatcatctcattattttctcgactgtgtaaatacgagaaaatccgacggtcaggagtctagtcatctataaatttaattcaatgat

SEQ ID NO: 278288 - DNA, 383 bp, Glycine max
agctagtgcatccaatacccggatgaggatgttctatatgttcttaaaactggactgatacataagcttacaaagtggcatggccttgctggcgaagacccgcacaaacatttgaaagaacttgacatcgtcagctccaccatgaaacccccagatgaccaagaggatcacatatctcctgaaggctagtcctaattcattagagggagcggcaaaggactgactgaattaccttgctccaggcccatcacgagctgggatgaccttaagagagtactctaagaaaaacattgccctgtttccaggaccacagccaacacgaaggcaatgtaatgtattagacaactcagcggagacagcctgtatgagtactgtgagagact

SEQ ID NO: 278289 - DNA, 457 bp, Glycine max
  unsure (1)..(457): unsure at all n locations
atgtcctgatacnctgacacccgacactaagctttggcaaggcgagagagaaaagtcaagattgttctatgttatttaaaattcatgttaaggtcccgctattatagacttctcctttctggctaaaaaaccattggagagtcatttcctgagaaaaatccgaaaactattgtgaagagttacctctctcgactctttattcgaaacttgtgactggtaatatgattacccaaaccatgtaatcgagtacacaatgcctattatgaaaagatgtgatttttcacatatgaattcgaatttcaacgttcagaacactagtaattgattccattatattgtattgattcacccattgaaaatcaattgcaacatgcgattcagttaaagcttnnaaatcaacttgccctgggatcgatatagaactggcatcttccttaagttaaccccgttcgtatag

SEQ ID NO: 278290 - DNA, 420 bp, Glycine max
ctgcagctaggaagcatctggagaggcttattttattttgagatccaccctggagcgactaatatgtactaagaccttaggttgatgttttggtggccgggtgtgaacaaagaagttattgagcttgtccttgcatgcctagtgtgtcagatagctatgatagatcaccagatgccttcagggaagttgcaacctttatagatacccgagtggaagtgggatagtatctacttggatttcgtggtggggttacctaggaccctcaaaggtttagattccatttgggttattgtatacatgtcgaccaaatctgcttcctttatccctatttacatcagatattctttatagaggttgatgatcttgttcgtctgtgagattgttagaccactcagcgttccttctaccataatctttgat

SEQ ID NO: 278291 - DNA, 420 bp, Glycine max
  unsure (1)..(420): unsure at all n locations
ctaagcttgccatttggctccacagatggactgtgtaagactcttcttgtctctcattatagctgatcaagttgcccacgtgtatgttaagttctttggatggtggactaagatcattntgcattttgttctttctactgctttgaagactccagttttgttccaccactgatttatgctgacatgggtagctctcgtgatattgctataggaccagaggcagtggtttctctcttgttggggacgttacttattaatgagatcgatgcctatacacatccagcaaaatatcagcgacttgctttttcagccacttttattgttgggattacttaaacaacgcttggtgttcttaggtatgatactactactactatatctatatgtatatatatctttatatatgatatagatatttat

SEQ ID NO: 278292 - DNA, 553 bp, Glycine max
  unsure (1)..(553): unsure at all n locations
acaccgcatgacctagggaagcgaactcgaaacagcattcctaacaaaaanaannnnggttgtgcggcactganggccccnnaanngaaangaccaagcaaacaannnaaaaaaaacaaagaacgagagcttactacacaacgcccccaacagcgacagcncacacccaagagaggagaagccaccgcccagcgacacaccnccaagaagagcgaagcacacccccacgacaaaaggcacgagagcacaaaaagaacgccgacgacgaagaccacgcagaaggccccggaaacagggccaaaacccgagaccacgagagcggccaaaacccaaggcccaagcgaagaacaaacccagcgcagaagccacaaggataagcgggcgcaaacctagcccaagggcacgaaagcgacccgaaggcgcaagagaaccccagggccgacccgaggagcccaggccaacataccaggaggcacaaacccacgccaccgcgcggcaggagagcacaaagcccacaaacccgaaccgcaggccgagacaacaccacgacacn

SEQ ID NO: 278293 - DNA, 566 bp, Glycine max
  unsure (1)..(566): unsure at all n locations
cccccaccaccccatcacgagcgaaacctggtnncacgggcgcggaggggacgggcgcnacccaggcnnccaggnnnnnnttgagctgatccctgannacgnaacnnagcnanggaccacgcgagaaggaagacgaagacgagaatacaatttgggggaggacgcccgccacagaaccaaaacacgcaaaacgacccaagcngaaacgaaggctgccactacgagcncgaggacacggagacatggtacacacaacacagagcgagaaaacactctggaacgaagaacacgatcccacgagagctctctgaacaagccgaagaaacacgaacaggccgaactccccaagacctctagaaaagccacacgaagtaaagctccctcggaaaaagaggccaaacccccctcgagaagcggatatgagggctgaataggcgggaaagcacgcgcatgtgcgctcagcgcacatctgaacagcacacacacattagggaaaacagcggaacgaggcagaacctgcgcaagacaggagcgaacggagagacaaaaagcaggaccggcgccag

SEQ ID NO: 278294 - DNA, 262 bp, Glycine max
aattcaattaagaatgagaaatcccatagagaatcgtccgattgcttttttggtttattttactaaaagacatctttttattattatattatcactttacctctctttggtttacaacgtggttacgacatgaccgaactgccagtattcattttaacagaagttaacggatattacaattcaaatgatcggtggaaatctatttatttctcgattaagcgagaaaacggcttatacgatcggttaaagctcgtcaaaaacc

SEQ ID NO: 278295 - DNA, 303 bp, Glycine max
gacagacactacggtcaggaaaaagtgtgatgagcttgaatatgtcaacacgactaccgttgaagcattagagtgtgaaacaaaaagggcccaaaaagaagaatggagcacgaacaagttccgaggggctctatggtgcagctacaacgagctcaaacttataagggccgagagggacgagctaaggatggaaagcatggtgtttaaggataagtaaaaggcctgtcaaagggcgataaggagtttgacggaacaactgagctaaatggaagagaatatgttgacaataatcgatcaatataa

SEQ ID NO: 278296 - DNA, 379 bp, Glycine max
ctgcagcttcatcagtggaatcatagctctgttcttttttaggtgctccttaaacctccattaatttttttgctttaccttctcttccattgatgtttcttcattatatttctccatgtatttcctcacatgtcttgtgctatatgtttttaacatgattcgttagagtttccaccgattaaacttgctatagaagctagatttgatttcctatggtccaaatatcttgatcgtgttcttgaaccatgaattgtgtcgagtttacgttcctttgagatttgtcttgttattttttgtggctgaatcctaaaccataaaattcttacaaaaatattatagtagaagaaaacctaacaatctagagtgacttgctcaacta

SEQ ID NO: 278297 - DNA, 429 bp, Glycine max
  unsure (1)..(429): unsure at all n locations
cgagtcccttctncttctagttctctctttaactcgccgtttttctctctctctgcgagtttcttcgagctcttacaggtcacgcgtatcgtgaaggttccctagcccttgaaagctatgtatcattggtgctttcattgagcacaagttaagatgtatggcggaaggcatgagatcaaaagctctatcatcataaaaaatggaggaattgtttgcgaaatttgcagcaacagtcgaggcaaagatggagaccttgctagagcggttagcacatctcgaagctaacatatataatcctcagcaagcacaaccagaggcgacttctgtttcggtatcaggatcacacatagcgccgtannggataagccggatgtgccgagattcgatggatctgacgccatatgctggatcttcaagataacacatttc

SEQ ID NO: 278298 - DNA, 412 bp, Glycine max
  unsure (1)..(412): unsure at all n locations
agcttctaggatccataataaacattgtgattgggtttgaccctagntcatctcttagagacaatattcttcaaacatctcatattaatttgaaaaataaaggagattttttagtttgcagactaaacagaaataatagaaacaatgtttaatagaatcaaatgcagaaattgtcaacccaaggatccaattttctgggtaacaatcacaatcccagaataagcatgaacccacccatccacccacacaacaatacaaattatataagctcaccacccaacatgcattcatgaatgaagattcacaatcacatttctcaattcaccatgatttcgagcacaaaacatattgtgcagcaatcaatcattcaccaagattaatcattcatatcttatattatgagatcaattcc

SEQ ID NO: 278299 - DNA, 491 bp, Glycine max
  unsure (1)..(491): unsure at all n locations
ctgcccaataggtctgtcgtaacttgcancacngaaanaanacaatgagcttgcctaaaccattgaatgagacgacctttatggtttgtttgcaccccatagccataatcatgattcacttgcttgaccctccttttagtggaggctacagntgcacctaaatctctctggctccctgtagaaacttagtctgaccatttgtctgagggagatacgaacaaactactttgtgtgtgacattgtaatggctcaacatctttagaacttggtttgtgctaaaatgagagcgaccatcactgactaagaccctctacacgccagagcaagtaaatatgtgcttcttcaagaactccactatagtctcaacatcgttctttgaggcatccactgtctctatctacttggagacataatccacatgccctaggatatatncatttccaatagatggatggagggggaccttccaacacaactttccacaatctacg

SEQ ID NO: 278300 - DNA, 188 bp, Glycine max
  unsure (1)..(188): unsure at all n locations
agcttctcgacatatgatgtgcccgtttcggtcttcttttttgaaaagntatgaccattagattttcgggagagttctcgatgtttaatgcccagccgctcaaattattatatggcaggcttgcaccgctgatgaataagactttacccattaccgtactctagagtgtgagacagtgtaaacacagt

SEQ ID NO: 278301 - DNA, 592 bp, Glycine max
  unsure (1)..(592): unsure at all n locations
tgcactagcagcctctgataacacgagaatnttgtatagtgggtaaanactaaaaccccaaagaaaaaaanannaaaaatgagcctttgagaccntcgcagnacnggnganccncnagagacgacccgcaggcatgcnaagcaagaagaacgaaagactctcaatcatgtccaaagangcacgcgaaccaggaagcatcaacaagaatcaagccaccgctattgggcaagcaatcaatggagcaaaacacaccaaatgagaatgatgatggagggcacaaattctcacagaggtaaactcagcactcacaaatagagctctcaaaactaccatgacatggagaggagaaccaaggatctcaagccacaaaaagccaagaacttttatatcgaaaacaactacccattccttgaacataccctatacaacaaagaaaaacatgcatagtcgaacatgcacacagagatgacccacaacattaaactagacatgctacgaaaccaacaacaccaacaaattaacacaaccaacaaagcaacaagaccaacagaacgaacaacaaccgaagaacactctcgcccagactgaaacg

SEQ ID NO: 278302 - DNA, 610 bp, Glycine max
  unsure (1)..(610): unsure at all n locations
gagtcacacctgccganacttcatntcactactntacgttatatggattaatggnagatantactacntatacccaaacagaaaacaaaaaaaganagaaagagttgatgcctttgaaggccgtccgaannacccgngnancnnaagagacgacccgcacgcatgcaagcctcgtatccaaggcaattcttgttggtttagctccatctaccttggctgataccccagtggatggagccacccctatcctctacaccttagccatccggtgcatctccatgatgaaaaatcaccatcgaaggacctcattgaagatcaaagatccagcctccatagaagctccacaagcaagctcccatcaagttacgaccaaatgaattctcacgagatcgtccgcgaatcagagcccgtcagcaccaaatgcctcgtgcccgactcgaacctccgtcagcaaagcaatcgaccacctcgactcacgcaaagatactgtcacctaaagcaccgaatcctacaccaagtcgacagaacctcacgacacacgcaacttaccaaacacaaatcgcaactccaaacacaccatgcaaccacacgacacgcaactacaaacctc

SEQ ID NO: 278303 - DNA, 317 bp, Glycine max
aacaagaaactatgctcggagaagtgatgaggacaagccttttggcttatcttgttatatcctgtgtagtcgaatagaagtatcatgttcatacgcctcgaagtctgaaaagagtgtgatgaactaacggatgtctatattgccaccgttgaatccttggtatgagaatccaagaaagcctcgaaggaataacacgaccaatgcattgttttgaggggctctatatggcatcaatattgagctctagcttcgatgaggtgaaaggactcatctcgggtcaaaggcttgatcttgatcgacgagcttaatgtgttgcc

SEQ ID NO: 278304 - DNA, 300 bp, Glycine max
aaggaaagaaaaaagggaggaaagggatagaaggaaggaaagaaaggggagagaaagaaaaagagagaaagagagaaagggggataggaagagaaggaggagaaggaaaaaggggggggagaaaagaaagaagtaggggaaggaggagaaaaaggagaagggagaaaggaggaagaaaggaaagaaagggaggaggggagaaagaaaaagaaagaaggataggagaggagggaaagaaggaggggaaaaaaaaaggaaggaaggggaggaaagaagagaggagaggaaaggagaaaaaaa

SEQ ID NO: 278305 - DNA, 364 bp, Glycine max
ttaagcacgcgctgcacttctttgtactgcttggattttttatctggcactctacactttgtcatataaatagtcgatgcatatctaacatgagtaacttatgttttattccaaagctatcttcaaatcactttgaaaaatgtgtgtcttgcagtcaatctacaaaaactaagaaatcacatcaatcagtagctaaagaacttgagccattggatttaatacattctaatatatgagaatttgatggaatgttgaccaaaaatggaaaacgatattttatcactattattgatgactgctctgattatacatatgtatatcttatgaaatataaaagtgaagcgcttgacatgtttaagttatt

SEQ ID NO: 278306 - DNA, 313 bp, Glycine max
tttttcttggcaccggcaacaactttttacttattcctgactatggtcatgaacatatgcaacaaagccatattatgtgttcagcaatgcaatcatttctttgatgaagcctaatatgggtgcagaaatattcccaacttgcaaataccatacattttgaactatactgattagaatatcattgaatcatcacaaatgtgcagtgagacactcaaatcttctcaatccaacatcaagtgagagacatctactgatgatagtgatataataaatgacctccaaaatcttatctttttacaatctgacaacattc

SEQ ID NO: 278307 - DNA, 553 bp, Glycine max
  unsure (1)..(553): unsure at all n locations
acagcctcttacccgataatacgtgaaaagatttaacantatnatctagacaaacgaaannaggaggtgatgctcgaggaccgtcaccacagagngaccngaggcatgccagcttcacggaataccgacacctagagcgctatatttggattctagatccacccccagacacaggacggcgctccaacaagcttctggcgcctagctaaccattaccaccgcctaccacccctaacaggacggcaaggaacgagaggactatactaacccctgaagacatgctaaaaacgcgcgctcctgaagaagaggagagcaggaaaaaaccacacgccccatagagagtgcgaacgacaacagagctcaccctagcgaaaggacgacaccctacaaagctattgatgggaggaagtcccacccctgcgacaccgccgggacgcgcttacataccacccacaacccaccaactccatactacccaggacgaacgaccaccttaaaaccgcaccacctcgattcaaaagcggaccaaaccgaccgccctacaaaccaaccc

SEQ ID NO: 278308 - DNA, 335 bp, Glycine max
acacctgagaagaagatgcacggagaacaatgttagcatattatgaaatcgagagaacaagacaaaaaggctgggtgcgtgttttctattttaaatttaagacaagggcaattttgcccgttcatttaaatgctacgcgcaccagcaatacgtttgggtgcacctagcttcaccctaacatctgttaatcgtggcatgacatatgagacttacttctctctaggattgatatgtgttaattcaattgtttgagtgtccacattatgtactatgcttggccttatggattacacttatgcagttttggtgtcgaatttcaattgttttctttcttc

SEQ ID NO: 278309 - DNA, 437 bp, Glycine max
  unsure (1)..(437): unsure at all n locations
agcttgttttatgccctaaggacagcaaatttatcattacactaacaattgttcacataaggttgtccacgatgcagagaacaagaaaaatttgcccaaaaaacagtaattaaatcgcggcatgttatctgagtcactctttggaaccgtccaattgcatccgtgtgaatgagtccccaatagggatgagactatgtgtgttactcaactttttttttttaaaggataaatacttatttttatttttttaatatgtagaatattgatatatttatttcttaaagattaaaattcaaattntagttttcagaaataaagagtgtataataaatttatctataccagttaactttntttgctattattaatgaaaaaacttacatgttacattatcatatttaatctttatttnttctttttttataattattacaaac

SEQ ID NO: 278310 - DNA, 466 bp, Glycine max
tatgagggtacaaccaaagagttgagttcagggcctagtggaacaaaatgtctgtcaccattacacaccacagtacattaggaatggtgaatcatcaacacaagtacacaacacaaaccacaccaactaaactacataatcatataccattcatcccacaattttccgctggagaatagaggtaagcagaaagtaaacaacaagaacaacaacaaaaacctaggtttcggcaccccttctaaattccaatcatgcagagaagcaaccaaggactaacttacatagatctacatctactcaatttctactaaagaacaatcatataaaccacaaatctgagtaaacccaagtaccaaaatcattgacaagtaattaaaaaaaaaagcttaccaaaattacgaccaacgatgcaatgccaagtgggtccatgcctcttatcgaactccttctttatctgctacgcaac

SEQ ID NO: 278311 - DNA, 321 bp, Glycine max
atggcatgagcaaccaaaacaatgtcatacataaataaaagcacatacaaaattgtcttagaatttgagcttatgacctaactcaatcccacaaaaccagcttgattgatgtggaactaaacaccaagcaattaacacagcccccaaagaggccgcaaataaggtaggttaggggtgaccgcaattaaggtgactctccaacattttctgaaaacagtatctttaatggatttgacactcaatgtactactgccttgatccttaccaccaaattaaataaaccacatagtcatcatttacgttgagattttaaatcatatc

SEQ ID NO: 278312 - DNA, 371 bp, Glycine max
agcttctcattctctctcataaggtatttattgttttttctttatataatacattaacattaaaattatcaattaaaaacaacattatataatctgttttagtagttgatggattactctatggcttaatataattctttaacattgcttttttttttttttgtggtgtgtctgcacactatgcttgggttgtctttgtactcaagtggtctgcaatagccacactcttgcccaagagaacggacaatgatatcaagaactaccggaacacgcatattaagaaaaggctaactaaaatgggaatcgaccctgtgacacacatgcctaaaaacgatgcacttttctctagtgacggtcattcctaaaccgct

SEQ ID NO: 278313 - DNA, 327 bp, Glycine max
  unsure (1)..(327): unsure at all n locations
agagcttgaatcgaagcttaattttgaatttcatccagacggngaaataggctctaagacacagacgccatcatgacaaactacccaagagctttgcgcacgcacaatttctccccataattggtttattttctttccccaaatctgaagttgtcaactctatgattgggttattcaaccccagatttgagacaatcacaaatgttcatagggtgtagacacttttcaccatagaaccagcacatattaagaaattgcgaagaatgaaggagattccagggagaatgggtctgtaatgcttcacagtatttaactagatgcttaaat

SEQ ID NO: 278314 - DNA, 407 bp, Glycine max
  unsure (1)..(407): unsure at all n locations
ancttaagcagtgatcaaactcgctctttgtttctggttttgcgaacatatcagtaggattatgcagagtgctaatcttatgaactttggttcttctttctgaccgaatgaagtgatatctaacatctatatgcttggctctatcatgatgaacctgatccttggccaagcatatagcactaaggctatcacaatagatgtcagcatattcttgattaattccgagatcatatatcaaacctcttagccaaattcctttctttgcagcttcagaaagagccatatattcagcctcagtatttaagagggcaacagaacgttgaagtgttgccttccaactcaccaagcagccaccaagggtgtaagcatatcctgtnatggaccttctcttgacaagataagctgca

SEQ ID NO: 278315 - DNA, 310 bp, Glycine max
  unsure (1)..(310): unsure at all n locations
aaccccatggatcaatgcatataccacaaggtcagtgggagtaaaaaaagttttccttgtttatatgtagatgatantttacttgcagccaatgatccgggttcgctacatgaggtgaaacaatttctctcttagaattttgacatgaaggatatgggtgatgcatcttatgtcatcagcattaagattcatagaatagatctcgaggtatttgggtctatcacaagacactatattatccaaattttagagagaattcggatgaaagattgttcaccaagngttnctcccattgtgaagggtgataggt

SEQ ID NO: 278316 - DNA, 414 bp, Glycine max
  unsure (1)..(414): unsure at all n locations
agcttagcaaatggacctgngaggngttcattttcatcatatcttccgtaatactcatcacctctatcatatctaataattatcacatttatgtctaattgcccatttatttcattgtagtaaatttctaaggcatccattgcctaagaaatcttgggcagtaagtagacataacccgaacatgaataatcatcaataatggtgataaagtatctttcctttctgaaagaactaacatctaatggtccacaaatatcagtatgcacaacttcaagaagctgagtgcttcttgtagcttctttctttgaatgtttagcttggtttcccttaatacatcccacacaaatatttagattcatataatctagataacgaagagattcattctttattaatctttccatcctttctcta

SEQ ID NO: 278317 - DNA, 338 bp, Glycine max
  unsure (1)..(338): unsure at all n locations
ncaatcggcatactccacacaaagactctgatggtgattatatacaacatactccacacaaacagattctgaagacaaatatagtgctagtttctgcggatcgaatgctatgagttgtaggaccatactatttggcttagtgagagaggtcttatacatcataccacaattctaaaacaataatcacaggaaataacaacgtataatataaaagaatagtttctttagtaacatctggaaattttgtataggctagttggaattctgatggcaaattgaaaacaaggctctcttcaaaggtcttttgaaccttcatcccaaatttgttaacctttatc

SEQ ID NO: 278318 - DNA, 404 bp, Glycine max
  unsure (1)..(404): unsure at all n locations
agcttnggaacaaaggaaatggaatttgctttttatttgaaactaatcacagaatacccatattaccttacactcgcccttgttccaattttggtgtgatatagatcacttttccaaatgaatcttcatttatcctccgatctgccggatgacaagatgcaaatgcatgtatgcttatgcttatgaagtttaagtgaaacaactaaacaagtgtcattatgttcaattttacttaaacgctttacaacaccccatagattgagagcatgtactctaaagacataaaagatgctacacatgaaagtgatatgcaactcatcaatccaatgtttattaatgttgtgatcatggttcacataggattggaaaactttggagatcccattgaacctttggagaacaat

SEQ ID NO: 278319 - DNA, 297 bp, Glycine max
agcttgaaagatccaaattctttattttatgtattgatgtatcagggatatgttcatgactcatgcgattcattacttcttcactataactatcttcgttttcttgcaaagacctaagcttcaacatgttgactggtccagacccagagccattacatggatcggataacctatactacttgtacgtgaacattccatttcctgaccacaagtttagccaaatagatctctctgtcctcacacacacacacacacacactcatataattgcgttcttcctatctactgatttagatg

SEQ ID NO: 278320 - DNA, 385 bp, Glycine max
atatattagagggactcatggtcactatgaatgacaaattccttaagataaaggtagagttgccatgttttcaaagcgcgtactaaggcatacaactccttatcatacgttgaatagttatgggtaagaccacttaacttttcactacaataggcaattggatggccttattgcatcaacacagccccaatcccaacatttgaagcatgacactcaatttcaaaagattttttacagtttggcaacgcatacatggggcattagttagctattgctgaagaacattgaaagcttcttcttgtttctctccccatttgaaaccaacatttttcttgagcacttcattgagaggcgctgccaatgtgctaaaatccttcacaaatcg

SEQ ID NO: 278321 - DNA, 120 bp, Glycine max
gaatagtactctgcacgctaacgagatgctcctcctcagtcttagaattggcgagcatatcatcgacgtcgacttcaattgttttgtccatcatatcatggaataaagctaccatagccc

SEQ ID NO: 278322 - DNA, 576 bp, Glycine max
  unsure (1)..(576): unsure at all n locations
gtctggtccaaactcntatnacacatggttgngnctctacccgaactgaatctaaatctcantcagaccnnnaccgagnnnannnaatgaacctgtgacactctagcacnacgcgaactatagaaaacgcaagctagaggagtagaagctggagacccacacattgtactattatgtagatagacggatccgagataaggtctgcgacaccatacacgtgaccaaactaatgctaactacgtgggccactaagtctatcatatgctgacaatagccgacaagcccatgaatctcatacgtggcggagtaggagattgacatcgccttggacttggcgaacaacgcggagaacactaagactcccgtacacggggagagaggtgagaggcatccacacggttgccattagaagcaaagagacgaacaccctcgctcctacgtgcgtatcacacgaaacttgagcaaacacccgcgcgcagaatgctcgcggacgaggttcaaccantccttntcgtactagagaggaagcataatgagaccctcgatagcgaaacgcacaagagacccattgaatac

SEQ ID NO: 278323 - DNA, 390 bp, Glycine max
  unsure (1)..(390): unsure at all n locations
agcttgcctgattgcagctgtttttttgtgtttctnattcacatcattaataatagcctattaggtcccaattgacctgcctgactcttgtctattgttccttcaaatccaataaaagaaagaaccaacgtcaacacagaaattccattaactgatctttacaagagtgacattgcttacagtacatgttacacaaaattacgctcatctgaatagggctgatattagttaggctccatctccctgctcattatatgccgccagcaccactaccagcacattcttaccctgtttcatctcagcaactggctaatatgtgtgctctcattttctccttttatcgctttagcatgtaatggcacgtccccattcaagcgttaattttccccc

SEQ ID NO: 278324 - DNA, 601 bp, Glycine max
  unsure (1)..(601): unsure at all n locations
ctcccgtaccgtacacttctatctgtagatcactgtcatcatatatgactagtgcatctctcctattactcgatgcanaccgctgtgtggccnnnnttttgaccttgttgacaccgttggcacnacgcgacacnananaanactcaagcttcaattactatcgccgccgcgacgctattgtaaaagatattgtcttgcgagaatgggctatatatgaggaggttgaacttggatactgctcgaatgggttgagatcatactccggctgcgtaacggacacatggnttccgctattctgctcttgtactacttaaggcgacaaatctatccccacttcgccctagtgtgatgctggttccttctgccatatttgtctttttaaacgattaacttaattgtacgggatgcttggagggaggtaatgacaatgcagtcgaagattatctctcgtgtcaggacaatagaacacacgatatctgtagtttttgaataataaatgtgatacacattgtagaagggagcaacataactctaagcttgtgggcgttcctcacaccacgttgtatagcccgactatgtctgtaccaacttcctnagttcg

SEQ ID NO: 278325 - DNA, 354 bp, Glycine max
  unsure (1)..(354): unsure at all n locations
agctntacagcagatnttagtaatgacccatctatcctataattaaaataacttaatgccattaacctagggaattaaaaaaaacttaatggctgagtgtaactgaaattgtggcaaccaaaagtcacccccaacagccaacaagtcagccaccatttggtctcccaaaaggctgatgcctaggttgccaattgggcccttattacaacttgaactaaacctaactaaagcccttttacttgattaacccaaaacatattcttggtcagccaactttacaaggattgtgccattatttagacaaactaaacactctaaaatcgaaacaaagtggtgttttttatttcttctcca

SEQ ID NO: 278326 - DNA, 419 bp, Glycine max
  unsure (1)..(419): unsure at all n locations
actaagcttacatattatatatataatgatatgatggaaaaattatttataatgaatacttagtacacaatattttntttcttaaaaaaacataattacaatattatatgttcaaatattctatatttgtctcttataattatcccatactccaatataataatatttaacaagcttacatgttaaaattaactcatttaaataagtgaatcaaacttcagatacaatatatttttntaatccatgcttgagacttaagtgctcgaatcaactcaaatcgtttacacaagggttctctaatacacacacaaatgcatataacttctaattataagaaaatttcaagtacagtataaaatatttatgaattagtatattaantacttaataattcaaagattggattgctaaatatcatg

SEQ ID NO: 278327 - DNA, 524 bp, Glycine max
  unsure (1)..(524): unsure at all n locations
accagacagatcnaggatgaggcacacacacagaatatacgaataaacaaacaaataannngtggtgtgctccgtgacgacagnccagancgaccgcagcaagaagcagaaggaacangcgggacacagcacatgcggtactaggtggcggccgggcgacggagcacaacaagatatccaccaccacacagcaccgacaaaccacaccaaccctggagaccacctacaactggacccaacgactcagcacaagcacaaaaccgactcacaaccaacaacaggagcccaacaatacacccagacagaccacagccaggcaaacaacaaacaccacagacaaaccaacaaacccaccaaaccggccaaagcaaaaaccgggccaaaccaaaccacaccacgacatgctaaccacaacgcaaagacccatccgcaccacgccaaaccacacgaccactagaaaccacaccgaaacaaaaaccgaaagaaccgaacgccacccaacagaacagcgagcccagaaagac

SEQ ID NO: 278328 - DNA, 258 bp, Glycine max
agtcacctgaggcatgcaagcttaaggctaagtcttcatgttgctccctttatttctatcttaattgaagccaacgggtgaagttgctaaatacaaggcatgattagtggccaatgggttactgcagatatatgttttggattaccatgaagtctttgttctagttgcaagaattgaactaattagacttatggttgccatagctaactaacggtgttggtccttgtttcaattatatgtgataatatcattcttaaa

SEQ ID NO: 278329 - DNA, 302 bp, Glycine max
gatgccccacattgattccatgacacatatgcaataatgatgatttggaaactttatgcataactggtcatgcatgcacctatgtggacactcaagtgtcaaatttctatggtcatgtgatgctagggctcatgagtcatttcctgtatttcaaatcaacccaatgttgccaaaatatgttgttttatccattagagcattcaaccgagtccgatttgggtgtccggagaatatttaacagagttcacccttcacgtgatacacatttttagtacaaatagctttgatcagcgaatcattca

SEQ ID NO: 278330 - DNA, 376 bp, Glycine max
  unsure (1)..(376): unsure at all n locations
agcttanaggagcactcatttctttgactttcaggcctatattccgaagagtccgtcagggcctctccttcctgattcaggtccaacccctaaaataactttttttgcatgcagacactgctcatgaattatacaatacccacgacctcacactcgtgttttaaacatgtttaacacaattgcgctatgtaacaccctaagatattataagttataaatcaatgtttaattgtatttattgtgttgtttgactatatgatagacttgaatgagttgaagtatgccttgaactagtcatgtgtgaatttcttgatatggatgttgaattatgtggagttttgttgagctaagtgaaagtatgagattttatatttac

SEQ ID NO: 278331 - DNA, 365 bp, Glycine max
caaatttaatcatcctacttggaagaatgagacaactggcgcaaatgaagagggtgagaatgaaggagaaacccatgttgtgactgtcgttcctacatggaaaatcccccactagcccaacaatgtcattacttagtcaataacaacccttctccttacccaccacccagttattcacaaaggccatccccaaatcagccacaaaacccacctaccacacaaccaatgctaaacactcacctttagcatgaaccataacaccaaccaaggaaggaattttgtagcataagcctgtaatatcaccccactctggtgtctatctaacttgtccaattcacttgatattcaaggtaccatacccagcc

SEQ ID NO: 278332 - DNA, 588 bp, Glycine max
  unsure (1)..(588): unsure at all n locations
atcacactccatgttacgntgtaganntttctaacatattagagtacaactgaaaatcaagcaccacgannnacnnnnnnnaagttgatgcctcctngnacgngcagcgaccagaagagccgaccggcaggcatgcaaactgngaaaccaagcgatgcgccattagtgtacattcangcaacgcaaggccaccacaccatgcaactacaacagagcaaactggctgagtagaacagacatagtggcacccgaccgttaaacgccgacagccaacataatcgacgccaaaatgaattccaaccggctgatggcgaagtaatcacgcgcaaccaccttaaaacaagaactcaaccaatcgacagcgctgaaaccgaggaaacaaacaaaacaagcggccaccggccattaacatgaaacgtccactattaacgaggcgaaaaacaatcaagtgaaaccaaaggtgagaatcactcacaaacaagctctcggccataggaaaaacacacgacaccgtacaaaggctcaacacctagaacgggctttacacaatcaaacggcaaaacgaacactagcagagcgaaccaaccg

SEQ ID NO: 278333 - DNA, 77 bp, Glycine max
ctgcagctttgtttcatttcaggacccttattatgttctcttctccgcgaattaacttaatctgattaattgcttat

SEQ ID NO: 278334 - DNA, 320 bp, Glycine max
acactcataggaatcacttttaacctttatacttttattattcagcttatcttccattttcagtcatggtagttgatcacaattttaaacatcacaacatcatgcaatgtagcctagctttcaaagacaacaaggttaaggatcaagaagtggaaagaccccccttacctcttgtagtcttcacgcgaaagagtatggtcaaaccaagaatgaagttctcttgagtaaaaaacaagctctaacaaaactcacgaacatgagatataaagattcaagtgattaataagaatgaacaacgctatagtgaatgatgaacatgc

SEQ ID NO: 278335 - DNA, 347 bp, Glycine max
  unsure (1)..(347): unsure at all n locations
agcttaacattcaactggagcgtttgnttgattataggactctactagacatgcgagtataaatgtattgttgattgaatttgctcaaagcttcaacattcaatttcgagcgtctccatatattacgggactcaatcagacatccgagaaaaaagttattgtcgcttgaatttgctcaaagctccacactctaagtcgagcgcttcgttatattataggactcagtcagacatccgagtaataagttatttgacgttcgaattcgctcagagcttcaacattcaatttcgagcgcgtcgctatattaccggactatatcaaacatccgagtaaaaagctattgtcgt

SEQ ID NO: 278336 - DNA, 430 bp, Glycine max
  unsure (1)..(430): unsure at all n locations
agcaattcaacgacnaagcttttacttgatgtttatgaggcccgcaaatatggagacgctcgaaattgaatggtgaagctttgagcaaaatcaaacgacaacaactttttactcggatgtctgattgagtcccgtaatatatcgagacgctcgaaattgaatgctgaacctctgagccaattcaaacgacaatcactttttactcggatgtctgattgagtcccgcaatatattgagacgctataaattgaatgttgaagctttgagcaaattcaaacaacaatcactttttactcagatgtctgattgtcgcccgtaatatatcgagacgctcgaaattgaatgttgaagctctgagccaattcacacgacaataacgtattactcggatgattgactgagtgccgtatataacaagacgctaaaattg

SEQ ID NO: 278337 - DNA, 345 bp, Glycine max
agcttggagccattagaagagaatgagtcttgtttgttattatgactgaaaatgttagtcagtttgtcagattgattgtgaaggaatgcattaaccgtatcccggtgagagtgtgatccttatattttgagagaaacgactatcatttagtactgattcttgcgtgaatctctgaagtatggactgaatgcatgaaattgaggatgatgaaggccatgtctgattgtgatagccacttagccaaaaagctgaccatgtgcttgaatgagttaccccttgcacccagtctgagctgaataaattattgattgattgaatctggactctatacagcgttatcttctg

SEQ ID NO: 278338 - DNA, 434 bp, Glycine max
  unsure (1)..(434): unsure at all n locations
gattcanagaaggtttgatgatttcttttgtgatgacaaaaagctgaaatgtcaagatcacttgatgataacaaagatgatctcatgaatcatagaatgagttcaagattgaaggaagaacacttcatggttcaaagaggaaatttgatttcaagaatcaaagaatcaagttccaagatacatgatcaagatacaagactcatgattcaagaatcaagagaagactcaatcaagataactattagatgtttttaaaaactgtgtagcacatgaatgtttctcaaaaccttttaccaaagagtttttactctttggtaatctactaccagtagcaaactggttttcatatagcttttaactgaatttacaacgttccaattgatttcacaattgtgaattgattactacgtcttggtaatcattaccagtgtgtg

SEQ ID NO: 278339 - DNA, 267 bp, Glycine max
catcttgaaaaccaactttgccactatgaattgattactggatactggttatcgatttctggagagtaaaaactcttttgaaaaacataactatgctatgtttgttttctgaaaaaatctcttcaatacttcccttgcgaagacttctagacttcttctcttggaactcgaattcattttttcttgaatcttgaaatcaaacttctcttgattatagaatatgttcttgatataatcttgaaaacattctttgggctttttgtcaac

SEQ ID NO: 278340 - DNA, 398 bp, Glycine max
agcttctcaaggaggtgagcttagtttttatatgggtgcgcgcagctaaactctagcttctcaaggaagttttctcaaagaagcttctcaaggaagttttcttaagaaagcttctcaaggaagttttcttaagaaagcttctcaaggaagctacctattctataaatagaagcatgtgtaacacttgttggaactctgatgaatgaaagtcttatgagatacacttcaaagtcccacttcttttcttcttttattccttcaatttcgtgctcccgccttctctctttcttttcctccattaaagcatcctcttcaagcttcttatccaagggaatttctggttgggaagctccttcttccttggcttattgcctagtggatgtgagcctcccctatcc

SEQ ID NO: 278341 - DNA, 370 bp, Glycine max
agcttccacaacatccaagttattttcatttatacagcacaagctatcacagccaagcagaacagagcaaaggcagaaaactctgctcaacacgtcaaccaaaatcacagcttttctcacgtaaagaccacagtaacaacttcttcgatccaattcgttaaccgttggatcgactccaaaatgttactggaagtctatagtgcataagcctacattttgaccgttgggatctactagcaaacatccagaactcattctgcactagactttccacagccaaccacacacaagcatttttctgcactcgagcaaaattctgctgcacaatttcacagcaaaaattctgcatagggcagatttcgaaaataca

SEQ ID NO: 278342 - DNA, 398 bp, Glycine max
  unsure (1)..(398): unsure at all n locations
tncttaataagattcctaaagaagctagagcttagcttcatatacctctctaatagctaagctcacctccttgagatgagaagctagagattagctacacaccccttaaatagctaagctcaccccatgacaaaatacatgaagatacaaaaaagaaatccctactcaaaatgcctcgaaatacaaggctaaaaccctatactactagaatggccaaaatacatggcccaaatgaaggaaaactgtagaagcaaagcttcatggtgaatcaagagtgattcaaagatgttttgatgattacaaacatgataactatagatgatgacataggtgatgacaaaaagctcagaggtcaatcaaagaatgagttcaatatcgtcaagatagaatcaataaca

SEQ ID NO: 278343 - DNA, 618 bp, Glycine max
tgcatgcaagctttgtgacacactcttactactttgtttttttcaaacaacattattgtgacaacatatttgtaacgcaaacttaatacacagagccctcttttaaaactaaatttcaatcctggcttcaattaagttttaaggcaacagtacatttttccaaggctgaagtctcctaactatgcacacaaatgggtgatcagacaaagagcgtacaaaattttagcactgatagaagcattgaacaatgtaaacacaacaaattagatatttatggaattacatcaactgttctttataaatccccaacaagggtgtttagcccgccattacataaaaaccctaacaataatgagattaagagtagagaataattgctccataccaccacaaagggggatccctcttctttttttaacatcttacaataccctttcaactactaatttttttctaattacaaaaacaacgttttttttaaaaaactctccttttgtggctctaaaactctttttttaaaaaaacccctgggggggcccctgcaatattttgtaaaaacttgttttttttttctcgggcccctattttttttaaggggagaatttttaaggccctaaa

SEQ ID NO: 278344 - DNA, 465 bp, Glycine max
catgatctaactcgcatcgtggtgttcccttcccctgcaactgcaaggcttctcatgagctgttagatgcctctagttgattgtgcatcttccactatgaggtcttgggtttttagttttttactgttgacctaatagcaagcattttaatgattaaggtgtgaatccattgttattgtgcatcttagatgaatgagagattctattttaattgtgcatcttccactggttgattgtgcatcttccactgcttagatggattcggttttaatgatttttgtgtgattatctctgttcataatcaaatacatatgtgaattctctaatcgtaggtgttagtaaccataatctttgttcgtaatcaaatacatatgcgattatctttttgtcagctaagaagcatttgtttggaagtcagcccaccatatatcatatagaaaactaaatgtcaaaaatttgcatact

SEQ ID NO: 278345 - DNA, 862 bp, Glycine max
cacccccttgatgacatcgatctcccgccagcgattctatagagccgccgcatgcaagcttgcatatcgaacatacagaccatggctatatttatgagttcaccgaggaaccatacctgagcaaatctgaaccggtggtgaatataacttaatgaggaaaggcgaatattggtaaacgaccttatatttgcattgagcttcaccccataatctttttgtggggatgcacattgctttaaccggttaacaaataggtgtaggacaaaaatatatgggctttattttggtacaccaggaacatgagggaaccttttacgaatatcctgtggccatttattaaaacccatggggctgaaagactggaattattagtggaccaccaaaaccaaatggccatttaaaaataaaaccacacctttctaaagacctttgttctccccaacccgtcttaaaaatgtactccgtttcccaaacccgttacacaaaacttgtgttccaaattggtgtttatattttgaagataaaattcttaaggaaaatggttgggggaaacaacccaaaacaccttcttctaccaaaggtcccattaaagaatatttatttccgcccccgggctcttgtgatgaaaaaacaacaccccacaatgtgacttccgtttttttgttttcttctcggcgcgcgctctccttatattaaaacagcctaacacacttctgggaaacaataaaaacacttctaattctcctcttcttttccaacaccctcctcctcgctcgagaaagaaaatgcaccccatcgttcttctccccccttaatttaaatctcaccctctttttttatgtatttcttttttctacccccg

SEQ ID NO: 278346 - DNA, 660 bp, Glycine max
  unsure (1)..(660): unsure at all n locations
cttatagaggccttttggatctcatgcctcacacaattttaaaagcatgttcatgaaaacctgtaaatacagttccactatcaaatatcatataaactaactaatacaaatgataagaaatgcctaatggtgccttgcctcaataaaatttgcatcaggtaacatggcacggcaagtgtctcggtctcttctgtaaggagatatcagactagcaacacatattaagccagcatcagcaaacagttttgccacttctcctagattaaataatttttttatcagtaaaaccaagttgatatgcatcagattttttaatacactacagctatatacaataactttgaaggattaatagattatttttcatcatggaactaatccaaatacactaatattgattagaagtttttttcatgtaataagttggccaagagtagattgcaatattgtgtagactgcaaaccaaccattttgagaaaggtgaagtgtgtcccacaagaaagaaagattcgggttctcacataaactgtatttctttgatccttcgtcatccacacttncacatgaatcttccacttgtttccctcacagcatggttgcaacggattcatcagtgtagacttttctgcataatgtagaaagaaaaaaaactgtcatcat

SEQ ID NO: 278347 - DNA, 505 bp, Glycine max
agcttataagaacaaaattgccttaatcatttccaaatatgcatgtgaattacgacgcatcaacaagaatcaagccaaggctattgtgcaagcaatcaatggggcaaaacacaccaaatgattataatgatggatggctcaaattctcacaaaggtaaaatcatcactttcaaattgagctttcaaaactatcatgacatgtagagaagaatcaaggatttcaagtcacaaaatgtcaagaacttttattttcaaaacaattacccatttcttgaacatatcctataattcaaagaaaaacatgcatagtcgtacgtgcacacaaaattgacccaaaatattaaactgaaaatccgacgaaactaacaacattaacaaattaacacaactaacaaattaacaaaaccaacaaaactagcaaaaccaaaaaacacccccccccccatacttaaacaacacattgtcctcaatgtagcacaattaaaagataaaaacaatttaatca

SEQ ID NO: 278348 - DNA, 484 bp, Glycine max
  unsure (1)..(484): unsure at all n locations
tctagccaaatggacttaccttgaattaattcctttgatattccttttgagccttgtttccctttccttgttttgaagctcactacaagccttaagggaaaaccatgatattaccatatccttaaggaattttggagctttggaattggtttgggaataagtgtggggggtttttgtttcattggacaacttgttttgttggctatgcttcatgatgtattttgggtcatacttgatgtacattgtatattggttaaatgttggacatgctgaatgaaatgttgtttctcaaaggctaaagagtaaaaaaaaaattcgaaaaaaaaaaattcgtaaaaagaaaaagaaaagcaataaagttgagtgaataagatcttaagtggcacaagaatgatgaaactcttggttctactcttcatgtataatttttatctttacttctttttattttcttattttnttcttaatatgcacttattcccct

SEQ ID NO: 278349 - DNA, 482 bp, Glycine max
agcttctagtcgtccatagacctcctctgtggtacggtctagcaaacgttgcatctgtgcattcatcgcatccactaacagacgttgagcgccgtccaactgatggtactcgtcaccaccaccacctgctccagccataattcaacaggaaaaaaaaatgtgcaataaaaattattaaggtttcaggacctcacaacactctactcacgtcttttagatggtagtacactcgtgtttaatgctctcaataggcttttgcgtaatgtattccctcttgccttttaccactcgtgtttcctcttaagttcctggatggaccagattatacacacgaggtaatataaaatacaaggaaagacaatgtattgatcacaaacagaattgatttgggataacaacttggacttgatttggataataatatataagatttggatttggataacaggtgagctttaatttgggtaacagatatgataaca

SEQ ID NO: 278350 - DNA, 552 bp, Glycine max
  unsure (1)..(552): unsure at all n locations
ctcagcttcttataagctgaaccattttatcaataaacacaagtttagttttattcagaaaattagagtttatctcttttatctttagtgagaagtgaattcttccctaaattctttgaggtgaattcaaagaaacacncctggtcttgtattcaaaagcgacttctcacaacactttgttgtgttcgccctcacttgcgaaagaagtgatttcttntcccttccctaattcatctcccaccccttgtttcttttcaaaccacaaattccagaaaattcacctctgcccaaaattatctcgtgaccaaaactcccatttcacacactcaaattaagtgattcttgagcctaaattgaatttcaaaacgagacctttcacctcgttttggaatcacctcatttggagccctgtagcttccgttattgtcatttctatatttctgtccagccaccacttaacctacgttttaccatcccattcatccattttatgtcagaaaccaccttattaagacccacgagattaaccaccttattttccatcctttcctt

SEQ ID NO: 278351 - DNA, 570 bp, Glycine max
agcttgaagaaattttgttttttacatgcccaattttttagtggcatttgtattgattttgaatcttagtctctatcttctcatgtgtacatcatgcatcatcatgtagaagtaagaatattatttctaaagttagaaacttgttcagtgcataaaactctttgttttaatcgattacaaggctgatcgtaatcgattgcacaagtgtttataacttgtagagagattctagttcagtttaatcgattatcaattaaccgtagtcgattacataatttagtaaagacaatgattggtttttcgcgagtctttgctttaatcgattaccagatgattgtaatcgactacttctctcttaaaagtgttcatataagtgatcacaagcactttaatcaattacatcaagagtctagttgattacattgttcttaaaagttttccagatgttgggaagaacactttaatcaattaaaatgataatataatcgagtacttctttgaaaagtcgatggcttgactattaatcaactacatgcgaatataattggtttcttactaaataaccccctc

SEQ ID NO: 278352 - DNA, 595 bp, Glycine max
tgctttactttatgttttaaaatttattttagctatgaagaatatgggtgacaaggattcaaccactctatcaatagaagaaaactttagtcccaaatgcattgtgccaactgccccgcagcattcttgcctctcaactttcctccttgtagatcattctggaaaacattccttaggcttcacttctggtaggatcacagcgcatggctcagcatccaaaccatcagagattatgaaacagttccaaatggctagagcatccagctggatctttagccattgacccatgttctgacatgccatgcttgactcacagatgccatactttatggtgcatgagggctaatgccttcaacaattgaccagtttactccatggaatcagttgaatccttcactcggaccatatccacttcccttcaaccctcatctagtgatctaggtcattttagagaccaattttacctagcatacgactgttagaatatatggaaacatccaaaaatatcttatcatatcctagaatatcttataggattagtttcctgatttcctgcttatctcttaagattaggtaccatatttacttatcatga

SEQ ID NO: 278353 - DNA, 765 bp, Glycine max
  unsure (1)..(765): unsure at all n locations
cacaccattgatgtacatcgattcccaccctgctattctgtagagtccacctgcatgcatgctagccttttgccaatatcctcgactcctttataccttggcccagggagggaatgtccaacctttcccttcggagcgacaaaaataaaagggaaacttccaatactgcgaaaactgaacagaatgatacatttccaatctaagacaatgcgtggaagacaacgaggatgattccccggtcacagagtgggggatagcatacacaaaagagcgataatttcctatcccataatgggggaatgtctgtaaggaacaccaagaaggtacgaattctcctgaccatggatcgaaggaacacagaaaaaatgtgcacaaacgtctttggacgcgtctatataagaacactctataattggccctttatgaccaaaactgatttatcgttacccccacctcagcatgcgcttctacctttgattaccaaccaaaatgccctgcactaactactttgtaccccgcctagaagacaccgcatttgtaaaagcccacttaaaaatcattgtccaaaactctcattatcaaaaaacccatangaaaacccattctccaggaagacctatgttcctgatcacccatttaatttttgtttgaagggaaactttttccacgccattaagacctattttcgttgggaaaaagaaaaaccctttcccttggcaagaaatatacaatttagggggatttttttcttattttgtcccgccc

SEQ ID NO: 278354 - DNA, 400 bp, Glycine max
ctgtggcgctgagactatcttgcagcaccaccgttctagtttttgctctctatactatctctgactctctcctctcctatctctcttttccgatttagatatagagagctgctctcaattcatctgagttcctctttcgcatgggaggatacaactagacttcttcgcatgtactacagttacgtctactattgactagaggggagctaactatccgacgttgatatctcttgaagatcaagcacagctctctttgaagctctattattaccactaaacttttgaccagaagttgctcttcaccaactactctatgattgctgcatattaatcaggcatgcttattgcttgattaaacgcctctgcgcgtaatatacgagcgtgctcaatgatcgttcat

SEQ ID NO: 278355 - DNA, 421 bp, Glycine max
  unsure (1)..(421): unsure at all n locations
agcttgccacccagctcgcccaggcgagcatggttgcttcctccaaaagcaacagccttctggaggaatcttctggaaggcccaagtgggcctggttgctatttgcacccccatttttactaaatacacccccttgccctttttctggtgattcttttttcgtaaagatacggaaacttatggatttcgcaacgatactgttttcttttcgtaatgttacagaaccttgcggataacataatgtcataccctaatttcgtccggngacctttgcttgatgacatgcgaccttngtttggtccttgtaaggtgcttgtcacccatcattangcaatttgtgaaaatctgggacatgccggaaaacaaaagaaaatattgatgcacaattccgaaaagttccgtgacacacccggaaattaaa

SEQ ID NO: 278356 - DNA, 514 bp, Glycine max
tcctactccagtagtagacctctcctcaccatagcctgcagctgacccttccactcctgtacttgacattccagaggatcagaccacaccagtcttggcactgaacacctctcctccagctactccagtacttcacttgacagatgaggaggatgctcagacttaggatacacaggatctatctcaggacttttacattcctgattattttgctttttggataataattataactatattggtttcagcacattgttttgagtaattttggtttccgcttataattatatacttatactttttgtgaatagttggtatgcttgttttgaagcatatggaacagtttaacttgactttgatgattatgcagtgaaacatttttacctttttgtgaaaattggtgttatgaattgattttggattgaatgcatgattatgatggagtttgcgtttcttttcataagtttgagtgagtatgtatgttagacaaagaaagaacaagaatgtgaacatg

SEQ ID NO: 278357 - DNA, 500 bp, Glycine max
  unsure (1)..(500): unsure at all n locations
agcttttaaaattaaggatcttggtgatttgaaaattttccttggtttctaagttgcaagaagtaaagttggtattaacatttctcaatgcaaatatgcacgtaagctattatataatgctggtttattgggttcttgccctgttagtactccaatagattacaacactagaattcatcacaattcaagattacatttgcctgatccttcatcatatagatgcctaattggtagattgatctatttgaccaatactcagtctgatattacatatgttgtacaacatgttagtcaatttatttatactcccactactgcacatcagcaggtagtagcttgtatccttcgttacattaagggtgctcctagtttcgatctcttctaaccagcaaataatactgctaaactcaaagcctttagcgactttgattgggctagctacataaagactagacattccatcattggattntctatttatcttgggtcttgtcttattt

SEQ ID NO: 278358 - DNA, 434 bp, Glycine max
ttcagctttttcctatattcatttttaccttttcttttttggttccaggcttaattaatctggcattggattcttcttaattccttccaatggattcaatttcctgattaaaaaggactacctgatctttctaagggcctcatgaaacttacccagcagtagactaccacggaattaaaagtgatgctcctggccaaacacatatatctgagatatttttgggggaaaattctagataaaatagttattgaacttcttttttttcttttacaggatacaatataaagaaggtaaaatgcaaacacacatgcactattaccctgagaactaaaaagggaaatttaaacacaaaaaatcaagcacacacaataattttcaatcctgtttgagaaaggaaacaatctggtcgatcaaaactagagcattctcacaat

SEQ ID NO: 278359 - DNA, 524 bp, Glycine max
agcttctcaaggaagctacctagtctataaatagaagcatgtgtaacacttgttgtaactttgatgaatgaaagtcttatgagatacacttcaaagttccacttctttccctcttttattccttcaattttgtgctccccccttctctctttcttttcctccattaaagcatcctcttcaagcttcttatccaaggcaattcttggtggtgaagctccttcttccttggcttattccctagtggatggtgcctcccctctcctcttctcctttgccttccgctgcatctccatggtgaaaaatcaccattgaaggacctcattgaagctcaaagatccagcctccatagaagctccacaagcaagcttccatcagctttcctctttctactcccgtctgttcctcttctcaatattttttattttcaactgttaattccctcgcgttcattcctttccctccatatacctcaacccaacccccttctcccttctctccatgtcatccctcacgtctgttccttt

SEQ ID NO: 278360 - DNA, 605 bp, Glycine max
  unsure (1)..(605): unsure at all n locations
ttccgcgtagcactgttgtgcgtgcttttgatctgccttgacagtcatgatctctcccatcaaggtggagaacttcatctttagatgttctatggagacgatggctccaagctcgttgagtgttttcctgtcaatcaaagcaaaataaaaagtatttgcattgagtatcgacggttgtcgcaacgtgcccttcgcgggcgagcgagggcgaggctcacgggtgcgcttcccaaaggaggaaagatgcgcggagtcgccaccaacgtttatttgtggaaaatgtcggaaaaaccgaaggaaaccggtcaaaataaaaattctaagttcgggagttgtatttacgcttgaggaaggtattagcacctctcacgtttgtctcaaaggacaacaacctattttttagaattgtggaaattgtgttaccttaacttttatttctttttattttttgaggtcgacaatagcggggcttttgctcctacgtaccctccatcgaagaggaaatcagacctacgtagttctttcttatacgtgaatcaagtgattctttntacttgaagggtgatcattttaagggcgtggacctttaaaatgatcctttttac

SEQ ID NO: 278361 - DNA, 396 bp, Glycine max
agctttaatatcttcattcacgagtacttcactttataaagagagtttagttgtcatgcgattacacatcatgaaagacacactcgtccaagatatgtatatgggcccaaagggtcttgctacactaatacacacataatgggagaaactaactaacttacttcatacacacaggatgataaaggtttattaacacattatcaatcaatatccagactacttgaaatacccaatggcttgccataatgtccaaccgcactttgtaaattatagagatgaccagtctcataacttatgactcaacagtggatttatgggatatcaaacattaaggatgcaagacacatacaaacatttttattaagtctcatttaatcatgtaggagaaaataaaaa

SEQ ID NO: 278362 - DNA, 588 bp, Glycine max
  unsure (1)..(588): unsure at all n locations
tagaatcacatacactaagacaaacactccagtctaacattggattgtcatagcctcttgcatgtaagttgtgcctgggtacacaagttacaaacaagattccataacaaaccaaataatgcatctatatgatctatcaaccaggctttgataccaactttgtcacgagacaaatatatatatatatatatatatatatatatcaatccaacaattagatatcaaggccccatgattcaacacaaacccttgacatattgtccaaaatatctactaatagcaatgttggtcataaatactaatcatcaaagtttttcaaaacatcataagtacatcatcaacatatttgcaagagaggatcatttaaatttcaaaataaaagaattctctctaaatctattactacccttatccctatagctgcattatattggagtcatgaaaaaaaaaactatccatcagacgcaatanaggcctaccaaaagataatcaaattctcgggtaagtcaacaaattctaaaaagtcaactactccactatatgtgcatcntagaaaataaaataaaataaagggataagtcacaaaga

SEQ ID NO: 278363 - DNA, 302 bp, Glycine max
tccatgatggcgaatacttattcaggtccccattggtggtgcattgacaaagccatcattttagtaggaaaaaccttcgcttgccatgtttttgacggaatgccttaccttatgatatagcatatctcttcaaatgcaatccctttggtcagaatttgcccgttattataaaagtgaaaaaatgcggtaattgtgtaaatgccaacatttattttcacagatgctttgctatatatttactgctctccattctcttttgtgagaaaattctcaatatttatgcgacatgccagatttacatt

SEQ ID NO: 278364 - DNA, 589 bp, Glycine max
  unsure (1)..(589): unsure at all n locations
tgaatccttgtaaaccaatgagagaaagtgtaatgaacttgtgaaatagtagaagcaaaactaaaggggcaattcaattatcatcataacattgccaaagacttataaaggaaaaagggaaaagtattactagtcatcctaagcaaattagcaaattagcaaattagcaaatcttatagactcgtaccattatgtatgttgaccaatgttaaaatgaacaggaggctattaagtattagattaaaaatttctagaatataggcacatggtcaaagccaattgcattacccatctaaaagttttacaatattcaggatcatgagaaattaataactagattgatataggatacaaaatattactaaatttatcattctccaaaaaggtgtgaaatccaataaattgccattgccatatctccctctctgtgataaacacaagtacgcaagcacttcatgccatattcaaccagcaatagatgactcaaaaagtacaatttgtagaaagaagaaatcaatcattctgatgccttgtctctgcatatgctatacntcacataaaatatattcaatgctactgatcactaatg

SEQ ID NO: 278365 - DNA, 456 bp, Glycine max
agcttcatggggcaacattgaattattccccgtatgacaaagttgtgtatgctttggtaagagctttatagacatggcaacactatttatggccaagggaattcataattcattttgaccatcaaagtttgaagtttctaaaatctcaaggtaagcttcaaaagagacatgccaagtggttggaattaattaagatgtttccttgtgtgatcaagtacaagaatggtaaggaaaacatagtggttgatgctttgtccagaaggtatgttttgcttacttctttgcaaactaaattgcttggttttgagtttgtgaaggacttgtatgctactgattctaactttggcaaagtatgagattcttgttctaaacatgcttttggaaattatatagacatgatggtttattgtttaaaaaaataaattgtgtgtgcctatgtggtccttgtgtgaaatg

SEQ ID NO: 278366 - DNA, 584 bp, Glycine max
  unsure (1)..(584): unsure at all n locations
tgtgtatagcataattttaagcttcaattaaaggtttttgctaaaggaaatatacctttaacatcaaagaatgcctgttgtttatgcttgtgcctcctccataaaacaagtccaacaccaagaactatcaagctgaggcatcccaaacttaaaccaaaggctatggccattttgtgagccttttttctgcctgatggcaaagcatctagggaagcaaagagattttctatcaacaatacaatcattatgcagaatgtatcaaaatgcaacataaggaaagtgatgtaaggaaaaatcattcaatttcaaaaattcatgagcaattctaaaagggtcttaccctcagtatcgttcaagttcattgacataggcataagtgtcatcccatggcaatttttttctttttctgtagcacaaatgagggggtttcctacaatactgaaaccacacaagggaataaagaagaatnttgaagtcagcacaaaattcttctgtattttgcaatcacagaaatacataaattaatttcatcaaagtgaaggatcaagagcagagagagagggagggagataaagttttactga

SEQ ID NO: 278367 - DNA, 772 bp, Glycine max
  unsure (1)..(772): unsure at all n locations
cgccttgatgcttgcaatacnggcaccttntaattaaaccgccgcctgcaaggcttggaatcaaagcttacatgaagggcaacaccttttttgtatcaaatgtttgataactgggtagaggatggtcactacataatcaattgccatcggcggtgccttgacaaagtcatcattctatatggccccaccctttggttactaagcttctacagaatgccataccatattataaagcctattatttcaactgcatatcatttgaataaaatttgaccttttttttattagggaacaaacgcagccactttgatgaagccaatatttattttaacaaaagcttttttatttatatactgctatacggtacactttgtaagaaaaatattaatataggcttggcatgcaagatatacactcttattgtatagatatgccctattggatttttggggaatacgcgtttatgccttaagtacgttattaaaaggcatgcaataaaaccctgttcctaattaaattctattatctccactctttggaaaaaaactacccacccccaatttcgaagtgaacttaatcagacactttttttttncaattcaaattaaaccatggttgttgtttgcccaaaacttttaaatattggctagaccaacgaaaaaaggactttcccttgtattatgggcacccccccaatatccgcgagctttcccatctccaaataaaaaatgtgttgtggattcctgaactatttattgaaaggcttcaactg

SEQ ID NO: 278368 - DNA, 295 bp, Glycine max
accttaaaactaacctcgattatttttgataacgaaggcgctgggtattttactgatatcatgcatcactgacacaccccgtgtacatctctaagactgtaacattctgttctactgaaaatggacaaatggcttgaatgtgtaacaaacacaaagaaatacaattctccttcaacatatcatcacacgtgctcaatcggaaatggatcatcacaaatgtgctaatgatcaggtaggcattcaacaactcaatttccatgattctaatctaagagaacaggcccaaccttttgga

SEQ ID NO: 278369 - DNA, 456 bp, Glycine max
gcttctacaaaaacaagtgcaatattgtatatttgggggtctttttcttaaacggtacaagtttaaaccttttaatcttggaccaaataaataagccaatatagtcatacatattctaataatatgatttataaatgttctagtatcaagtgagtttttcatcaaaagaaatgaggcttaagataatagtgcaatattgtacttttgatttcactaaaaagtgctttatgaacttaatactcttaaagacagccttttggagaagtacaaagagaatggagtgtatagaaggccaactactttgatgaatgagttgtgttgatgtccatatagttactgttggaaagagaaacatttaatgatgatttcctttccaagtaggttagttaatagtcaattaagttcaatgtatcgtaggaagttgtgatattttaattattctcttgaaaacaaaat

SEQ ID NO: 278370 - DNA, 644 bp, Glycine max
  unsure (1)..(644): unsure at all n locations
tagcgagtacatacattttggttctctgtgttgcgcttcatctattgttgtataatggtgtgtagttttcgcaatttgtgtttgtgctgattgtttatctgatatagcttagctgcattgttcgcctctgttgactgtttgcttaccatgtttgaatgaattttgttaggcttttgtgtgtgtttggaacccatgaacttgctaagcatgcatcatgtgcttagcgagttcttgcataatagatttatgtatgaatttctggaaaaacattcatgatctcactaagcctacgacgtgcgcttagcgagttcattccatcttgattcgtgttcatgatttatgggtttttgttctttgtgttcttcatcattcatcaatgttcctccagattttttatttttctagaaaccggtgcccgctaagcacgctcatgtgctaagcgagccatttgttccctgttcgttgttgttgaggttagtgtcagttatgcgctaatcccacacattattttccattcctattgtangacttagtgctggctatgcgttaagccctcaagtcttttcgtatcttttgttntcagggcttaacactggctacgctctaaaccctggtgtcttattgttttcctgggcatgggcctt

SEQ ID NO: 278371 - DNA, 556 bp, Glycine max
agctttgagctgcaaaaaatctaataggaaagatttgcttcgtttgttcttcaatgacaacagttaatatatagggtctgattagggtaaatttttctagaagaactaagaaaaagaaataaaatgattttttttcgtaagttaatttgaacttatgcacaaactaagttctaattttttttttcatcttttagagaaattattatacaagagcttttacaataagtaaaaatatgaaaattttcttatgaaaaattcatttcatttttaattattcctagaaatccttctggaaagaaacccatagtcaaaactcaaaaaggcctttgacgcaagatacctccgctgtgtgggttaaaatagtttaaaatttgtttaactctcccgttagtaaaaaagcgacactatctgacaaaatgtggacgtgagcttgtaaaacgtctttacatgtgtaagaccctagtttactagcggggaaaaatattgtctaaccaataaagaacattctcaatgtagctaaaactttaaaataattgcatttgggatgggatttaca

SEQ ID NO: 278372 - DNA, 640 bp, Glycine max
  unsure (1)..(640): unsure at all n locations
tccttcaattggacaacagtggtgtgcctcttaatatcaccacctaagtagtgtttggttctactgccacgctgtccatgtccttttggtggttgggtcctccaatatcaccactccaagtggcataacttcattgatgaagaatggtctagaccacttggatttcagcttacctagaaacaatctcaatctagaattaaataacaaaacctgttgaccaggctgaaaattcctttctgaaagctttttatcatggtaaattttaactctttgcttataaatcttggaattctcataagcttgaaacctcagttcctcccattcatgaagttggagcttcttattttcactagttgcatttgagtcaaaattcagaaacttcaatgcccaataagttttgtgctccaactcaacaagtaggtgacaagatttgccatagaccaattggaagggagtgcatcctgcatgagccttgtatgttgttctgtatcccccacanagcttcttctagtacttgngaccaatctttccttgattgagcaattgttttctctaagatcttcttggcttccctgttagaactntagctngtccattggtctgggggtggtaaggagaagctaccttgtgtctaacacta

SEQ ID NO: 278373 - DNA, 584 bp, Glycine max
agcttatttgtatgtattgaataacaacaatgaagttttgccatacatagttcaccatgaaggtttagtgaaggaaagtaatccaaaaatgtcaaagaacagagtgttgaaagagcataaaaagactttcctaaattggtttaaagacacaatctttggtgacgacaatgcttctgaaacgataagaaaactagtagatgggcctaaaagaaatgttataacttggcaaggatacgatacaaacaagtattctttctatagaaaagcataagacgagaaaagtataatgcaaaaaatggggttagcctaagggatgaatctcaacactttgcgagtgtacatgatgacaatcccagtgtagcttccatcccttactttggtttcattgaagaattctgggaacttaattatgtcaaattcaatgtctattttttcaaatgtaagttggttgacaacaatatcggccagaatgaccctttcatcatggtagaacaagcaaaacaagtattttatgttcaagacccttgtgatgaaaaagtggcaatggttctatacaacaaaacattagtggttatgttgaaaat

SEQ ID NO: 278374 - DNA, 649 bp, Glycine max
tgacgagagttacacgccgagcaaagtttccatccatgccggtgatggttttcacaacttgaaggtaaatttttattttattggtttggtgttgactttgggaacatttttaggagattaagaccatggaactcgtgaagccaactgggtgggtttatgtatccttgtatggagctgatcctaggtaagtacagtgttctttctgtatctagtttttgttggtttaagtttgtatccagtttttgttgtttggaggcctgtatttttgttttcaacgaaattttgtcttcatgttttggtagatttctagcatagagtgaaaatgaattagtatacttttcttcatttttttctataaaaatttagtgatgttcatattaattgaatgatttactttcattggatacaaatgggatgccatctcctgagacgtgaaaacataagcaacaaaataacaacccaacaaagaaaactacaaaacccaaccatacaccccacactatgtaaaggccaaagacatagatgaggaccattgctaaaaaggaacaacaaagtccttttcccaccccctcaaccaagaccaggtgagaaagattgcattatccaccagcttaaagatgacaaacagttgattttaaaagtcatgaaa

SEQ ID NO: 278375 - DNA, 295 bp, Glycine max
cttctagctcactccaaatagcacctccaaggtgctgttgctacaacacatggacttggtcgggcctatgcacgtaccaaaccttgaaagaaacaagcaggccacaaatgctggggcagatttttaccgatgcaccttgatgtatttttctctagaaacttcattacgatgcttgcttctcaagctttatttctaagactttaacacactacagacattgtcttaaagataacaacggacagatcatggagaggagtttggagcagcaggatacctgaattcgagacaattgaac

SEQ ID NO: 278376 - DNA, 456 bp, Glycine max
tgtacatcatcgtagatagctgtcctgcattatatatatgttgatctgactatcatggattatagacaactatgctggacttggagtacctacatttggttggactaggacttacctttattggctacctaattatagctactcagattcaaacacattgacactggagttgagtgccaatgtttgattttatcatgggaagtgttcaatgagacgggaactcagagatacactgagtcggacaacggtcaatatgtattcaacgtgcggtgacattgatgaggcacaagtattgaatgatggggcgagggtcaaagatgtgtccacttatgattccatgaatggaggatggagagtgctgccaaaatgcattttctcattcacacagatgctagagatgttcctgttgcacctgaaaagtcagatgttgcattcaaagatgagaatccaacagat

SEQ ID NO: 278377 - DNA, 456 bp, Glycine max
tagcttgacactaactgattcgtattgtgtttttctcacacatacaccaacccatgaaaaaattgtaattgcacaataactgctacaacatcatacccaacagccccgcatccacatatgtatactttagatattattgacacactccaaatggactctaataacttctatcaccatgatccgaaccctataacataccactaatttgtgaagttttgagcatcgctgtccatccttaacccctttgatgacgaatattagattatgaaaaatactattgatctgaattagagaaaatatgggacaactattctgaattatattattacaggctttgtctgaaatctatacacactttttatattgaaatgcttaatcaaatctatattgaagacgagttaactcttaatgctgatatagaaatgcttgtaataagatgctggtcttacatacttc

SEQ ID NO: 278378 - DNA, 640 bp, Glycine max
  unsure (1)..(640): unsure at all n locations
ctatagaatctcagcttagagatacaaactggaagtactaataaatgatatttaaccttttatttgataacacaatttttattgtcgacacaattataaaaatgtaactttgaatttacaggcacaaccaccaataataatttcttattgtcattcgattctcatcctttaattgagtcgttgttaactcatactggctttgttgatgttgtgaaattatgtcacttcaaaattgatcatcatctantgactgcacttgttgagcgatggagactagagactcacacttttcatcttcctgttggagaatgcacaataacattggaggatgtagcactatagcttggcataagggtggacggtaggctagtcacgagtgcaacgtactatgattgggaggaaatgagtgaacaatatttgggcgtggttccgccaaaaggagaagcaatagtcaactctgccatttagcttaagtggttgcaagataatatgttgtcgcttcccatagaaccaacacaacaacagttagaagcacattgtagagcttacattttacagctaattggtggggttttaatgccagacaagacgagaaatatgttcatctaatgtacctaactgtgtagggtgatctcaaatg

SEQ ID NO: 278379 - DNA, 335 bp, Glycine max
agcttgaaattgaaaaacggaagctctcggaaaattcaaatggtcataacttatcacacggaagtccaattcaggcgcataatatatcgagacgctcgaattgaacaccgaatgctctcgagaaattcagattgtcataacatgtcacagggaagtccaattcacgaacctaatatatctagactcttgaaattggacaacggaagctgttgagaaattcaaattgtcataacatgtcacacggttatccaattcaggcgcgtaatatatcgagactctcgaaattgcacaacggaagctctctagaaatttaaatgagcattacatttcacacg

SEQ ID NO: 278380 - DNA, 608 bp, Glycine max
  unsure (1)..(608): unsure at all n locations
tctcgatatattgagcacctgaatcggacttccgtttgaatagttatgaccttttgaatttctcgagagcttccgttgtttaatttcaagcttcttaatatattatgtgcctgaatcggacttctgtgtgataagttatgaccatttgaatttctcgagagcattcggtgttcattttcaagcttctcgatatattgtgcacctgaatcggacttccgtttgaagagttatgaccttttgaatttctcgagagcttccgttgtttaatttcaagcttctcgatatattttgcaccttaatcggacttccgtgtgacaagttatgaccattttaatttctcgagagctttcgttgttcaatttcgagcttctcgatatattatgcacctgaatcggacttccgtgtgaaaaggtctgaccatttgaatttctcgagagctttcgctggtcaatttcgagggtctcgatatattatgcgcttgaatcggacttccgtttgaaaagttatgaccatttgaatntctcgagagctttcgttggtcaatttcgagggtctcgatatattatgcgcctgaatcggacttccgtgtgataagttatgacccattg

SEQ ID NO: 278381 - DNA, 327 bp, Glycine max
agcttgaaattgaacaacggaagctctctatatattcaaatggtcataacttatcacatggaagtccgattaaggcgcataatataccgagacgctcgaaattgcacaacggaagccctcaagaaattccaatggtcataactatcacacggaagtcccaataaggcgcataatatatcgagaatctcgaaattgaacaactgaagctcttgagaaatttaaatggtcataacttatcacacaaaagtccgattctggcgcataatataactagacactctaaattgaacaacggaggctctctagaaatataaatggttattattt

SEQ ID NO: 278382 - DNA, 501 bp, Glycine max
tgaaattgaacaacggaagctcttgagaaactcaaatggtcataacttgtcacacggaagtccgattcaggcgcataatatattgagatgctcgaaattgaacaacaaatgctctcgagaaattcaaatggtcataacttgtcacacggaagtccgattcaggtgcataacatatcgagacgctcgaaattgaacaaccaaagctctcgagaaattcaaatggtcataacttatcacacggacgtccgattcaggcgcataatatatcgagacgctcgaaattgaacagcgtatggtgtcgagaaattcaaatggtcataacttgtcacacggaagtccgattcaggcgcataatatatcgagaagctcgaaattgaacaacagaagctcttgagaaactcaaatggtcataacttgtcacacggaagtccgattcaggcgcataatatatcgagacgctcgaaattgaacaacgaaagctctcgagaaatcaaatggtca

SEQ ID NO: 278383 - DNA, 500 bp, Glycine max
agcttgttcaagatatgctccgcaacttttgtctagccacggggctagaggtcaatgtttagaaatctaaattctctgtctctaaaaatttgaggaggtagaaagttgataaattcaccaccattctagatttcctacacactcaacatctggggaaatatttgggattccctttattagttgggcagaacaaagaatacttaattttctttcattttggacaaaattgataaaagaattgttgggtgaaagagcaaagttcttaacagagctgggaggatcactcttgcaaactcagtcatgtttgcaatccctacctatcctatgcaaaatttgtagattccttaaggtatttgtaatacaatcgatgctataagaagctttatatggtggactggtcgactattacaaaaccgcgccacatagggggttttgacataagcgagagtacgccattccacattgtcttactatgaaaacatgtttgggctctcatgaac

SEQ ID NO: 278384 - DNA, 752 bp, Glycine max
  unsure (1)..(752): unsure at all n locations
ctccttgaacgctgctttacgtgacactataaaactaagcttataaggaaatctatgaatcttgccatacaacaagcagatcataagggcagttcatctttaacaggaattttgaaattacaacgattaagcacaagctttaaagcttgagaattggattgacctgngctaagttgccaaatatatacagagttaggcacagtattattacaatcaacagaagaaacagtatttatacaagctggagaagacacagcagagcagaactgaagattgggaaactggtacaagccatcagatccaacatctccttgaagaaggattcttttggaatcctgatatttaacaaagcaacgattagcatgaaactcaaagaaaacatgattatctttggcaaatttgcttacactaattagattcttagtgatttgaggaacaagaagcatgtttttaagaataagttggccattaggactgaaaggagaaacaaaattggaattaccaggggctgagatattcagaccttgtccgttaccaattttgatctgatctggaccctcanatggacaagtttgctggatgttctgcgagttattagttacatggaaggatgctccagaatctggaaaccgagatgatgaagaatnggagtcagaatttgcaccatagcttgtgaggcctagattaaagtctgagagtatgattctgatctgactttgtgggaactcaatgggattaaagaatggtcagtg

SEQ ID NO: 278385 - DNA, 449 bp, Glycine max
ttccttttaaagaaccaacctttccattttttgcctaacatgaagggttttacttggtggggaaagcaaaaagggtaattgtgggtgatactgaaggccttccaaagggttttgtatgggtataacaacaactggttgccctttcgtggcatatccgaagcaaggctcgaagtccgctatattgtggtggggaatttcatgtgtctcccccacggtttaagagacttgtgcatgatcagtttggggttgttggctctcaatgggtataagagtggagttattgacattcttattgggagtgtacgccacattgggtggcgtatagttgagaggcaagccatatggcgggaaggcgtgctcgttttgaattgcacatcatgggggccgcccgtactttccaaatctttgcctaccatatctgagggtggatgattcattttggttgatgc

SEQ ID NO: 278386 - DNA, 575 bp, Glycine max
  unsure (1)..(575): unsure at all n locations
ttagaatcaaactctcttctctctttttctctcaactattattcattcttcttcctcttttcaattttattctttcattttcttgcaaaaaaaattgtggcttttccattggtgatgatcatggaaggttggacatttaatcaatccaaagatccactccaagtaaggttgaatttaagttctggtttagtatttctaatctttgtgagtgttcatctttctcttcaatcctattttcaattttcatgattataattatgctgtcgcaacctacccttcggcgggagggcgacgcgagactcgcgggatgcgtgttccacgaaaggaatacgcgcggagtcgccaccaacgtttatttgaggaaaacgtcggaaaaaccggaaaagacgcgatctacgaactttntagtgaaaggttcgggagttgtatttacgcacggggaaggtattagcaccccacacgcccgtcccaagggacggcagcctttaatcgaatgtgcanacatgactttgatctttatcgtcccttttatgttcttatatcccttataccctttttatatnttttctttttta

SEQ ID NO: 278387 - DNA, 522 bp, Glycine max
  unsure (1)..(522): unsure at all n locations
agcttcaagaaaaaagatggcctcagcaaatttcttatttccagaagggaattctataaatagacctccaatcttcaatggagagggttaccactactggaaaacccgaatgcaaatttttattgaggcaatagatctaaatatctgggaagccatagaaatagggccttatatacccaccacagtagaaagagtttcaatagatggtagttcatcaagtgaaagcatagccatagaaaaacctatagatatatggtctgaagaagatagaaaacgagtacaatacaacttaaaagccaaaaacataataacatctgccctgagaatggatgaatatttcagggtatcaaattgtaagagtgctaaggaaatgtgggacactcttcgattaacacatgaaggaactacagatgttaaaagatctaggataaatgcactaactcatgagtatgaattatntataatgaatgcaaatgaaaatattcaaaacatacaaaagagatttacacatatagtaaatca

SEQ ID NO: 278388 - DNA, 420 bp, Glycine max
tttctaaatgaagaatagagttgaccattaattgtgcgaattttttcataagttgtcagtcctttaaccacaaccaacatcatcctaaggtaatataattcagtagtacttggaggcacccagttaagtctaccaattgtattgccacctttgtgtggcctccaacatctagacttggcaatgtatgtaaactttgaaatgaattgcaagtatgttagatcttttgcttcatgaaaaatgctgttagcttggagccaagctgtaaacatagactttttaactgttggcttggacaacaaaacatcaatgtcatcatcatcctcaaatattactgagtttttaccaggtaaatgaaagtataacctttcaacaacagacgatcttttatgaatttggaatgaaaagattcgccaacatgct

SEQ ID NO: 278389 - DNA, 975 bp, Glycine max
  unsure (1)..(975): unsure at all n locations
accacaactgctaactctcaactcactcactacaacgactaaaaccgaacctgagaaatctaactgccgaancaaaacgtccaaatcacacacgacacaccacaaattgatgtcgacacgtacaaccacntanacaataaaaccccgcgcatgcaagctatccaggaaagaaagcagaaagattttttttttacctacgcgcgtagcaggcacacaggagaaacgaaagtttaaacctcgctcgacactaacgaaagagaaaggaggacttagaaagaacacaaactccaacgaccggagcatcgattatcccatacacaactactgcaagctgggaggaagacatcaggcgaactcccattgaattaacgttggggcagaagcacaagaagtgcaagacaccccgcttttcaagtgctgagacaagacaaggacacaagagaagcgtgcgcggaggggaaaanatgcacaacaatgggccaaacacaacgctcggtgagagagggagctcctccgccacaacacgnatttaagcgtatggaaaccccgaatcgaatcccaaaggagaggaaaagtcaactatctaaaggggaccgccaggcgatacaaaacggaaggccaaagcgaagcctgtatgtgcggggaccaggggtaaaaaatacacaaaacgccacgcacccaaaagggggtgtttgcacctataacgaaggaggaagtaaaacgaacccttgatcaaacaagggaaaaccaagtacgggatggtaacgacggaaagacaccaattttgggagtaagtgcccgaccaactatgaagaacgataaacgtggggaaccacggaaactcatgaaatagatcactaatagaacgccaaatttacaaacggggagaaggaatgtgcaataccgagagggggaggggaagaagaactctctaccctaaaccaccgagaaataggatggaccaccacgagaaac

SEQ ID NO: 278390 - DNA, 456 bp, Glycine max
  unsure (1)..(456): unsure at all n locations
taggaagatgtctttttttattttagtctgagaagtacatttttaagatagtgtagggttatataccacatgactgaaaaatggttaaatttgtttctagtcctatcaatgttcttttttagtctcttaaaattattttctctctttttgttctcatttatgaaaatgtgtcatctgatctttattttcataatcaattgaccaaaatgtgacattttttttttgtgaagaacaaggatcacatctaacatattttcataaataaaagactaaaataaaattgtttattttttaagaactaaaaataagcattatcatgtttgaagagactaacaacatttttaatccgttaaaaaataaaaattaatggtgcatgtttagtaacacttatttttaaaagtgattatttaaaaaaaaaactaaaaaacagtacatatatgnttgattataatctca

SEQ ID NO: 278391 - DNA, 781 bp, Glycine max
ctcgttgcacgctctcccacccaccgtatatctctatctgcaccgctgcaagcttgactcttgtaattaatatatgatgcgctcggatatgttattttctctgggtccaaacctggagaccctatatagattgatacaacaagttttcaccgggaacggaaacctcttttggtgaacaagcctccgaaatacatagcgcgtggaaagatttcgtacatctcaaacaactattgagaaatccttgtgcacactccagtgccaagcagttttatatatgtgtgatcaacgtgcaagggcctatgcatcaacagtcgaatttatttaggggctgacgagctattaatgcgacgtcattccttcgtacacgcccaaatcgcaatacctgtgtaatgccaatggcaaataatgcccggcttgcccctcatgattctaacggaatgggttacaatcctttgtgaaaaaatatgctactagttactgaaagacaaacctgccttaatgcgatcactctttcatctacattatctctgatgaatgcgagtgtaaagcttctgaccttccatacgactgttaccaacagtaatttttcaaattatctaccttacgcccagttttttacaaagcgacggttcttgaaatctaagtgcccatatgtgcacctttcacaatgggttcccacaaaattggtgtttatcgaaagcctacagttgtcaaaaactgcccctttcccctttaatatggcccccccacggactctctcatggaacacctcgaaatcacg

SEQ ID NO: 278392 - DNA, 639 bp, Glycine max
ttggagtttccaagtgccaattcgtcttcttctttagtccagtcttcttctggcttcaattcatcagtgggctttccttctgtgtccaacatcttgggatgttcccagcctttgatgacagctttccaggttctgctatccagtgatttgaggaaggccaccattcttgctttccagtattcatagttggttccatcaagaattggtggtctgttcactggtcctccttctttctccatgttcatcagaatttatctccctagatctcactctgtgatttcgagtgttggctctgataccaattgaaattctgataccaggggacagatgtcgtacaggatgtcacgacatcacgcttcagaacatgcagtttatatgtgtctgtatgaacagattaaacaagtaaataacacaagagaattgttaacccagttcggtgcaacctcacctacatctgggggctaccaagccagggaggaaatccactctcaatagtgttagttcaaggtctaacagcccctgtttacaaccttctcacctaaccactacccgtgcgatctctacctaagagccactcttagatatgagaacctctgctcactccctctcactcacactcccgtgtttacaattaagtca

SEQ ID NO: 278393 - DNA, 554 bp, Glycine max
tgcttgcacgaatttggtaagggcaacaagattagatagaagattaagagccccttaccaaagctttgatggaagaaacctcaagaacaccttgtatgaagcttagaagaagaaagaaattgactcctctccctcttggtgaactcatgcaaaaatggtgaaggaagggttccaaattgatttttaaagaaacaagaagataaggcttaaggctttacattgacaagcttaattgaaaacataaatgacccatgaccagccatggtgaacgtgccaagccatgtcatttagggttagtgttgcttctgaaattttaaccaaaaaaggccaaagtaggtttaaaccaaaaatggtaaatcctatcccaatcccctagatagacgtgttaaccttccttggattctatgtaatcaaagtggaccttgcacaaagtccactcttacaaagctaaattacattgtcactcagtgtataagtgtaattctttcaagatgcaatttttagctcagataagtttcatattctttgccaagctttgctaaacaaaacacata

SEQ ID NO: 278394 - DNA, 564 bp, Glycine max
tctgcttattagtgcacaactctttcaagaatttagcatatcttggaatttgctttattgcatccagcagaggtatgtttacctctacttttctaaatgtttccaatatctccttctcagtatcttccatttttttgttggaaattgctcttggagggaatgaaagagggatatgttgcttctctttagattcacctgcatagaaattgttaggtaacttactctttaaatttttgtcatcatctttttctggagtagagtgaagttgggcaggttcatttgcagatgaggaagatgttgctggttgaggttcttgacactgctttcctgacctcaatgaaatgacactcacatttttgggattctggacagattgagaaggcaatatgtcagaattctgggactgttgttgatttaactatgtagccaattgtcccatctgattagttaagctctgaatggaagctctggtatcttgttgaaactgcatgttttgcatagtcatttgcctcacaagttcttcaagggaaggttgcgaaagagcctcaactgtttgctatttct

SEQ ID NO: 278395 - DNA, 494 bp, Glycine max
agcttctcaaggaagttttctcaagaaagcttctcaaggaagctacctagtctgtaaatagaagcatgtgtaacacttgttgtaactttgatgaataagagtcttgtgagacacaactcaaagttcaacttctctccctttttcttccttcaatttcgtgctcccccctctctctttctctccctttttcttttcctccattgaagcatcctctccaagcttcttatccaaggctcattttggtggtgaagctctttcttccatggcttattccttaatggatggcgcctcctctcacctcttttcctttgtcttccgctgcatctccatggtggaaaatcaccattaaaggaccccattgaagctcaaagatccagcctccatagaagccccacaagcaagtttccatcagcaagggcatcggtcatttgattttcctctctagaaatgtgatgaaatgatacgtcatcaaatagggccatcaatttcctaat

SEQ ID NO: 278396 - DNA, 567 bp, Glycine max
tctacagaaggtttgttcctaatttctctacaattgccttacctctcaatgagctggtgaagaagaatgtggcatttacttggggtgaaagacaagagcaagccttttttttctcaaagaaaagctcatcaaggcacttgttctagctcttcctcacttttctaaaacttttgagctagaatttgatgcctctggagtgggagttggagctatattgttacaaggcgggcaccctattgcttattttagtgaaaaacttcatggtgcccccctcagctaccccacctatgataaagaactttatggcctaattagaacccttccaaacttgggaacattacctggtttccaaggaatttgtcattcatagtgatcatgaatcacttaagtacattagatgacatagcaagttaaacaaaaggcatgcaaaatgggtagagtacctagatcaatttccatatgttataaaatacaaaaaaggaaaaacaaatgtggtagctgatgccctctctaggaggcacacattgtttttctccttgggaactcaaattttaggatttgataaca

SEQ ID NO: 278397 - DNA, 523 bp, Glycine max
  unsure (1)..(523): unsure at all n locations
agcttctccacttgtaacttgggcctaaattcaaatagcatggttaacacttgttgaagagcttccttggccttctttgatctagcccttggcataggtcctccaagtccttctaaaggttccttgcccttagtccttgcatgtcctcatcacatgtggaaaaaaatgtgtgtgatagtgtaatcagcatgcttcttaacattaaaggtaagacaaaggatgatttgaatactcgtcaagatctagctgagatgggtatacgtgaccaattacatccaatgttttaattaaataaagagtcttgttaaccagtgcctttaacgtattggttaaggaattaaaaaagaaatgtatttattatgtaaattataggagagtgtaaaaaaagatcatgggcaacacaatttttcacctctcaataaaaacattcctattttatgttttttaaccattacccttangacactagttagcatttaacttaaataacaatgaaaacattaatttcattatgtgtgagact

SEQ ID NO: 278398 - DNA, 633 bp, Glycine max
  unsure (1)..(633): unsure at all n locations
tgactcacaccaaacatggcaagttcaacacgctttcaacaaatctcttcacaaataattatcacaaagcataaaccaagtaaaactacccatcatatctcccaaagccccatacccatgaaaatttaggtgagtagaagtctacccaaacctgaggtttcgaggtcccacacgtagagatgcgcttcacgactccaaaaatgccttcctttcgcgatttggagcagaaatggtgaccaaaggttggagctttaatggaggcttcaatggagaggaaggagaaagaaaaagcaacatgagggagagggagaaagcttctgaaattttttgttgagtgaggagagagagaaaatagctttttggtttaaagaggcttttctcttttctattattttattttaagctatgccacatgtctccatttgagtggagcaaaaaggcccactttntctcttgatgtgactcatgctcttccacatgaagagaaaaatctgaccttttgaaatgccaaaatcctgcctcagtttgcgtgccgtttctctggttccagtccctcgcgtttctctgcgcctgtcggggccagttttcgaaagtagggcatatatatatcanaacgctcagaataaacccccg

SEQ ID NO: 278399 - DNA, 459 bp, Glycine max
agcttatgctgctaacatctacagtagacctcctttttctgagcagcaaaatcacccacaacagaacaattatgacctctccagcaacaggtataatcccgggtggaggaatcatcccaaccttagatggtcgaatccttcacaatatcagcaacaacaacaacaaccttattttcagaatgctgctggcccaagcggaccatacgttactacaccaatccagcaacaacaacagctacaacatctgcagctgcagccaccccagaaacaacaaatagttgaggctcctccgcaaccttgccctgaagaacttatgacgcaaatgactatgcaaaacatgcagttttaacgagagaccagcaccttcatttatagcttaactaatcatatgggacaattggctacacagttaaatcaacagcagtccgagaattctgactgattactttctcaatctgt

SEQ ID NO: 278400 - DNA, 580 bp, Glycine max
  unsure (1)..(580): unsure at all n locations
tgttaaaagcggaagcaaagaataccgaaagtaagcaaaataaaaatgaaagcatacaaaacaagaatggaccgctgaaggtgcatagaatgaattgaaagattcaaatttgaaaacttaccagttgaagaacaaagaacaacgaagaacaaaagaagaatggtgaagaacatccatggaatcgatcacgaaaatgtctcgaaagcgttacggaagcacctcggcttgaattttctccttctttcttcttctcctcactaatttcaagtgaaagcttattgcaaaaaaatgttggactcttaaactcagcccccttcccctatttatagtggaaaggggaggtggttgccgcccagaggcttcttgaggaagattcttgagcgcacccccaattgataagttcacccacctccagggttgcttactgattaagtttcctaagtgcacccncaattgattagttaaccaccaccttccagagtgttctagatgaagnttcctgagcgcacccctcaggtttgataagtgcacccctcggagtttgctactacttaagtttccttaacgcacccctaattga

SEQ ID NO: 278401 - DNA, 397 bp, Glycine max
agcttctcggtatattatgcacctgaatcatacctccgggtgacaagttatgaccatttgaatttctcgagagcttccgttgttcaatttcgagcgtctcgatatcttatgcgcttgaatcggacctccgagtgagaagttatgaccatttgaattgctcaagagcttccactgttcaatttctagcgtctcgatatattatacgcgtgaatcggacctccgagtgaaaagttgtgaccatttgaatttctctagagcttcggttgttcaaattcaagcgtttcgatatttgatgtgcgtgaatcagacctccgagtgagaagttatgacgatttgaatatctcgggagcttccgttgttcaattgcgagcgtcactatatgtcatgcgccggattc

SEQ ID NO: 278402 - DNA, 538 bp, Glycine max
  unsure (1)..(538): unsure at all n locations
tccttaagaaaattcctaaagaagctagagcttagcaacacacacatctctaatagctaagctcacctccttgagatgagaagctagagcttagctacacaccccctataatagctaagctcacccccatgacaaaaaaaagatgaaaatacaaaaaaaaaagtccttactacaaagactactcaaaatgccccgaaatacaaggctaaaaccctatactactagaatggccaaaatacaaggcccaaacgaaggaaaaacctattctaatatttacaaagataagcgggctcatacttagcccatgggctcaaaatataccctaaggctcatgagaaccctagggccttcccttggatctctagcccaatctacttggagtcttctacccaatgcccttgcgggataagatttcatcattccctccaccttggaaaggatttgacctcaaatcccaaggttcttcatactctgggctccttccctcaacacctgtaaaaagaaaaaaaacatatgtattantggtgtttggtatgtt

SEQ ID NO: 278403 - DNA, 456 bp, Glycine max
agcttaatgattaaaaattaactaatttatatatgatcttatttggccacacagaatagacgcccatattactaccagcattattatatgtactagaaaaaccaccaacaaaacctgtaaacaacttttcacccttctattctgggggaaaacatcaaccacttttaccagtttaagttttaaaaactaaaaaaaaaagaccgcaaaatgggtttgtacacacactcaacaataactccagtgacaattgacgggttatggcagctcgaattattatattccattaaagagctacaatctcatgcctgcttagatgttctaatatggaggaattacaattgaactgaatctcttaaacggaacattcctttaaacagattatccaccgttataacaatatcatatctacactaatactccaattgactcaaatttaacaatatggatttttttaaa

SEQ ID NO: 278404 - DNA, 587 bp, Glycine max
  unsure (1)..(587): unsure at all n locations
ttaagttttaatattttttctcaatttagtctttttagtaatttatatatataatcctgtagtggatagggataaagccttaatcacatgaattttaattaatgactcttatgaaggcagtctattgctttttaaaagactaataccatttccttattcattactacatatacaagatgatcaatatgctcttcacataaacttgattttatcttgtctactgtatagatttctcataggctcctgactctagaggttctgaaatccagagggggaaataagtcataattttagttttgtagaaatatgctgggaggggttcttattagtgatttttagtcttattagtgtgaagttatatatatatatatatatatatcatggtacatttatgaagggaaacctctaaataatcatcattgtagtttagattcttcattgtgaaattggaagtaagcctgtcaacttcttgaggatggatgatgctctgttagaatatgaaatgaagnttatactcagatatatggttaacttattatttgggtagtgaaaaatctacctgtggtatatagtattgaaattgatct

SEQ ID NO: 278405 - DNA, 530 bp, Glycine max
agcttatggcagaggagcatcatttgtctaatactgaccaaaaatagaagatgactacgatgttaatgcaatagaacatcaccacaaccactcccttacaagtacactacatagtaaatgaacctacatccttctctttctgtttatgtttttcttaactaaaccctattagcttctagagttatagaaaattactaacattgtgaaagtgtaagtttctaagtctgggtgataacacattaatgtattcaaccaaatacattatcaaactcaagcatcccactaaaaatataacgggattagacaccccaatacaagcaaaaacacaataacaagtacaaacaaaacactaagggaagttaaaataatggcaaccaaaagcaaaacttaccaagacacagtatacgcaacagacacgagaagaggagcaaaaagtgctttggtgcccatggctgcaaggaaagcaacgtccgttgacactatagacaccaagaaagaaacttaccccagcggattgaaaagggtgggtt

SEQ ID NO: 278406 - DNA, 544 bp, Glycine max
tactttgaaatttgtgattcaatatgatgtatgctagtttatatatagagaagtagttatttatattaataatttatgtaaatagtattgtagagtgttatagtatgattccaaaaattattaagtgttggagtttgagaatattatggttaaatttgatgaacatgtgtatgttgtaccttacgaatatcattaggaatgttatgagatggttgatgtgatgttatgagatgttaaagtgtggacatgatatttgattgtgaataagtggatgtgtttaacacttgatgttacattaattatattttgagctatgaattatacaataactcgaccagtgtttatgcgcagtgttaaagagaaagtgtaggttcctagttaggaaccagtgttaaattgtagcgcaatgtgttaaacatgtttgaaacataagtgtgaggtcgtggtattgtgtaattcatgagttgtgtttataaatggaatatgtgatgaattgtggaataacatgttgctttgagattttaatattggtattgagattgag

SEQ ID NO: 278407 - DNA, 549 bp, Glycine max
agcttgctgccattagaagaaaaataacatgtgattagaagtatgactgaaaatgttagtcaatttgtcagattgattgtgaaggaatgcattaaccgtatcccggtgagagtgtgatccttaaattttgagagaaattactatcatttagtactgatttttgcatgaatcttggaagtatggactgaatgcatgaattgaggatgatgaaggccatgttttgattgtgatagctacttagccaaaaagctgaccttgtgcttgaatgatttatcccttgcacccagtttgagctgaatgaattattgattgattgaaccttgaccctatacagtgttatctcctgctaccttgtcttaggttgtaggagagcatcatccacagaaaagcttggttcaaggaaaatttgtcccaaatttgggggaaacactatgtaaagaaataaaatggtcaaaacagagcagcttatacacattggtttctgtataaaaaaactgttagtatgatttgacatgataaaagtttgtgtgctgcaaatcaaatcaatga

SEQ ID NO: 278408 - DNA, 507 bp, Glycine max
ttaaaatttgaattaaaacgttcacaaactgttggtaatcgattaccatatatgtgtaattgattacacagggcaaattttgaattcaaattttaatagctgttgtaaatccgttttggccactggtaatcgattacatcctctggtaatcgattaccagagagtaaatttgttgaagaagactttttaacttgtaatccttggccaaaccttttgctacttcaattggaattcccttcctatttaatataccctttctaagactctatagactgtcttgatcatccatcttgaatatctttaatttctttgtcttgagtaaatctttgagaagcatatgattcatgtaatcctttggcatcatcaaaacattcagcttaatcctttgtctacacccacgttctactatgaaaagctgattggctacatgccagctaactttgcggatctcgtcttcgccggagaaaggattgaatcccgactacaaaaaggcaagttcgaatatgc

SEQ ID NO: 278409 - DNA, 488 bp, Glycine max
cttgactgatgaagatgaattttggttactttctgcactcttctaaagaaaatagcatcatttctggcactaaattgttgggagttggaagccatcttctcaattaaatttttggcttcagcaggggtcatgtctctaagggctccaccactggcagcatctatcatacttctctccatgttactgagtccttcataaaaatattggaaaagaagctgctcaaatatctggtggtgagggcaactggcacagttttttaaatctctcccagtattcatataggctctctccactgttgcctaatgcctgaaatatcctttctgatggtcgtggtcctggaagcaaggaaaaaattttctaagaatactctcttgaggtcatcccaactcgtgatggaccttggagcaaggtaatataaccaggcctttgccactccctctaagaatgacgaaaaccttcagaaatatgtgatcctcctacacatctgg

SEQ ID NO: 278410 - DNA, 517 bp, Glycine max
tatgcgcatattacattacgaacgttctcttgcccattacattctattaaccgaaaaaaatgcacccatatacaatcaaggcagctttgttacctagattatttacacgtgcttccaaggtgtatttgttacttacatcacacacatctccttggctaaattcacatacatgcatactccgagcattttggggtaccaaaaattgcacatgtgcacatcttggtatttgtaatacctatacatacacaaaattcatgatgaatcttgactatctacacaataaagtgctacatttcatgccttgttccaagctttggctacctatagccgcatgcaaattcaagcatattttcctttgttgactaaaattgtattcaaattatatatatatatttcttggaatatgttttctttcacataacattcaacatatttatatatattttttgtgagacattctgactaccaaaaattatatatacatacattcaagtatttcgctattcatacccaaagt

SEQ ID NO: 278411 - DNA, 502 bp, Glycine max
agcttgtgtcacactttcaattgtctaatctgaatacatagctgcaagaagttgttgtgctcaaagtctttggatgaagcaacaatgatgtaagctccattggagcttgtaagcctaggatcttcttcatcaatggattcctttgcttcttggaagatgaatggcagcggaatggagaaaggaagagagagaggagacgccacttcaaggagaagatgagtctaaaagaagctcaccaccatatgaggccatggataagagcttggatgaagaatgagatgaatgaagggagagggagagaagagcacgaaattttgtgctctacatgagctctgagatctgaagtttaatattcaaatgatcaaagttgaaaaaaatgcacacacatgacctctatttatagcctaagcgtcacacaaaattggagggaaattcagaattaacttgaatttgaaattgaatttgtggagtcaaactatggacccagaatttcactaaatat

SEQ ID NO: 278412 - DNA, 497 bp, Glycine max
tcttagtttcagatgatgcagatgggtttgtagctacctcatgcactcctctaatgactatggcatcatttctggcgctaaactgctgggagttggaggccatcttctcaattaaatttctggcttcagcaggagtcatgtctccaagggctccaccactggcagcatctatcatacttctctccatattactgagtccttcataaaaatgttggagaagaagctgttctgaaatctgatggtgagggcaactggcacatagtttcttaaatcgctcccagtactcatacaggctctctccactgagttgtctaatacctgagatatctttcctgatggctgtggtcctggaagcagggaaaaaattttctaagaatactctcttaaggtcatcccagctcgtgatggaccttggagcaaggtaatacaaccagtcctttgccactccctctaatgaatgaggaaaagccttcagaaatatgtgatcctcttggaca

SEQ ID NO: 278413 - DNA, 443 bp, Glycine max
agctttcacaacatgcaagcaaaacaacattctaacagcacaagctatcacagccaagcaaaacagagcaaaggcagaaaactctgctcaacacatcaaccaaaatcacagcttttctcacttaaagaccccagtaacaattccttcgatccaattcgttaaccgttggatcgactccaaaattttactggaagtctatagtgtataagcctacattgtgaccgttgggatctactatcaaacatccagaactcattctgcactatactttccacagccaaccacacacaagcatttttctgcacttgtgcaaaatcctgctgcacaatttcacagcaaaaatctgcacaaaatgcaaatttcgaaaaccacactttccctcatacaatcttgcccaaatacaatcctacaagtttcaaatcatgtatcaatcatgtctaaaa

SEQ ID NO: 278414 - DNA, 614 bp, Glycine max
  unsure (1)..(614): unsure at all n locations
tgtgtggaatcgacaagcaaggacaaaaaggaatcttcaagtgacgtgacgaggaatccgtggggtagctcactataggtaaggggagtttattataaaatttaccattttaacaccatagttaggattaaggaacctagctatgaggatatctgcctgtccttgtgcatgctgatttttcttcaaagaaaattacgttttaactaatgggatgcgatatatatattgtgatgaatgatattgttttggctgtttgaaggctgtgcgtgaggaaatgatattgttgtgtttgtttgaattgttgttgatgttgctattgaggattttaattgatatgtgatgataatgatgattatgatgatattgatttgagatgacattgttaataaagaccatgtcaacatgaattgttattattgatgaatatgtgaatatgaaatgatgttgttgttgttgttgataacgtcattgagatgagatgatatttatgttgtgaatgacatggaaatacgatttgttcattgatgttggaaatgcattggcatgtgcatgttgtgtatgttcgtggggggcactgtgcactgacctttcannggtctttggcattagctttt

SEQ ID NO: 278415 - DNA, 595 bp, Glycine max
  unsure (1)..(595): unsure at all n locations
agcttgcttcttgcgattccaagacacaagatatcttcctaataggtggcatgtaatttgcaacctgcacaatcagaatctctatatcttgactcatccactgatttacctttctcatctaagtcaaggtatgttgaagtggtcgttggagtatatggttctttgcattttttatgccaaatttcttaattagttctatagagtatttggtttgacataggaaggttccatgtttcatctactgcacttggagtccaaggaagaaatttaactcacccatcatagacatctcagattccttctacatacaactagaaaattccttacacaaaatttcattactagcgccaaatataatatcatcaacatatatttgaacaatgaacaactcactatttactttcttaataaacaatgttttgtcaacttggcctctagtgaaagattgcttaattataaaactgtttaatctatcatacgatgaccttggtatttgtttcaaaccatacanagccatttttagtgtatagacatctttaggatgttcatagtccacaaaacctggggatgacctatatatacttctttttcaatg

SEQ ID NO: 278416 - DNA, 235 bp, Glycine max
  unsure (1)..(235): unsure at all n locations
tagacgaccttgtttgagcagagatgactttattatttatttggacaagtttgaatatgatgtagaagaaagtgaatgtgagccttttacccctttgaaaggtttgcatttaaaaatattttaaaaaacttttaattaatatttgaatttttattcctttattagtatatatgtgaggggtaaagggtgttggcaaaatcaccaaattgggtccctttggcnaataaattaccat

SEQ ID NO: 278417 - DNA, 647 bp, Glycine max
agcttgtgcttcaagcataaagggaaataattaaatatgacaccatattcatttttgtgttaaggttgtttgcatacatatattcataaattcttcactgtattcagtgtattgcatatttgcattgaatacactttaagtttgttaagtatatgtcgaactaaatgtatcattgcattgtttgctaaaaaaatgtttgagctaaagtaactctcttaaaaagggtttgttcaacttaattaaataataaatatgataattgactagttagataagatacatcaattatgatctagtttaccgcgcactttaaggttaagctgcgttcgtcctgcttaatccgcctgataaaacattacaaccgaataaatgacaagcataggtacatgttctaattcatttcaccaacaaaatattgcgttttttcttcttattttacgcttcggctaatgcatttataaaagattaagagattattttgtttcacaaaacatattttgttttaagttgatatacgaaaattgaaacacaaaattgaaacggatataatagaaaattatttacactattgtcataagtgtttaaaaaaaagaaataaagtgaaaaaattgtgacattttttaattaaaaagaaaaataaatttttt

SEQ ID NO: 278418 - DNA, 586 bp, Glycine max
  unsure (1)..(586): unsure at all n locations
ttgtccatggcttttgtgtatgtaacttgttatatgagtagtttggttcgagaaacaattttcacggatttataatttacagaagtgatttcaactttccagcgatcaaatttttgaagtacttgatgtgtttcacaaatagagattattggtaaagtcaaaggatattctggataataaatataataataagaacaatacattacattgtatagagcttcattgcttgcacttttattttgtgatcatggttccaagcttaagaggacttaaatcaagtaaataaaaagtgatactcacgtttttttagctgaataccaacctatcaatatatcccattctatcaattgcatgctgatacgcacggtatcacttctatcaacattctaactcaacatcaacacatcaataaaaagtgagaccaaacttttacactgactatatatttcaaacttttaataacatttatttattaatttaataatatatcccaaccactgctatgcaattgcttcctgcacctccaaggtctggggaactgttaggcgcactancataatagaaaaatgtcggttttgtccaatac

SEQ ID NO: 278419 - DNA, 536 bp, Glycine max
agcttaggacgttggggaagggttttggaagaaagaatgagaaatgaatggttgttttccaaggctacacgaaaaataagacttgaaacactcaagtgtttctactctcgggaaaagaagcttttctcacacaccagaagacatatcgcagatcgcaacggtcagatcatggacatctgtcctatgaacctccagaccaaattttgagaagctccaacggttaacaaatgcaggaggacacttttaccaagacagctttaggtagcttccttgagaagcttttctcaagaggcttccttgagaagcttcctcgtgaggcttctttgagaagctagagttttaactacccacacccctctaataactaaactaacctcctttaaataaaacatggataaaacaacacaacaaataaaataaaacatcaattataattactaataatatttcagggtgttacaggcattgttattgatcctcttcgagacctgaaaggttcatcccctctagggctaatttttgattttctattagta

SEQ ID NO: 278420 - DNA, 598 bp, Glycine max
tctcccctattttgctatgaatagggggagaagtgaagattatatgggttcagccccttaggcacttctctctctttcgaatttgctgaggaaaattatttccgtgaagaaaatccaagccgaggcgcttccgtaacgtttccgtgagtaattacgcgaagattctcgaccgttcttcaagattcatcgttcgttctccgttttcttcagtcttcaacgggtaagtacctcaaaccaagcttttcaattcattctatgtacccgtggtggtccacattttgtttcatgtatttttattctcgtttgcatttactttttatacccccttttgatgtgcttaagccatttatttaagtcatttctcgcctaatctaaaaataaaataaatttccaccgatcgtttgaattgtatcatccattactttcgtttgaaatgaattccgaccgttcggtcgtgccgtaaccacgttggaaataaaaaaagagggtaaataataatataataataaaaaataccttttagtaaagtaaagcgaaaaaatcaatcggacgttttctctttaggatttctcattcttaattgaattgactaataact

SEQ ID NO: 278421 - DNA, 444 bp, Glycine max
agcttgtatcaaattcaaacgacaataagttttttctcggatgtccaatagagtcccgtaatatatcgagacgctccaaattgaaattggaagctcgtatcaaattcaaacgacattaacttttgacttggatgtccgattgactcccgtaatatatcgtgacgctccaaattgaaaacagaagctctaagacaattcaaacgacaataactttttattcggatgttcgattgagtcccgtaatatatcgagatgctccatattgaaaacggaagctcgtatcatatgcaaaccacaataactttttactcggatgtccgattgagtcccataatatatcgagacgctccaaattgaaaacggatgctcgtatcaaattgaaaccgcaataacttttaactcggatgtctgattgagtcccgtaatatatcgagacgctccaaa

SEQ ID NO: 278422 - DNA, 447 bp, Glycine max
tccaatttcattttggagcgtctcgatatattacgggactctattgggcatccgagtaaaaagttattgtcgtttgaatttgatacgagcttccattttcaatttggagcgtctcgacatattacgggactcaatcggacatccgagttaaaagttaatgtcgtttgaatttgatacgagcttccaatttcaatttggagcgtctcgatatattacgggactctattggacatccgagaaaaaagtcattgtcgtttgaatttgatacgagcttcccttttcaatttggagcgtctcgatatattacgggactcagtcggacatccgagaaaaacttattgtgctttgaattttctaggagtttctgttttcaatttcgcgcgtgtcgatatattataggactcaatcggacatccaagttaaaagttattgcggttttcatttgct

SEQ ID NO: 278423 - DNA, 403 bp, Glycine max
agcttgcctcaaagaggtccaggaaggacaatgcagccgaaggaactagttccgctccggagtatgacagtcaccgctttatgagcgctgtacaccagcagcgcttcgaggccatcaagggatggtcgtttctccgggagcgacgcgtccagctcagggacgacgagtatactgatttccaggaggaaatagggcgccggcggtgggcatcactggttactcccatggccaagtttgatccagaaatagtccttgagttttatgccaatgcttggccaacagaggagggcgtgcgtgacatgagatcctgggtaaggggtcagtggatcccgtttgatgccgacgctatcggccaactcctatgatatccgttggtgttggaagagggccacgaatgtgagta

SEQ ID NO: 278424 - DNA, 499 bp, Glycine max
ttggctgcgcacgagctcagattgcgggagtatttatagaagatgacgcattgtaatcgattacaggtattggtaatcgattacaggcccaataagccttctggtaatcgattacaggatgttgtaatcgattacaggctgcctgttcatgtgtaatcgattacactggatggtaatcgattaccagagcctatcctaggctagtttctaagagaatatctatatttatgctcaaatacatcctatatgtctaattttcactactaatacactaaattcaatcattcaattactatatacacaagaaatcataaattctatcataaaaacaagaattcaaacaagatcaaccaaaataatctacaatcaaaaggtaaaaagtaaatcaaccaatcaatcaaccaatcaatcaaccaatcaatcaaccaatcaattcctattttctaaatctcttacatctaagagacctaattctcttttaatagagaaaaacactttc

SEQ ID NO: 278425 - DNA, 241 bp, Glycine max
agcttgcgcttcgcgcttacagggaactagttatatttgtgaccggaggcatgtttgtggcaacgtgctcaacgtgaatctatatatattgactccaccgctgacagaccgttgcagattagcttagggtacgctgtaattgtcttgggactatgtggtactcaacgtctcattgccctgtgtgctaaaaaaatgctagaccttaggttactgctaaaaagagggtttgttgaacttaatt

SEQ ID NO: 278426 - DNA, 444 bp, Glycine max
tcacgctagaagcgagaaagagcggaaaagacagtcttcctacttttattcgttgaccaacagaatggtacactggagataatgtcgagagggtcacgacaccttggggatgtcaagtggggtgctattgccaaaaaccaagcttgaccaatcccaacccaacccgggcatagtcagtcagtgagaacctgtggacgtacctaaacaggcgaactcctggtagtcaaccaataaaagaacaaagaccacaaagcaaggaggcttgtgtggtggctggccagctatggattttgagtgatatctagaatatggcctatggtaatcgattaccaagggtgtgtaatcgattaccaagggtgtgtaatcgattacaaggcttaaaaatgaagacatgaagttaatatggcctctggtaatcgattaccaacggtgtgtaatcgatta

SEQ ID NO: 278427 - DNA, 554 bp, Glycine max
agcttcagggatgaaaagcaacattttggaacttaactcagggttttgcatgaaaaatggatgataaatgactaaaaagaagatatttaaagcgtcttacccaagttttgagatcgagaagagtctcacgacactactatggatcttagaagaagatgaaagtggtggtctcttgctccttgaagatctgatgcaagatggagaacaatgaaggtccaggttttggttttttggagagaaaatgatgagaaatgatgaggtaaagcctaatgctattgacaaggtcaatgtgacacgcatgaatgaccatgtgatggccatgttaaactgaggggtgagcagaaaatccggtaccatctgaaaccaatgcacccgaggtgttaaaagttaaatcgttagcgaaatatttggtgctggatgtaaaccgatttgagagaagtctatttcatattaggacgggtgggttcaagtggcaaataaaaaattctgacggtgacctaaccccgaccgatgaagaaaactggattaaatttgaaatggagagcatgggataa

SEQ ID NO: 278428 - DNA, 532 bp, Glycine max
  unsure (1)..(532): unsure at all n locations
tgtttcacagcaagagcatccatgccatctacctgcacatagtataaatatttacttccaaaaaaatttcaaaaaatgtagttcacgaaaagactacaacacattcaatcagcacatgtatatatcatagctatcaatcttggattgcaacctgccaagcttaagctactgctaaccagtaacaaaattgctatggaagtagagcaaacagtggaatggctgcgatgccaaagttttagataaaacataaaaattatttattatttatgatatacatatatacatgcttacaagcccaaaaacaaaaaagacaattataattgaaaagatagacacaacaagagaaaggaggttgaattgtgttgtgttatattttttctacaggtcaaaagctttgtatgaaattcctttatagactgttgcagcgaanaggttttggcaccagatgaatggatggatcttgacattgtgttatgaactagaacggagcaacaatggaccaccttaataggtggtccaccacagaccatga

SEQ ID NO: 278429 - DNA, 479 bp, Glycine max
agcttatgaccatttcaatttctcgagagctttcgttgttcaatttcgagcgtctcgatatgtgatgttcctgaatcaaaccttcgtgtgataacttatgaccatttgaatttctcgagagcttccgttgtacaatttcgagcatctcaatatatgatgtgcctgaatcggacatccgagtgaaaagttatgacaatttcaatttctcaagagctttcgtggttcaatttcgggcgtctccatatgtgatgtgcttgaatcggacatccgagtggaaagttatgactattttaatttctcgagagcttccgttgttcaatttcgagagtctcgatatataatgcccctgaatcggacctccgtgtgaaaagttatgaccatttgaatttctcgagagcgaccgttttttaatttctagcggtctgatatttgatgtgcctgaaacggacattccagtgaaaagtttgaccattttaact

SEQ ID NO: 278430 - DNA, 573 bp, Glycine max
  unsure (1)..(573): unsure at all n locations
tgtctcagcgtttatgcgagacggagaccaatatgctatctatcatcgccaagtaccaagaagagttaggtctagccgcggcccacgagcataggattgcggacgaatatgcccaagtatacgcggaaaaagaggctagaggaagggtgatcgactctttacacccagaggcaaccatgtggatggatcggtttgctcttaccttgaacgggagtcaagaacttccccgattgttagccaaggccaaggcgatggcagacacctactccgcccccgaagagattcatgggcttctcggctattgtcagcatatgatagacttaatggcccacataattagaaatcgttaggaaacttgtatggtctctcagaccttgactagatacgacttccttttttgaaataaaatgagttggtcccatgtttctactccaaaaagcttggcaaatcaagtcactcccgcattttatctctggcatgcnatggatgttggtctcgtcctttgtcacgggaaagccggaaggtcatatcaccttcttattcgtacacatggggcacttgcgcccccaaatg

SEQ ID NO: 278431 - DNA, 513 bp, Glycine max
agcttgcagaccagggatttatctgcaacttcaaaactaggaggctgagtcataaatacatatccctcaagcaacccattaagaaaagcattgttgacatcaaactgaaataactcccacccttgagaaagagcaagagtgagaataacacaaattgtgacaggcttgaccacaggaaaaaatgtctcatgaaaatcaaatccatgaacctaatgaaacaaaccccttagcaaccagtttggctttgaacttgttgatagaaccatcaacattttcttttactctgaaaagccatttgcacccaatagcttgcctattaggaggtaggggaaccaagtcccgagttctgttttacagtaaagcatcatactcctcttgcatagctgtagaccaatctgaattttccagggcctctttgacagtcttgggttcaaaatgagcaaggaacagtgaaggatgtaggctaggattatgaattccagacttggacctaatttgcataggatgagtgtt

SEQ ID NO: 278432 - DNA, 512 bp, Glycine max
tctaccatactcagaatgcctatcatgggaagaattattgtcttccacgctgaccacatgacagcgcgagagtgttatgccgcaagtctcacaatcagtaaaaggacataaggagtcgagcctacgacacagctggtggcatacactgacctgaataatctgagggataccaagcttgatccgagagaagaatatcagagggaaaatttgacagaagaagtgaagccttttctactcagtagagaaacatcccactgcaccaaactcaaatgtttaatgatcgcagaggtggaagaaaatattacccatgtactagaagcaaatagagacttattctgatggtccagatcagatatgcctataatcgactctaaattccactatcacaagctagcaatctatctagaatctaaacctgttgtgcaaagaaaaataaaacttgatcccttagagtggaaaattatggatgaagatgcaagaaagttgctcagtgcacgattcattatagaagt

SEQ ID NO: 278433 - DNA, 598 bp, Glycine max
tgccgcccaactcgcccaggcgagcaaggttgcttcctccataagcaacagccttctggaggaatcttctggagggcccaagtgggcctggttgctatttgcacccccttttttttactaaatgcatccccctcctatttttttggtaattctttttccgtaacgttacgaaactttacgaatttcgtaacgatacttattttccttccgcaaggttacgaatccttacggattatgtatttactcttttttaggtttcgaagaagttacggaaacttacggattgcgcaaaacacctcttttcaatttccgccacattacggaatttcatggatcgcgcaagcttgcttcctttagatttctgagacgtctcgggacttcatttatcgtgcaacaaaggacgccaagtatctcaaagcggctaaccaaaggttgcatgtcatcaagtaataatccccggacgaaattagggtatgacagttgcccctctttacttacctctcatctatgataagaggaaagcaaagatagaacactgatttcgtccgtcctgccctttcgtgatgacgactctcatctctacttcttcttttttctt

SEQ ID NO: 278434 - DNA, 298 bp, Glycine max
aggggggggctctaaagtgaggaaagaaagagggatagaagttgaactctgagttgtgtctaccaagactctcctttatcaaagttacggcaagtgttacacctgctcctatttatacactacgaatctctcttgaaaacctatcttgacaaaccttcgttgcgaagcttctttgagaaaacttccttcgatagctaaagcttatctagacacacctctctcatcactaagctcgcctccttgcgaagcttccttaataacattcctatacaggctagagctgatctacccatacctt

SEQ ID NO: 278435 - DNA, 433 bp, Glycine max
tatcgtcattggaaagagatcattaaaatcaccaaatatgcaccaagcaccaatagaggaatgagctaaagatcacaaaagattccatgaaccttttctcttatctctcttttggaatccatagtaaactattaacttcgagacaattttgacaagatggattttcatgttgataaaattaaaatagtagtttaagagacaacaattaaagggggttttccaaaacatagtcagcccaccactccggcctttagcatcaacaaaaaaaaaagcataaatcaaaaccaatttgaatacaaatatcatcaatatgctaagagtaaacacgagtttcacataataaaatgatattccaatgagatcttttagggtaggaattgtgctcgggttgcccaagccctgacagtttcaactttgagactaatcttccctg

SEQ ID NO: 278436 - DNA, 930 bp, Glycine max
  unsure (1)..(930): unsure at all n locations
ctaacagatactttcaatttctacaatcaaaccgtaataaactaaataaacttaacatcatattttaacattaacaccagcacgcagcaannnttgatgtcgatcccattgcaagnacccannntanannagctgnagggcatggcatgctcaaanggaacaacacagggagacaaacagattccttatatgctagcggagatgagacatcataagcctagactctagccaaggctaaagcgaaagcaatgcaaggagcaaaactgaacaaatgacaatactgagagatagcccaaatgcggacaacaggaatagcaacacttctaaaccgagcaagaaaagccttaagggaaatgtaaaacaagaaaccaggataacaagacacaaaacgtccaaaactggtaattgacaaagcagataaccacacttcctcgaaacatatttttaactatgaaaagaaagaacacgcccagatcgcactgcctattagcgaagcaatgggaactcaattccctaaaatcctgtgttgcaacgaaaacaaacaaacaagcggtcgggaaaacggaaaacaaataagcaatattacaaggcgggtctgaagagctggggtcaagaatgacaatcgaaacacgagaagatgacgggacacgtgtgctgaaatgcagaaattgggactgaggaaagcgaaaaggggagaaggaaagaagggaataaacggtggggcagggttcaaaaacaacaagtggaacacccgtgaattgatgagtgggaggagggcaaaaaaacgatacccgccacaaaaggttgcgtgtgtggtaccaagtaaaactcctggagagattctatggaaaaccgtgggtgtaaggaatacgacgaacacctttataatggtggtggggtcgtaaaaacaataaacgggaggggaacagg

SEQ ID NO: 278437 - DNA, 627 bp, Glycine max
tgttgacatgtggagatttacgtcgtcttccgtgcagacaacctatttcagtactaactcgtgaagttagggggcaggcggaaatacccaagtggttatccggataaacattcttttaatatctctaagactcaacgcatgatagcatgcagagactaacgtcgtcttctgcaccttttgtcaatcgcggccaacaagcccattgccacgtggagatttacgtcatcttctgtgcagacagcctctgtcagtactaactcgtgaagttagggggcaggcggaaatacccaagtggttatccgtataaacattcttttgctatctctaagactcaacgcatgatagcatgcagagactaacgtcgtcttcggcaccctttgtcaatcgcggccaacaagctcgttgacatgcaaagatttatgtcatcttccgcgctgtcaatctctatcaatactatcccatgaagttagggggcaggtggaaatacccaagtggttatctgtataaacattttttcactatccatcagacccagagcacgatagcatgcagagactaacgtcgtcttctgcacccttttggcaatcgcggccaacaagctcgttgacacgcggagaattacgtcgt

SEQ ID NO: 278438 - DNA, 405 bp, Glycine max
agcttgccgcccagctcgcccaggcgagcattgttgcttcctccagaagcaacagccttctggaggaatcttctggagggcccaagtgggcctggttgctatttgcacccctttttttactaagtgcaccccctttctattttttggtaatctttttccgtaacgttacgaaactttacgaatttcgtaacgatacttatttttcttccgcaaggttacgaatccttacggattatgtatttactctttgtttaatttttcttgaaggagttactgaaacttgcggattgcgcaaaaacacctcttttcgattaccgccacattacggaatttaacggattgcgcaagcctgctttcttttgatttttgaccggcctcaggacttcattcattgtgcaaccaaag

SEQ ID NO: 278439 - DNA, 694 bp, Glycine max
  unsure (1)..(694): unsure at all n locations
ttgagccaaaatcctgactcaccataaaccttgacccagggtgagaatgtcaatccttaccttcggaagcgaaaagaatagaagggaaatttccaatcaaagaaaaggaaagaaggaagatttccaatcaaagagaaagcaaaaaaagaaaagaaggaaaattcccaatcaaagagtgggagaaagcaaaaagaaaagaaagaaaattcccaatcaaagaatgggagaaagaaaaaagagaaaaggaggaaagaaagctcctgatcaaggatcgaaagaaaacagaagaaatgtgcagagaagtctttggaccggacaatatctgaacaatacagaattgtcaccaaatgaacaaaaagggaaggaaaggaaaccacgacctaaaatggtcttctccctttgattaccaaccaaaatcccgtgcgctagcgacttttttttctcgccccgcactaaacaaaaaaaaaacagaaaaagaaaaagccagaaaaatcaaaagccaaaaacacacaaaagccgaaaaaaaaaaccaccaaaagaacccattcccaagggaagccctattgatccataatcgcgcatgtaatttttgatttgataggaaataattngcaaagtcaagtcatgacatatctatggttcggaattaggatgaaacacttacctgtgcaagattgatacactttgagtgatt

SEQ ID NO: 278440 - DNA, 872 bp, Glycine max
  unsure (1)..(872): unsure at all n locations
tgatgcgatgtatanaacacttcttttatcatttacttcaacttgtcacggacattgcatgacgttatctcattctctataactgtaaaaacaaagaggattgatgcatgtagaccgncgactatataacaaccgccgcatgcaagcttatttgctgaagctggggagacgtgtttaatttgttggttttaagggcattaacagctgctttgaaatgaaaagttatgcttgcttggacgggcaatggaacaaatgttatttgctggatgccattagggaattcttgaacaacttcaaacctgattaatatgattgtggtgaatgcatgaacagggtgttcaacaaaaaagtgaatgaaattatgatgagtttgcttactttctatgcgtcggttaggtatgggtttacttcaccaattccgtactcagttccagatgaaaaagcaacatgctatggacttgcattagaggattgctttaggtaatagaagggatggtaatttaatgtggattttatagggagtggaaataagaacgagggcaatatggaattggaggtagacaaagaaggtcttaatttaggtaacgaaccatggacatgtataaaaagggaagaattttttttagataagagaaaataggtgattaagggtagtctatataagatattcataccttaaaaaataaaaggaatttttatttacagcaacgcggatctagtgttaacaatgaatgaaggattcctaattatgggtggagctatctgttaaaaaagtaagaacgtaatggtaagttgcccgacaaaaggcttcgaagtctcagaaatactggaaaagtaggatcttgctgtaacttacaaaggataagcgtatt

SEQ ID NO: 278441 - DNA, 347 bp, Glycine max
ttggagtgtccaagcgccgctccttcctcacccttaatgcatttttcttcaggcttcatttcatcaatgggcattccttctgtattccgcatcttgggatgtccccagccattgacgacacacttccaggttctgatatcctaggccatcgcgaaggccaccatactcagctctccaatatccacactatgtgtcatgaagagacggaagtctgcacactgagcctacgtctttatccatgtttatcagaatatatctccccacacctcactctgagaatacaaagaaggctcttaaaccaataggaaccctgataccaaagtacatatgtagttcagaacgacaca

SEQ ID NO: 278442 - DNA, 566 bp, Glycine max
agcttataagaacaaaattgccttaatcatttccaaatatgcatgtgaattaggacgcatcaacaagaatcaagccaaggctattgtgcaagcaatcaatggggcaaaacacaccaaatgattataatgatggatggctcaaattctcacaaaggtaaaatcatcactttcaaattgagctttcaaaactatcatgacatgtagagaagaatcaaggatttcaagtcacaaaatgtcaagaacttttattttcaaaacaattacccatttcttgaacatatcctataattcaaagaaaaacatgcaaagtcgtacgttgatgtgccatcattgtcttctattttctaaacccttgttgcaccatattaattattgattggtcttaattgtcaaataattacgcaagtttataatttgggctcatttacctaatttgatgtttataatctaatttcacgaattaatgaaacattgggcttaatcccgatattgattgggacttgaagagggcaaataaagcaacgcttaccttagttaatttctatattaggaaattcccaaattta

SEQ ID NO: 278443 - DNA, 511 bp, Glycine max
tcctcggggccattttctgcgaaggcaaacatttggaaagttagttttaccaagaaatgctactcttaaaacaaaaatggcatacaacctcctccaataaacacaaacatcaatgtaaatttagagcaaactcatgcacatactcccttacgaacattcactcgcacaagatattcttctacctaaaaaaatgcaccgatgcgcaatcaaggaacctttgttacctagatttatctatgtgtacttccaaggtgtatttgctacctacatcacatgaactttcttggctaaatttacatacatgcatactcaaagcatcttggctaccaaaaattgcacacgtgcacattctggcatttctaatacctatgcatatacaaaccttgtgatgaatcttggctatctacacaataaagtgctacatttcatgttgtattcaagtgtttttgctacctaaaagccgcatgtaaattcaagtatatttccttttgctgactaaaattgcattcaa

SEQ ID NO: 278444 - DNA, 387 bp, Glycine max
agcttttctttgaccgaagctaaggctgaatcttgtttttcaccctatacacatgccatgttcttcttcacccactattagaaaggtgacgcatttgaataaaagataggaactaaccttatatataagcttgctaaccaatggaagctcctaatatctccgacacattattgggtgctccattctagaatagtcgtgattgtctcatggtgcacttcgaccccatttctaccaactcctaaacctcagagaactatattatctactcacaatgtacacttctctatatatgcatagagggagttttctctattgactgaaacaacttgcctgagatgtactcattgatcatataagctcatatggcccactaaaatatcttaaaaa

SEQ ID NO: 278445 - DNA, 354 bp, Glycine max
acctatgaaactcagcttgttagaggctacctccatacgctaacatgtggcttctttgagaatctttctcaccgtggtaccgtgttttcgaccggggattatgacttgtttacaaggcccctctaggacatcgctttgacacacgtgggagtgattagttgcgcagtccatgattgacccacacgtgatctagtcaaaaggaagcacgctcgcgcgatccgagatagactcgcgaactggcaaaaatcgaacatgagagtgtttacgcaataccgcgataatcgtagctcattactcagcgggagaggagtatatacatagtccgaactgattcataaccttgctgaaagaaaa

SEQ ID NO: 278446 - DNA, 491 bp, Glycine max
agcttcaaaattcactttcgagcgtctcgatatattacgggactcaattagacatccgagtaaaaagttattgtcgttggaattggctcagagcttcaatattcaattacgagtgtctcgatatattacgggactcaatcagacgtccgagtaaaaagttattgtcgttggaatttgctcatagcttcggcattcaattttgagcgtctctatatattacaggactcaataagacatccgactagaaagttattgtcgtttaaatttgctcaaagcttcaacattcaacttcgagcgtcttattatattataggactcaatcagacttccgagtaaaaagttattttcgtttgaatttgctcaaagcttcaacattcaacttcgagcgtctcgttatattataggactcaattagacattcgagtaaaaacttattgtcgtttgaatttgctcagagcttcaacatcaatttcgagcgtctctatatatta

SEQ ID NO: 278447 - DNA, 570 bp, Glycine max
atactcaagctttgagccacttcaaacgacattaactttttactcggatgtcttattgagtcccttaatatattgagacgcttgaaattttatgttgaagctcttagccaattcaaacgacaataactttttactcggatgtccgattcagtgacgtaatatatcgggacactcgaaattgaatgttgaaactttgagccaattcaaacgatgtctgattgagtcccgaaatgtatcaagacgctcgaaattgaatgttgatgctttgagcaaattcaaaagacaaaagctttttactaggatgtttgattgagtcccgtaatatatccagccgctcgaaattgaatgttgaagctttgagcaaattcaaacgactatatttttttactcggatgtctgattgagtcccgtaatatatcgagacgctcgaaattgaatgttgaacctctgagccaattcaaacgacaataactttttactcggatgtctgattgagtcccgcaatatatcgagatgcttggaattgaatgttgaagctttgagacaattcagacgacaataactttttac

SEQ ID NO: 278448 - DNA, 451 bp, Glycine max
agcttggctgaaatggtacttggctgtttcatctttatctcttaattactatctaatcattatttgattagatagtaattagtgatttagtccttattacacattatttgattgatactatgtaatgaatactgatcccatttactcgttataaataaaggcttggtgtggccatccaagacacaacattacagaaaaacactgttataggtagcataaaataaagacttttgaggggtactaaggactaactcaaggtgttgtaagtgctcttgccatgtcttgctatatataagtgtgttataaaaaaacaccaaaacaaatgtactaagatacagctgcaagcgtgagttcattgtacattgaaatgtggcaaagacattggttatagcccaaaaggaataaccaagaactcaacaacaagttccgaatgagcttcattcccaacaca

SEQ ID NO: 278449 - DNA, 651 bp, Glycine max
  unsure (1)..(651): unsure at all n locations
tggaacatatatactgaatcctagttcctcttaaggacttatttagaatatttgccggttggtcattagaattaatgaactcagtgataatctccttggacaatagtttctctcgaatgaaatgacaatcaatctctgtgtttagtcctcttatgaaagactgaatttgaggcaatgtgaagagctgcctgattatcacagtataacttcatttgcacaacttcacaaaatcccaactcttggagaaattgtttaatccacataagttcgcatgtaaccatagtcatagatcgatattcagcctctgcactggatcgagcaacaatagtttgtttcttgttcttccaagagataatatttcctccaataaaaacacaatatcctgaggtagatcttctgtctatgggacaaccagtccaatctgcatcacaatatccagagacttgagtgttacccttgttttcatacaacaatccttgtcctagagccttctttacatatctgagaatacgcatgacgacattccaatgatcaacatgaggattntgcataaattggttaacaaccccaacaacaaaagaaatattangtcttgtaatgtaagataagtgagttttcccacaagtctcttatatctctcgggtttgatct

SEQ ID NO: 278450 - DNA, 389 bp, Glycine max
tgccatttttgttttaagagtagtgtcccactgcaaaaactaggtgtttgccttcgcaggaaatggccccgaggaagcttgcctcaaagaggtccaggaaggacaaggcagccggaggaactaatttccgctccggagtatgacagtcaccgctttaagagcgctgaacaccaacagcgctttgaggccattaagggatggtcgtttctccgggagcgacgcgtccagctcaaggacgacgagtatgctgatttccaggaggaaataagacgccggcggtgggcatcactggttactcccatggccaactttgatccagaaatactctttgagttttatgccaatgcttggccaacagaagagggcgtgcgtgacatgagatcctgggt

SEQ ID NO: 278451 - DNA, 639 bp, Glycine max
  unsure (1)..(639): unsure at all n locations
tgtaggattatggggtacccgtcatatgtggtactaggtggcgatcaggcgatggtgcaaatcaactctcccacatccacaaatcaaacatgaacccaccatccccagttgcccaccttcaactgagctcatgtacccccacgtagcccttatcctcgttcctctcagcaccgggtccccatcaacccctccaagcttccacaacatccaagcaattcaatatgtaaacatcataaactatccaaaaccaagaaaacagggcataggcagaaaactttgcccaaaacacattccaatacgacagctttctctacttaaataccccagtaacattttcttcgttccgattcgttaaccgttggatcgacttgaaaattttactggagatccctagtacataaatctacattttgaccgctgggatctactagaaatgtccagaacccaatatgtaataccctttccacaaccagcaatacacaaacattttatgcacaagagccaaattctgctgcacaaaatttgacagctttttgctgcacaaattaggcagatttcgaaatccctcttgccctcatccaaatttgccanattgggatctacaagtccctaatcatgtataaatcacatctaaaccaa

SEQ ID NO: 278452 - DNA, 470 bp, Glycine max
agcttatcgatgttgggcaagggatatgcgttcttggggcatgacttgttaaggtaggtgtagtcagtgcacatatgccatttgccattggccttttctaccatgacaatgttggctagccaagttgaatatctgaccttctaataaactaagccttgagtaacttgtcaatctcttgtctgaccaccttttgtcgctcttctcccatcttttttttttcttttgtgagactagtttggtcagaggatagatggccaatttgtggcatatgatgctagcatgcatacttggcatattagacaactgtcatgcaaatagatttgtgtttcttcgtaagacttctgctacatgtttgtacttgtcgctaatgaagtccttgctgagctaaatacactacccaggtttgggtccaagtgtaacttgacaagctctttgattgttttgggcctttataaatatgtcatcacgca

SEQ ID NO: 278453 - DNA, 529 bp, Glycine max
tatcactgcctcacgaatgcccaccctggtctaaatggtacgtgatagaacatgcataatcacatagaaggtggtttctagtagaagaaaaaatgtaatccaagtaagtgcaattggtttatctggagctacagaggggtggcactgaatcatgcagactgccttctgttatagcgattaattgaagttttctttcatgccctgaacgtgaaatacagtgggtcttataatacttttataatattatgccatgtgagtataatgacaaccttttcatatcctttcagtggtttcggtcatgtcatttaaagttttatttgaaaagaaaatttataaaattgtttttatagagaaggaactatattggaattatacattaatgtgggattttgttaattaccaaagatgaaatctatggagtttgtaattctaaattatatggtttattgatataacgatgctatgaaatatttatatttggatttaataaaactgttaattataagatatatatatatatatgaattat

SEQ ID NO: 278454 - DNA, 590 bp, Glycine max
  unsure (1)..(590): unsure at all n locations
agcttagactatattctagaatcttgagcctttgttctcaatgattaagttggtcttatcatagaggtggcctttatgctttcttcaaatattgagaatccattttgtaagtacaatgtttttcctaaagatatgatcaaggcttcacatcaataatgcggacttatcatttactaaaagtactaggattccagacaaggaaaaattaccaccatatacatcttgtgtaacacccaaattttgcataatataaattaaaaaaggttctatttaaaaataaatacagttttaggaaaataatgagattttcgtaattaaataaataagacaaataattttattaattaaaataatgaatttaaggttaataaaataattatatgttcttataaaaaaatatgaatattttatttatttatttgatacggagtaaaatatatttcttttataaaatattaaaataaggaaaatagagaaaataatacgttgagagtataatagttctaaataagatatactangtcagttttacatttaccatatggctctacgctctatcatggtctcaaattcatttttcctacccccct

SEQ ID NO: 278455 - DNA, 500 bp, Glycine max
taatttacttacactaatattcaaatattaaacagggaataaccataattatcctagatttaacttcaattaacctaaacatagtcgaaatgaaaaaacacaaagattcttacctaaaacctacaacggaaaaaaaatccaaataggttaaagcaaaaaatgagctcatttgaacactataaattatattaaacaaagatattttttctaacaatgtttcaaacctttatccaacatattgttattggatacttgggaaaatggcaataaaggagagaaataaaacataaagaaattgaattaaatgagagagaagaaaatgtatgtatctaacatgcaacaacagttagttaagatgaagagtatgcatacaaatcaatggaagctcatagagaatccagaggacatgggcgtttcaaacttcggcactaacccgaaccctatggtgaaatacttcgtgaagttcatgtggtaatactccggtgtgtcgatggcgcatg

SEQ ID NO: 278456 - DNA, 469 bp, Glycine max
  unsure (1)..(469): unsure at all n locations
agcttataagaacaaaattgccttaatcatttttaaatatgcatgtgaattaggacgcatcaacaagaatcaagccaaggctattgtgcaagcaatcaatggggcaaaacataccaaatgattataatgatggatggctcaaattctcacaaaggtaaaatcatcactttcaaattgagctttcaaaactatcatgacatgtagagaagaatcaaggatttcaagtcacaaaatgtcaagaacttttattttcaaaacaattgcccatttttttgaacatatcctataattcaaagaaaaacatgcaaagtcatacgtgcacacgaaattgacccaaaatattaaactgaaaatccgacgaaactaacaacattaacaaattaacacaactaacaaattaacaaaaccaacaaaactagcaaaaccaaagaacactcccncccccccccaatacttaaacaacacattg

SEQ ID NO: 278457 - DNA, 555 bp, Glycine max
  unsure (1)..(555): unsure at all n locations
tgtaattatttgttggtataatttgcctgttccattaggctcttaatgtctttagaggttacttcctcgttgacatcataagccagccaatagaagaagattttcaagatctcttgtttgaagcaatcaattccatacctgacccccaagaaaagaaggtttttctggaaaaactcaagaaaacattagaggtaaaacctagacaaaaggattttatcacaaacaacaaatttgatgtaagtaacatactcaagagattagaaaattcttcaaccaaaccaacgacaatccaagatctccaaacagagataaacaatctaaaaagaaaggtaaaagaatttcgtcaacaacaagaaattcatcagatcattctttctcagcttgagggagatagtgattctgagagtgccaacaacagtgaggaaaaccaaccagaaaatttagaagatgatatgtntatgggattaatcaacaagattaaaatccaaaaattctacataaacataaaaataattattaatgatttcgttttagaaacaatggccctatttgaca

SEQ ID NO: 278458 - DNA, 356 bp, Glycine max
tactctagctgcaagcttgcagcctgctgtctttttaatggaaaatagaacttttcaatctctacccataggtccaaactcgaatgggggggactcctgatccactgcacatttcatggcgcttccaagaaggggttgagagcgtgcaattacactgagtctttactgcacttaccttcactctcgaaggtggaggacacatgaacgataacgcaattaatggtgctacgaatagattgagagtggagaattgaactaatcaatgcctacccgtagctcactaacagcaaaggtgggtgactcttgaacgaccacgctattcatggggctcccaatagattgagaatggacaattg

SEQ ID NO: 278459 - DNA, 545 bp, Glycine max
gaaactcagctttaacaaatgtcttcacaaataatcatcacacagcagaaaactaacaaaactacccctcatatctcccaaaaccccatacccacgaaatttaagagagaaagaagtccacccaaacctggattttcgaagtcccactcgtagccacgcacttcacgaccccgaaaatgccctcctttcgcgatttggagcagaaatgagcaccaaaggttggagctttgttggggtttcaatggagaatggaggagaaggaaaaagcaacgtgaggaagagggagagcttctgaattttctgttttggctgagtgaggagagagaaaagctttttggtcttaaataaaaggttttcctctttttctattattttattcaagctctaccacatgtccctatttgattggagcaaaaagggcccactttctctttttgactgtgacccatactcagtcacaaaagtgagaaaaatctgacctttgaaacgctaaaatcctgcctcggtttgcgtgccgtttctctggttccaggttctcgcgtttc

SEQ ID NO: 278460 - DNA, 470 bp, Glycine max
agcttgtcaatgttgggcaagggatatctgatgtaagctccattggagcttggaggcctaagatcttcttcatcaatggattcctttgcttcttggaagatgaatggcagcggaatggagaacgaagagagaggagacgccacttcaaggagaagatgagtctagaagaagctcaccaccatagaaggccatggataagagcttggaggaagaaggatatgaatgaagggagaggaagagaacagcataaaattttgtgctctaaaagagctctgaaatctgaaatttaattttcaaatgatcaaagttccaaaaaatgcacacacatgacctctttttatagcctaagtgtcatacaaaattggagggaaatttgaatttctattgaaactttacttgaatttgaaattggatttgtggagccaaattttggagccaaaatttcactgattatgattagggaatttagc

SEQ ID NO: 278461 - DNA, 589 bp, Glycine max
  unsure (1)..(589): unsure at all n locations
tctcaaggaagttttctcaagaaagcttctcaaggaagctacctagtctataaatagaaggatgtgtaacacttgttgtaactttgatgaatgagagtcttgtgagacacaattcaaatttcaacttctctccctttttcttccttcaatttcgtgttcccccctctctctttctctccctctttcttttcctccattgaagcatcctctccaagcttcttatccaaggctcatcttggtggtgaggctccttcttccatggcttattcgctagtggatggcacctcctctcacctcttttcctttgtcttccgctgcatctccatggtggaaaatcaccattaaaggacctcactgaagctcaaagatccagcctccatagaagcttcacaagcaatcaatatattgacagattcagatatactgantttgatgactgatgctcataatgttggagaagctgaagatctaaaagatcaagatgttcaaagccatagtgcttcttctccctcaaggcaaaatgaattcagagcccantatcaattaaatgccatcaaggtggattctacatttaatgatcttttgaaca

SEQ ID NO: 278462 - DNA, 604 bp, Glycine max
  unsure (1)..(604): unsure at all n locations
agcttttgttcctttttataaaaagagaagttctgaaactcatcacgttgtctaaaaaggccttgaggtggatccaagtgctctgatcattcattagcatattcatgttttggtggaatgctccccactgtttgtttctttagggaactcaccataactaaaaaagcgcaaaggcaccccaataacacccgatccagaagtaatatggataacaaagagggagtgcaagaatagatgaaggccgacctgtcggccataaaagatcagatggcttctatcacggaggccatgctaaagattcaaaaaactatagaagataatgctacggcagccgtttccaatacatctagggaagcggaaccggttctacagcccgcaataaacttgggctgagacagaaacgcgacgggttttaatcagaagtatagacctcaagcctacccttatggtttgcctccagacttcactccccgtaccgctctagacgatatgaaccaagcccctaccttcgangggcagctaccttctcatgccactatcctcacaggaagatgatgaagggatgccatttagggcccttacttccctcaagaacggcccccat

SEQ ID NO: 278463 - DNA, 222 bp, Glycine max
ttacggacctatagaaactaagcttggcttcatatcctgatgaagatgtcctatgttctctgactggactaatacatttgctgcccaagtttcatggtcttgcagatgaagatcctcataagcatcttaccgccctccctctggtttattaattcacgaaaccagccgcgcgctttaaaaaccccaaaatgccctccctttcccaattggagccaaaatgag

SEQ ID NO: 278464 - DNA, 532 bp, Glycine max
tataacagccaagcaaaacagagcataggctgaaaactctgctcaacacgtcaaccaaaatctcagcttttctcacgtaaagaccactgtaacaatttgttcggtccaattcgttaaccgttggatctaacttcaaaattttactgtaagtttataatgcataaacctacattttgaccgttgggatctactagcaaacatccagaactcattctgcactacactttccacagccaaccactacacaagcattttactgcacttgagcaaaattctgctgcacaatttcacagcagaaattctgcataagtgcagatttccaagatcacactttctaccatccaaacttgcccaaatcaattcctaccagtgccaaatcatgtatcaatcatgtttaaaccaaattcatgctttagaagccagcatcacagaatctgggtgtccaacaacccttcattcaatggcttttctaggtttgaaaggtgaaatttataatgagggaaattcaatcaaacttttaccttacacaagt

SEQ ID NO: 278465 - DNA, 647 bp, Glycine max
  unsure (1)..(647): unsure at all n locations
tccttaataagattcctaaagaagctagagcttagctacacatacctctctaatagctaagctcacctccttgagatgagaagctagagattagctacacaccccttaaatagctaagctcaccccatgacaaaatacatgaaaatacaaaaaaaaaatccctactcaaaatgcctcgaaatacaaggctaaaaccctatactactagaatggccaaaatacaaggcccaaatgaaggaaaactgtagaagcaaagcttcatggtgaatcaagagtgattcaaagatgttttgatgataacaaagatgataacaaaagatgatgacaaaggtgatgacaaaaagctcaaaggtcaatcaaagaatgagttcaagatgttcaagatagaatcaagaacacttcaagattcaagagatcaagattcaagactcaagattcaagaatcaagaaaaggctattcaagaatcaagaaaaagcataatcaagataagtatgaaaagtttttttcaaaaactgagtagcacatgaattttttctcaaaacatgtttaccanaagagtttttactctctggtaattgattaccagattggtggtatcgattaccagtagcanaatgtttttgaaaaagtttcaaatgaatttaca

SEQ ID NO: 278466 - DNA, 486 bp, Glycine max
  unsure (1)..(486): unsure at all n locations
agctttaagaatcgttgtatctctatgaccctttaaagagaggcacgaataaccagagggatgtttaatatacaagggaacaaagaaataatgaaatacattgacagacaagaagaagtagtgttgaacacataacctctcaaatgcaagaataaagccccaagcatttggatggagttgggaagggaaaattctaagaaaattcaaaaccctgatttggaaatcactaaggggtaacatcttttaagcatggtgtcatctggagttctaaattagtggtcatatccctgtcacaaacaaaatggggattaaatttgtcaccagaatctgtaatgccctgaaattttgataattgaaaatatatgtttgatgtttttcttgtgttatttgattacttgattaatttggatgaattgaggtattgtgtgaattanccatgtattatttgcttgatgcggatgttgagttatgtggagctttattgac

SEQ ID NO: 278467 - DNA, 511 bp, Glycine max
tcaggttgctcattgactccagattgctgcaaagaaggacagagatctgtatggtgatctacagaagaacatagaccatagactcttgcaacaggtgcagatgcagatttttgattcatggcaagctgagttactaggtagaccaaggcatcaagttttccctcaagcttttttattttcagtagatgaagatgaatctatggccacctcatggactcctctaaggacaatagcatcatttcttgcggcctcagttgcttgttgtctttgttgttgctgctgctgtattggaggaggaacatatggcttgcttggaccagtagcattctggaagggagggacaagctgatgttgttgtggaggacttgtccatctcagatttggatgattcctccaacctggattgtatttgttgcttgaaaggttataattattttgttgttggtggtttttctgctgaggggatctattataaatgtttgcagcatgagcttcaggttgctcattgact

SEQ ID NO: 278468 - DNA, 493 bp, Glycine max
agcttttgttttcaatttcgaccatctcgatatattaccagactcatccggacttccgtatataaacttattgtcaattaaattttctcagagctttggatcaaaattttgagcgtctcgatatattacgggattcattcagacatccgagtaaaaaattattggcgttagaatttgatacgagcttccgttttcaatttggagcatctctcgctaaattgcgataggctatcgggcatccgagaaaaaagttattgacgtttcatatttctaagagtttccgttttcaatttggagtgtctcaatatattacgggactcatccggacatccgtgtataaagttattgacattttaatttgcgcaaagcttctagtctcaattttgagcgtttcaatatattacccgattcaatcggacatgctagtaaaaagtaattgtccgttggaatttctacgagcttccgttttcaatttggagcggattgacatttt

SEQ ID NO: 278469 - DNA, 575 bp, Glycine max
  unsure (1)..(575): unsure at all n locations
ttgagcaaattgaaatgacaataactntatacacggatgttcggttgagtcccgtaatatatcgagacgctcaaaatttagatccgaagctctgagaaaattgaattgacaataactttatacacggatgtccggttgagtcctgtaatatatcgagacgctccaaattgaaaacggaaactcttagaaaattcaaacgacaataactttttactcggatgcccgacagagtgtcgtaatttatcgagggatgctccaaattgaaaacgaacgctcgtatcatattcaaacgacaataactgtatactcggatatctgattgagtcccgtaatatatcgagacgctcaaattttagatccgaagctctgagaaaattgaattgacaataactttatacacggatgtccggttgagtcctgtaatatatcgagacgctccaaattgaaaacggaagctcgtagaaattcaaacgacaataacttttacttcgatgtccgaatgaatccgcaatatattgagacgcttcaaattgagactagaagctctgagcaaattgaaatgaccataacttttt

SEQ ID NO: 278470 - DNA, 490 bp, Glycine max
agcttatgcgcatatttccttacgaacgttcacttttttcttgacattctattaactaagaaaaatgcacccatatacaatcaaggcagcttcgttacctagattatttacatgtacttccaaggtgtatttgttacttacatcacacacatttccttggctaaatttacatacatgcatactcaaagcattttggggtaccaaaaattgcacatgtgcacatcttggtatttctaatacctgtacatgcacaaacttcatgatgaatcttgactatctacacaataaggtgctacatttcatgttcttttcaagattttgctacctaaagccgcatgcaaattcaagtatattttcctttgctgactaaaattgtattcaaattaaaaggtatatattttttttgtaatgtattttctttacataacatgcaacatttatatatatatatatatatatatacatatatatatatttatatatatatata

SEQ ID NO: 278471 - DNA, 520 bp, Glycine max
gctattgaatactcctgcttgtaccccagtcatccataaacctatttggaacatttgacattgtcataccctaatttcgtccggggattattatttgatgatatacaacctttgattggccgcttcaagatacttggcaccctttgttgcacaatatgtgaagtcccgagatgtgccgaaaatcaaaaggaagcaggcttacgcgatccgtgaaaattccgtaatgtgacagaaatcgaaaggaagtgtttttcgcaatccgtgagttttcgtaacttcttcgaaagctaaaaaagagtaaatacataatccgtaaggattcgtaaccttgcggaaggaaaataagtatcgttacgaaattcgtaaagtttcgtaacgttacggaaaaagaattacaaaaagggtaaagggggtgtatttagtaaaaaggagggtacaaatagcaatcaggcccacttgggccttccagattcttcctccagaaggctgttgcttgtggaggaagcaaccttgcttgcct

SEQ ID NO: 278472 - DNA, 550 bp, Glycine max
agcttgtaggttaagtgacagtgattgtactggagatgaagatgatcggaaaagtactagtggatttgtgtttttcatgggggaacacaaccttcacttggatgtcaaaaaattagtcgatagtcactctttcaacttgtgaggcacaatacatagcaactacttcatacatttgtcatgcactctggcttaggaatttgttaaaaaagttgggcatgtcacaagaatagccgaccaagatctttgttgatagtaagtcagccattgttcttgcaaagactccactgttccatgatcgaagcaaacatattgatacatgttaccactacataagggagtgcatatcaagaaaggatgtacatgcacaatatgtgaagtctcaagaccaagtagctgacatcttcaccaagctgctcgagtaagaagacttaatcaagttaagaagcttacttggaatggtaaatcaagtttaaggggggggtgttgaataatataaacttgatttatcccattaatcatgtgttaagtcccataagtttgtgctactact

SEQ ID NO: 278473 - DNA, 211 bp, Glycine max
ttgtatggtagaaggtgtaggacacccctatgctgcttatagcccggagaaggcctcaccttacgaccaaaagtggtacaacaaaccactgacaaagctacctaattgaagaaaggatcacacctgactaaagcccgcacaatacacttaatccatccctactcaaaatgcctttcaatacactgccttaaccctatactactagaatggc

SEQ ID NO: 278474 - DNA, 452 bp, Glycine max
agcttgatttcaaagaagggagtggaatcactactataaatataagtttctacgacacctatcctatgatggttctaagcggaccgccttagaaaataagcttgtggcattattgtaattattgtaatgaaaaatgccttttacaacacacattctaacgcgattattaacaaccgtcttataatgtgatggctaataaaatttaagacgagttttagtaaaaaatcatcttacttccgctgaaaaaaattagaaaccctagctcgcctgctggagctctgtctatcgcctccatactttacgtcgacatcaagagagaggaataaagcttagaaagaagactaatataagacaaccgcctcacacacactctgtgtacttgcacatgcaccattctcactaatctcttgggaatattcattcctgcatggagctaaccgtcgtttcttaca

SEQ ID NO: 278475 - DNA, 452 bp, Glycine max
tgagatgaggaagtgttgaagggtgaaacttcctgcttttattgctgaccacagagtggtacctggagatatgtcgcgggggtcaagagaccttggggacgtcaggtggggtgctattgcccaaaaccaagcttgaccaatcccgacccgacccgggtatagtcagtcagagagaacctgtgatgtacctaaacaggcgagctcctggcagtcatcagatagaaggaacaaagaccacgtggcaaggaggctcgcggaggctggccagctgtgaattatgtgtgatatgcggaggatggcctctggtaatcgattactaagggtgggtaatcgactacaacgcttaaaattgaagacgagaggctaagaaggtctctggtaatcgattaccaaggggtgtattctgatacgcagcttgccttagagatcgggaaacttatggagcctgtggt

SEQ ID NO: 278476 - DNA, 486 bp, Glycine max
agctttgaacaatatacttgcccttcatttaactgtctctgcgcttggcggtcacgctcaacaaagtactttcgacacctactgtacgttgatttgaccaatgctgttatgggaatgttgcgacaatccttcaaaaccttattgatacattctgagaggttggttgtcatgtggccatatcgacatccttctctatcataagccatcatccatttttcctttgaaattcgatcaatccatgtggctatggctggactcagttcacgaaatttttctaaattttgatcaaaaatgtgcttgcaaggagtgtaggctgcataaaattagttatgaataacatggataagtatatatgaaaggtaaataaatgggaccatcaaatatgaaatcttacccaatttcttcaacatggcttttttgtttgcattattgaaatttccgattgaagttgcttgctatgtgacgcacccagtatacatgataacc

SEQ ID NO: 278477 - DNA, 625 bp, Glycine max
ttgataagttagttaccatttggaagctttggaccatccgaacaatatgtcaaacatatcaataacttgatggcactttttgaattaattcattggaggtaaagatataaactttagattagacgcattataaacgaaaaacaaagaaggaaagggttcaagttattaataaacctgaggaaaaagcacctggttagtacggataaaaagagtagttgtagaaatgagaaaaaaaaagtgagggaagatcatggtagagtaattaactaaaccggccatcacaaatttagatgagagtggtttgaaaaatgcagactgtaacaaattagtgggacttaatttgaaagaaggaagaaggagacaattgtcgtctctttgtccactactccacctcagttttttggacatgtctattttgaaactacttagtaacattccctgcggaaaaagctagaagaatacggtagagaggagtatatatagaggacatgaatatttgagggagagaaggtttaatgggcagtttttgataaggtctgggcagtacgtaatggggctattttactagtttattggtactaccttaatattattaagggattaaatgatttaaatataaaatttg

SEQ ID NO: 278478 - DNA, 479 bp, Glycine max
agcttgtccctcttttccctataaatagggagatgagggaagaacaaaaacatttaaccctcctggtatctgaggatcacttgaaattagtgaaaaaatcgtttccgtgaagaaaatccaagccgaggcgcttccgtaacgtgtccgaaacatttccgtgggtgattttgtgaacattttcctccgtctttcgttcgttcttcggtcttcaaccggtaagttcccagaatggaacttttcaattcattctatgcacccttggtggtccccacttgtttcgtgtacttttattttcatttcatttacttttcgtaccccttgttgacgtgctttagtcatttatttaagtcattttctcgcctaatcaaaaaataaaatatatttacactgatcatttgaattgtaacatctgttaatttctgttaaaatgaaatccgaccgttcggtcatgtcgtaaccacattgtaaataaaaaaaga

SEQ ID NO: 278479 - DNA, 527 bp, Glycine max
  unsure (1)..(527): unsure at all n locations
ttaaaggcacaaagaatgtaactacctaaggcagttaagccttatttttggcagtttcaactgcctcgcttagcgtgttgactcgctaagcgagcacaccatgacatttgagttttcacactcatgcgcttagcgggaaaactcgctcagcccaatgccaaaaaaattgaaattccagaaaaggaattgggcttagcgcgacaagtcgcgcttagcaagttctgtagctatgattggcctgtaactctcgcttagcgggccatgggccggcttagagaattatcatgctccctgatgttgtagtgggttgcacttagcacattcttctcgcttagtgcaattccaaacccaaaagttatttgggcttagcgggctgacccgctgggcctaattctcataaatgatccaacagagaggaaatagtgcttagcgcgtctgtgcgctntgcaagatgaggctgcatgcttagcgagatgactcgcttagtctaattccagaaaatgaaatcacagagaggtttttgggct

SEQ ID NO: 278480 - DNA, 468 bp, Glycine max
agcttgggttaaacttgtttaagcgctgacttctataatatcatgttggtttctatgaacctccaagttattttcccttattactatgcttgtatgaatgttggtttaaatgagtttattacttgaaacttcaacaataaagtatacgaagacaagtaaattaaggtaaaagataggcaaaattgcgaatttggtcccccattttgtctccaattttgattttggtccctctttaaaattattgatgaattttgtcctcctattttatccaatcacgtaatcttggtcccccagtccagaattgaacgttgatcattatcaacttacgttgattgacacgtgtcaacgtctaagaggtacgtcaaatgggtcgtgatttttaattgagtgtgataaaatttttatttagggtgaccctaaaaaaaaccctaaaacctaaaagtcttataccacgaaatccctaaaacg

SEQ ID NO: 278481 - DNA, 434 bp, Glycine max
tcaaacttgcaacaaaggagttgagcaggtaaaaaagattcgtcttcaaactcttagaggtgactttgaacgtttgtttatggaggagtccgagtcaatttctaattatttttctcgagtattggtcgtagtcaatcaacttaaaagaaatggtgaagatgttgatgaggtgaaggtcatggaaaaaatacttcgaactttaaatccaagttttgacttcattgttaccaacattgaagaaaacaaggatttaaagaccatgactattgagcaactcatgggttccttacaagcatacgaagaacaacaaaagagaaaaattctacaaaaggaggctacggagcaactactacaactcaacatatatgaagcaaactatgcatattacaacagccaaagaggacgaggtcgcggccaacatcgtggacgtggac

SEQ ID NO: 278482 - DNA, 319 bp, Glycine max
actctacctgcgagctggcggcctgccagcgggaccctaacctgcatctgcttaatttttccactcaaatcatccaatggcatactcttatcatactcaaacactcatttcagctaaacaatcactgcacattatttgcatcaatacaccgagcatacgcgcttattggctcacgcacacacctttgcgcgctacattctatatacctgaaaagttgcacccgtattcaattgttgcacatacatcatctaatatactgaacacgaactaacatggtcgagatgcacctatactaaacgacccgctcctgtgcatgctc

SEQ ID NO: 278483 - DNA, 644 bp, Glycine max
tctagaaaaagctgatgcataaactaattttatgtttatggaagaactttatttcatctaaagagaccctagtgaagccagctatttatgactaaagtactattttgttcttgaatttgtaacgctctaatcggttagtccttcaaattaggtaaatttgaaaagaaaaaagaagttctaaaaacttgttcccgcgactgggaatacatcgatacatgtaaaaggacacaggcactgcatgtcagtcaaaggggccaagacgtcaagttttggactagctttgttgatggaaaaccaaattaagagtttttttttttttttttttgtattttagctaatttcagggactatatcaaattataaattcaggaataaaaatggtgatttactagataattagtaggatgtaaataattagactagtgagtatatagtcaaattagatcccatgttaggagtttgaggactaatttgactgatgaaatgcaaccttgggtgtactgttcataatttaaggactaatataagtgacccgtattttctggggactagtttgattatttacagctacttattaaatcatctcaacattttttcataaactttgtatgacatttttaaatttttaagcgacaaatcatccc

SEQ ID NO: 278484 - DNA, 377 bp, Glycine max
agcttatcttcctttgcagtatccattgctatttttctagaggagaacctggatacacaaatgatattcctttgaaggatgtttcataaacaacacctaacaaaaggcaaaaggtttcaatgagagaatttattatatacataatcgttgatcaatggcgtgtgcaccaatgtatacaagtagtaaagttaaaatgaaagtttgagtgttgagtccacaaatgcttcgtttgtacttacgtagatgaatataaaattctcaagcaataattaaattggtttagaaggttgtgaaaagaatagtaaaataatttgacatacaattaaattcaaataaacatgaaaaaaaaacaaactctcggtaaattaattaattag

SEQ ID NO: 278485 - DNA, 446 bp, Glycine max
gtatgattgcaactcaaagaaagtggtgatcagcagtgttgtaacctttgatgaaagtaaaagcctggaaagcattgctacagaaacttatccaaggcagcaggatcttaagattgaagtgaatgattccgcttcagaattagctaatgactataaagatgcagaccatgagacaatggtttaggtcaatcagaatcaagaaagggcagcaaggccaaaagaactagggtcccctcatcaagacttcaacactttgaagtatacacagaagataaggttattgatgaaggtgagttcctaccctgtgaagaagtgcatgttgcattgtttgttgatgtcgagcccctttcatttacacaagttgtcaaagagaggaaatgggtaaaagcaaagaaagaagagttgcagtcaattgaaaaaaatgggacctgagagttagtccaact

SEQ ID NO: 278486 - DNA, 569 bp, Glycine max
agcttccttggggccatttcctgcgaaggcaaacatttggaaagttagttttaccagtgggatactattcttaaaacaaaaatgacatacaacctcctcccataaatacaaacatcaatgtaaatttagagcaagcttatgcgcatatttccttacaaacgttctcttgcacaagacattctattaaccgaaaaaaatgcacccatatacaatcaaggcagcttcgttacctagattatttacacgtacttccaaggtgtatttgttacttacatcacacacctccttggctaaattcacatacatgcatactcaaagcattttggggtaccaaaaattgcacatgtgcacatcttggtatttctaatacctatacatacacaaacttcatgatgaatcttgactatctacacaataaggtgctacattttatgctctttcaagtttttgctaactaaagccgcatccaaattcaagtatattttcctttgctgactaaaaatgtattcaaattaaaagggatacaatttttggtaatgtatctttcttacataacatgcaacatattt

SEQ ID NO: 278487 - DNA, 671 bp, Glycine max
  unsure (1)..(671): unsure at all n locations
ttgagccaaaatcctgactcaccataaaccttgacccagtgtgagaatgtcaatccttaccctcggaagcaaaaaaagaatagaggggaaatttccaatcaaagaaaaagagaaggaaaatttccaatgaaagcaaaaaaagaaaagaaggaaaattccccaatcaaagagtgggagaaagcaaaaagaaaagaaaggaaaattcccaatcaaagaatgggagaaagtaaaaaaaggaagaagaagaaggaaagaaagctcctgatcaaggatcgaaagaaaacagaagaaatgtgcagagaggtctttggaccggacaatatctgaacaatacagaattgccaccaaatgaacgaaaaaagaaggaaagggaaccacgacctaaaatagtcttctccctttgattaccaaccaaaatcccgtgcgctagcgaccctttttttctcgccccgcactaaacaaaaaaaacagaaaaagaaaaagccaggaaaatcaaaagccaaaaacacacaaaagccgaaagaagagaccaccataagaacccattcccaagggaagccctattgatccatgatcacgcatgtaattnttgatttgataggaaataatttgcaaagtcaagtcatgacatatctatgggttcgaattangatgaaacacttacctgtgcg

SEQ ID NO: 278488 - DNA, 468 bp, Glycine max
ttttttgtcgatgagatggtagaaaaaaacatgggttgcctctatttttaaataaatttccgcatgcacacatattttcgtagtatttaagtaatcgtgtccgcttgaacaggaaccccctcacactattctcaaattactcccatcttgtgacccatcttattaaatggttagatcaatactccccttaattaatttgaaatcttaaatatttttttgaacccctaatcgttggattgttaacaatacttttgttatgctttaaaaattaatatcctttagaaaaaatcttgcttctaagttctgatagttacctcacctctaacttattcaacctccaaccttctatcaacatattgtgttttccccatattcattatattcgtaagtcaatttcgtacctaggccaacaatttacgccctctgtcccttctctaacaacaaaaattgcttaatcaattcgatacg

SEQ ID NO: 278489 - DNA, 666 bp, Glycine max
  unsure (1)..(666): unsure at all n locations
aaactaagctttacacagattttagtaatgacccactaacctagaattaatttaaattaatgccattaacctagggaattaaaaaaaaacttaatggctaagtgtaactgaaattgtggcaaccaaaggtcacccccaacagccaacaagtcagccaccatttggtctcccaaaaggctgatgcctaggttgccaattgggcccttattacaacttgaactaaacctactaaagctcttttagttgattaacccaaaacatatttttggtcagccaactttataaggattgggccattatttagacaaactaaacactctaaaattgagacaaagtggtgccatttagtcctcctccatttgggccatgatacaactcacaaccttggacttttctccttgaaacttgggcttgtattcaaatagtatggacagcacttgttgaagagcttccttggctttccttgctctagcccttgtcataggccctccaagtccttcaagtggatccttgcccttgctcttggtcatgtcctcatcattctctccctcttgagaaggatttgtcctcaaatcggattctccatctgcatcnaaaagagataaatcagagacattgaaggtggactaacattatactcaccgggcagctcaacttttaagcatt

SEQ ID NO: 278490 - DNA, 442 bp, Glycine max
ggagaaccaagccaatcggaatgctatactatttatatatgggaatataggtaacaatggcggttatgacggaccgaggcataaccgggttgagggagtaaagctcaatgttcctcccttcaaaggtataagtgatccagatgcctacctgtactgggaaatgaagactgagcacgtatttgcctgcaatgactacactgatgcgcataaagtcaagctagcagcagctgaattctccgactatgcccttgtttggtggcataaataccaaatagaaatgttgagagaggaacggcgagaggtatatacatggactgagatgaaaagggtgatgagaaaaaggtatgtgcccactatctataacaaaaccatgcgacagaaacttcaaaggctgtcccaagggaatttaaccgtggaatgattttaataaagaaatggaaat

SEQ ID NO: 278491 - DNA, 584 bp, Glycine max
ttttttgttcgatgttgcctaaaaaatttacaatgcagttcggctaggtttcttcgtgcgaactgaaccgaagttgtgtttcggccgactggcatgttctcattttgtcggccaggaaaacattagcccacctcggcataaaaaacatgattcaccgatatttgacaggaaaagaaaaatgctagccgacgtcggccaggaaagatgaccgaccgaggtctgaaaaagaagcatgaccggatgactccggtcgaacatttcctaacagatatcatccaagtattattcagggattgaatagaaaaaacaatagccgacatcggtagttaaatagccgtgactgatatttttcggccgacattgcgcaatttcttttacaaacgctggccgttacggtaaaggatgttttgctgatttgggtgtcgcctataaaattttcaatgtaggtcggctaggttttttcgtgcgagcttcaccgaagctgtttttcagccgacaccggcatgttctcatttactctgccaggaaaacattaccccaccttggcacaaaatctttattctccgatactgattggaaaaaaa

SEQ ID NO: 278492 - DNA, 476 bp, Glycine max
agctttataagtgcgggttcgggagacaaaggtcattcgttcgcgatatgcgaagatgatattccgagtactttggatttggtacgaccatgctctcctgatttccagctgggaaattggcgagtggaggaacgccccggcatttacgcaacaagcataatgtaaacctttacggttttaaaaagctctatagttgggcctaggctttagagttttcattttgttaaggctttgtgtcttttgtttttgaatttataatacaaggatctttcttcatctgttcctggtctctacccattctcattcatttgcatgtttacttctttttctaaaacggcagattcgatgacgagtcccccgaaggtactaatacctgtgacccgtctatcaacttcgagcaagaaatgaatcatacggaagatgaaggagatgaggatgtgggactttcttctgaactagaaagaatggtcgcccat

SEQ ID NO: 278493 - DNA, 492 bp, Glycine max
ttcaagaaattcaaatggtcataggttatcacacggaggtcctattcaggaacatcaactatttagccgatcaaaattaaacgacggaagctctcgagaaattgaaattgtcataacttttcacacggaggtccgattcaggcacatcacatatggagacgcccgaaattgaaccacggaagatctcgagaaattcaaatggtcataacttttcacacggaggtccgattcaggcgcatcatatatcgagacggtcgaaattgaactacggaagctctcgagatattaaaatggtcataacttttcactcggatgtccgattcaagcacattacatatggagacgcccgaaattgacccaccgaagatctcgagaaattcaaatggtcatagcttttacacggaggtccgattcaggcgcatcatatatcgagacgctcgaaattgaacaacggaagatcttgagaaattgaaattgtcttaacttttcact

SEQ ID NO: 278494 - DNA, 627 bp, Glycine max
agcttgcttgcggggcttctatggaggctggatctttgagctttaatgaggtcctttaatggtgattttccaccatggagatgcagcggaagacaacgtagaagaggtgagaggaggcgccatccactagggaataagccatggaagaaggagcttcaccaccaagatgagccttggataagaagcttggaaggatgcttcaatggaggaaaagaaagagggagagaaagagagaggggggagcacgaaattgaaggaataaaagagggagagaagtggaactttgaagtatgtctcacaagactctcattcatcaaagatacaacaagtgttacacatgtttctatttatagactaggtagcttccttgagaagcttctttgagaaaacttccttgagaagctagagcttagctacacacgccccactaataactaagctcacctccttgagaagcttccttgaaaagattcctaaagaagctagagcttagctacacacacctctctgatagctaagctcacctccttgagatgagaagcttgaacttatctacacacccccttatatagctaagctcacccccatggacaaatacatgaaaattacaaaaaagtcccttctaca

SEQ ID NO: 278495 - DNA, 493 bp, Glycine max
gtgttctttttataaatgagaagttctggactcattacgttacctaaaaacctttgggtggatccaagtgcaccgatcattcatttgcatattcattttttggtggcatactcacctttgtttatttctttaggaaattcatcataactaagaaaacaccaaggcacccctataacactcgatccagaaaaaatggataatgaagagggcgtgcaggaacagatgaaggccgatctatcggccttaaaagatcaaatggcttccatctcgaaggtcatgttaaaactccagaaaaccatagaggacaaagccacggcaaccgcctccagtacggttagggaagcggagccggtgctgcaacccactttaaatccgggccgagatagaaacacagccgtgtttggtcgaaggtatagtccacaagcttatccttatggcttgccttcggacttcactccccgtgccactctggaagattaagccaagcccctac

SEQ ID NO: 278496 - DNA, 156 bp, Glycine max
ataagctgaccatacggccacttttaaataaaactggtgagactttccgaaggctggctgaaacaaaaacatatttctaataaccttttagggaaacaggcgcagtttccccggacacgcccttcttgccaaaaattcgcatatatgtgcggaaag

SEQ ID NO: 278497 - DNA, 196 bp, Glycine max
  unsure (1)..(196): unsure at all n locations
tcccccctgggaaacctttctttaacacggtcttagaaagactcttatccatgacaacaagacggatcgccttaacgagaaattccataatagcgaaacacatagtcttcgcccctaactgtcttttacctgggggaaccgaaaccgtaaggggaatctctcttatcgctaacccggggtgccattaaacggcccn

SEQ ID NO: 278498 - DNA, 381 bp, Glycine max
tagcttatgagttaaataattaaatttatatatttaagaaaatcttttaaaaaaagatatgtgtgagagtattattgtagaagaaaagagaaaattattcatcccctcctcatctaaattatacatcttctaggatatggctcaccaaaacagtatttgaaagctcgtcatatatctgtaaagaagatgctgatgctggctagcgtgtgacaattaacaaagtgtggtatcgcatgccaaagtttatatgagctatctagatgtaacattaagaatttaacagctgagactttttactttagatgggatacattactgaataagcaatcgatgacgcgacctatataatgttacaagtgacacagaaacattaaacactac

SEQ ID NO: 278499 - DNA, 593 bp, Glycine max
  unsure (1)..(593): unsure at all n locations
tgggcttgtcatctgttgagatggtgatttcatgcatggtcctacatcatttttagtgacatagatgattaacatttcaaaataaacatcaaaattaaattaaacaatttgactaggaactttatacaccatatgttataaaggctccacacatcatacaagtttagataggcatacttgataagttcttaaatctgtattttacatgattcaccaaaggaaataagcaaagatcggacagggatacaaataataataataatatcagcacctcaacctcaagaaagtcaaaaaagtaataacatgattaaaaaaaaaggaagctaaaagtatcaaagaccagttgggttacatattcagatccacccccatataaaaagcaaagcatgagtaatttagattctaggtcactattcaaagaaattttccaagcctagttataaaaatagcttgcatcagaagtttcaccgtgaatattgaacattggcatgtacagattgntcctcttctatgtcttcttcagaattatttgcttcaagagccagtgcttcaagattangagaagaaccanaagcatgaggtggatgtatact

SEQ ID NO: 278500 - DNA, 488 bp, Glycine max
agcttcacaaccttagtagcaattgctacaagactcacataacacctgctatgttcactttgaacttcagaagcaataatcctttaattattcttctaagttcttccctctaatctaaagggatggacactacaccttttgagatgctttctattgagacttctggcacgaacatgtttatagacactcttacatatttaattttactttgactccatctagagtgttttggctaaggaagtttcttgttgttggagttagccctagtgaccaatccatttcagactatatttgttatcgtgatattgttttatatattttatatacatgagacatgtcaactattatgttattagttttatagcataataatgtcctaatgataggtgatttcttcaatggtaaatcaagtgagacttgattgtgagatatattgaacaatgaaacattgttccaaaagtatctatagtcatgtactattgttgact

SEQ ID NO: 278501 - DNA, 582 bp, Glycine max
tgttgtcctcattagtggacgcctctattaaacaagtggcctcaataacttaagaggagggaggggggtgaattaagtttaaaaatttctccctaatcaaattttaattctctcttgaaatagaatatgcacacttaatatgaatgaagtaaagagctattcaaatgatacttctttaaaataagcaaagcaaaaataaaatgtaataaattaaagaagtttagggaagagagaaatgcaaactcagtttttatactggttcggccacgccctatgcctacgtccagtcctcaagcaacctgcttgagattttcactaacttgtaaattccttttacaaattctgaaccccacatggatacccttttcttgtgttcagagatccttacaaatcaagatacccactgtctcttgaacaacagttgtttgctttaaagtaagaagaatatttctctcttgtagagaagaatgttacaagatgaagatcttattagaattcttattgattttgcaagtgtttgaccaatgctttcttttgagaagaaaaaacaattattgttctgaaaaactttcgagaaatttg

SEQ ID NO: 278502 - DNA, 417 bp, Glycine max
agcttgcaacacgcgcgctaagcccgcgatctatcagaagcgtgcgctaagcctgtaacatgcacgctaagcgcgcgatctacacgcgctgagcgagggggtgtcgcgctgagcgcgcctacgaaggcccaaaacccacttcagcagctataaatagagagccagtccaagggacagaagacaccacgacagaaccccctctcctaggggtttcacttactccctttctttctttcacccccttctcattgtaaagccctcaatgaccatgagtggctaaacccttagttagggcctgacaggcctagaagccaatgtgatgtatgatgtactcttcactatttatcaatgcaataccaggggtttctttcctattgtcttttctgtttttagcttgcatactcatctttatattct

SEQ ID NO: 278503 - DNA, 621 bp, Glycine max
  unsure (1)..(621): unsure at all n locations
tcttgcagaggctgaagaatcagctctcggtgaaatcctttttatgatttcgttctgttttaggtcgaagaagttggttgaactgatgaagatgtgtagagatctgaggcacaaggtcccagagatattggaggtggaggtggatccaaagggagcaccaaggattcaagaggcgataatgaagctctacgtttcaaagagcgcgttcgagaagattcacttgttgcaggcaatgcatcttagaatttcctctctataaacataatttagaattccaaaattttagttaattaaaaattatctattaaaatactgaaatttcaaatttcagtgaacaagacatccaaaagaaaattttagacttagaaattttaaatcctctaaaaaattactttctttgctttaaatactccatccaaacagattctgaagagaaaaaaaacattttcttaaagtatcttttgtttgaaattaattttaaaaataaaaaagaataattaaaaatagaatttcaattaattgaaatatatttttaaaataatatcattaaatagggtgaaaaatggttaaatttatttatatttaagtttaanaattacttttggtttatttaagtcaaga

SEQ ID NO: 278504 - DNA, 465 bp, Glycine max
agcttcaacatcagaccacttccagggtgctggaactacttcacatggacttgatggggcctatgcaggttgaaagccttggaggaaagaggtatgcctatgttgttgtggatgatttcttcagatttacctgggtcaactttatcagagagaaatcagaaacctttggagtattcaaagagttgagtctaagacttcaaagagaaaaggattgtgtcatcaagagaatcaggagtgaccatgacagagaatttgaaaacagcaggttcactgaattctgcacatctgaaggcatcactcatgagttctctgcagccattacaccacaacagaatggcataattgaaaggaaaaacaggactctgcaagaggctgctagggtcatgcttcatgccaaagaactttcctataatctctgggctgaagccatgaacacagcatgctacatccacaacagagtcacac

SEQ ID NO: 278505 - DNA, 577 bp, Glycine max
  unsure (1)..(577): unsure at all n locations
cttccatcacaaggtatgcaatcctaatttaatcctccattgtttgattttagcaagacaagcatccataagcaaggagatagtgaaaggatggccaaattcgagaaatacatggagaataatgcagagaaaaaggaagaaccacctattgaaaatctcacatgggaatgtgctacatcaagtaagacccacaagacatttggaggacaagcaacgttttaccatcctcatcatgagaaccgttcatgtaaccattgatgttcgtaaaggagtttacacactaaaagagggcaagaaataaatgttctacaacattcaaggcattgaagattttcccaatgaatcggctcactaacaacaccatcatactacgccttgacaatccacatgcatacaccaagctattgatgttaagaaagtgcttattgggaggcaacccaactttctaagtattactttntacattatattcatttaggatagttttttagatttaangtttggagttcaaaaaaatgatcactcagtagcatggccgctacttgcatttttgagttttggtcatcatgtgcagcat

SEQ ID NO: 278506 - DNA, 417 bp, Glycine max
agctttataagaaaactattataatctatatataagggctaacattttaatcccaaaaataattaaattatggcacttatcatgtacccattaatgtcccaaccactactagaaaaaacattttctatgacaacaaaacgacgacggttcctcaagaacctgcttaatatgtaaggtagtgacaattttgtaaatatggggtcttagaaactacccttccatgacggtttcgcaaaaattgtcttaaaagactgtcattctaagacacttttgtaaaaatcgtcttacaagagagcatgttcttaattgttatatctccctctcgtgcgcttaaatgtttgctcttgctctcacactctctctcactcttcgtaagtgagagccacagagacctatcactctttccctctttgcctt

SEQ ID NO: 278507 - DNA, 492 bp, Glycine max
  unsure (1)..(492): unsure at all n locations
tgtaatcgattacacacatactgtaatcgattaccagaggagtttttcaaaaaacattctcaacagtcacatctttttatctgattcttaagtggccatcaaaagcttatatatatgtgactagagacacgaatttaacaagagtttttaagaacaaaaaggtcttatcctcttaaaaagcaaaatcattttaccctcttacaaattccttggccaaaactcttgtgattcaataaggaattatttgagtgctcaaattgttcaatctatctctttcaagagagatttcttcttttcttcttcttcattctgaaaagggattaagagaccgagggtctcttgttgtgaaagaattctaaacacaaaggaagggttgtccttgtgtgtttagaacttgtaaaaggaatttacaagatagtggaactctcaagcgggttgcttggggactggacgtangcacaagggtgtggctgaaccagtataaatctgagt

SEQ ID NO: 278508 - DNA, 480 bp, Glycine max
agcttgtaagagtataactctattatttttaagctacctatggttagtctgttatggttaggttaactgtgttagttagttagttagaatctctgtatgcataaatacagttgtaaacagagattcagtaactaattgtaaaatctcttgtcataataatggatctattttctctctcttatatgttcctctcccaaagctttataaactcaaattaagtcatatctctagttcatgttggattaaacctccacacttgaggtgcaattaaggacggccccaaagaagctgcagctaaggcaggctaggggtgacagcaattaaggcacattccaacaatttctaaagcattagtcttagaatttggctttggacctaactcgacccaacaaaaccaacttgtaaggtgagagttgtctcctacttatatacactacttttggcatatcatgagttatgtgggactaaccaacccccttg

SEQ ID NO: 278509 - DNA, 446 bp, Glycine max
tcacaaaattcttattcaatgcaattccagcctttgcatttaaaatacttgatctagaacaataatttaaaaaaaaggttaacagaccaatcactaacaagaaaatgaataatgtcaagttgtcaacttaaaaaaggcaattgtgttcaataactttacagctgttaacataatttatacctgttatcaccaacaaagtcggtggagaccacatcatcttcagtgtaaccaagaattcccttcaacttgccctctgattcctccctgagaaagacaacattatataagacaatacaattgagaaggaccaatcccaaaatggaggcctttattaataacaagtaatgaaaatttgctttaagacccaataatacacaacatatatcattagaggagaatcaaagaattctgtcattacttgatagcatttttaatttcatcatatg

SEQ ID NO: 278510 - DNA, 517 bp, Glycine max
agcttgccgcccagcttgcccaggcgagcaatgttgcttcctgcagaagcaacagccttttggaggaatcttctggagggcccaagtgggccagattgctattcgtaccccctttttactaaatgcacccccttctattttttttggtaattctttttccgtaactgtcgcaacctacccttcggcgggagggcgacgcgtgactcgcgggatgcgtgttccacgaaaggaatacgcgcggagtcgccaccaacgtttatttgaggaaaacgtctgaaaaaccggaaaagacgcgatctacgaacttttaagttgaaaggttcgggagttgtatttacgcacggggaaggtattagcaccccacacgcccgttccaagggacggcagcctttaatcgaatgtgcaaacatgactttgatttttttgatcccttttatgttcttatatcctttataccttttttatattattttcttttttgtgggcgacaagggtgtttcccttcgctcctacgtat

SEQ ID NO: 278511 - DNA, 561 bp, Glycine max
  unsure (1)..(561): unsure at all n locations
ttatgtcttttgttcctaaatttataatataaagatctttcttcgtctgttcctacgtctctacccattctcattcatttgcatgtattttttttctttacgtttaaaacgccagatccgacgacgagtccctcgaaggtactaatacctgggacccgaccatcgattttgagcaagaaacggatcagacgaagagtgaagaggacgaggatgtgggacttcccccggagttggagaagatagtcgcccatgaggaccaagaaatggggcctcatcaagaagagacgaaactagtggacttaggaaccggcaatgggaaaaaggaagtaaagataggcatgggtatgaccacccccatccatgaagaactgacagccctgctaaaagactaccaagacgtctttgcttggtcgtaccaagatatgcccggtttgagttctgacattgtacaacatanattacctctaaatctcgagtgttccccgataaaacaaaaactgaggaggatgangccngagacatccttgaaaatataagaagaggtaaataaacaatttgacg

SEQ ID NO: 278512 - DNA, 1154 bp, Glycine max
  unsure (1)..(1154): unsure at all n locations
tgcttatcagncgtatntntncgtgtncatttatntantactacactctcatgtctaanagtgcgtataaagtgcagacactcgtccacattacntcacataatctctnnatctctntacatatnactcatccnncacgataaaaannnanannnaaatgtaaaanntttgattgtaccaatcggtttcgtcancngacccccagncgttantcattaataagaagtaccctgaccctcgcgcatcggcccatggccatangncnttcantnnaanantnctatatctgtatcagtaggtgatgccagtatattgttattgactagtcaaacnttacagtacaaatatgactatcgtagactcacgatagccgaccgatcngtccacatctatctaatacatctctaatgttgactatctacacantaagtactacctaatactaangtagtagtgaatactcacttagctaataatcagtcaatcgtnacttttccctcaatattcatcactcatactaccgacaacagtaatatagtatttgtaatattgctacctgacaaacaacgatctcaaacaatgcgagatatgttcgtaccacaatagtgacgagcgcgagacgttcttcaaatagaatatgagtagtaataatactaggacagtcgaatctggacacaggtgtactatacgaaatgtagaactgtttgcctatgacaggatagtatagaaatccgttgacaactattgcttaaatattgttcattatataaaaaagagacagatgctcaagtattcattattgtgagacggatagatcacaagagatttatttatatcaagtaacaaatcttcaagcgatccaccaagccctgaaaaccccacaaagataaacgagtgtttgatctccgccccacacgatattagtcggactttctcacgaattttgtaagactttttcacaactcggtacgattttataaagttattctgaaataaaaaaagaaacgccttacctactaaaaaattttcagaaaaagaacataagagctcactccccctaaggggaaaccctctcgcttagtcctcaattaaaaaaggcccaattttttggattccacccaacggggaacaccttatttcatacccgcatctcg

SEQ ID NO: 278513 - DNA, 652 bp, Glycine max
  unsure (1)..(652): unsure at all n locations
tgcacttattagcccttatatatatataaactaaaaattgtatttttgaaatgcaaaaagtaattaaaggtacgtggagcatagacagagaccatgatcctcataattccatgaaaacgtgggggagtggatatatatatattaatctccccatatacgagattaatctttcttaaaatataaaaaatattaaaataaattttattttttaatccctctctttacataattaacttaaaatacttatattgaataagagcatttttagttgttattctttaattaaaatatttttaccttcttttttatgagaacatttttaaatatatttttgaaacattttatctcttttaatattaattttatatgttttaataataataaaatttttatatttaagaatattacatattttatttatatgaaataaagattcatcttgttgaatgcatagactaacatattagttaaagtattaatcgtatataattattttatttttctgttataataacatatatgaacggaggtttttctatggtcaagtcaagcacatattttcctctagttgggatttgaacactgcttgatgtagaactatcaataagaaatttctagagctcanagaaacacggacattttattttattga

SEQ ID NO: 278514 - DNA, 407 bp, Glycine max
agctttgagcaaattcaaacgacaataaccttttactctgatgtctgattgagtcccgtaatatatcgagacgctcgaaattgaatgttgaagctcagagcaaattcaaacgaccataacttttttctcggatgtttgattgagtcccgtaatatatcgagacgctggaaattgaatgtttaagctatgagcaaattcaaacgacaataactttttattcggatgtctgattgagtccagtaatatatcgagacgctcgaaattgaatgttgaaactttgagcgcattcaaacgacaataactttgtactcggatgtctgattgaatgacgtaatatatcgagacgctctaaattgaatgttgaacctctgagccaattcaaacgaccaaaactttttactcggatg

SEQ ID NO: 278515 - DNA, 441 bp, Glycine max
taaacattcaatttcgagcgtctcgatatattacgggactcatatcttacatccgagtaaaaatttattgtcgtttgaattggctcagaggttcaacattcaattttgagcgtctcgatatattacgggactcaataagacatccgagtaaaaagttattgtcgtttgaattagctcagagctttaacattcaatttcgagcgtctcgatatattacgggactcaatcagacatccgagtaaaaagatattgtcttttgaattggctcacaggttcaacattcaatttcgagcgtctcgatatattatgggactcaatcagacatgcgagtaaaaagttaatgccggttgaattggctcataagttcaacattgaatttcgagcgtctcgatatattacgggactcaatcagacatcccagtaaaaagttattgtcctttg

SEQ ID NO: 278516 - DNA, 521 bp, Glycine max
agctttgaatgcactattcaatggagttgacaagaacatcttcagactgatcaacacttgcacagtggccaaagatgcatgggagatcctgaaaatcactcatgaaggaacctccaaagtgaagatgtccagattgcaactcttggctacaaaattcgaaaatctgaagatgaaggaggaagagtgtattcatgacttccacatgaacattcttgaaattgccaatgcttgcactgccttgggagagaggataacagatgaaaagctggtgagaaagatcctcagatccttgcctaagagatttgacatgaaagtcactgcaatagaggaggcccaagacatttgcaacatgagagttgatgaactcattggttctcttcaaacctttgagctaggactctcggatagggctgaaaagaagagcaagaatctagctttcgtgtccaatgatgaaggagaagaagatgagtttgacctggatactgatgaaagtctgacaaatgcagttgtgcttcttggaa

SEQ ID NO: 278517 - DNA, 471 bp, Glycine max
tgacttggcgatttgattttagccttagtttcactttagttattagtcaattcaattaagaatgagaaatcccaaagagaaaatgtccgattgatttttgtgcttcattttactaaaagatatatttttttattattatattattattttacctctttttttttatttccaacgtggttatggcacgaccaaacggtgggaattcattttaacaaaaattaacgaatactacaattcaaatgatcggtggaaatttatttttttagattaggcgcgaaatgacttaaataaatgactgaagcacgtcaaaaggtggtacgaaaagaaaatgaaacgagaataaaagtacacaaaaaaaatggggaccaccacgggtacagagaatgaattgaaaaagcttgattcggaaacttacccgttgaagaatgaagaacggatgaaaagcggtgaataacggaggaaaaccttcac

SEQ ID NO: 278518 - DNA, 459 bp, Glycine max
gcttatacattctaagattttaattcattcttcttcacattggatgagcctgttcttgcaataaaagtctacattttcagattctttccctgccaggttctatttgtcatattgagcctctctttatctaaaatttatctacttcaagttggctaagcaatgttgttattaattccattatgcaaaacaaaaattgaaaactagtttttacccttttcctttaataaaacgaaatagagaagcaccaacctgctcaacaaacacaaaattaaaacagatgaaaaggctgaagcttctggctgttcaatgccatgcataatcagagaagagaaccaaaaggaagtatagttctttattaaaacaaaacaagacaaactatagatcaaaattaaggacgcggaaagatagtacaataaaaaatttctgaaaaagcaacaagtgataaccatactttccatt

SEQ ID NO: 278519 - DNA, 438 bp, Glycine max
  unsure (1)..(438): unsure at all n locations
cttcttcatcctccattgaaactccattaaagctccaacctttggtgcccatttctgctccaaatcgcgaaaggaaggcattttcggagtcgtgaagcgcatctctacgtgtgggacctcgaaatttcaggtttgggtagacttctttctcacttgattttcgtgggtattgggtttttgggagatatgatgggtagttttgctaggtttctgcttcatgatagctatttgtgaagaaatttgttgaaagcatgttgaacttgccatgtttggatgagttaagcttacccattcagttttagggtttttatgatgatgcttgtgatgtttatgtgctgaaattgcttatggaaaactgttaaagatgaagggtagagttaacctagggttacaaagtgagaatatgggtgtatgagtggaanaagagtgagtttttga

SEQ ID NO: 278520 - DNA, 528 bp, Glycine max
gcaagctttgaatgctgtatataatggagttgactataatatcttcagactgatcaacacatgcgcagtggccaaagatgcatgggagatcctgaagaccactcatgaaggaacctccaaagtgaccatgtccagattgcaactcttggctacaaaattcgaaaatctgaaaatgaaggaggaagaatgtattcatgacttccacatgaacattcttgaaattgccaatgcttgcactgccttgggagagagaatgacagatgaaaagctggtgagaaagatcctcagatccttgcctaagagatttgacatgaaagtcactgcaatagaggaggcccaagacatttgcagcatgagagtaaatgaactcattggttcccttcaaacctttgagctaggactctcggatagggctgaaaagaagagcaagaatttggctttcgtgtcccatgatgaacgataagaatatgagtatgacctggacactgatgaaagtctgactaacgcagtttggcttcttggaaaaca

SEQ ID NO: 278521 - DNA, 619 bp, Glycine max
  unsure (1)..(619): unsure at all n locations
tatctgtaaaatcttctagtcctccatatatgtgtgctttctctcctcatatgtattgcttaaattaagggatttattttatgcattatgctctatattaaaccttcttcaagattcatttgcatttatcaatattcattatgcttactacctctggactgatataaacaaccaaaaaaatgactgacgtaaatataaacaaatttaactacttttgccctattataatgatatcataccaaaaatacccttcaattaaaagatatcatattttcaatgactcctttttattcttgattcaagttccaatgaaggagactttatgaaaaacatttttttaaatgtgattagtaggattaaattatgttaactaaatggtgtgaagttagttaatttttcttgtatttcagtcccgagggaatattatttactgtgtagcacgaattcctttntaacccaaggttgtcaattttaagagagtatgtataagcgcaaccttttaggagcttagcgcatatccttgcggcagatgttcaacttagcgggcactttccagcanagtcaattctgcagaagctgaatttctgtaacttccgcttagtggctccacatatctcta

SEQ ID NO: 278522 - DNA, 539 bp, Glycine max
agcttataaatatatttacatgtatcaaatatatatataattaataataacaataataataaatgtatcattagataaatatttatttaaatatatatatatatatatatatatatatatatatatatatatatatatatatataagcacataaaataattaaatgtgctaaaaacattaacatgaatatactaaaatataaatgtgagtttaataatatatatatatatagaagtaattttacatgtatatatataatttgagtgagtaaatgcgttaaatataaaataataagaacatgctaaatatatccttagataaaaataaaatatatatgtataatatatgtgcataacaaccaaaagtgtatatacatatatacatatatcctaaatgcgttccaacgaagccatgaaaacccaacaatgagaaacgagagtttgatctcaagcactacacgaatatcatgggaattaatcacaaattttttagaattatttagaagaaaggacaatttgtggatttatccctgaaaaaaa

SEQ ID NO: 278523 - DNA, 617 bp, Glycine max
  unsure (1)..(617): unsure at all n locations
tcctcggtgccattcctgcgaaggcaaacatttggaaagttagttttagtgggacattactcttaaagcaaaaatggcatgtaacctcctcccatcaatacaaacatcaatgtaaatttagagcaagcttatgcgcatatttccctacgaacgttcacttgcacaagacatcctattaactaagaaaaatgcacccatatacaatcaaggtagcttccttacctagattatttacatgtacttccaaagtgtatttgttatttacatcatacacgccatcttgtcaaaatttacacacatgcatactcaaagcatttcggggtaccaaaaattgcacatgcgctcatcttggtatttctaatatctatacatatacaaacttcatgatgaatcttgactatctacacaataaagtgctacatttcatgccttttttcaagtttttgctacctaaagccgcatgcaaattcaagcatattttcctttgctgactaaaattgtattcaaattatatatatattttttggaatatgttntctttcattcaacatatttatatatattttttgtgagacattntgactaccaaaaattatatatacatacattcaagtatt

SEQ ID NO: 278524 - DNA, 504 bp, Glycine max
agcttgtgcctcttcacgtctggaatatgaatgtagcatatagatccaaagacccttaggtgctttgctgatggcttcctcccgttccaagcttcaattggagtcttgtcttttacagacttagttggacatctgttgagtatgtaaacagcagtgtagactgctttagcccagaatgtgttaggtacttgagcatcgatctagccatctccataactgtgcgattctttctctcggacactccattttgttgaggaggatatgcgactgtaagttgtcgctcaattccttcatcctcacaaaatctttcaaactcgcgagaggtgtactctttgtcgcgatcacttcttagtacttttatccgttttccactttgattttcagcaagggccttgaactttttgatactccaaatacttctgatttttcttttagaaaatatacccatgtcattctagagaagtcatcaatgaagagtatgaagtacctggttgttccatgtga

SEQ ID NO: 278525 - DNA, 626 bp, Glycine max
tcctcggggccatttcttgcgaaggcaaacatttggtaagttagttttaccaaggaatgctactcttaaaacaaaaatggcatacaacctcctccaataaatacaaacatcaatgtaaatttagagcaagcttatgcgcatacttctttacgaacgttcacttgtactagacattcttataactaagaaaaatgcacccatgtacaatcaaggcaccttcgttacctagattatttatatgttcttccaaggtgtatttgttacctacatctcatgcacttccttggctaaatttatatacatgcgtactcaaagcatttggggtaccaaaaattgcacaggtgtacattccggtatttctaatacttatgcatatacaaactttgtgatgaatcttggctatctacacaagaaggtgatacatttcatgctctactcaagtgttgttgctacctaaagccgcatgcaaattcaagtatattttcttttgctgactaaaatagtattcaaattaaaaggtattctttgtaggtattttctttacataacaggccacatatttatatttctttgtgagacatgttgactaccaaaaatacatgtacatacatcccagtattttgcta

SEQ ID NO: 278526 - DNA, 245 bp, Glycine max
  unsure (1)..(245): unsure at all n locations
gcatgcaagcttagggatggaacacttacttgttggtgatgaacaaaagcgcaaaacggaatcaaaaaatgcgaaaaaggatgaccctaaggctgcaaactcgtcaatcccgtgggtatggcttttgaagggggggggggaaganattttttactaacatttaatatctcactatttaataatcatcaatttttttatgactctcacatgatccttcaataaataacaaattctttccctatctt

SEQ ID NO: 278527 - DNA, 445 bp, Glycine max
tgttgaacagtttgcagtttgattaatattgtagaggttttttttgattgaaaatcttgtgtttgttgaatgaattggattgatcaatggcatgaattgagtgaattgtaatgcgtatattgtatgttctgaataagtattcagtaattataagagaaagaacatggattagatacatggttgaaactgtcagttggtttgactgattgcatatgaagataatcactagccacaacccggtgaatgtgtgatttttaattgtgagagaacgactagcatacagtactgatttttgcatgaatctctgattgctgaatgaatgcatgatgtgacgatgatgaaaaccatgattgtctggggtacctccttagccacaaagcttaccttgtgcatgattaattcataccttgcccccatgttgaattgaaagcccgattgattgact

SEQ ID NO: 278528 - DNA, 436 bp, Glycine max
gatcttaagtcacctgccgcatgcaagcttgtcaaaacataaacagatactcattatggcattcagttatcatgtaccattcaacttaacctttgaaatgatttactacaactaggaaatgcctgcttcactttaagctgcaacttttgaaatatgtaggccttataattgtgaaaagaataaagtgaaaagcattcacattgtataagaaaataatttggaagaaaaatccagatcattcacattttgtgagaaaatagtttacataaaagagccagacatagattgatgtacacaaaagagaaaacattattgaggagagcatattataaaataacccccccaaagaaaaaggcttcaaattgcaatgatatgatcgaaaacagtgttatcaatggcggaacatataaagccaaaatttcttcatataaacaca

SEQ ID NO: 278529 - DNA, 624 bp, Glycine max
tgctcaatttggtgaaagtaactttagattatggaaccttcaactctgcagtaactctttcataatgttgaggattaatggaaacgggttggtccacctatttccaaatagcacagaagtcaatttgacaagatccaatatgctaaattaaaaaaaaaaagacaaaatatgaacatgttaaatcaaaatatgctaaataataataaaaatcaaatatgaacatgttaaatcaacaaattaataactaatgacgagggaaaattattcccaggtgacaatagtatttaccacgaacttatgaacctgaagtttaaaatctgatccttgtgtcatagagagtggtgaatttgtccattattaagctcctgttactataggagatgcatgtcccccaacagataactttcagcaaaataagaacatagttaaccaaggtggtcgtgttattgctatctattcctattaaaagaataaaaataaaaaatcgaagtggtttagtgtatagtacagcactacagcagttttaagaggcacatagaaaccattttttggtctgttgggcttcaatttgaagtagtttaacttttattttgttttctagttgatctatatacaacaaatcac

SEQ ID NO: 278530 - DNA, 509 bp, Glycine max
gcaagcttgtaaagactattaacctattttataatatgaaactatcattttattttaagcctcgacctaattgtcaacgacttaatgttactcacgtgtatcataatgtaaacttactacaattctatacattatgtgaataggatatgcctatcaaatgcataggtgagtttcttttcttttttttaatcaaaaatacgtgaggtttaattaaatatttcttacgctttctttgaggtggttgtaacttataagaagactctgcttttccagtttgctaactaggggttaataaacatttttatgttaggtgataccaataaccgataacctttattgctacaagctggattatctatcttcgtactgtggtttttatacatctaatgaaaatcgttcgctgatttaaaaaaaaccagataataatacacttagttttattgaccaactcaattataatttttttattttgaaacactaaattaatttaacataatttttatatttaa

SEQ ID NO: 278531 - DNA, 576 bp, Glycine max
tgaaccttgaggaagaaatttcagtgtcacatgcatgtcattgaaacgttgatttggcaccaaatgaccctatgctttctttagtgggagggaagttccatgcatgtggcattaagagctatgaccgtggagttatttgttggggatttatcatcaaaccaagttcaccatctcctaaagggattaaggtttttgaagttgctgctggtgattactttacttgtgcagttcttgctgacaaatctcttatgcctttatgttggggtgttggctttcccacttctcttcctttagctgtttcaccaggaatgtgccaaccttctccatgtgctcctggctcctatgcaattgataagcataagagtctttgcaagtcaccggattctcgtgtttgcatgaagtgcagtggtgcttgtcctcctgaaatgtatctgaagagtgcatgcaattttgcatatgatagaatgtgtgaatataactgttcctcttgttcttcatctgaatgcttcttgaactgctcctcttcatattccaatgctgctgcttctactgagaaaaaaagtgaaaaaattgggc

SEQ ID NO: 278532 - DNA, 471 bp, Glycine max
agctttatgatgatgaatcaagattgatttttgagttttgatgataacaaagatgatgacaaaaagctcaaaagtcaagatcacttcatgataacaaagatgatgacaaaaagcccaagagaatgagttcaagattgagtcaagaacacttcaagaatcaagtttcaagaatcaagaatcatgaatagacaagttgaagattcaagaatcaagaaaagacttaatcaagataagtactaaaaagtttttcaaaacattgagtaacacatgaatttttcacaaaaccttttaccaaagagtttttactctctggtaatcgattaccagtttattgtaatcgattaccacgtaccaagttgatttcaaaaagctttcaactgaatctacaacgttccaattgatttcaaaatggggtaatcgattacaatgaagttggtaatcgattaccagtgggtttggaacgttgaaatt

SEQ ID NO: 278533 - DNA, 559 bp, Glycine max
  unsure (1)..(559): unsure at all n locations
tcaacatcagaccacttccagggtgctggaactacttcacatggatttgatggggcctatgcaggttgaaagccttggaggaaagaggtatgcctatgttgtgttggatgatttctccagatttacctgngtcaactttatcagagagaaatcagaaacctttgaagtattcaaagagttgagtctaagacttcaaagagaaaaagactgtgtcatcaagagaatcaggagtgaccatggcagagaatttgaaaacagcaggttcactgaattctgcacatctgaaggcatcactcatgagttctctgcagccattacaccacaacagaatgggatagttgagaggaaaaacaggactttgcaagaggctgctagggtcatgcttcatgccaaagaacttccctataatctctgggctgaagccatgaacacagcatgctacatccacaacagagtcacacttagaagaggcactccaaccacactgtatgaaatctgganagggaggaagccaactgtcaagcacttccacatctttggaagtccatgttacatcttg

SEQ ID NO: 278534 - DNA, 414 bp, Glycine max
  unsure (1)..(414): unsure at all n locations
agaaagggaagcggtananttggaacctctgatcctcgaatccaaccagctngtacccatgtggagttggctaacattaaagctgtccttatcaccactattggtcctctttttgaagttgttaatggttttaatccactacttcctctggatctttggcctatgcctaatgttcttgtttttaaccttaaagaaggtcaggcaaaggcgactatgtaaaaaagctcatgaaaagtcaagatcaaatgagaggaaaataaagcttgctaataaccacaaaggagaaaaagttgtttcaaccggagatggttgggtgccatgaaaaaaaagtttcgaacaaagaatcaacttcaaccaggagatgacattcagtctgaagatcatgacatgctacaatgactaccgtagatatgt

SEQ ID NO: 278535 - DNA, 355 bp, Glycine max
taatatccaatacaacacaacttggttcaggggcaaccgaagcctccatgtcagccctcccacaaacatgcataattatacaaagtgccccgattacgatctttactacaatgacaaccccaaagctgaagatgcgtctttgagagcatgtacaaaagtcctgcttccaattaaagacccgcctgacgctaacaacccattcacattcgcaactgcagatatcttcactaaagtagaataaccgatgaatgtgcagcttgccactatcgcaaaggaaggcagtgtcaacttgaccgcagagagatattattttgtgccactgccaatagtatccgtacgctttcttctgcaataa

SEQ ID NO: 278536 - DNA, 334 bp, Glycine max
ctaatagaccctaagtaatacatgtacaaactcacggtgtaaaagtcttttacactatcatctaatcacggatcatcatgtatgataagttcattgacttttataataaccaccttaaaagtcattcaaaggacaagttcttattgtttgatagcataaaaactctaatattgacagcgtgtatctatgagaactcttctgaatctcgtctacctctacatttggttaaacaaaagtgtttttctaaggtctggttactggcttcataagggaaatatccccccttttgctgttgcacagagtacatcatgttttgttgagaagcacagttgct

SEQ ID NO: 278537 - DNA, 100 bp, Glycine max
atcttggaccttcgatgtaaatgctggaacattgctttgctgcattacctgaagatgtaaacatctgtttcactgtcattgctttgctcacaggtcacac

SEQ ID NO: 278538 - DNA, 313 bp, Glycine max
  unsure (1)..(313): unsure at all n locations
ttgtccttagatccctcttgttggactatgctcaacttattcagcccttgtaggtttagactnaattaaactaaacttcgtccttagatccctcttgttggactaggctcagcttaatcagcttacgaaagtttagactaatttaacctaagcttcatcttcagatccctcttgttggactagacttagactaaacaacattatcatcacaacatattaggaaaactaaaacttaatcctcagatccctcttgttggactaagtttcaattctgcttctatcaagttctaaggcacaatacattttccaatgc

SEQ ID NO: 278539 - DNA, 395 bp, Glycine max
  unsure (1)..(395): unsure at all n locations
ttctctgcaacaaataaagganaattggattaagcagaacttgctaaatctattcctgacaatatatgtttggaggtaacatttcaagtatgatcaatatttataagcaccaattatgaagtactcttctatcctattagtttcatgtgtggcttaatcaaatccatagatagctatgtgtcataccctaatttcgtccggngactattgtttgatggcatgcaacctttggttgaccgcttcgaggtacttggcaccctttgttgcataatacgtgaagtttcgagacatgccggaaatcaaaaggaagcattgttacgcaatccgtgaaatttcgtaacatgccggaaatcaaaagaaagttttgttacgcaatctgtgagtttccgtaacat

SEQ ID NO: 278540 - DNA, 231 bp, Glycine max
gtcttagggttgaatcctgacactttgctactgtacattatgacaattcgtgtgtggtgtccatgcgttactttggagtcattgaagaaatctgagagcttagttatgttaaattcattgtgtgttttcaagtgtatgtgggttgatagcaatattggtatgcgaacagatgagtttagatttactttggtagatctgaagaagctagcttatcagaatggatttcatgat

SEQ ID NO: 278541 - DNA, 320 bp, Glycine max
cctgctcctgttgcagcaacatgtctttgtggcatttttaacacatttttcatggagctgcacttccaaaaaatccacagttgttgatgcacaatatatgaccttcaggagggagctggcacccagtcttgtcatggtccattttttttccaacttaccctgcgcaaatgatacatagaacatctaagatcacgtcatcactaatttcataataaacaaacagcactccagagaaaaaccagttatcaactatgattatagtccaatttatgtagggaacaatatagcacccttttcccaatgcaaaatattgatgaaac

SEQ ID NO: 278542 - DNA, 130 bp, Glycine max
ttgcgaagttttctcggcctggctgggttttatcgccggtttatccggggttatgctacgatggccgaacctctagtaaaggctaccacgattgatcccctgcaatggtttaattaaccccaaatggttt

SEQ ID NO: 278543 - DNA, 400 bp, Glycine max
aaagcttatagatatgggagggagaataaaacaatcttatataattttacctggcaagcaacgaagagttctttttgcggcttttagatgacgacaggtacgagcctccatacagcgacacacaactcccaccgcatatagaatatcgggccttgtattggttatataccttagactccccacaagactcttgaagatcgtggagtctaccttctctcctttatgaaactgtgataacttcaagccaccttccataggtgtgttcacgggattgcaatcaagcatattaaatatcttaacacttcttttgtgtacctatcttgtgagacaaagataccattctccgtttgcttcacttgcattcccagaaatatgacatgagtcccatagtctgcatatc

SEQ ID NO: 278544 - DNA, 264 bp, Glycine max
  unsure (1)..(264): unsure at all n locations
ctactagaaactcaagctggtaacattggtaaatctgtgaatcatttgtgaactcattttttctnggaaatncagaagaaagcaaggggcttagttgacacatggaaaaaacgtgttgaagctgaaatgattataaatgatgctaggtctggttcagttcagactgtcccctggccagccagacaacggctttctgaagttgctcaaagtgggaataaacattcgagtgggtcaactgatgttgccatgaagagctcagttaca

SEQ ID NO: 278545 - DNA, 350 bp, Glycine max
  unsure (1)..(350): unsure at all n locations
tcatgatgaatcaagattgattcanagaagttttgatgatttcaaaggtaatgacaaaaagctcanagatcaagaacacttcatgataacaaagatgaagatctcaaagaatcaagaatcaagattcaaggttcaagttccaagaatcaagatcaagattcaagactcaagattcaagaatcaagagaagacttaatcaagataagtatgaaaaaagttttttcaaaactgagtagcacatggattnttctcaaaaccttgttaccaaagacttttactctctggtaatcgattaccagattattgaatcgattaccagtagcaaatggatttgaaaaagtttcaactga

SEQ ID NO: 278546 - DNA, 310 bp, Glycine max
aaacgagcccttatgtgagcactgggcaagatgtttgaaccccctgccctattgggtttttcatacaaacaaagcatgttatttcggtctgagatggggcagatagtacacttgcgtaatcagtcttcaactcgcaagtctatgttattatgtccaatactacatgagttcgactgagcctaccagaaaattattatcgtggcgagttaaacagactagcatagctgagattgttaactaagacgagtttacaagtaggcatgagagtttgacaaccatgtgtgcatgtgtcactaagaacatgtgcctg

SEQ ID NO: 278547 - DNA, 339 bp, Glycine max
  unsure (1)..(339): unsure at all n locations
ttgcacgtatcagtcaagtgtatggaccatgttgtanccattttgctcatctataatggtgctagtttaaacgtgatgcctaagagcactttggagaaattaccattcaatgcttcccacttaaagccgagttcaatggtggttcgtgccttcgacggcacccgccgagagggtaggggagagatcgatctcccagtacagataggccctcacacctgtcaagtcacctttcanattatggatatttaaccccccctacaactgtctgttggggcgctcgtggatccactcagtgggaagttgtccctctacactccaccaaaagttgaaattcgtagt

SEQ ID NO: 278548 - DNA, 198 bp, Glycine max
  unsure (1)..(198): unsure at all n locations
ntcgcgctctcttatgcttctaatctccgtttaccgaaactgtccctgtctgcatctaagcatcgtgtgcggcgcactcgagcatcgtcatcgttgcactcgagcatcgtcacaagtccttgcttcttcctcttcgccaccatacataggtatgtttcgtctccttcgcgttggcttctccctctctctggcttcttc

SEQ ID NO: 278549 - DNA, 463 bp, Glycine max
  unsure (1)..(463): unsure at all n locations
gacactatagaaaaactcaagcccttctaatttctattttctaggacgcaaaatcgcaatttatttanacgttttatngcnncattatatggaagtngcacgcagaacanatgtgtgagaagataagaannatganatgggagtgaacgacccaagcctggaattatgaaagttcgcatggtaccctcgttttcgccctaattcccaattatgaactagggaacnncctaaattaatgaattaacccgtcgattggcctcttaagataattgttnagcctatggtcaatgtaacaccctatttttcataaaataaattaaaaatgattntatttaaaaataaatagaattttagaaaataatgaggtttttataattaaataaataaggagaaataatttatttattaaataatagttttaggtaaataaataaattatgtcttaaaaaatgtttattattca

SEQ ID NO: 278550 - DNA, 111 bp, Glycine max
  unsure (1)..(111): unsure at all n locations
ntataagtgcgggttcgggatacaaaggtcatgcgttcgttatatgcgaagatgatattccgagtactgaggatttggtacgaccatgctctcctgatttccagctgggaa

SEQ ID NO: 278551 - DNA, 447 bp, Glycine max
  unsure (1)..(447): unsure at all n locations
ncactctggttttgctagtncttgantctcaaaaatcnanagggacccggtggggatgctaagaaaatcccaaacttattccctttttaacaacctatnnagaggcctttagtgccggatggtacaaccttcaaatggtggctcgtccccctatttcttttctgcaaaaaagaaaatcattatcaaagaaaccatggatgaagtcctaaggatgccatgtacatgngtattaatgaagatatagtattatatttccaatcaacatacattgattgttgattacatgtaataagacttttataacatgggtttcccaaatcacanattaaaagcacaactaccaatccttcagagccctttgttaatttggcttgctccttatgtgggggggtttgttaaataatatatacttagcctcctaaaaaactatgactgacctcttttatn

SEQ ID NO: 278552 - DNA, 416 bp, Glycine max
tctggcatggaatgacttggcaattgccttctttatgcagcaccattacaacactgatatggctcctgatcagaaccaacttcagagcatgaccaagcgggaatatgagtccattaaagaatatgctcaaaggtggagagacctagcagcccaagtcgtcccacctatgactgagagggaaatgatcacgattatggtagatatgttgcctacgttctactacgagaagctgataggatatatgccggctaactttgcagacctcatcttcgctggagaaagaatcgagtccggactgaggaaaggcaagtttgaatatgcctccaacgctgcccccaacaataacagaagagccccagtggtgggcacacgataaaaggaaggagatacccacgtggtcaccaccgccccaacat

SEQ ID NO: 278553 - DNA, 327 bp, Glycine max
  unsure (1)..(327): unsure at all n locations
tgaacattcatacattaaggagaagcaagatttattcaaattgaaanacctctcagngaaacacaatgctgatagagtctatcattttcttagcaaagttcttgtattgagtcttactttattgtaaagctctctttgagtgttagaatctataattctttaaatggttcgtttatgaaagctangagtcacttagtgacaaaacaatacttgaatgttcttaagttcaaggggagtctaagggttgtgttagtagtgacctagagaattcttgtaaagacaggaggggtaggttagaatatttattgtaatcaatcattgattagt

SEQ ID NO: 278554 - DNA, 361 bp, Glycine max
cgaagggaagagagagaccagtcacgagcttatagcatgtgtcttgaaagaggagttagctgcttgctcaaggtccaagagaacttgtctcaacgttatgcgagacaaagaccacattgtgcccatcgtagcaagtcccaaaagaattaaatctacccacagccacgagcacaagtgacagaaaatatcccgagtgtcgcgaaaaggaggctaagaaggggatcggagtcaagacatcccgattgctaccaggccaagaaatggcgacacctactcgccccgagagatcatgactttcactatgcagctatataacatatggcctatatagaaccgtagaattgatgcactaatctgatat

SEQ ID NO: 278555 - DNA, 387 bp, Glycine max
  unsure (1)..(387): unsure at all n locations
ctaagcttgaatccagagccngcatggcaaatgttaaccacctttaacctgtactggcatcactcaaagttaatcactttccaatatgcctccacattccagaccccttctagatattatttacttggcagttgatgggtgctgcactctgggttttctgttcaaaggtctatgattttaggtaactataaaaaagtgtttgggttggagtagctagtcattcctgtatattactttgggtcttgctacagctaacagctttaatctgagctgaatgaattacttcattctgctactttaagttgcgctagtgtanggttatttattctctttcttatcttgggtgatgggtgctaacaaggtgcatttacatctgttttatttttt

SEQ ID NO: 278556 - DNA, 438 bp, Glycine max
  unsure (1)..(438): unsure at all n locations
agaaannnnnnnccgtgggnnactgaagngcatgaancntgaaatcattaaaaacccggnccggaaagacactaaattggtttgaaggcccactgtcttaaacaaccctcttgtttttatcgggacatggaccgtccaaaggcataaaatcaacccatagctttaccactttttgcaagaactacttaggtctgagttcctcaccacaaatggaggatcgtcggagtaaagcccactttgtcgacacccttttcaaaaaaaaaaaatcaaaaacctaatggtaatgcctacgttctcttttccaccagagacgtatggccatgcctaactttctctctttcaaaagaatcaaaatatcggtcaaaggcccaacgccttaaacgaaatttgttcgataaaattgaccttgcgaaaaagatcaaaaatcttagccaacct

SEQ ID NO: 278557 - DNA, 453 bp, Glycine max
  unsure (1)..(453): unsure at all n locations
aggggnggggnnnccggtaanncctggatgggctgatactgtgcaaccnactcagcttatgatgaggatccaggtggttccaggtggtttggaggttgtcaaaaggcccacagatggatttcaggattcagccaccaggatcaggaccaggataatttccaggtttcttgagaggaatctcagaggattcaggattcangagaggtttgatttcaggaatcaggagaagaatttaagaagacttcccaggggaagtattgaaaagatttttcaaaaacanacatagcacagttttgtttttcaaagagctttctcanaatttctaagtaccagagttttactctctggtatcgataccagtccctgtatcgattccagtggannagttgatntcaaagctttaactaattgcacgtacaaatgtttttaatgggtatcgatacatatattggg

SEQ ID NO: 278558 - DNA, 119 bp, Glycine max
cactaccagaaactcaagcttctatgtagggctggatctttgagcttcaatatggtccttctttggtgatttttcaccatggagttgtagtagaagataaaggagaagaggtgagagga

SEQ ID NO: 278559 - DNA, 252 bp, Glycine max
  unsure (1)..(252): unsure at all n locations
tgcattnggaattgcgagagccccactctatcattaggattattacctgacatctcaaacgaacaaatcaaacgtaacaagacaattatagttgctgtttgaatacctcacccactcaagtgtatcacacaattatggcttttctctaatgaaacactcttgccttttaccacatctaattcccttgagttcttaagcaattcaagagattatggccaccacaaagaacaattcaccaatatgtgtaatgta

SEQ ID NO: 278560 - DNA, 399 bp, Glycine max
  unsure (1)..(399): unsure at all n locations
tataagatcaaaattgccttaatcatttcttttatgcatgttaattatgacgcatcaacaagaatcaagccaaggctattgtgcaagcaatcaatggggcaaaacacaccaaatgattataatgatggatggctcaaattctcacaaaggtaaaatcatcactttcaaattgagctttcaaaactatcatgacatgtagagaagaatcaangatttcaagtcacaaaatgtcaagaactnttattttcaaaacaattacccatttcttgaacatatcctataattcaaagaaaaacatgcaaagtcgtacgtgcacatgaaattgacccaaaatattaaactgaaaatccgacgaaactaacaacattaacaaattaacacaactaacaaattaacaaa

SEQ ID NO: 278561 - DNA, 295 bp, Glycine max
  unsure (1)..(295): unsure at all n locations
ggaaggtgtgtagncccaccattcttttcatatttagaaaacatgtaatgtgtctactatcattgttatcattttttttctccgtcattgaggtgccacttgagctgccaggtctcgcctccttcaatgtccttgagtctttcctctatatgatccaactttccctttcagccatagcaggaggggctcttcctaccgcaaaattgcacggttgtggttgtggccgaaaatgaaggccctccaaaatgttttgcaggagtatacctaccaactgcttacccttcagtggtatatc

SEQ ID NO: 278562 - DNA, 487 bp, Glycine max
  unsure (1)..(487): unsure at all n locations
agggcctgnaagcggggggnttttcgaacctactgaatcgctacgctatcctgcgacactacannaaaganaagcangtnacatctatggaggtggaaggcagttttttctaaaattccccagagaggcccggaaaccggnaagccactttgttcctgctccggtgggccaccccagccttcccagccctatggtccaaccaagggaaaaaagttccaaaaggcttaaggaagggaggacaaccgaggatttaaaagttaaaaaatattatataactttgttctatttttttttttttacaattgttcacttctgaaattaaactttttgctctaagcgtcggtaaacagttttataatattttgtctgaaacatatcngggctcccatgttttacattgacgtgtattacaaaaaactagcatttgattttttgattccccttattgactattgagtggccactctttataatgttgcactccctg

SEQ ID NO: 278563 - DNA, 405 bp, Glycine max
  unsure (1)..(405): unsure at all n locations
tatgcgcatatttccttacaaacgtactctttacaagactttntttaaccgaaaaaaaatgcacccatatacaatcaaggcagctttgttacctagattatttacacgtacttncaaagtgtatttgttacttacatcacacacatctccttggctaaattcacatacatgcatactcaaagcattntggggtaccaaaaattgcacatgtgcacgatcttggtatttctaatacctatacatacacaaacttcatgatgaatcttgactatctacacaataaggtgctacatttcatgctcttttcaagtntttgctacctaaagccgcatgcanattcaagtatnatttccttngctgactaaaatngtattcaaattaagaggatacattttttgtaatgta

SEQ ID NO: 278564 - DNA, 184 bp, Glycine max
actcaagcttagagagatcctagagattctctaaggcttattcttatattcttccctctacaagaaggttagaaccctaaggacgataatttgggcaaggaaagcttttactatgtaatttattatttgcattgtgttttgatgtcgattttgtgatgctcatttgatgaatattgggtgttta

SEQ ID NO: 278565 - DNA, 135 bp, Glycine max
ggggcctatgcaagttgaaagccttggaggaaagaggtatgcctatgttgttgtggatgatttcttcagatttacctgggtcaactttatcagagagaaatcagacacctttgaagtattcaaagagttgagtct

SEQ ID NO: 278566 - DNA, 318 bp, Glycine max
  unsure (1)..(318): unsure at all n locations
ctaaaatactaagcttgagccaaatcctgactcttcataaccttgaccagtttgagaaggcaacctaccctcgaagcgaaaagataaaagggaaattccaatcaaagagaaggaaagaaggaagatctccaatcagggagaaagcaaaaagaaaagaaagaaaattcccattcaaagaatgggagaaagtaaaaaatgaagaagtcgaaaggaagaaagctcctgatcatggatcgcaggaaaacagaagaaatgtgcagataggtctntggaccggacaatatctgaacaatacagaattgtcaccaaatgaacaaa

SEQ ID NO: 278567 - DNA, 356 bp, Glycine max
  unsure (1)..(356): unsure at all n locations
tgtcattaataaactcatacttgacatatgacaaactcagggtgaatnaatatgtacaaaaatattattgactctttagataaaaacgttntatggataataaaacttaaatgaactacgttttttgtatttatttcaattaaaattaaagtttaatcttagtaactcatttaataaaagttgtccaatgtgattcagcatataaaataaaataaaagtcttccttaacaccaaagtcaaactttagttaaagaaacataattttttttagttaactacaatgataagtttctatgggatattngtatattatttttggtaaatatcacatggtatttttatgagagatatttatg

SEQ ID NO: 278568 - DNA, 551 bp, Glycine max
  unsure (1)..(551): unsure at all n locations
aggggaaannnnnnnacgacttggacccttagggtnccgtcaactncgtacganancnctngcanaagcnnnncntaggacacttgagcaagaaggactataggagagtggtggatatattttaagctgttttcaagtgttgacatgtggaggtcgcttaagccgagcctaagttagtnaaggacactnagaagccacttagagggtccccactttaagccttaagcccttaaaggcacattaagccgagggcaatcaaaagcccaatgggaaaggacaaagaaaaacccccgctttaaggccgtgacnnactctgtgcgcccttaagtgaggaagaaatataataggctgagtttattcccaattcatggagaaccctcgcttaagcattggaacaatctgggcaggttataacaaagccagatacccagtagctaccactanttcccaaatcaaaaggcctcggcttaagtgaggcaatacccacgcttaagcgagaaaattatgccatgcctaagcccatttcaatttacaaaaacccagtgcatgan

SEQ ID NO: 278569 - DNA, 329 bp, Glycine max
atggatcatctaaataggttaatttcaaaagatctagtttttggatggcctaaattaaatctaaaaatattgtttccaccactaaaccattgcaataattacacatggatttgtttggaccatctagggtcatgagctttggtggaagttactatgcattagtaattgttgatgattattctagatatacttggactttatttcttactcataagaatgatgcatttcatgcatttagaagacttgccaaagtcattcaaaacaaaaagaatctcaaattatctccatcagaagtgatcatggaggtgaatttgaaaacattgattttg

SEQ ID NO: 278570 - DNA, 296 bp, Glycine max
atcttgaagtattggctggaattttaatcctgaaaagcccatttgcatcaattgcaacacaatatcatgatcatcatcaaaacatcaaagtcaatggcatctacagcatgcacctatgtggacactcaagtgtcaaatttttatggtcatgtgatgctagggctcaagattcattccctctattttagtcaacccaatgtttccaaaacatgttcttttatccatttgtgcattcattcgagtccattttgggcgtccagagaaacttcacagcgttcacccttcgggtgtacaca

SEQ ID NO: 278571 - DNA, 340 bp, Glycine max
  unsure (1)..(340): unsure at all n locations
tacctggggggacctaggggtcagaaaaagtgtccaaatgaccctttggccctcttttttgagtattttccgcatcctttcctgaaacatcaaaaaacctttggaattgcatgacaactggtgtaaagcagttcatttcggctaacaagaatcaaaacgttagcaaatgaaggtcccaaacgaaatagggtatgacatatgttttaatcaattacacaatntgttcaagtntacaaagtatgtctcgtgtcggcttaatcaattacagcatcatcataatcgatcaaatacttgttttgagacaatgattgattattcaagagtctctatttaattgata

SEQ ID NO: 278572 - DNA, 217 bp, Glycine max
  unsure (1)..(217): unsure at all n locations
tgcgatgaggaagtgttgaagggtgaaacttcctgctntttttgttgaccacaaagtggtacttggagatatgtcgcgggggtcaggagaccttggggacgtcaggtggggtgctattgcccanaaccaagcttgaccaatcccgacccaacccgggcatagtcggtcagtgagaacctgtgatgtacctaagcaggcgagctcctggcagtcaaca

SEQ ID NO: 278573 - DNA, 350 bp, Glycine max
  unsure (1)..(350): unsure at all n locations
actaagctatgcgcatattccttacaaacgttctcttcacaagactttctattaaccgaaaaaaaatgcacccatatacaatcaaggcagctttgttacctagaatatttacacgtactttcaaggtgtatttgttacttacatcacacacatctnncttgctaaattcacatacatgcatactcaaagcatttggggtaccaaaattgcacatgtgcacatcttggtatttctaatacctatacatacacaaacttcatgatgaatcttgactatctacacaataaggtgctacatttcatgctcttttcaagttttgctacctaaagccgcatgcaaattcaagtata

SEQ ID NO: 278574 - DNA, 380 bp, Glycine max
  unsure (1)..(380): unsure at all n locations
ttatgtagctactagcaagacaaaaaagtgctgattaatatttaaatggaagcaaaaggaggaatgaaggctatttcaccctcaaatctcatctttattatttctgtactagaaacacataatatccgagtcagaccacatgttgnggagcanccttgaagaatatgtttttccactttttttctacttaaaatggtagcagcatcttgaaacttaagaggtggtacctagtttgatgatgaaactatatgctcctctgtctttntattttttatttgaatgtcataatccaatgtacatcanaaatataaaatctcaaaatatttgtttcacaaaacatgnctttagtcttgggcactttngccaagtacccattacta

SEQ ID NO: 278575 - DNA, 355 bp, Glycine max
  unsure (1)..(355): unsure at all n locations
agcttgtgagcacaagtgttgagcgccctatatttgtgagaaattctataactaaaatgggnggggaagctctgtacttttcatccaacgagtgtaaatagaccaatgcattgacttaagattgttaaaagcatgaaggagttatgagtctgtttctaacaaaaaatatcgtcaactacaagatctaagcctttctatggaaaaaatatctgccattgtcttcggcagaaaagctatagaaatagccacattgctagcacatgctcccaaaaaattaagatatcgttgataaaaattgccacttgcaactaaaacgaagcattctctagttgcccatctatgtaacatttaccca

SEQ ID NO: 278576 - DNA, 316 bp, Glycine max
  unsure (1)..(316): unsure at all n locations
ataggctacatgccagctttctttgcggatctcgtctttttcggagaaaggattgaatccggactacgaaaaggcaagttcaaatatgctgccaatatggcccccaacaacaacagaagagccccagtagtgggcgcgaggaaaaaggaaagagacgcccacgcggtcaccaccgccccgacgtggatgatagcaccccanaatatccaaagctcataccaacccaatcccccaaatttttaatccgagctgggaattcccttccgactcaagtaaaggaccactcgcagcagaaagagcgccggcacaacgcaca

SEQ ID NO: 278577 - DNA, 468 bp, Glycine max
  unsure (1)..(468): unsure at all n locations
aggggngnnnactgtaggancctaaatnngctacgnctngcaatctataanaacccccngnatnggaactgggaaggatcggagaacggcctaccttaggcanaatttttaaaattctganagggcgcccgatcggactcaactggaaaccatggttaaaaaggaaagtgattcctttaaagaatatccgtaatggggggagggacctgccaacacaagtgggctttccaatggtggaaagggtaatgattaccatgatggtagacaccttgacggtggtttactatgagaaaatagtgggctacatgcccttctacttcgcggacttggtattcgtcggagaaagaataaaatangtttgaagaaaggatgtttgantacgtctcctccataagtaccaacgctaggagggacaaagcacaggggaaaaaaagaaggaagagaacccatgccacacttcagtgcctg

SEQ ID NO: 278578 - DNA, 474 bp, Glycine max
  unsure (1)..(474): unsure at all n locations
agganggggnnaaaagttgganncctaattgcctagntnnctagcantncacaannaaccnannnanaacacnggagcaggaggactgagaagnggaggattttattaagcttgcttaagagngacaaggggggggctgaggcgagctaagtagnaaggacactcagagccactagaggtcccaacttaagcttaagcctaaaggacataagcgaggcaatcaaagccaatggaagacaagaaaaccccgcttaagcgtgacactctgtgcgctaaagtgaggagatataatagctgagttattccattcatgagaactcgcttaagcatgacaattttgtcagttaaacaagcaaatacagtagctacactataccaaaaaaaaaggccacccttaatgaagcaatacccacgctggatcgagataataatgccatgcacaagcgcaatacaatgttcgaaaacccagtcatg

SEQ ID NO: 278579 - DNA, 393 bp, Glycine max
  unsure (1)..(393): unsure at all n locations
atccaaggcactctctaaggggtgtatctcatttttcctggcttattccctagnggatgacacctcctttcacctcttctcctttatcttctactgcatctccatggtggaaaatcaccattgaagaacctcactgaagcctcaaagtttnttagttgatgttgaccaacgatttttttggccgacgttggctacatttatttgaccggcgttggctacaatttttctgctgacatcggtcatgactaacttttgagtagacgcttgctaaggtttttcagctgacgtcataggtttttccagccaacatcagccaaagctagtttttagcaaatatcggctaggattatttttcagatgatgttagctagggtggtttgcctgatgtcaact

SEQ ID NO: 278580 - DNA, 286 bp, Glycine max
ctgttacggtatgcaacaaacacatgtacctcgtactttcagagataaactacacggcacaccaaatgcgacatttccgatgtccgaaagagctaagaaggtgacactctacttaaagcacatgtgatgacattgcttacttgacgaagtaaacttcccatgtaccaagcaacatggggcactctcacccgagagatcacgacttaattgtacattgataatatgaccttataaaacgtggagtttatgcgtaattgatgtatactttgataatagtatcactttc

SEQ ID NO: 278581 - DNA, 348 bp, Glycine max
  unsure (1)..(348): unsure at all n locations
actaagcttaatacctatcaaactcaagaacttgttttagatgattataggaaaaatgagaaaacgttgggtccaagatgcaagttttccctcactcctactacnaatttactttatccacaccacccanatcccaaaaaccaacatanaacacatcanaaccttgaaagagaacacatatatgaaacttctaaaagtgtccatggagaaaaacgaanatggaggatgagagggaaaaaatgaaggtcttttacctttgaaatcaatccaaattcaaacaaagaagctcaacaacaatgtcctttatgctaaaatttcaaggtctcacactctctaatggctctctaa

SEQ ID NO: 278582 - DNA, 324 bp, Glycine max
  unsure (1)..(324): unsure at all n locations
ctcaagcttatgatgaatcaagattgattcaaagagttttgatgatattaaagatgatgacaaaaagctcanaagtcaagaacacctcatgataacaaagatgatgatctcaagaatcaaagaatgagttcaagattgaatcaagaacacttcaaggttcaaaaggaaanttgatttcaagaatcaagaatcaagattcaagattcaagttccaagaatcaagatcaagattcaagactaaagattcaagaatcaagagaagactcaatcaagataagcattaaaaagttttttcaaaaactgagtagcacatgaattnttctc

SEQ ID NO: 278583 - DNA, 307 bp, Glycine max
  unsure (1)..(307): unsure at all n locations
tgaccaatcccgacccaacccgggcataattctgtcagtgattatcctgtgatgtacctaagcaggcgagctcctggcagtcaacagataaaaggaactaagaccacatagcaaggaggcttgtgtggtggctggccagctgtgaaacttgattgatatatgggaaggggcctctggtaatcgattaccaagggtgggtaatcgattacaaggcttaaaaatgaagacaggaagctaagatggcctctggtaatcgattaccaaggggtgtaatcgattaccangcttgaaaatggaatcaagaaac

SEQ ID NO: 278584 - DNA, 358 bp, Glycine max
  unsure (1)..(358): unsure at all n locations
gagcacgaaanngaaggaangaaagagggaaagaagnggaactttgaagtgtatctcataagactttcattcatcaaagttataacaagtgttacacatgcttctatttatagactaggtagcttccttgagaagctttctcgagaaaacttccttgagaagcttctttgagaaaacttccttgagaagctagagcttagctacacacacccctctcataactaagctcacctccttgagaagctttcttaagaagaatcctagagaagctagagcttagctacacatacctctctaatagctaagctcaccttcttgagatgagaagctagaacttatctacacaccccctataata

SEQ ID NO: 278585 - DNA, 249 bp, Glycine max
  unsure (1)..(249): unsure at all n locations
gggagaactaccataagggatagagcctttgtgctaagtgcatgtnnagaaacaagccagacaaggcaagtaaggttgtgagaaacaagacaagattggttgccaaaggttactcacaatangaaggtatagactatacataaacctttgctcatgttactcgtctaaagcaatacacattatactctcatttacagctcatacaaaaatgagactatatcaaatagacgtaaaaaggcattcctcaat

SEQ ID NO: 278586 - DNA, 191 bp, Glycine max
  unsure (1)..(191): unsure at all n locations
ttgagcagattcaaacgactataacttgtgtctcggatgttcgattgagtcccgnantatatcgagacgctcgtaattgaaaacagaagctcttagcaaattcaaacgacaataacttttgactcgggtgtccgattgtgtcctgcgtttattgaaaagcctcaaaatggaaaccggagctttgaaaaaaa

SEQ ID NO: 278587 - DNA, 475 bp, Glycine max
  unsure (1)..(475): unsure at all n locations
cccggggatccttagagcacctgaggcgtgaagcgagtttcaattgttacngaaanacttcttccggaagaagaattattgtatgggcaatttggcacttcactggttgctgggtgccccaccaataatgctgggggccatataacctcctctatgctggattgccagttaaaggatatcgcacgttacgatataaagccatattcaatgtgggcttctacaatgaaccttgtggcgtgagggaaagcccaatgtgcaacacttttggaggctcanttttnatcacgtctgatcggaccacgctattaaaaattatttcgggcctcttattccaagccgttagcctacattctccagaacaaaatttagtcatggccgttgtgcgctcaatcatgctgccagtttactcgctaaaaactatattcacatgcttctacatgagctggcctccactagataatttttgaggaaagcg

SEQ ID NO: 278588 - DNA, 489 bp, Glycine max
  unsure (1)..(489): unsure at all n locations
ctcagcttataagagaagaaaagaagagcttgtctaaagctctganagtgtctatacaagaatctgttgaatctgacaactctaatggatccataaatgatgaagtgactctcatgtccaggaagttcaaacagatgatgaagaagaagggaaagtttcaacattcctctaaatgtaaagataccaaattcaaaaagaagaacaagggggaaagcaatgagatcatcttatttgagtgtagaaagtcgggacatataaaggtttaaatcttcaactaaagaagaagagatactccaaggacaagaagaagaaaagtttgatggttacctgngatgactcagacagtgagaagagtagcagtttagacaacgaacaagacaacatctgtcttatggtagatatagatgataaagtcaaggtaaaaacatgttgtgaatctcataccctattttgtgtcttcaccaacaatgaagaagatataccttatga

SEQ ID NO: 278589 - DNA, 423 bp, Glycine max
  unsure (1)..(423): unsure at all n locations
catgcaacttngttatgnttttccanccgcgaaacgagcgtgggtgtatacccaangccaatctgatcatctcgctctgataaatgcgaaaaaactgtgcctaaggaagaaggtgtgattgacggagaaccacctgctgtgactgtcattcctatacagccaatattcgcactcggacagcgatggcggtactcctccaataacaaacacttcctcttactcaccggccagtgattcacaaaggtttggcgtatactaccgcatagtctgctacatcccttacatgaccacatgagcttacacatgcataactccaccctgaatgattnttcctcagaaactttaagttacgcccttccgtggcatgtgaattgtcctttataatgtatcaaggggcccatcccccacggtttcacttagtac

SEQ ID NO: 278590 - DNA, 228 bp, Glycine max
ggtatagaacctcctcccataaatacaaacattaagggaaatttgaagcaagcttatgcacatatttccttacgaacgttctcttgcacaagacattgtatttaccgaataatgcacccatatacaaccaaggcagcatcattacctagatcatttacacgtacttccaaggtggatttgtgcttacatcacacacatctgcttggctataatcacatacatgcatac

SEQ ID NO: 278591 - DNA, 513 bp, Glycine max
  unsure (1)..(513): unsure at all n locations
gcatttttgcttcgtgacaaccannnaattgagaaccggcccgcgntacnnnnagacgagaaggaaggcgtgcaacgttaattacatcatcctctccgangactaggcgcgaggtagacacgcctcctacgttggactaacttaaactgagctgcatcctcggatccctcttggtggactatacttatcttagatagctcatgagagtttagactaatttagcccaagctttgtccttaaatccatcttgttggactagacttatacccgacaacattattgtaacagcatacttataacccaaactctattccgcgatccctcttgagagactatgctcaactctacttggttcaagctctcttggagctatacaatttcccatgctgatagcacctaaccactgccaccagtgggtgattcgacccttaacttctgaactcatcgccgagagaagcatggacacggacatccagccacctgtgttgacacaatgccactcttgcgtttttg

SEQ ID NO: 278592 - DNA, 246 bp, Glycine max
gaggagtgactgatcactgtgacctgaaacccatataagcgccactttggctatttcccgttcttctgaagacgagcttgcaaagtcccatctagatcgacagaacgtgaaagtggggtacctgcactctacacgagtgaagccctgacatcttgtaagacactaaagccctagctgccagcaccaaatgtctaaacccaccttagggatactatgcccaacaacggaccggaaatctccgatctc

SEQ ID NO: 278593 - DNA, 406 bp, Glycine max
aagtcaaccggcaggcaggcaggctggttctttttccctccccctccctctccacaacctgtgcaaattctctgtagcctaaatgaatactatgatgcccaagggagaactgaaaactgcaccctcatctggcgcaccaacatgcaacttgtgacagatgttccccttccatcagtaagaaaatcaagacaatcagtcgacacgagtcaccatccaaatagttgttaagatagcaaccaatcaatcactcgctactcgctgtcagtgtgcaagtaacaaaagaatgcatcaagaaatttggaatcattttctggcccatgatgccgttcttcccgcacagtgtcaaaagagggttccttgtgcacacataattgagattaagtatcgtggacaataaataatcatc

SEQ ID NO: 278594 - DNA, 336 bp, Glycine max
  unsure (1)..(336): unsure at all n locations
tcagctacatggatcacngatgccatctgctcggttaactttctgagccttagaaacattgtctagcctaagattccccttgatgatttcctccaacctcctttttggtctcccacgactcctttttaccagactaacaaccatgcaatctattcttctaacgggcacctcctcttgtggccttctttgtatatgcctaaatcaccataaccagttttctgtcatcttttcctaacttggtcctacaccatatttttcttgtatatagtcatcatgcattctatcctttcttgtatgatcacacacccaacttaatattctcatttatgctactcc

SEQ ID NO: 278595 - DNA, 538 bp, Glycine max
  unsure (1)..(538): unsure at all n locations
agacggacttgactcgatatacngcnacatnnanctcgtacccagggaatctctaaagccaaccggcaggcatgcaggctggtttgatttatttcactcctacatattatctctagcatgcatgcattttgtctttacctactcctcacgtatggttnttttaagaaaaacaccataacgtaacgcgctacaatgcatccttatcgcaccagatccaaatctataacgatgggtgatcaagaggagacacatgaacagatgaaagccgacatgtcggctctgaaagaacaaatggcttccatgatggaggccatgttaggaatgaggcagctcatggagaanaacatggccgctgctgtcagttcggctgccgaagcagacccaactctcttggctaccgcgcgccatcctccctcagacacagtaagacggcgaaggaacacgctggggcacgacgacaaccctcatctgggatacaaccgaacagcttacccttatgtgattgccgctactactcacccccatcatgcangagatg

SEQ ID NO: 278596 - DNA, 472 bp, Glycine max
cttgaacgataatcgtatctcttgcaccctgtatgagctgtatgatattgtcaaattttttaaccctgttcttaaataattatctccagatacctttcttagattctaggagagcatatagtttaaggcaaatttaccctaaatttgggggagtgaagttaatagggatgtaaagaaaagggtaaagcatcatcacacacaacaaataaattgtatgttaaaaaaaagaataaattgtgttgttacaataaagtcaaaagcaaattacgtggaaaagatagtgagaaagctacttgtatgacacaagatcatttggataagtctaggacttatgctctcttagaatctaaacctttgaatcctagaaaaaaaaaccaatgaatttttgtaccaagcctcactacaagcctgagaaagtctttctaatactgattatacatttctgactatatggcatgagatgaaattcaaa

SEQ ID NO: 278597 - DNA, 415 bp, Glycine max
  unsure (1)..(415): unsure at all n locations
nctccaatggtgccttgaatcaatcaaatccagtatgggtagataaccacaattctctctggcagcagctttcctaggaacaataatgtcattatacctttccaggcctcaggagaaatgaacctcgatcggcatatcggacatgggaaggtgtggcacgtgcctttctcttctttgatgccatctgagaatataagatcaaacaacaagattagtcatggttatttccaacacaacagaanaataaaactaaaaactgaactgggcgctaagagcagtaaggctggcttatcgcgccttatagaatttacccatggctaagcgcacagactccgcttacctaaaacacaaaaatattttctgcaaatatgctaacgccacatgtggcttacctcatctacatttcaaatgaaag

SEQ ID NO: 278598 - DNA, 326 bp, Glycine max
  unsure (1)..(326): unsure at all n locations
gggacattactcttanagcagagatggtatataacctccttccattaatacacacatcaaggtgaatttagagcaggcttatgcacatatttccttaagaacgtttcttgacaagacatttattaaccgaataatgcacacatatccatcaaggcagcttcgtacctagatatttcacgtacttccaagtgtatttgtacttacatcacaccattccttggctaaatcaatacatgcatactcaagcatttgaggaccaaaattgcactgtcacatcttggatttttaatacctatcctacacaacttctgatgagtctgctatta

SEQ ID NO: 278599 - DNA, 250 bp, Glycine max
tctgatcatcttgctttgataaatgcaaaaaaactgtggcaaatgaagagggtgagaatgagggagaagcccatgctgtgactgccattcctatacagccaagtttcccaccaacccaacaatgtcattactcaaccaataacaaaccttctccttacccaccgcccagttatccacaaaggtaatccctaaatcaaccacaaagtctgtctaccgcacttccaatgacaaacatcacctttagcacaat

SEQ ID NO: 278600 - DNA, 354 bp, Glycine max
  unsure (1)..(354): unsure at all n locations
gcttatctcatgtgggtacatctcaataaattcattcttggagagcttcatggttttggttatcacgggaaggatcattgcagatgcgggaagcatgaccacggatctcgctagaggtgctgatgtagttggtgatatttttgggatcattgatcgtcgtacgaagattgagccggatgatccanatgggtacatgctagagaggttaattggtcaaatagagcttcatgacgtgcattttgcgtaccctgctaggcctaatgttgctatctttgaaaatttctcgatgaanattgaggcacggaaatcaacagcattggtggggcaaagtgtgtccgggaaatcgaccatcat

SEQ ID NO: 278601 - DNA, 384 bp, Glycine max
agcttatttctagatccctcttgttggactaggctgagtttagacagccctcctaggtttagactaacttaaactaagcttcatcctcaaatccctcttgttggactagacttatcttaaatagcttatgaaagtttagactaatttagcctaagctttgtccttaaatccatcttgttggactagacttagaccaaacaacattattgtaacagcatacttaaaaccaaaacttaatccgcagatccctcttgtaagactatgtttcaattctacttcattcaagttctaaggcaacaatacatttcccaatgctaaagtcacctaactatgcacacaaatgggtgatccgaccaagagcataccaaatttaagcactgaaag

SEQ ID NO: 278602 - DNA, 445 bp, Glycine max
  unsure (1)..(445): unsure at all n locations
tctagccaaatggacttaccttanattatgttctttatagcctttttgagccttgtttccctttccttgttttgaagctcactacaagccttaagtgaaaaaccatgatatcaccatatccttaaggaattttggagctttggaattgttttgggaataagtgtggggggtttttgtttcattggacaacttgttttgttggctatgcttcatgatgtattttgggccatacttgatgtacattgtatattggttaaatgttggacatgctgaatgaaatgttgtttctcaaaggctatagagtcaaacaaaaaaaaaaagagaaaaaaaaattcgaataaaaaaagaataagacaagccatanagttgagtgaataagatcttaaatggcacaagactgatgaaactctctggtctactcttcatggttaaactttatctttac

SEQ ID NO: 278603 - DNA, 313 bp, Glycine max
agcttgtatctcacagttgcctctctccttcacggtcaggtgacaataataaatttacaaacagatgcgtactactacattattattattattataattactgatattcaatgattaattatatgcaattgtcattaacttagtagtaatgctatgcttttgtaggtgttattatgcttagatggaaggagttaagcattcgggtccgaccaaattggttctatattctacggaggccacaaacattctctacacattccgtggacatgctgttactgtataagacaacctcagatatatattcgtgtctttt

SEQ ID NO: 278604 - DNA, 458 bp, Glycine max
  unsure (1)..(458): unsure at all n locations
tctanattctaatatatctatctaatgtttataaatnnttntggtangagatagctagtgtatcaaacaatctacaatcatcattctgggttgtggaggggagcacgagaacatagaactaattactcttggttgtgttaccagatcataattatggtgtaatagataggtaaaaattaaaaacaaaaatatatgtcttgtcaattaactgtaaattgtgaaatgtagatatgtaatggatattaattctaggttaagcccaaagtgcataaaaccagaactctatccattcagatcccacttgaatatcattttaaaaaaattacggtgacctaaataagtcacaactatttactattgaaataagtgtgcagctaacataaaaatatgaccaatgggatccaagcacaagatttacagattcaactcatcatgctataagaaagaattatgagtat

SEQ ID NO: 278605 - DNA, 207 bp, Glycine max
aatgcatgtggagcaagaactaacatatatgtatatatatatatatatatctatgtgacctgccatctttgttaccttatctgaacggattccttctgggatctgtgagtgagtgtaactacacacgtgagcttagaacaacgctcatgtcttctctcaaaatactgatgtctcactcgaagagtgcctagaccttgagagggaaga

SEQ ID NO: 278606 - DNA, 117 bp, Glycine max
gctcattcgagagatactcaaacacggatatcatacaaaataatccactgcatatcatttgcaatcagctcactgtgcagacacactgtgggtacatgcgaacaactcagagtactg

SEQ ID NO: 278607 - DNA, 277 bp, Glycine max
  unsure (1)..(277): unsure at all n locations
tgctnttgactcctgattctttggaacttgcttaaatcttgattctttggtgtcataccctaatttcgtccggggattattatttgatgatatacaacctttgattggccgcttcgagatacttggcaccctttgttgcacaatatgtgaagtcccgagacgtgccgaacatcaaaaggaagtaggcttacgcgatccgtgaaaattccgtaatgtgacggaaatcgaaaggaagtgtttctcgcaatccgcgagttttcgtaacttcttcgaaagc

SEQ ID NO: 278608 - DNA, 617 bp, Glycine max
  unsure (1)..(617): unsure at all n locations
nggggnnnnnnnnggggnggcagttgctaatgnnctttgannatcgacancnttngnatangacancnctcgcnangnacgngacacnatacgaanactcagagctcacatatnncnggactttgagctgttgtatggatattcttatcagcnnnncatttatggcgtatgcanaganaccagtgaccntaagccagtganaacattgaaacactcaacncaagctttagatattttaataagaaaacataacattgtaccaccaagaatgatacactagtcccacattcacaagtaggtgtacacatacggctctaccactaagttcattttgttaagatggtttattaaattccgatatgcatataggcttacataactaggcaacaccactngtctaacactcaaagaacagcattattaattagttaacacgcataacttctccatctaaggtgtgacacaacagagatcttccctactatgtgtcacaaccacgatacgcgtgctaagagcataaaagaaatatcctaaccgaacaagaaatgactatgacagatgttaaccctgagcttgaatacaatatgcaatgctaaatcgaacgccagagtaaattt

SEQ ID NO: 278609 - DNA, 312 bp, Glycine max
ttcttattatgaaatgataaacttcaactttatttccgcagaaaatccaaacaacaaaatgtttgtaaaccgtaagatatagaacataagtaagactcccactaaactaaggtactatcaggaattacacccatatgattagtgtgctcatgaaaaactttaagtgtcatacatttagtaagtggatcagctagcatgaaatgagctcctatatgttctatacaaatctgcagaagacaagcttataatgaaatgataaacttcaactgtatttccgcagaaaatccacacaacaaaatggttgtaaaccgt

SEQ ID NO: 278610 - DNA, 213 bp, Glycine max
gtaattacgtctgtctctgtcatttgttgcttctcagattcccttattaagttcaacacttgcatgccttgagtcaactcatcccctgcaaacttttccttcatatagttccaaatcaattttgttgttttgtgggtcatgattttagtaaaagaaaaatgttgcgaatcacaacaaatatgcctgatgtaacattctatttttcataaaaaa

SEQ ID NO: 278611 - DNA, 449 bp, Glycine max
  unsure (1)..(449): unsure at all n locations
agcttgttcttttttattgaaagatacaaaatcaacttgatgatgcatgcatgcacgttatanangaagtgngatcaccaaatttatattctagaacaatatatttanattataatcttaatgcttttatattgnataatacttaattgtttcaatattntattctttgctatataatagtagttgagtattaatgttttcttaattaattcacttttcagtttctaaactaatttctgttctatttttccgcatataatacttgtaatccatcttatgttatattcccttgagtgtcggagactcttgccacctctataatacgtactagctagcaacttgtccttgtntntgttgttttatgctgagaagtggtttgtccaaatgacggaattgtcactcatgtctaanacaagactaataacagtgtcttgtaacatacactacac

SEQ ID NO: 278612 - DNA, 442 bp, Glycine max
  unsure (1)..(442): unsure at all n locations
acacgcagctgttgcaaacattcagaagatttaagtatatatntaatatagaactngtataaaagaaaaatagacaccaccagataattaagtggttcaactntggcatatgtgcaaatgcaaactagctaccaattaagattctcgacaatcctcanagcaacatcacataaacacttcaaaccatcctctctgggagcaagctcagtaggataaaccaaacccgggtagagtttgaacaagttgtgacaaaacattgggtaatcagaagctgcagtgatgtgcatggaagcatagtcacatgcctcattagccaaatcatgtgcagaagcttggagggcatcactggcatacttgtacttttctacacactccttcagcacccttttaaggtggaatccttgttgcagtgcaagcaactgagaagaaaatagagagaagt

SEQ ID NO: 278613 - DNA, 498 bp, Glycine max
  unsure (1)..(498): unsure at all n locations
aacgtgacgagctancgaagncanactaggcaattcagctccgacacgcgatacatagaccgacgtgaggcaggcgagtttccttatataatgccaactacgctctagagtggaggaactagctcataacggagagacttcaaagtgactagcatttgttggctctctgtacagagatgaagatgaccatganggagccgaatgtgccggctgatcactcaatggactaaagatctatctccgaaaactactcaagcagccatgaggttatgagactccaggagatggtgtgctcacgatcacgcaaatangaagatcataggaggaactaggctcgcatcttaagagaagactatatatccgaatattgtgaactgccgagattgttgaaaggatatatgcttctcaaaccatcctggtgagcaacattaaaaagaacgggtgctaacagagtcttccactcgattctctggttgaaaacaaagtataaaatgggcn

SEQ ID NO: 278614 - DNA, 303 bp, Glycine max
agggactgaatcacacattcgagtaaaaagttcttatcgttagaatacgcacagaacttcggtgttccattctgagcaactcgatatattacgggactcaatcagacattccagtaacaagttattgtcgtttgaatgtggtcagagcttcgataatcaatttcgagcgtctcaatatattacgggacttagtcagacatccgagtaaaacgccattgtcgtttgaatagactcagaacttaggtcttcactttcgagcgtctcaacataattctggactcaatcagacatccgagtaaaaag

SEQ ID NO: 278615 - DNA, 349 bp, Glycine max
  unsure (1)..(349): unsure at all n locations
gttaaaagtgattttctaaatggcttaattcaagaagaagtatatgttgaacaaccaccaggttttgaaatattggataacccaaatcattgttataaattgaaaaaggtnttatatgggcttgaaacaagcccctagggcttggtacgagcgtctaagtaagttcctttagaaaaggactttctaganganagtggatctattcttttataaagagaaaacacatgatatttactagtcaaaatatgttatgacattattttggaccactaacaattgtgtgcaggaattctccatgacatgcaagtgagttgaatgtcatgatggaaattatttcttcttggataca

SEQ ID NO: 278616 - DNA, 463 bp, Glycine max
  unsure (1)..(463): unsure at all n locations
agcacactacagatatcttctcaaatatcccaacggtcagatcatggacaagtgtcttgtgaatcttgtgtttgtcttcttcttccctacactctgtaatttccactgtgtatttataattgctgcttttacttttggttaagtttatgtttctattctttactttcttaactttgtagtaaaagcctaattgaatctagtaacattaagaacgatagatttttaattagtcaagacacgttaataattaattcaaccccccccccttcttaattattccgaggcctcttgatccaacaattactgattctcatggtcaatcaaagcctatgataaaggtcagatgatgctttttgccttatatcaatactccaatgatcatagatatatcaatntaagtacaataatatcatcaattccagagatggttaattaanggataattaatctgtcgaagattacc

SEQ ID NO: 278617 - DNA, 116 bp, Glycine max
cgcttcaacttccacactcaatccactcctccattctatcatcctcacctaaattgcacacttctttcaaaatctgcaaactgcatattttatcctctcttgcaaacaagacacgc

SEQ ID NO: 278618 - DNA, 383 bp, Glycine max
  unsure (1)..(383): unsure at all n locations
gcagcatctatgttagtganggctgtgattcacctcanggttcnttcgagntttgatcccacaatcaagggggacccacaaaatgtttttctcaagcactgcgagcatcttattgatcctatcagcaatatcatcacttggtggtattctcggagagtgaatgttataaactccggggccaattcctgctccatacttaactccttcacagaacactgacaggagctcttcttctgagcgagaattttcgatggtgatcacatacacatccatatcaatgatcgagtggatgatgtcattgaaattagagtaacacatgtgcgtgtggatctgtcgattgtatagaatacaaaacatattatattttgatggaatgcgttcta

SEQ ID NO: 278619 - DNA, 473 bp, Glycine max
  unsure (1)..(473): unsure at all n locations
gtgggggactttgagacanncatnnantngacccggcncgtgaacnnnacagacaggaggaagcgcgctttgttttttggccaaacactaaacaccgtaaggcgcgttgatcatcaaaggtgccacgccttcccctgatgatgcgcttggccaccatgctaaatgaagaactggacgtcctggcataactgtcttgcccgcacctttgactgcactgcagagacaagatttatcaccttattaacgcacgcttcttgatgattggccgataacgtatcgcccacgaaacaaaaagcgcctccactagtgtctctggggaatgaacattgcgagagcggatgataaacacaatactaagtgtagaactgctgctccgagcatagcgcgagatgatttcttcacaaaatggaccgcgcattgacacagccgcccgtttaccgcacactcatttctgctcttaccctcctttatan

SEQ ID NO: 278620 - DNA, 511 bp, Glycine max
  unsure (1)..(511): unsure at all n locations
aggacggagttgaggccttgaaatacgacacattgattganacancttgaaaancncccnggcngcaaaccaagaggacnggngcgagtcatgagcncaaacacgttccccngcgctgtggagaaanccacaaggaccaaccgacggaactccagaggagccacaccacaaccggagccaagagagcagaggactaagtgccagaagtcaatcgtggctccgcccgcccttggcaaagaatgcaaaacgacacagccagagacgacatgggagtcttaccccaccccaaacaaaagggaccaaaggacgaaccggccgagaatgaaccggaagccgggagacaagtggcctcaagaagcccaacacggggggcggagacacagcacccaactacgcgccccaagaaaaatcgaagacacgggcaaatgagggaggaatccctcatgacgaacgtgagaaacatccatgcaaagaacaacacaaacggaacacaccacaaaaacaaaaccaa

SEQ ID NO: 278621 - DNA, 324 bp, Glycine max
agtttaatcattcaatttcgaccgtctcgatatattacgggactcaatcagacatccgagtaaaaagttattgtcgtttgaattggctcagaggttcaaaattcaatttcgaacgtctcgatatatttcgggactcaatcagacatccgagtaaaaagttattgtcttttgagttggctcagaggttcaacattcaatttcgagcgtcccgatatattacgtcactgaatcggacatccgagtaaaaagatattgtcggttgaatttgctcagagcttcaacattcaatttcgagcgtctcgatatattacgggactcaatcag

SEQ ID NO: 278622 - DNA, 168 bp, Glycine max
  unsure (1)..(168): unsure at all n locations
ttcatacgacaataactntttactcngatgtctgattgagtccccgtatataacgaaacgctcgacattgaatgtttaagctttgagccaattctaacgataataactttttactcggatggccgatggagtattggatatatcgaacgctcgaaatgaatggagaag

SEQ ID NO: 278623 - DNA, 318 bp, Glycine max
  unsure (1)..(318): unsure at all n locations
agctttgttttgataggtaaaatacatctcanaattcagcttataagttcataacttcaaatcttcaaagtttctcacatttatagtcaatctatataaagtatctgctgtctctaaatggtccaaaagtttcgtctgagcttgtgtttgaagaaggtatatattagtgaaactgatatagcattgtgcttatctttcctgagccacactctggtagtggttaaagcactttagcgtagagtaggtttgatcatagtangtataacaggcagcgcatcttttgagagaatgggttgatcttttgattgttctcttact

SEQ ID NO: 278624 - DNA, 467 bp, Glycine max
  unsure (1)..(467): unsure at all n locations
gcttctcaaggaagctacctagtctataaatagaagcatgtgtaacatttgttgtaactttgatgaatgagagtcttgtgagacacaacttanagttcaacttctctccctttntcttccttcaatttcgtgctcccccctctctctttctctccctcttttttttcctccattgaagcatcctttccaagcttcttatccaaggctcatcttggtggtgaagctccttcttccatggcttattccctagtggatggcgcctcctctcacctcttctcctttgtcttttgctgcatctctgtggtggaaaatcaccattaaaggacctcattgaagctcanagatccagcctccatagaagccccacaagaaagcttccatcacctttcctccttctttattctgctgccattgatcttcaagaaatgaaggactccattggtgaagaagatctaaggcctataagc

SEQ ID NO: 278625 - DNA, 206 bp, Glycine max
  unsure (1)..(206): unsure at all n locations
ttaatcaagcacccgcgagctatacancgaccgcagcgaggaggcagcttaatttatcaaaaaaccacacacgggcgggtgcacgtgataagaacccctccctcgccccaacgatcctaattcacatcacatacgcctaacactaactgcacaagacctaaatcattcctcttcagccactaaaccagctgttaccacattctctt

SEQ ID NO: 278626 - DNA, 291 bp, Glycine max
  unsure (1)..(291): unsure at all n locations
gggagtggctgaacgacctgaacccnaaacagacgaccgggggggaatagaccgcgtcttcccaagaccacggctagcaacaacagccccaaagagaaacgccaacanggcacgcccacccggcagaaggacctatcccaaacacccccggacaacccccgaccacgcgagccccccccccagaagcggcccaacccacaaccacaggaaaacccaaacgcacgcccccccgagccacccagcacagaccccgcgacagagcagggcagaagaacagccaaaaccccccgc

SEQ ID NO: 278627 - DNA, 316 bp, Glycine max
agcttcttatgattgtttgttcctaatttctctacaattgcatcacctctcaatgagctggtgaagaagaatgtggcatttacctgcggtgaaaaacaagagcaagcctttgctttgctcaaagaaaagctgactaaggcacctgttctagctcttcctgacttttctaaaacttttgagctagaatgtgatgcctctggagtgggagttggagctgtattgttacaaggtgggcaccatattgcttattttagtgaaaaacttcatagtgccaccctcaactaccccacctatgataaagagctttatgccttaa

SEQ ID NO: 278628 - DNA, 453 bp, Glycine max
  unsure (1)..(453): unsure at all n locations
actcagctttagcattttagagaacactttgtctcgagacattcatagnccttttgcaactcgaataggggagttcattgtagacagttgaaccatctgttgctagagaacttgattatctttgattcactgtgttcactcgggcagagttggctgtaacaatttacaaagtcttcaagccattattgacaatgaaattaatatccggtgcatgatcaagtctgtcaacattttatcaatacaaatattggcttcacgtgaagatctttatatatatatatatataaagtagatgtgtggacatttttgtagaatcaactttccatcctcttgttagtctctattatagtaaaattgcatctcatatttagatatatgtgctaattaatgacgattataaattagctctctctttttacagctgtttacttttaatccaatttatacgtacgt

SEQ ID NO: 278629 - DNA, 352 bp, Glycine max
  unsure (1)..(352): unsure at all n locations
agcttgtataatggccaaacatgatacatgtcagggtttggtttggttcaagggtaaaagggatgccccacattatttccatgacacaaatgcaaaaatgatgatttggaaattttatgcaaaactggtcatgcatgcacctatgcggacactcaagtgtcaaattnttatggtcatgtgatgctagggctcaagattcatttcctctatttttagtcaatccaatgtttccaaaatatgttcttttatcaatttgtacattcatccgagtccactttgggcgtacgggaaaattttcacagcattcacccctcaggtgtatacacanttttttttataaaaactagttatg

SEQ ID NO: 278630 - DNA, 463 bp, Glycine max
  unsure (1)..(463): unsure at all n locations
tgatgtcgttggacctctgtgtcgagttcgacaccagaattattatctaaggcataatgatattaaaactcaatgtcattaggatcactatgtcgataatcgacaccaggattggagttgaggcatgatgatttcttgataaatcatgtaatttctctggctttcaagcacttgtgagaaattgaggactgacgaagaaaatgacaatatggctttttaaccacattgtcatgtcatttcttgttacactccacattgatgactattcaatgaagtcagtaatatttgtaaccatggaaggtgttgcatcaataaatggtgtacttaccaccatgatttggtattacatgacttttgttggatggagtctaaattaggtgtnttatcttgngatcnatgtttgtggccatagtttgttgttagctcgagagtctttttgaaaatgttgttaanattaaagata

SEQ ID NO: 278631 - DNA, 372 bp, Glycine max
  unsure (1)..(372): unsure at all n locations
tatcttatttgttcagcctccatagaagctcaacaagcggagcctccatcaagtggtaatcacagcacaagagcttcaagtatgtgctccttanacctccattaattttttgctttaccatctcttccattgttgttacttcatgttttctccatgtatctcctcacatgtcttttgctaaatgtttttaacatgattctttacattttccaccaattaaacttgctatagaagctatatttgattttctatggttcagatttcttgttcttgttcttataccatgaattgtgttgagtttaagttccttcgagttttgtcttgatattttntgtggctgaaacctaaaccataaaattcttacaaaaatat

SEQ ID NO: 278632 - DNA, 516 bp, Glycine max
  unsure (1)..(516): unsure at all n locations
aggggcttaacgtagngcttganatcacnctttgatagaccatttganaacngacacaagatactagagcttgagtaggatgtattgtcaacccctatatttgttaacnacttttgtgaanaccagncggtgaagcatctgcaaatatgcctgtgacctagtcaacttgaccagctatattaagatgacatcccccatatgaagaaatgacaaccactgcactgacagtgacacgttcaagaccacattacaatttgctgttgatgtaccagacaaaacagccatatagatagttgctcccccactgaaataccaactctaagaatatatgaacttgtgtcacccgcagacacgcatagatgattaaggaccgtgacctgactatactctagaaacatgatgcatgtgatcgtaatcaaaacaaactacaatctcttacacttggatagaagaacggtgctgccaagatcgtgagctacaatcacttcctgccaaggatatatatggccatataag

SEQ ID NO: 278633 - DNA, 387 bp, Glycine max
ctgcattttaataatatataataagagaactatgactatggaagaatctattcatgtttcctttgatgagtctaatgttattcctccaagaaaggatattttagatgatattgcagaatctttagaacaaatgcatatttatggacaagattctaaaggaaaagggaaagaaagcaatgaagatcctccagaagaagccaaatcaaatgatgaacttccaagagaatggaaagcttcaagagatcatccacttgacaacattattggtgatatctcacaaggggtaacaactagacattctcttaaagatgtatgcaataatatggctcttgtgtctatgattgaacctacaaatttaaatgaagccataatagatgatcattggat

SEQ ID NO: 278634 - DNA, 541 bp, Glycine max
  unsure (1)..(541): unsure at all n locations
ggaggaganagttgaaaccnttngaagntcgangncnntagattgatcaccnttcgcaaaaacgncacacnatagaanactcaagcgggcatncggaattgtgagagccccactccatctttaggaaaangtgcctgccgncncanacaaacaaatcaaacggggcaagacaataatagangnnagctgaatacctcacccactcaagagnatcacacaaanatggacattctcaaatgaaacactcttgccttataccactctaaataccccttgagttcttaagcaatncaagagatcatggccacaacaaagaacaatccaccaatatgtgaaaggaaggctagagagacaaggaaaagggtaaccaagaaaaaggctaacaatgcctttaggcacaaatgaaggaaatanaattcagaacttaagaattcaagtaacaatccttcatgcaaccagaatattaccttaaagagatnttnttctaaaagtcgtcacgcatgaacaattcagcccaacttttttataataacggtataca

SEQ ID NO: 278635 - DNA, 403 bp, Glycine max
  unsure (1)..(403): unsure at all n locations
agcttcatcattattttcgagcgtctcgatacgttacgggactgaatcagacatccgagtaaaaagtattatcgtttgagttgctcagagcttaacattcaatttcagcgtctcgatatatgacgggactcaatcagacatccgagtaaaaagttattgtcgtttgaattggctcagagcttcaacattcaatttcgagcgtctcgatatgttacgggactcaatcagacatccgagtaaaaagttattgtcgtttgaatntgctcagagcttcaacattcaacttcgagcgtctcgatatattacgggactatatcagacattcgagtaaaaatatattgtcgtttgaatttgctcagagcttcaacattctatttcgagcgtgtcgatatattactggact

SEQ ID NO: 278636 - DNA, 368 bp, Glycine max
  unsure (1)..(368): unsure at all n locations
cgacaataacattttactcggatgtctgattgagtcccgtatatatcgacacgctcgaattgaatgtngaagctctgagccaattcaaacgacaataaatttttactaggatgtctgatataatcccataatataacgagaccctcgaaattgaatggtgaaactcttgaccaattcaaacgaaaataacttttactcggatgtctgattgagtcacgtaatatatcgacatgctcgaaattgaatgtgaactctgaccaattcaacgacaatacttttactcgatgctgatgagtccgtacatatcgagacgctgaattgatgtgagctctaccaatcaacgacataactttctcgatgctgatgat

SEQ ID NO: 278637 - DNA, 490 bp, Glycine max
  unsure (1)..(490): unsure at all n locations
nggagcgcagccgtttcgaagtcntacaaggcaancagcaccggcggacgtttaagagaccgacggcaggcaggctaattttatatattcgagcgcctccatatatgacgagactatatcggacatccaggtcacaagttattgtcgttggacattccttagagcttccgttttcaattacaagcgtctagatatattacagggctcgatcaaacatccgagttaaaagttattgccgttagaattttctgagagcttcacgtgttcaattacgaccgtctcgatatcctacgggacacagtcggacatccgagtcaaaagtattgtcgttgaattactcagagctctgtgtcaatatgagcgctgaatttacagactcatccgacatcgatcaaagttttgtcgttgacttcaaaaggttcgacataattcagcttctattattaaaggctatcgacatcgattanagtatggcctgaattctggaccc

SEQ ID NO: 278638 - DNA, 331 bp, Glycine max
  unsure (1)..(331): unsure at all n locations
aataatatgtgcatgatgtcgatgaggaattgctcgatcggcgtcagcaggtgattttctttntagacctcgatctgttaactntcgttgccgatgtcggctaggatttttgtcgaccagtaccggcgaataaagttttgttccgacgtgggcaaatgttttccctgccgagtaaatgaacacatggcggtgtgggctgaaacaaaactatggctgagctcatacctaacaacttacccgagcgacattgtcaattcttaccgcaacacccaacaaataggcatcctctaccgtaagaaaatatcatctgccagcatttataaaataattg

SEQ ID NO: 278639 - DNA, 308 bp, Glycine max
  unsure (1)..(308): unsure at all n locations
cctgtgatgtacctaaccaggcgagctcctggaagtcaacagataaaaggaacaaagaccaccaagcaagaaggcttgtggtggctggccagctatgaacttgattgatgtgtgagatatggcctctggtaatcgattaccaagggtgggtaattgattacaatgcttanaaatgaagacaggangctaagatggtctctggtaatcgattaccaagggggtgtaatcgattaccaggncttgaaacgagatcangaagtcatganggcttctggtaatcgattaccaagggggtgtaaatcgatacc

SEQ ID NO: 278640 - DNA, 518 bp, Glycine max
  unsure (1)..(518): unsure at all n locations
gaagatgagtttgaanctttgagattcacacattgatttgacgcttcgaacaacccanggcnggcggcattcagagagcgcccncaattttacatgccacccactatctangagngttttgtgnngnncacaacggcgcaacaaccgggcgaagacgaaaacgacannancagaaaagagngccaaacaacagcacgcagcacagaagaactcccaaacacaaaaagccgtcctgcatccaactctagcccctctgttattattcttcatccactagaactacctgcccatcaatatgctatactgcctcaaagcagatttagattcatccaaagtaccaaacttcatccgtaattccaacttctgttcacccactccactactttgactatattgaggataaacttcaacatccttatcttcatcatcactattaactggtgatttctatctcctctgattgatataatctggctcacttgaacttcacttctttcttatacaaatgaatgttaaag

SEQ ID NO: 278641 - DNA, 187 bp, Glycine max
  unsure (1)..(187): unsure at all n locations
aatggactctaactctttcatatgtaaggattcaaactcacctagtacaagttgagacacaccttcttactctgtctctcctttgtgggaggttgaagctatcccatgccccttacagatgttgcttaaaatcttctcgacacatcatcatctaatgctgataatangagagagccttctgctctct

SEQ ID NO: 278642 - DNA, 508 bp, Glycine max
  unsure (1)..(508): unsure at all n locations
agaggcttagtctgagcgcttttancttctacactctttgnancacagccananacacaaggngccaggctcttctggaaaggcaaacggtgtgcggggccnncgttcttaacgaangtgggcgctccaaaccggggaatggcgagccacngangaccngggacaggaaaaagaaccagaaaccgcncagccacacgcaaccgagacagccagagaaccgcacgcaccgccacctggagaagccactgcgccgcagatcngactctctcaaatatgctgaatgacatagtatggcgaacaagattacaatgaatctttgtcctgctctacatatgtgaagatctttgaacttaggctggactcttctgatgtgtaggatctgccctcgctgttctgggaaggcaagacaatactctatggtataggagcaaggcaatacacagtcccgcattatccaaggctccaaacacccgccaaacttcataacctcttatacactagcccgcgc

SEQ ID NO: 278643 - DNA, 198 bp, Glycine max
  unsure (1)..(198): unsure at all n locations
taaaatatcctactatttatgtcaacatacaaagacattcaacacattttagttaccacacatatatatatacatctttgaaaagacatacattcttgtctcaggcattgtgtaaaattacacctaatcacatctnatattctgtatacaaactcctatcatattgaagattacatacaattatgtgttgatacatta

SEQ ID NO: 278644 - DNA, 279 bp, Glycine max
agggggtcaagagaccttggggacgtcaggtggggtgctattgcccaaaaccaagcttgaccaatcccgacccaacccgggcatagtcagtcagtgagaacctgtgatgtacctaagtacgcaagctcctggcagtcaacagataaaaggaacaaagaccacaaagcaaggaggcttgtgtggtggctagccagctgtgaatcttgtgtgatatatgggttatggcctctggtaatcgattactaagggtgggtaatcgattataaggcttaaaaatga

SEQ ID NO: 278645 - DNA, 330 bp, Glycine max
agtttgttttgttgcgtatgatattggttttgcgtctgtgataataaagtcaaacacatcaaccaaaaagagaggaagaatcccttttgttttaattgattgtgagaggagtgaaaaatatatagtatacaagacagatttactttgaatggtgactatcactataaaatgtgggtctccctttaagccacgattgaaacccagtttgggaggtgaagggtggatgatcaacttgacatgtgggacttataatcatgcattgactaagtcattcactatacatccatatgttggtcgactaattgaggatgagaatattattattgatga

SEQ ID NO: 278646 - DNA, 285 bp, Glycine max
  unsure (1)..(285): unsure at all n locations
tcacaccttcggccagggccatgtgtgatgaatcagaagtagaaagagcaacaactgactgttgatgtgcgttccaactgattgatgtaccaaacanagcaaacacatatgctgtcaaggactaccttgtgtctacatttcttgcagaatccgcatctgcatagccggtgactactgcatcatgtgatgactacatgtacactaaaccagctttcaaagatccaaatagatacctgagtgtacactgaacaactacccaatgcgcgctgccaggatcacccacga

SEQ ID NO: 278647 - DNA, 356 bp, Glycine max
agcttttgtttgcttaactcgaaagcacaagtgtggtgaagaagaagctaaaaacgacagtcactacggttaagacagactgtgatgagctgaaagatatcaacatgaccacgcttaaagcattagagcgggaaacaaaaagggcccgaaaaaaagaatggagcacgaacaagttccgaggggctctatggagcagcagtaacgtgctcaagcttatataggttgagagggatgaatcaaagatggaaagcatggtgttagaggataagttacacgcttatcagaggttgaagagatgtttgatagaatagctgagcaaaacagaagagaatatgttgataattggtgatcaacat

SEQ ID NO: 278648 - DNA, 463 bp, Glycine max
  unsure (1)..(463): unsure at all n locations
gcttacacaggaaagtgttcatcttaatttaaatccagattgttttatatcgattttgcaagtcattcccatcaaatcaaggataatgtgcataatcaattcatggatcaagtggccttagaataattaagaaagggaggttgaattaattattcgtaaacctttactaatntaaaaattactcttctaaggattntactatgttgttaagtaaataaagagtagaatagacacttaaccaaaagtaaaagtgggaattaaaatgcatagcggaaattaaaagagtatggaagaaggagacacacacacaagagtttttatactggttcggcaacaacccgtgcctacatccagtccctaagcgacctgcggtccttgagatttcttttccaaccttgtanaaatccttttacaagcaaagatccacaagggatgtaccctcccttgttctctttgaacaacc

SEQ ID NO: 278649 - DNA, 407 bp, Glycine max
  unsure (1)..(407): unsure at all n locations
agcttggttttagatcctntcaatngagtagcattggaaattgtacctgtgcacagatgctacaacatgtccctcgcttgcaatcttccaaactcaagcaagcaaaacaaataatagtctccctaaaaacaaatcaatacctgcatgtctgtaactccatacaagtgaagcttccctttattcaaaatatgatcgggcacctacatgtctctaataaaataaaaattattagtgatatcctcatagagcaaaaacagagaataaattattaaggaataaccacaaaatttagatttcatcaactatcacaaacatatgttagtcaaattgtaattctaattgaaatccaacatcataattactcacggatctgcataaatattataagagtcgacaatatgatatct

SEQ ID NO: 278650 - DNA, 279 bp, Glycine max
agaatactcagctgggctatcagagagtcggctttatttttcatgctgcagatttgtatagctgctactctccctaacctggcatttcatgtacgtaatgtcacctactatgaagaacaccatttcttactcacccgtctcctcggtctatctcctaagataacatattcttttcatatacctaacaatcagtttattgtactcagatcccacacacattgtgtaacttaaagtggcgaaagagcctttgacacacaaattcagtgaaccaccgggtaa

SEQ ID NO: 278651 - DNA, 345 bp, Glycine max
agcttgcttttacggagttttccgactatcctctcgtgtggtggatcaagctacaaaaggagagagcatgaaatgaccagccaatggttgatacatggacggagatgaaaaagatcatgacgaagcggtatgttccggctagttactcaagggacttgaaattcaagctccaaaaactaacccaaggcaacaagggggttggggagtatttcaaggaaatggatgtgctcatgattcaagcaaatattgaagaagatgaggaggtaactatggctcgatttcttaatggttcgactaatgatatccgtgatattgttgagctgcaggagtttgttgaaatggatg

SEQ ID NO: 278652 - DNA, 211 bp, Glycine max
tcctaccaagacgactgacaagactgatgcaaatcacgagggcgacatagacggagaaacccatgctgtgactgccattcctatacgaccaagtttcccaccaacccaccaatggcatgactcatgcataacaaacctccttacccaccacccagttatgcacagaggccgtgcctaaaacaaccacgaagcctgtctaccgcacttccat

SEQ ID NO: 278653 - DNA, 452 bp, Glycine max
  unsure (1)..(452): unsure at all n locations
agtttttttggcttttaagaataccatacgcatactcctatatctctcagtagctgatgaagccgttagctcaacccacgtacaagaggaanggaaacattagtttcctaaaactttcaccagcaacatactctataacgccgagaagtgctaccatagccacaccatactctataatgtcgggaaacattagttcctggctttcaagaataccatagccacaccaccaatagcactcattacctcggctcgacgacttaagccctactttcagagtcatcaagtggtggtcaaaacaaactacagttagagataggggagcaacatgaagacttagccttgaagcttgaagaaagttttgtttttacatgcccaaatctctttagtggaacgttgattgagtgtatattgtgattgctcatataacatggatcatctaatagggtattcaa

SEQ ID NO: 278654 - DNA, 419 bp, Glycine max
tatgaagactcaggctatgggagtacatacatgggacctacttattgtatcgcagagagtacgtcgtatctagtcaagggctgagagaccatacaaggacgctaacgatttgtaattatgcccgccaccaagcttgtcctatgccgaccctacccgagcataccatgaatctgttaaccggcggagtacgtgtctgccgtcgccttggccttggctaacaatcggggaagttctagactcccgttcaaggtgagagcaaaccgatccatccacatggatgcctcttggtgtaaagagtagagcacccttcctctaacctctttttgcgcgtatacttgggcatactcatccgcgattctacgctcgtgggccgtggctagacctaactcttcttggtacttggcgatgatagctaacat

SEQ ID NO: 278655 - DNA, 300 bp, Glycine max
  unsure (1)..(300): unsure at all n locations
agctttgttaaatgttgttnttcatctttntgctaacccaatctgctggcttagcgagcgtccgctaagcgcaacactcataggctaagcgtgaggaagactctggaagaagatgagctatacaggtttgctaagcgcaccgcttcatctcactaagcgcaccactttagttcattcgctaagcaagaaaggcacgtgctaagacgaaattcactaatgtgcgctaagcggtccataagtgcgctaagcgcacgagcacgtacaaggccacctatntangcctgaaatcagattttagag

SEQ ID NO: 278656 - DNA, 538 bp, Glycine max
  unsure (1)..(538): unsure at all n locations
aaggacgatagactgatnctttcganatcgacactttgtactgacacnctcgttananacngacacnannagaaactcaagacgatagcgncgctatctagcagnatatcatgtttcatataacaccttgaaagagnancnacncccgcnaaacaggggagggacacaaacancaacagcaancaccgcgaaaccaaaagaggaaangacnngaaggaacnngnaaaacnnaagaccgacagccacgancaaaccacagagggaccgaaaaagcnagcacaccaaagacccngagacaccgcaaacaaagnnaccaggccgcaccacacgaagnagaacgccaaggcgcccannaagaaaaacagccanaacacccagccgaaggagcagcaaaacacagcgagcgcccacagacangagcgggcccagacaaaccccaagaggagaccgggagaaaaaggnngcccnaacancaacgccgccnnncngaggaaaaaccgcagagacgagacaacccacaaagccccgacaaaacccg

SEQ ID NO: 278657 - DNA, 397 bp, Glycine max
  unsure (1)..(397): unsure at all n locations
tgcttattgatcaaaattgcctcaatcatttccaaatatgcatgtgaattangatgcatcaacaagaatcaagccaaggctattgtgcaagcaatcaatggggcaaaacacgccaaatgattatgatgatggatggctcacattctcacaaaggtaaactcatcactttcaaattgagctttcaaaactatcatgacatgtagaggagaatcaaggatntcaagtcacaaaatgtcaaaaacttttattttcaaaacaattacccatttcttgaacatatcctataattcaaagaaaaacatgcacagtcgtacatgcacacaaaatcgacccanaatattaaactaacaatccgacgaaactaacaacattaaccaattaacaaaaccaacaaaac

SEQ ID NO: 278658 - DNA, 491 bp, Glycine max
  unsure (1)..(491): unsure at all n locations
agagtgagttganncctttgangttgangtcctttgactgatccccctcgtatnnaccgacacnatanaatactcaagcctctcanagaagccatcggggaagcttcttgattgataccctnnaattgagcttcttgaggaagccacatgaagnggcctcggttaaaacgcttcccagccttcattaaccgctggatcttctcgaaatttggtttacaacttcacaagacacttgtccatgatctgaccgttgggatctttcagaagatgtctggagtgtgggctaacctccgtcctggagctttcttatttaacatttcggccttgctttttgtatcttaagaaaacgcctttctctccttctttttccaacgcattttaacattcccatacttttcctctgcacacccatttccccacaaccttgttttcccttgacccccacggaggaaccttaccaagcgattttccacttgcttcggttcgtaaaa

SEQ ID NO: 278659 - DNA, 359 bp, Glycine max
  unsure (1)..(359): unsure at all n locations
agctntatgttattttttggacgcatggactaagtatgtgtcgcaacctacccttcngcngaaaggcgacgcanggcttcacggtgcgtcttctaaggaaagaaggcgcgtggagtcgccaccaacgtttatttgaggaaaacgtctgaanaatcgaaaaggtgtggtctacaaactttaagtgtgaaaggtccgagagtntgttttacgcacgatgaaagtattagcaccccacgcgtccgtcacaaaggacgacaacctttantcaagtgtgcaaatatgacttcagaatatttattttcccttttttatgtctttttgngttttatgcttatatgtttttgatttttttacctttt

SEQ ID NO: 278660 - DNA, 458 bp, Glycine max
  unsure (1)..(458): unsure at all n locations
tgagacaacttccttgagaagctagatcttagctacacacttccctctcataactatgctcacctccttgagaagcttccttaagaagattcctaaagaagctagagcttagctacacacacatctctaatagctaagctcacctccttgagatgagaagctagagcttagctacacaccccctataatagctaagctcacccccataacaaaatacatgaaaatacaaaaaaattccctactacaaagactactcaaaatacctcanaatacaaggcaaaaaccctataatactagaatgaccaaaatacaaggcccaaacgaaggagaaacctattctaatatttacaaaaataagcgggctcatacttagcccatgggctcaaaatctaacctaagtatcatgagaaccctagggccttcccttggatctctggcccaatctgcttggagtcttc

SEQ ID NO: 278661 - DNA, 523 bp, Glycine max
  unsure (1)..(523): unsure at all n locations
agatcactagccctaagtcacgcnatnaaccggacccggcgttctttagacaaccggcggcatgcaggcttttttctttatttacggaaaatctgggacttagccatggtagaagtctctaccgattgcatcccgttcccagtattatgaccagcccctaaggtgcttcacatttcaggactttccagctagtgccgcttgtgaaagagtttgaagaattcctgngatgcccactgngaggaaagaagccatatcttttctctggttctatcccttcacgacaagagttgcaaggtagtgaaaatctcagcacaagagttgaaccanngtaagcanaatangaatggngtagtcggagtatcaaggaaatgtttggaggaaanggaanaggcctttggaaatcaaggcgaatgggctntcttttattgacatctntgcgccttttgatctttggagtgtccttcttttcgatatngnanggttagtggacctnacagtgattgacgctttcctcgcctttctn

SEQ ID NO: 278662 - DNA, 399 bp, Glycine max
  unsure (1)..(399): unsure at all n locations
tggccggctaacctagagaacgggctattatctttncttcgtttctcccttngccaggcagaattcgccagggactatccgcctgaattcttttgtgtctcccttctcccttgtcaaagaattcaaatcgacacagtctgagaattcttttaattcttccctttccctaatacaaaagtgttcaaagaactaactgcttgagaattcttttgtatccccattcacaaagcatcaaaggtttaacagcccgagatctttgtcttaacacattggagggtacatccattgtggtacaagtagagggtacatctacttgggtttgactgagaacaagagagggtacatctcttgtggattagttctagtggagggtacatccactagggtttcaaagagaac

SEQ ID NO: 278663 - DNA, 160 bp, Glycine max
actgcccggatctaagacggggggagcttttttgtgtaaggatttatggtatcagagaatttgtacacccagttgaaatgaaacaatatgtaaatgaaggctatggtgacagcctagctgacacgtaaaatccttaaaagactttaagaaagatcttctt

SEQ ID NO: 278664 - DNA, 613 bp, Glycine max
  unsure (1)..(613): unsure at all n locations
agagagaagttganacagtgagattgaancntggttgacagcttcgaacacactacaganatcntctaaaatatgtcctacgggcantatagtggacaagtagggtttgggacacnccgtgtgttgtcctcttacgtacctacactctcatagtgtccacatgtgtatnctataatgcgctgctttttactgttgtggttaaagtctcatgtaatctatttctttactattctgtaacgtgtgtgatgtatcagcctacattgaagttctagttacagttaaggaaggaatagaatgtttaatttgtcgcagacaccgttaatagttaaatgtccacctcccgccgcccttcttacatatatgtctcgatgcncatcgttgaatcacaacacacttacttgtatttttcagagggttcaatcatatacactcataatataagggtgatatagattgcctctattggctttacaattaaatactgctacatggatcagngantatatagtcaaactctgaggttacgaatagctatgcatccaatatgcccgaagagtgggttatataagggattcaatatatacttgtgcgacaattaacgccgaccaattcg

SEQ ID NO: 278665 - DNA, 431 bp, Glycine max
  unsure (1)..(431): unsure at all n locations
attgtaaaaatagaaagcttttttgaaacacgtaattaatatattttttgtattaccaatttatgtatattcgatctcttggtaatttcctgtggttttaatcttcctttgggtattgtttgtaagtctctaacgtgctgtttaacttgaatgcatagatctaaacatccctgacgtactttgagaaaacaaatagaatnntagttaaaaattacatanttcgttttagttaaaattattttttatgtatgcgttgaaatgacttgttatanctcattttgttntaaaaaaatatttattttgaacaaaataactaanaatatttaatataanattaaatttaaataatnnttgtcacatgaaaagagatgttttgataaattatttatgccattaatantttagaatatataaatattataattttatat

SEQ ID NO: 278666 - DNA, 174 bp, Glycine max
  unsure (1)..(174): unsure at all n locations
ccttatggcttgcctccggacttcactccccgtgccactccttgatgatntaagccatgtcccctacttttgatgggcaactcccgccttatgacgactatcccaggcaagacgatgaggaaggagatacccatctcggccccctgctccacctcaaagatccgtccccacatg

SEQ ID NO: 278667 - DNA, 478 bp, Glycine max
  unsure (1)..(478): unsure at all n locations
agtgggttgccctttgaattctgcgaattagtcggtccgggggcccttagaccccgaggcggtgcgcctttttttagttctctttccgcgttggtggttagaataaatcattaaatggtggattcgtggttcttggcaatgtaatttgatgtttgatttttcaggtgcaaagaatgtcattagtgtttgccgcgaatgtatatgtgaacccttgtatataacagtctgctgatgttgattgatggtttgatgatattncgatggagatgaatcgtggcgttccgtggaaagtaaatttgttgacgaagtcttttgtttccaacctgtaatggctaaatagatggtttgtttgcaatgaatagcattctgatangggatgtgaatgcnactgacacatgttagtgaccttagctcaagcgagcttgatctgatgccatgaatgtggctatgactgcttttctctatatgtttggactgg

SEQ ID NO: 278668 - DNA, 269 bp, Glycine max
  unsure (1)..(269): unsure at all n locations
gtctccgttggccttctccagtatcttcttctgcacactgtacccgaatntgccgtcgctgtgctccctccagagggagtcgatggccctgagggcgctctcggagatgaacttcacctccgagaagaagacgtagccgcgcttctgtgcggcttcgccagcaagcacgatgaggagacgacgcgtctcctcatcggccagctgaaagttattggtggagagatggtggcggaggaggtccaaggacagtgtggtttgggaggtggtgg

SEQ ID NO: 278669 - DNA, 483 bp, Glycine max
  unsure (1)..(483): unsure at all n locations
gcctgcacgcttcagagacggcnatcatccgacccgacatctgatctcaactgacggacagacgcattatattgaccaagactaccaggcggaccttccttaccctatagctcgacttataataagtacgtcatatatgtaggatggcgagcattacactcggtctctggtaattgaggacatggttgtagaactcccaacacgtccatatattttctagaacatcttgaaagacataatgttgtttaaacacaccatagatccttgtctccctccgtcgacattccaagaaaagtacaccacttgctcaaatgtcaatacacgaatttgtgaggttatgccagacaactttgctgctctccatgtggacatccttatgagactcattaagattttggcattgtagggcgacaaggtggactcttctctcgcctttcgcgtcgaacgttgaacttctctcactgtttaatcactgccttatcn

SEQ ID NO: 278670 - DNA, 518 bp, Glycine max
  unsure (1)..(518): unsure at all n locations
aggaaggtggcctgagcccgttgatnatgacnacatagnatacacacgctcnatatagaaaactggcttgatactccaggaggacgcgngccactcatctcttcagacttttctcacctngttgagaagaatccgccagggaatatccgacaaacttagagcgtgcctcccttctcccttgtcaaagaatacatctcgacacagtcagagaattctagaacttatctcctcaccctaagacacaggtgagcacacaactcaaacgcaaagacaatgcttttgcatacccattcactaagcatcaaatgctcacagaccgagatattcgacgcaacacaccggaaggtacatacagagcggtacaccaagaccgtacgaaggacgaagctattctgatatcacgagagggacatgcttagtcgaaacccagggcggaagaacatccccaggtgatgagacaaccaggggacggcctgtactcgtggactttgttggaaaggaatatacatggcgaacag

SEQ ID NO: 278671 - DNA, 274 bp, Glycine max
atggatccaaacccagtccctctcattaagaactagctcctttcttcctctattgcctttagttgaatacacctttgtttggttctctatttggatcttaaccctctcatgcaacttctttacaaactctgacctacattccccttctttatgtataaaagaagtgtcaagtgggaagggaatgacgtctaatggtgttacgggattgaacccatacacaacctcaaaatgagatggcttggtggttctatgaacccttctattgtaagcaaat

SEQ ID NO: 278672 - DNA, 269 bp, Glycine max
caaggcttaaccatccagagaagacactaaaataatgcttagtcactcaacatagaagtacaacaacaatacagtgctgagacctccatggtaaaagcatatacaatgcttaatcaccctggacagacgcttacattagtatatagaataacacgaaacttgtcttcagtgacgacatttcacaaacactttgtgaaccaacatctactaaagctaagccatccatggtaaaagctataacaatacttaacgcaccatggacagaagct

SEQ ID NO: 278673 - DNA, 349 bp, Glycine max
  unsure (1)..(349): unsure at all n locations
agcttattgtctagaatgggcatagatgaacccaactagattaattgcccttctaattgtcttccttatcaagggaagcttaccaatgtcttcaagcctcaaatcaatacaatgggatgcacaaggagtctaataaatatgtttccttttgtcttctaacaacttacccgctaaaacatagttgctcccattatcagttacaacttaaacaacgttctcttctccaacttcctccacaatagcatcaagcaactcagaaagcttttcacctgtcttcacaaaatcagagccatcaatagacttcanaaacattgtaccagcttgagagttaagcaaaaaattaatgatg

SEQ ID NO: 278674 - DNA, 265 bp, Glycine max
tcaccgcttctatgtgtgatgatcttagacaaatagattttaatgtgacttctctgtacttggtatacgaaatgtgggattcagtgattgacacagtgagataggtcatataccgacaagaaagataggcacgaattgaagaattaaaatcttataatgtcagaccctaatttcatccggggactattgttcactgatattatgattcttgctagttgaattacagagattgacaccagttacagtgcaaagcactgaattactc

SEQ ID NO: 278675 - DNA, 400 bp, Glycine max
  unsure (1)..(400): unsure at all n locations
ctttttgtgccccacaaagccaanaggaggcgcggtaagaaccatcactgagaccacacacgaccgtgcactcgagaaaaactatgcaggcacccgacctaaatgtctgaagacaagaaacatagtcggaagcgtgccgtaaacaccaatgcattcatgtcccccgctgacggagctcggaccaagcactatcaaggatgagcgtctagagcgccgcatgatgcacatgcatgcaccactttcttgacacacactaggcacacttcatgtcttgacaacatacttttgacccaacgcgatgatttctacaacaccgaccgacatgatgccgcgcagaaacgaatgccggctagagaccatccctcagccaagatctgaacaacatccattgataaccccc

SEQ ID NO: 278676 - DNA, 258 bp, Glycine max
ggggtgactgatgactgtgactgaaccacttggaagccgactttaaacattgcacatttcaacccggaactcctctacaagtgatacttgcccgccccatgacctcccacacaaagctagcgcatcgccccccctcgcatcggccatcgaaagaaagccccaaaggaaaatcgggtgggtccactgtagattgtcggcaacaagactcaacagcccaagattcagcacgcaggtcgaaggaaaggctctagcaacgcg

SEQ ID NO: 278677 - DNA, 247 bp, Glycine max
atctttgtgtatcttcaaacaacaataacttttgactcgaatgtctgatagagacccgtaatatatctagatgctcgaaattgaataccgaagctctgagcatattcaaacgacaataagtttttactcgtatgttcggttgagtcccgtaatatattgaaacgctcgaaattgaagaccgaatctctgaacaaattcaaacgacaataactctttactcggatgtatgactgagtcccgttatata

SEQ ID NO: 278678 - DNA, 250 bp, Glycine max
  unsure (1)..(250): unsure at all n locations
gcttcgctattgcatggcgagcgtctgtcttataacgggagtcaattctacatccgatttagtaagaatngacgagagaattagctcgagagttcgacattcaatctcgagcatctcgatatattacgggactgaatcagacatccgagtcaaaagcgatcgtcaatagactttgctcagatcttcaacattcaatttcgagcgtcgggatgtcttacagcactacttcggaaatccgagtaaaaaccca

SEQ ID NO: 278679 - DNA, 309 bp, Glycine max
agcttctctatatattatgcacctgaatcagacttccgtatgaaaagttatgaccatttgaatttctcgagagcttccgtggttcaattccaagcttctcgatatattatgcgcctgaattggacttccgtgtgacaagttatgacaattttaatttctcgagagcattcgttgttcaatttcgagcgtctcgatatattatgcgcctgaataggacttccgtgtgatcagttatgaccatttgaatttctcgacagctttcgttgttcaatttcgagcgtctcggtatattatgcgccagaatcggac

SEQ ID NO: 278680 - DNA, 206 bp, Glycine max
  unsure (1)..(206): unsure at all n locations
atcaatggtcttattctaaagctaactaattccgccacacnncttgatatatagngcgcctgaagcggactttcggcnganaagacatgaccatttgaatttctccagagctttcgttggtcaatttcgagcatctctttatattatgcacctgaatcggacctgcgtgtgacaagtcatgaccatttgaatttctcaagagcatt

SEQ ID NO: 278681 - DNA, 368 bp, Glycine max
  unsure (1)..(368): unsure at all n locations
tgcttcatggtgaatcaaaggtgattcanaggtgttgtgatgataacaatgatgataacaaaagatgacgacaaaggtgatgacaaaaagctcaaagatcaatcaaagaacaactcaagtgaatcaagaataattcaagagttcaagataagaatcaagaagaattcaagactcaagaagaaagtttagagtcaagaatcaagattcaagattcaaggttcaagatctcaagaatcaagatcaatattcaagactcaagattcaagaatcaagagaaggcttaatcaagataagtattgaaaattttctcacaaattgagtagcacatgatttttctcaaaacatggttaccaaagagntttactctc

SEQ ID NO: 278682 - DNA, 383 bp, Glycine max
  unsure (1)..(383): unsure at all n locations
aactgtgagaaagcaaccatactatgaaggtataatcaatgttctctctctatgatctccttgagattatgtgaattttttcatctgtctagtcttggttgtggctacccaacaaattgggtggagctcatggctcttgtggaatggtgctggcagtctccatccataaccgtctccatcctgaagaatctctgtcacatttaatggctcagcctcagacaaaataaaaaaccatatatgatgatattntcctactcacagaaaataaattgaatgatgagaggtaactctacacaactgatttttcgctttcagagaagatattcttatttttattaaaagaacaacgtaaaatatttgtacactataatatgtttaaatgt

SEQ ID NO: 278683 - DNA, 386 bp, Glycine max
  unsure (1)..(386): unsure at all n locations
agcgtccttaagttgattcctaaagaagctagaagctagctacacatacctctctaatagctaagctcacctccttgagatgagaagctagagcttagctacacancccctataatagctaagctcacccncatgacanaaaacatgaaaataaaaaagaagtccttattacaaagacagactcaaatgccccgagatacaaggctaacaccctatactactagaatggccaaaatacaaggcctagacgaagganaaacctattctaatatttacaaagataagcgggctcatacttagcccatgggctcgaaatctaccctaaagctcatgagaaccctanggcctntccttggatctctagcccaatctacttggagtcttct

SEQ ID NO: 278684 - DNA, 468 bp, Glycine max
tgtgtggtctccattccagaatccaaacattacaagcaaaatttgtcattcattgatccacatgggctttattgggcttgtaacgtggtcaggggtaagagggctatgaaagaaaagattagagaggcttaaagagtgtttaagggtgtcataccctaatttcatccggggaccatccgttgttgggatgcgaccctcgtttgaccacttcgaggtatttggcacccatcgttaggcaattagtgaagttctgagacatgccggaagccaaaagaaaagggttgtagcacaatccgtgaagttctgtgacatgccggaaattaaaaggaagtgtgagtgcacaatccgtaaagttccgtaacgttccggaaggcaaaaaagggatgattacgttatccgtacagttccgcaacattacagagataaaacaagtatcgttacgaaattcgtaagtgtccgtaactttac

SEQ ID NO: 278685 - DNA, 317 bp, Glycine max
  unsure (1)..(317): unsure at all n locations
agctagtttttctatatctagatgaggatgtttcatatgttctcaagactggactaatacattcgctacccaagtttcatggtcttgcacgtgaagatcctcaaaagcatcttaaggagttccatattgtatctttcaccatgaagccccctgatgtccaggaagatcatatctatctaaaggctgttcctcattctctagagggagtggcgaaagatntcctgtactaccttgctcctaggtccattactagctgggatgaaccttagagggtgttcttggagaaaatcttgcctgcatctangaccactgccatc

SEQ ID NO: 278686 - DNA, 462 bp, Glycine max
aaatgatttctatacaaaagttagtcatataaagcgacgtacatcaagccacatttacctgcaattatcttacacttattgaggttaccacacccgacaccagacaatatttgtccatgcttcgtcaccctctacttgtcaacactactacccctgacatcagatactctcctttgacactggacaatctctgggacacatggcactctaagacacatgtcaaccctccatgtcagccctgcaatagaagcgcgaacactcagccattagcagtcgggctccccaaataacaagttatctctaacctattgatattgtaatatctttatctattggcaggtagttaattatctacaaagccacaaaattatctacaaggtacaattatcttctagcttttatctataagctatgagttatctctaacattatctataagctcctggctattatctataagcc

SEQ ID NO: 278687 - DNA, 533 bp, Glycine max
  unsure (1)..(533): unsure at all n locations
ccccacaccacccacaccatgaagccaagaaacaccacactncnacnccctnccccccaaccaagagttgacctgcatccncncnnnanaanacccggccngggaaacacaacgagaggaggaggtttgttttaccaaaaagctcggctngggcgngggtgcactgcacaagatgctgcaccagcacaacaagaagccgcaaaagccatgcatggccctagagcccgaaagaactaacccgagccaaaaaacactaaaggaccaccagctgctaacggaacgaataaaaactcaccacaagggtcccccgagaaaagcgggacgctcaataactgacgagtaggagtgaaccaccgacgggtcacgaagacagaccaagatttacaacagcggcgtccccgaaaaacagaaaaaagcccgcccatccgcaagcaggagctgatacacacaaagacagaaggaacaccatgcccagacagcgcatcaaggaaaacgaagcacacgccgacgaaaaacccgaaacccaagaaccg

SEQ ID NO: 278688 - DNA, 508 bp, Glycine max
  unsure (1)..(508): unsure at all n locations
ggcgagaagttgagacccgtgagnttcgacacacntgttgaacagcctcgtancaacgcgcanacttngcacacagagcaagggcangatattgctgcncaccacatatttccaagattttgtcaaatcagagccgggaggcgagacggcacattttccaccaacgatatgcacgtgagacacggcgagctcctcccatagaaccattcatatgggacacccctaaaaatgggaccgactaacccccaatttaagatggcgctcgcaccgttatcgactggcgcccccaagaactttggaaaaggagccacacatccacaaagtctgtcccaacagtacagagatccactcgtcctaacaacaaccccatttcgcagaggggtgcccgcgagcaaacagtagccccaaaccacagcgtatccccaacaaagacatactttatctaaacacaccgcctgatcctccaaaagaaaggacttaagtacccctccagcggagcggacccccg

SEQ ID NO: 278689 - DNA, 346 bp, Glycine max
  unsure (1)..(346): unsure at all n locations
gcccctcattgcccaagtgtagggctttgaggtatcaaccttgtcttttgtcatgaccttgtagtaaagaagaaactatgcatgttctcaaaaatgaattttccaggacaagaaacattttgaacgattttttttttcaattgacanactaagtcaaatgattcctacttntgataactcacattctctctcaaaaaagataaactctcaagaatgataaaatgaggtcacatgaatgtctgtactctatttgacacacagtcaatcaaatgtttttattcttctattttgaaacttatctgtttgaactctactcatcgttttacgacaccctcaccaaatgtgt

SEQ ID NO: 278690 - DNA, 434 bp, Glycine max
  unsure (1)..(434): unsure at all n locations
cttgagaaaacttccttgagaagcttctttgaganaacttccttgagaagctagagcttacctacacacacccatctaataactaagctcacctccttgagaagcttcctttagaagctagagctgagctacacacacccttctaataactaagctcacctccttgagaagagaatctagagcttagctacatacccctataatagctaagctcacctccatgacaaaatacatggaaatacaaaataagaagtccctactacaaagactactcaaaatgccctgaaatacatggctaaaaccctatactactagaatgggccaaatacaaggcccatacgaaggaaaaaacctattctaatatttacaaagaagagttgatccaaccttgacccatgggctcaaaaatctaccctgaggttcatgagaaccct

SEQ ID NO: 278691 - DNA, 347 bp, Glycine max
  unsure (1)..(347): unsure at all n locations
gggtctgggagacaaaggtcaagtggtcgcgatatgcgaagatgatgttccgagtacattggatttggtacgaccatgccctcctgatttccaactgggaaattggcgagtggaggaacgctccggcatttacgcaacgagcataatgtaaacctttatggttttaaaagctctatagttgggcctaagctttagagttntttccttttgttgaggctttgtgtcttttgtttntgaatttataatacaaggatctttcttcatctgttcctacgtctctacccattctcattcatttgcatgtttacttctttttctgaaacggcagatccgatgacgagtccccc

SEQ ID NO: 278692 - DNA, 435 bp, Glycine max
  unsure (1)..(435): unsure at all n locations
cttctcncccaattntctataaatngggggagaagtgaagtananttttggttagccccttatgcacttctctctctctcgaaatagctgaggaaaattagttccgtgaacaaaatccaagccgaggcgcttccgtaacgtttccgtgagtaattacgcaaagattctcgaccgttcttcaagattcatcgttcgttcttcgatttcttcagtcttcaacgggtaagtacctcaaaccaagcttttcaattcattctatgtacccgtggtggtccacattntgtttcatgtatttatattctcgttttcatttactttttatacccccttttgacgtgcttaagccatttatttaagtcatttctcgcttaatctaaaaaataaatatatttccaccgatcgtttgaattgtatcatccgttaatttcgggtaaa

SEQ ID NO: 278693 - DNA, 347 bp, Glycine max
agcttattaactaatgagatggggtgaggccttatctttttcttgatcttgtttgctttaaccttgaattattcttgaagcaatgcttaacctttgaatgtttgttgaagtaaccttgtattaatcttaaagcaatgtttaacctttgaatgtttgttgaaacaaccttgttgtttgattctactttagcatcatcaaaaccatgtattcatacattcacaggctttggggttagttgatacacccatactgtgtagccgttgtgagaatgaagaaaatatctctctctggacctaaagttcattgatttctctcattcttaacgaaatcacattttgagtttgata

SEQ ID NO: 278694 - DNA, 381 bp, Glycine max
  unsure (1)..(381): unsure at all n locations
tccagattggtatgcgatgctacaactgtgcgtgccaagctgttttgaaaganatggtccaataacttttcgtgcgcagaatacgcccccatcttccggcaatacatccggagatgcccctttggacatgtcgtccctatgtacttatcaaagtctagtactttgaacttgtgagggatgacgatgttgggcacaagacataagtccgccaaatacgagaatgggtaattgccaagaccctcaactgctcttaacctatcttcaagcgcctcaatctatcccttatcttccgcgaagggaacagatacttttacgggtgtgggtgacgccgagatatggcagactatgttcggctggggtaaaacatgcggagatggatct

SEQ ID NO: 278695 - DNA, 344 bp, Glycine max
agcttgttattaacggaagtaaaggataccgacagtaaacgagatgaagatgaaagcataccaaacaagattggatcactaagggtgcatagaatgaattgaaagcttctaaataaaaaactaaccgattgaagctcgacgaacgatgaagaatgtatgaagaacagggaagatactttcacggaattgatcacggaaacgtctcgtaagtgttacagaagtgtctcggctgtgatttttcccttctttcttcttctcctcaataatattaggtgatttctgagctatcaaagtgctgaacccctcaaactcagccccctcacgccattttataagaaaatggg

SEQ ID NO: 278696 - DNA, 177 bp, Glycine max
tcttgcgtagccgctcttggtgctcagtatatcccaaaaacaaattcctcttattactagctattttgaattctttagttcctgaatatacaaccttcaaattgttgctcgttcccctcttcaaaaatgaggaggatcttcataggacttcatccagttgatgtttatcgccagtta

SEQ ID NO: 278697 - DNA, 340 bp, Glycine max
tttctacaaataaaccaaaatcaatgggttgatcgttgatgtgccattattttctcctatctcgtaaccctgtatgcaccattctaagtactgattaatgttaattgtcgaattaattaagcagaatgattatttgggcccattaacctaatttgatgctcttaatctaatttcaaaaattaatgaagcattgggcttgaatccacaattgggcttggatttgaagaggacaaactatgttattctactaaattagatcttatcttatcatatctagatattatttagattggatctcatcgagatattatttcagctagatctaatcttatcttatcta

SEQ ID NO: 278698 - DNA, 461 bp, Glycine max
  unsure (1)..(461): unsure at all n locations
ntactatgcagagaatatccaaggaatataccttcatctgacttatcatcaaatattcctaagttatcttttccattattcaatacaaaacatttacaaccaaagatatgaaggtgtgagatgtttggttttctgccattgaacaattcatatggagttttctttaaaatgggtcttattaaagccctatttaaaatgtagcatgcagtgttaacgacttcagcccaaaagtattttggaagaggagtatcatttaataaagttctagcaatctcttccaaagatctatttctcctttcaacaacaccattttgttgaggggttcttggtgcaaaaaagttatgctcaatcccatgcttatcacaaaatatttcaaattctttattttcaaactcacccccatgatcactcctaatagatataatctttagatttttcttatattgaatgatttttgcaag

SEQ ID NO: 278699 - DNA, 301 bp, Glycine max
  unsure (1)..(301): unsure at all n locations
agctttgttgttntggtcttcgccagcaaaaggattgaagtgggtctgaaaaaagacaaatttaatcatcctgcttggacgactgaganaactgnggcaaatgaagagggtgagagtgaatgggaaacccatgctgcgtctgccgtttctatataaccaagtttcccaccaacccaacaatgtcattactcagccaatatcagcccttctcactacccaccacccattcatccatgaaggccatccctagatcaaccacaaaacccaccttccacacaaccaatgctaaacaccacctttt

SEQ ID NO: 278700 - DNA, 419 bp, Glycine max
  unsure (1)..(419): unsure at all n locations
gcttgtaggcctaggatcttcttcatcaatgtattcctttgcttcttggaagatgaatgtctgctgaatggagaaaggaagagagagaggagacgccacttcaaggagaagatgagtctacaagaagctcaccaccatacgaggccatggataatagcttggaggaagaaagagatgaatgaggggagagggagagaagagcacgaaattttgtgctccaaatgagctctgaaatctgaagtttaatattcaaatgatcaaagttganaaaaatgcacacacatgacctctatttatagcctaagtgtcacacaaaattggagggaaattcaaatttcacttgtatttgaaattgaatttgtggagccaaactctggagccaaaatttcactaattatgatcagtgaatgttagttatg

SEQ ID NO: 278701 - DNA, 327 bp, Glycine max
  unsure (1)..(327): unsure at all n locations
agctnggtttgaggtacttacccgttgaagactgaagagaacgaagaccgaacgatgaatctttgaagaactgtcgagaatcttcgcgtaattactcacgaaaacgttacggaaacgttacggaagcgtctcggcttggattttcttcacggaaataattttcctcagcaaattcgaaagagagagaagtgcctaaggggctgaaccctgttcttcttcacttcttcccctatttatagcaaaataggggagaagcttgccgcccagctcgcccaggcgagcaaggttgcttcctccagaagagacaaccttctggaggaatctttt

SEQ ID NO: 278702 - DNA, 456 bp, Glycine max
  unsure (1)..(456): unsure at all n locations
atagaaactcagcttgtggagtagaacatgggaccaattattgtatttcanaaagtaagtcgtatctattcaaggtctgagagaccatacaagtttcctaacgatttctaattctgtgggccattaagtctatcatatgctgacaatagccgagaagcccatgaatctcttcgggggcggagtaggtgtctgccatcaccttggccttggctaacaatcggggaagttcttgactcccgttcaaggtaagagcaaaccgatccatccacatggttgcctcttggtgtaaagagttgatcacccttcctctagcctctttttccgcgtatacttgggcatattcgtccgcaatcctatgctcgtgggccgcggctagacctaactcttcttggtacttggcgatgatagctagcatattggtctccgtctcgcataaacgctgagacaagcttcttt

SEQ ID NO: 278703 - DNA, 295 bp, Glycine max
  unsure (1)..(295): unsure at all n locations
ttcttgtatataagcatgattgggagcttactatatttaacagctagcagacctgacatcacctatgcagtaggtgtttgtgcaagatatcaagccaatcctaagataagtcacttgaatcaagtaaagagaattctgaaatatgtaaatggcaccagtgactatgggattatgtactgtcattgttcagattcattngctggtgggtattgtgatgctgattgngctggaagtgcaaatgacagaaaaagcacttctggtggatgtttctatttgggaaccaatcttatttcat

SEQ ID NO: 278704 - DNA, 242 bp, Glycine max
  unsure (1)..(242): unsure at all n locations
tcaagaataatggtttcatcaaattatttatttcccgaagggatttctgtaaatatgcctcctatacttaatggcgttggttaccattattgtaaaacccacatgcaatattttataaaggcaatacatctgaatatctgggaagcagtggaatatgggccctacattcccactatggtggcagaaaatacacatagaagaacctanggaagaatggatggaggaagaatagatattatttc

SEQ ID NO: 278705 - DNA, 312 bp, Glycine max
  unsure (1)..(312): unsure at all n locations
ttctttctttcaacaaagagaagagaaagatgaaagattgaataaataaaagtagtggggatgtatcctaataataataatctaaaaagaaaaaatcatcatcangaatcaacaatgtcaacagtgtctaaattggggaatcagtgagagcaacaacttctccagatgacgaaccacanagatcagcaattcctccaactanggaagcaggggggtcagctgtttctccagctggtgaatcaagaggggcagcagcttcatctaatgatgcatcgaagatgagaattagaggtggagatcggggaactactt

SEQ ID NO: 278706 - DNA, 417 bp, Glycine max
  unsure (1)..(417): unsure at all n locations
gcggagcctctactctatgacttgcactagaacatgnnaanttgctggtagncgnaacaggagagacatccgagagacttgcttgccaatgttaggaattcttcctggaatctgctgcaagtgatctgtctgtataatttcggtaacgacctcttgacaatcaccataatcaatgcatctgatcctgcgacaaactcagctttatacttgcccctagcccttcaagctatgttagcattgtttttcccactcctccttccatgtgtacaggaaggctcatctatgtctgtgaaaagcacttgcagatctgttgttaataactggttataaaagaacaccttcaagcactggaaccacatagagagatcatattgttgttgcacaggaccaactgcatgtaccttaaacacaataacc

SEQ ID NO: 278707 - DNA, 369 bp, Glycine max
  unsure (1)..(369): unsure at all n locations
agcttgtctgatgtctataccgctgatttaatgtaattagagcctatagatttcctttctctattgttttctgaaatctacctcattaaataaacaaagagatcttgtttcatctgttcttgcagttccaccttttctcatatcattntgcatgtttttgtttctttggtcttgtttggtatagatatgagggtcgattctttgaggatcctaacaacgagggtttgacaactcgatttgatagagatataagccaaacgataaacgaggaagaggaagaggacgtcctgtcaccatagttggagaggttggtcgctcacgaagaacgtgaaatgaagccttaccaagaagaaaccgaattggtaacat

SEQ ID NO: 278708 - DNA, 442 bp, Glycine max
  unsure (1)..(442): unsure at all n locations
tagtagggaatctatccttcctaagatggagtttaacccattcaccctcattaagaactatctcttttcttccttaattgcctttagttgaatacacctttgtttgtttctttatttggttcttaaccctctcatgcaacttctttacaaactctgacctagattccccttctttatgtataaaagaagtttctagtgggaggggaatgaggtctaacggtgttaggggattgaacccatagacaaccttaaaaggggactgcttggtggttctatgaaccccctgttataggcaaattctacatgaggaagctactcatcgcaagacttatggttgcctttcagaanagcccttanaagggtggataaagacctattcactacctctgtttgcccatcagtttgtggatgacaagtggtagagaaaacaagtttagttcct

SEQ ID NO: 278709 - DNA, 529 bp, Glycine max
  unsure (1)..(529): unsure at all n locations
ngacttactagacgctaagaacactctaagcaatncagctccgggccgcgattcaatgaaccgacgtgcatgcagcgctaatttatttctccactcaccttatggcattccattcctcatactctcctttaccataagataataactaacctatctaatttctaattcatacccttcatattccaactattcccttacataactatatattgaggtatagcccttctttgtcttcagtatagatcttgattcgaatattgcgatcccttgcttatttcgttacctctgctggcttcctaagaggagaacacanatagtagcagcctcaactgcgaaataacagataactccaacanttaagaaacacaattcagagctctatgttccaatagaatagtagcagcagcaactgctggcttcctctgctgcacttacatanagccaactcccaatttttgctccaattgaattggcaattgactagttgagttctcacccttggtggtggcggtgatgagcacaagtaccg

SEQ ID NO: 278710 - DNA, 378 bp, Glycine max
tactttgatgaataagaagtctggggcatatgaagagaatatgagagagggaggaacccatgtcgtgactgtcgatcctacatggccaaatttcccaccagctcaacaatgtcaatactcagccaatatcaacccttcttattacccaccaccctatcagccatgaacacccaatcattcacaaaggccacccctaaatcagccacaaagcccgcctgccgcacatccgataccagacaccacccttaacatgaaccaaaacaccaattagggaaggatatttccagcaaagaatcttgtaaaattcaccctaactccagtgtcgtatgctaacttactcccatatctactcaataatgtgatggtagccataaccct

SEQ ID NO: 278711 - DNA, 288 bp, Glycine max
  unsure (1)..(288): unsure at all n locations
ttacattgatgtttatgggaagaggttgtacgccatttttgttttaagagtagtgtcccactggtaaaactaactttccaaatgtttgccttcgcaggaaatggccccaaggaagcttgcctcatagaggtccaggaaagacaaggcagccgaaagaactagttccgctccagagtatgacagtcaccgctttangagcgctgtacaccagcaacgcttcgaggccatcaaaggatggtcgtttctccgggagtgacgcgtncagctcanggacgacgaatatactga

SEQ ID NO: 278712 - DNA, 305 bp, Glycine max
caaccatctggatgaatcttctggttggcccaagtgggcctggttgctatttgcaccctcattttactaatacaccccctcgcccttttatgggatccttttttcgaaagtacggaactacggatttgcacaatacttgtttctttccgaatttacggaacttgggatacataatcatcccttttttactacggaagttacagacctcactaatgtgaacgatgctcctttgatttccgtggtacggaacttcggatttgcatcaaacttttttggtttcggccatatggactcacaattgccta

SEQ ID NO: 278713 - DNA, 412 bp, Glycine max
  unsure (1)..(412): unsure at all n locations
gcctttgagagctccccctgaatattctttcgaaaagttttacttggctttcaccacaatattctttaagcgtctgcaaactttacccaagtatctttctgaaagtctctctaggctaagaaccctcattatacttgttatttgactcttatagcaacttgtcgtgatcactcaaaacctttagaaccagtaatcccctaattgctctcccgaggttccctattctacatagatttttttatcagcanatggttagttgttagaatgttagtttttttagtagagggggatngaatcatgacttttaccctcttcccttctccattaacaatcannacccactaatangggtttgtgtaagacaagtatctaatgcacctttcatggaaaactcatcagtaagctccccttg

SEQ ID NO: 278714 - DNA, 444 bp, Glycine max
  unsure (1)..(444): unsure at all n locations
cttctacttatgtggcanggcgggcttccttcactttcttgactcctacgcgagctctgaccactgttcttccttcccgcgatgcttctttgtatgtccgcctgagtgggcttatagcctataccatacttcccacgatttccttgagtttttatcaggctagttatgccgccattgtctttccctaaacccatcccgggttcanaaccgttccccaacataactcgggccatcattaccgctgcatcggacagacaaggttgcccaaagagggagtcaacggaggaaatgctgaccacctcanaagactgganagcagtttctaacgattcttctgcggcttccacataaggcatggaggatgggcagcttaccaagatatcttcctcgcctgacacgatgaccaagtgcccctccactacgaatttcagcttttggtggagt

SEQ ID NO: 278715 - DNA, 530 bp, Glycine max
  unsure (1)..(530): unsure at all n locations
agaagctgcctttgctagacacacacgggaanngagcaccggccangcgataaagnaaaccggaagggatggaggcgggttacttatcttggatgganctctgagaacagaaggtgttttggccaacaaaaaacagaacttattttcctcttggaaagattagaagccgataccttgttttcattattgatatacacaaactgttgggtttgatttgttgttactacaatttaaatattctgcatgacattttgtgattctatacaatattattgacctgtccgtgtaaataaattctgaagcttgttgtctttgagaatgcacaaatagggaaacttgatccctactctgttccagaatccaagaaaatgcgaacttgtgccactgctccagtgatgatggctgctcttctgcccaacanaagataatgcaaacttctgctgctgctgatgctgctacatatgcttcaactagcactgtggccactangaatgaaccatatatcctgttatgtcatcttcaaaaccatg

SEQ ID NO: 278716 - DNA, 445 bp, Glycine max
  unsure (1)..(445): unsure at all n locations
ngatgtcgtaggacctctgcgccgacttaagtacacccgacacattatcgtccgcatagtgagangattgacagaatggcattgngatcactatggctatgatcgacgccgcaattggagggtatgcatgaagatagctacctaaatcatgtaatatctctggctttcaagcacttgtgagaaatcgaggactggcgactaaaagacacctggcggtttaccacctcgtctggatgtattgaacactcccatggatgacttctactgggggtagaatagatgggactgtctaaggccctctttcacagatggtgtcgcacacccatcataaggtcttacctgacctccgtcgctgacacataacatagtggacatggggcgaccatttcatagcctaaccaagagcacatctctggattataaaatgcggcttgtatagaacccn

SEQ ID NO: 278717 - DNA, 290 bp, Glycine max
tctttgcagatgagaatgcttcagaaacattaagaaagctagcagatgggcctaaaagaaatgttataacccggcaaggatacgacataaacaggtattcattttacacaaaagcacaagatgacaaaagtacaatgcagaacagcggggtcaccctaagggctgaatctcaacactttgcaagtgtcaatgacgccaatccctgtgtagcttccatcccttactttgggttcattgatgaaaattgggagcttaattatgtgaaaattacagtatgtgttttcaaatgt

SEQ ID NO: 278718 - DNA, 211 bp, Glycine max
atggaatctattatgaaattaaagtgcatcttatggttgtatggacttctttttttctttttcaagttttgacttataaaatgagtctgttaggtgtgaaaatatagggtaccatgtaaaatttatgacaactgattcccagaatacttacaaatctaaaaaatgagtttaagagtgaaacatggcagcaacttcatattggacattagat

SEQ ID NO: 278719 - DNA, 339 bp, Glycine max
  unsure (1)..(339): unsure at all n locations
agctttgttcttccaccgccgccgccaccatcatcttagaatatattttaatattattagtactttgattttcagccttgtattttggctatattattatggtatttgaacaatttactatttccttatttgcatggtatggttgaacaagtatgttatttgactatttangaaagatcttacttcacgatttggttgatgttttttcatgaatgttgtgtgaatgtttagttatgattgattatttcaaatttgttacacactttagctctttattgatgccaaaggtggagagaaatgggattaaaatcaagaactcacatgagtaatcaatttaat

SEQ ID NO: 278720 - DNA, 424 bp, Glycine max
ctcaagcttcttatccaaagctcatcttggtggtgtatctccttcttccattgcttattccctattggatggcgcctcctctgacctcttctcctttgtcttccgctgcatctccatagtggaaaatcaccattaaaggaactcattgaagctcaaagatcgagtctccatagaagccccacaagcaagcttcctcaagtggtaatcagagcacaagagcttcaagtaggtgttccttacacctccatatattttctgctttaccttctcttctattggtgtcacttcatttttctccatgtatctcctcacatgtattgtgctaaatgtttttaacatgattctttacagtttccactgattaaacttgctatagaagctagatttgattttctatggctcaaatttcttgttcttgttcttg

SEQ ID NO: 278721 - DNA, 311 bp, Glycine max
  unsure (1)..(311): unsure at all n locations
atcttgtttaatggctagacatgatacatgtcagggtttggtttggtttaaagataaaagggatgccccacattatttccatgacacaaatgcaaaaatgatgatctggaaactntatgcaaaactggtcatgcatgcacctatgtggacactcaagtgtcaaatttttatggtcatgtgatgctagggctcaggattcatttcctctattntagtcaacccaatgtttccaaaatatgttcttttatccatatgtgcattcatccgagtccattttgggcgtccggggaaattttcacagcattcaccct

SEQ ID NO: 278722 - DNA, 350 bp, Glycine max
  unsure (1)..(350): unsure at all n locations
ctataagcgcgggtctgngagacgaaatgctagtggtcgcgaatttcgangatgatgttccgagtacattggatggggtacgacgatgccctcctgatttccagctgagaaattggcgagtggaggaacgccccgacatttacgcagcgagcataatgttaacctttacggattcaaaagctctatagttgggcctaggctttagagttcttctttaggataaggcttagtgtattcttttttttaaagttataatacaaggatctttcttgatctgatcctacgtctctacccattctgatgcatttgcatgtctacttcttttctgaaacgacagatccgatgacgag

SEQ ID NO: 278723 - DNA, 353 bp, Glycine max
  unsure (1)..(353): unsure at all n locations
agtttgatttttatgagtnagctngggaaaaggacaagctaacttggagaaaccttctatgaatctctagtaatatcccgctaaacccagaaaaattctgatctcaaacacaaacttaggactctaccacttaagaacaacttttatcatacagggatctacaactatacctccttaggatatcacatgtcctaagaaactaactttctctaaccaatactcgcacttggacaacttactgtaaagatgctggtccctaagggtttgcaagacaatcctctagtgctcttcatgctcctctctagtgctggagtataccaaaatatcatctatgaatactaccacgagctatc

SEQ ID NO: 278724 - DNA, 449 bp, Glycine max
  unsure (1)..(449): unsure at all n locations
tggtggatctcgatgttctactgaccgaattattgttcatgctcatttagtctgagctacgggctgctagagagagggaggccaacaacgagcttgatgatgagcttttcattctcaagaatgatgccgtggagcatcatgaaacatggccttaacaatccgttggtgcatgctgtgttcttcaccaacgaccttgacttgggtctctttgacccttttaacgacgtgaagaatggtgttttgcttgacatagacgatattgctgctaacgaggagtaaggcgatgatgccattggttacggtgcctttcgtgtattctcttcttttctccattgtttgaatctaaccgcatgggcctctgtatcatgacaaattttcttcataagctctccttcgatgacanaatttgcactatatatgtatgtcttgagcgtatgcgtttatctatg

SEQ ID NO: 278725 - DNA, 202 bp, Glycine max
ctagagcgtgagctcacacacgccatctcataactatactcacctcctggagaagcttgcttgcgatgatctctcacgaagctagagcttaactacacatacctctctaatagctaagctcacctcgttgagacgagaagttatgactgaactactcaccctctatctacctaaacttacccccatgacactaaacatgcta

SEQ ID NO: 278726 - DNA, 277 bp, Glycine max
  unsure (1)..(277): unsure at all n locations
cccctattgtttgaatgatgctaatcttaagaatacgcggatgactcttgagggtatttgattgagaaccatttctctcccccttgggcatcaacgaaaagccaaagtgcgtatcaaataaatntaattttaacatccatacaatgtgcataaaaaaaatatccaccaaatcatgaagcatgaagcaagaaccatgaaaccatgaagctaacaaccatgcatagataaattataaactccacatagtcaaatgacatacttattcaaccaaaccatg

SEQ ID NO: 278727 - DNA, 355 bp, Glycine max
  unsure (1)..(355): unsure at all n locations
agcttattctgtctatactaacaatatgcaataactagccctccaacttgatccccactacaacacacccattnttttccttttcaaagccattcacaacatactcaaagaaaaagaataaaatactcaaattcaagaaaattgttggatgcctgatatctttagtttctagaaaagaatatattagtttatcttttaaaatttttattttttttaaaccatatcaaaatttacatcaagtgaataatccatgttaacaacaaacatcatcaattcacaaaactagaagttcacctctcactctctcagtcactgtataaaaacanagaaagaaagattttcaacaacacacaac

SEQ ID NO: 278728 - DNA, 511 bp, Glycine max
  unsure (1)..(511): unsure at all n locations
aggacgttgctgatgcttgtaatcacacatagtttgacnctttgcatanacngacacnatagaatctcaagctgtgctgcncacggttgctatanagagagatgtccacgcnccttttagtagagacaganaaggcagcgtgaagatctgcatagaccagatcttgaaacacgagccgagatgagagcttgaaatgattctgcgagcgattgcgagatcctataggtgaccgacacgatcctctccactggtgttgtaagcatcgttcctcatgtacttttcttatgtggtgacaacgcttacagggatggaaagctatattctttgatggttcgttcctcgaggtacctcgtgaaggataatctatatctatttaacgatgatntgtgggctgtccgtgtactctcatctattacacgccctatagcacctgaaaccgttgagcttgcttggttaggtgatcaatacttgaactggttagccataacccctggtatggaggctcacttcc

SEQ ID NO: 278729 - DNA, 243 bp, Glycine max
  unsure (1)..(243): unsure at all n locations
agcttttttaactcattgtaatcgattaaaacagagaatttttgtctctaaagaaattnttctcagatagaaaattntcttcactcagactatgaggatgcacaatgcaacacanatatcaaatgtactaaaatgcaacaatcaagttaacaaccaatacaaatgccactcaaaggagttgggcatgtaaaagccaaaacttcttctaaaacttcttcaaattnttctttgagcttcaagttt

SEQ ID NO: 278730 - DNA, 434 bp, Glycine max
  unsure (1)..(434): unsure at all n locations
tctcanaataagtattcatgtagaacttgtctttgtttcctatncatgttcttctaatggaatnncagctacaagtaactttctcnagttcttccacgggctgctcgagccttacccacatgagtgatcatgtcatgactggtttgcttgaggactgtaactttcatggttgcatcaaacanactttggatatcattggcaaagatttcttgggctttcttccaaaaggaacgacatgatttaaatgatcgaaggatttccaagatatccggctcaattgattgccataacacggcacacagttgataatcaagcttctcccattcaggtcttttatcatctgaaacagaatctgaggttttctccaagtggtcatggtgtccttgaccaaggaaccacaactccacggaagcagaccacgaagggtagttttt

SEQ ID NO: 278731 - DNA, 492 bp, Glycine max
  unsure (1)..(492): unsure at all n locations
nggctgacgtagctagctatcngcattnactcgacccgggtccttaacaaccggggcggcgcctttttattttttggttctaaccttgaactggcgcttcatcttntctttccctcttcccttggccaaaagaattccgccagggccattccgccggaatccttttggggcctctcctctcccttttccaaagaaccnaagggacttacccgcctgatatcttttggtgtcttcccttctcccttgtcaaagaattcaaaatgacacaatctaagaattctttgattctttcattcctaatacanaagtgtcanaggactaaccgcctgtgaattcttttgatccccattcacaaagtatcanagggttaaccgcctgagatctttgtcttaacacattggagggtacatcctttgtggacaagtagagggacatctacttgnngttgttgaaacaagagaggtcatctttgggatcagtctatggaggtcn

SEQ ID NO: 278732 - DNA, 433 bp, Glycine max
  unsure (1)..(433): unsure at all n locations
gattcctaaagaagctagagcttagctacacacactctctctaatagctattctcgcctccttgatgtgagaagctagaacttagcttcacacacctttctaatagctaagcacacctcctagagatgagaagctagagcttagctacacaccccctataatagctaagctcacccncatgacaaaatacatganaatacaaaaaaagttcctactacaaagactactcaaaatgcctcgaaatacaaggctaaaaccctatactactagaatggccaaaatacaaggcccaaatgaagggaaaacatattctaatatttacaaagataagtgggctcatacttagcccatggactcaaaatctaccctaaggctcatgagaaccctagggccttcccttggatctctggctcaatctacttggagtctttta

SEQ ID NO: 278733 - DNA, 313 bp, Glycine max
tcgataaatcacgggactcagtagaacatccgacacaacaagtattgccgttggattaggctcaaacctccaccatcaaattctaagcggcttcaatatgtaccgggactcaatcagacatcctagaaaaaagtattgtcgtttgattgctcaaactcacatcattcagcgttgatgtacgactatcaactcggaaaagtatgcgtgaagctaagtcacatcattcagcgccatttacgactctcaactcagaaagtatgcgtgatgctaactcactcatcacgccattgacggctataactccaaagatgcg

SEQ ID NO: 278734 - DNA, 437 bp, Glycine max
  unsure (1)..(437): unsure at all n locations
accaacgaccataactatttactcggatgtctgatagacgctcgnaatatttctagacgctcgaaatcgaatgttgaagctctgagccaatacaaacgatactgactttatactcggatgtctgattgagtcccgtaacatatcgagacgctcgacattgaatgttgaacttctgagctaattcaaacgacaataacgattttctcggatgtctgactgagtcccgtaacatattgagacgctcgaaatagaatgttgaacctctgagctaattcaaacgacattaactctttactcagatgtctgattgagtcccgtaacttatcgagacgctcgacattgaacgttgaagctccgagcgcattcaaacgaccataactttatactcggatgtctgattgaggctcgtgatatatcgagacgctcgatattgaatg

SEQ ID NO: 278735 - DNA, 534 bp, Glycine max
  unsure (1)..(534): unsure at all n locations
agcaaggacttaagcattcgntggtacangcncaatnnnanctnngnacccgggggatcctttnnagncaaccggcaggcaggcaggcgggtttattgttcttgcccccagccaaaaatgtcgagaagagtgttccacagctttcactataccaaaaattgccggcatgacttcggcaacacaagcttttggttaactctaaatcgcaatcaacacagaggcccaccatacccagcacgaccagtgcttacctttacaataaaactgatcaattatcatattagatcacaagtactgaataacattatctgatgaaatgactaacgaatatcaaattacatacataaacatatttatataatgctcttatacaaaatcttactgtgattttcatgatataaatatatcttatagcgcttataattntagtcttacgttgattgcaacacttgtagcatttatttatagatctccgcttctctcccctgaaaataattaaatcactatcagtgactttctaagaagagagctctg

SEQ ID NO: 278736 - DNA, 173 bp, Glycine max
  unsure (1)..(173): unsure at all n locations
gcactcattgcanatgcgtcatcctcagctgacatgacgataagccactatggattgcttcttagaactccacgatattggtgttgcaccatacgtgaatatgcaacctatagtactcgctatgtaattttggactcatccccaatccgcatcagtatatcccactaattctt

SEQ ID NO: 278737 - DNA, 373 bp, Glycine max
ccggcggcatgcaggcttatttttttattggcctcactcttttataataaactaaaagtttggtatttcttacataaaagtggaaacatcacaatcttaaaatgctcaaactttgaattagtggtaaacaacaattattgatgtggatttatatgtatgtgatttcagggtcattggagctattctcatagtaatgggactttactcagttctgtggggcacgcacaaggagaacaaagagaaagaggcagagataactattgacgtattgaagtgttgtttagaacatgggatgccgttggagactatggtaaaagatgtcgaaacaaacaatgacattgacatgcacaagggtgaagcctcaagagagtta

SEQ ID NO: 278738 - DNA, 364 bp, Glycine max
tgacataatcttggctcctggttgcggggttggtgacttggagagttgctaggttcgtgagttcctgagttggtgtgttctcgagctggagagtttgttgtttaacactgttggatgtgcttactgcaatgattgttattggtgcaccattatcttgtttgctgagtgccattgctgtgttctagggtataagaaaacaagacgccgttcgcattggatttttgctttgaacaatggttttgaaaccctagacactaacctaagactttgtagactcactcctgtgcacattatgtgattgattcaatataaagacagaaatgttcatctggaaacctatttcccctcgcaaactctaatcctc

SEQ ID NO: 278739 - DNA, 532 bp, Glycine max
  unsure (1)..(532): unsure at all n locations
agagcaatgatctttgtcatgcaccacngactcgagacgggatgcgttagatgaccggaggaaggcagngctccttatttgtgtaccaagagatcgcggctccagccaagctatcttggaaaaagtgcattattaagttttcatccctagaatgcgcccccatcttgtgacaatacatcttgagatggttcttaggacaagtcgtccctttgtacttgtcaaaatcnagtaccttaaattttggggggatgacgacatccggtaccaagcaaagatctgccatgtncgcgaacggatagtcgccaaagccttcaacagctcttaacctctcctcgatgagatcgagtntncttctttcttccgccgtcnggggtggtccctctgtggacaaaaaatattgttgtgctgtggggttgtgttgaagcaatacattgtgtgtcgacccctcaacagggaccggcgggtagaaatcgacatccccttgggcatactctcgatgatcctcgtgaatctcgtcggcctgtcgaagaag

SEQ ID NO: 278740 - DNA, 510 bp, Glycine max
  unsure (1)..(510): unsure at all n locations
agaggcggctgaaccatgaagntttaagcctgnctgaacactcgaaacccacaaccngcaacacgagctgccgccnttagatgagagacgccagagagttcgtaaacacccttccacaggnncnacagaggggacgactagcgaagatagcgcaccccccacgcgacgcaacgacgaccaccagcagacaaaacgggaacgacacaggacggattctagagcgagggcccggacagacgccgcacgcgcccgagcgcgaggccaccgagccggcggaaatcaggaactccgaccagcgagacaagagacacgacaccaagaggacgccactgggaggacgaagcgcggacccagaagccatgaaccaagcacggggcagcaaggcagacaaacacccgaacgcacagaccggccggagagcgcccaaagcaacagaggcaggacacggaccaccctggagaacgccgccacagaaaggccggacagactcataggacaggacggcaaccg

SEQ ID NO: 278741 - DNA, 391 bp, Glycine max
  unsure (1)..(391): unsure at all n locations
agtttattcacggaaaatgnaataatgaaatggagatgcccgatgaaacaccatttcctagttaaccatgcattaggtaccacgttcaattattttgtttttaagtgaaacgggtttatgatacccaacatggtggctcgtggtgcctaacacatgaaactaagaatgtagtgtgaagtttcacgcttcccccttttttgttttgttttgtagaggaaaacgcaaggatgagcaaacatgaaaacaaatgatatgccaatttgcagatcaaaaagtttgttgaacgcatatgcatgatgatgccatgactcatgcaaaatgtgaggctggaatatgataacggacaaatgcangatatgtccattatgatngtatgaagagatgcttatgc

SEQ ID NO: 278742 - DNA, 335 bp, Glycine max
taattacatcaactgttcattataaatccccaactagggttgttagccagccatacaagagaccctaatacaagtgagacagataatacagagcaattgttgcttacacaggaaaggggatcccttctcctcttgttggcacctcacaatcactcagcactctttaatctttaagaatgatgaaccttagcctccttgcttggatgctcctctatgttgtctccaaaagaactatactctaattgtgtgcctacaacctttgtacatacatactctggtcctttgcctaggactcactcattctgacaattgaagcttaaataagctctgaatca

SEQ ID NO: 278743 - DNA, 392 bp, Glycine max
  unsure (1)..(392): unsure at all n locations
tgaaaacgttttgggtgaaaatgggtaccaccatatagggctatataattaatatatatactatcaatccacacctagagaagaaatagctatgcagtaggcatagggaaccctattttgagaattgcagatgatcagtgaaaaagaagattaatccaacccacatatatatagaattgccaccagaatttagatagttagtagtaataattagtaactacataatattgttgatatcttanatgaatttggtgttagtgtgtcaaccttttgttcatagtcatgaacttgtataaatattgttcaaataaaattttatttattagagctgacagactaagatcttatggaaagcaaagcttaaatcaacaggactataaaacttccattta

SEQ ID NO: 278744 - DNA, 452 bp, Glycine max
  unsure (1)..(452): unsure at all n locations
cgaatctgaagctgaactatcgggtcatataatcaattntnggttgattagattcggagctgncgggatntctgatcaatggaagcatgatgcagcaaagtacttgaactgcagctgcttaactcttctttntgtgtatcttggcatacctataggggctattaatgcaacaaaatggtgagctatggaccagagttttgaattccaaatatggtggatggaggaaccttgaagaaacaggaaattcagcanaacaatgtgtttggtggagggatgtaaaacaagctttcaatcaatctcatcagggactggttattcaaaataacatgaagtggaaggtgggggatggagagaaagttagattttggacagataagtggattaatcaagaggagtcgctagcagaaaggtacctcangctgtttattatatcctcacagcagaatcacacc

SEQ ID NO: 278745 - DNA, 403 bp, Glycine max
  unsure (1)..(403): unsure at all n locations
agcttattgttgcccgagtcattcatccctatgagatgttgttgaagtattggcgatcagaattgccattccttggattatagggttgaaccaagctcacgcttttacaaaaaggttcatcaagtcaagttgaaatatggaagtaaccgtcttgcaaaattggggcaaaagatgaatcgagtcacatcactgcttcgtctactgccaaacatatttaggattattgatgtccttgttacttccagtttcaccttgacaaagatgtcatggaccatgttgaanatctaaattgattcaaccccatatcttgcgtaaaaattcgcaatacttcaactgtacatcattcgcatgcatncatgcttttcatttggttgcattgctcgtgcattctttccttgaaaat

SEQ ID NO: 278746 - DNA, 464 bp, Glycine max
  unsure (1)..(464): unsure at all n locations
ctcagcttgtcgaatgaagaacatcttctgttctctggtgatccttttctccatctcattgaatcgaatgtccactagtaactccaaagtatcaaacctttcaccaacaaaggtttgaagaccatcgaacctgtccaaaatcttttgaagaagagaggaatcttctccaccatgtaaatgtccttcttcatcaatgggttgagcaccctttttcacccaaaagccatcatgctctttacggtaaccaaaggatgcaacacaacagcgcctattagaaaggatctcttgattggaacataaggttcaaaatcaagaggaatgttgaagtgttgaaggaagagagtgactangtgtggatatggcaatggagcatttaatcacaatgccttatgcatgcgatatcggactaagtgtgcccaatcaatttgtcggcctttatgaaaagcccacataacaataagatc

SEQ ID NO: 278747 - DNA, 320 bp, Glycine max
  unsure (1)..(320): unsure at all n locations
agcttgtttcatgtgaaaactcacaacaaatttgaaataagtagcaactatgtctgttgaatgaaatanaatgacttaagatattttcctttatataaaatatgttggtactaaaaaactatattatttagcgacaagaatgagatttagcataaggatttatttagttaatatttttcaatgcatttctcttttttttttaatgtcttttatttttccttttctttntattgacctttcctttntatccctttagaaaaagattctccatcttttcatccttcaattgtctttttctattatctttgttaccctttcat

SEQ ID NO: 278748 - DNA, 482 bp, Glycine max
  unsure (1)..(482): unsure at all n locations
ctctatanaacactcaagcttgcacactcagaaggacatctcacctatatctgtgatgaaaactttcatgtacatttgtccattacacaaaaatgacaccatctaaacaaacttaactgagtagagactagttctctccttcttccataccaatatgtcctcctcactcagaatcaaattaatacttctaaagtcatgaccttttatctaagtaaattattatatttatttctcctaatgatatagagatttctccatttccatctgcacaatcaatttccctccctccagtcacctaatcctgacaccctggctgttatggctactacaaggttgtataatctactatacttcctacatgtgaaaataaagcacttccacccacaggtcttgagaaaataaaagtatccgctaaccctcccaacccccacccaccttctaactaactcagatgccaaattctttcttccctcatagntact

SEQ ID NO: 278749 - DNA, 292 bp, Glycine max
  unsure (1)..(292): unsure at all n locations
tgcttgttcttgattnttcctaagttctgtaacaagcttagaacaataaacttggccttctcttaattgtctttgggcttggcgaccacgatcaacaaagtactttcggcacctactatatgttgacttgaccaacgctgttattggaatgctgcgacaatctttcaacaccttattgacacattctgataggttggttgtcatgtgaccatatcgtcgtccagatgtatcgtaagccatgctccatttttcctttgaaatgcgatcaatccatcttgctatggctggactc

SEQ ID NO: 278750 - DNA, 277 bp, Glycine max
agtatgtgctagggccaccctatgccagtatggacttcgagcatacagtgactgtaacatcccaacaaaatatctagtaaaaatagttgacatttgaaagggagttaatgttaaagcattttaagtagtggaataattattttgtgcatgtgtgatatacttcaatggataagcgctctagaattttaattctaggcttaataagatgtgttttaggcctaaaaagccttggacaaaaatttgtcaaccatagtgaaccagtcaaggtaagagaatc

SEQ ID NO: 278751 - DNA, 338 bp, Glycine max
  unsure (1)..(338): unsure at all n locations
agctntgttttcctttgttccgganacctttcttttctcatgtgcacccaaacccaatctccgggttcgaagacaaccttctttctccctttgttggcttgtttagcatagcttttatttttcctctcaatttgatctttgactctcttatgaagcttcttcacatagtccgcctttgcttgaccttctttatgcttaaaaacagaaacattatgcaaaagatcaagaggagttagtggattaaaaccataaacaacttcaaaaggagaacaattagtggtgccatgaacagctctattgtaagcaaattcaacatgggggtaaacaagcttccaagt

SEQ ID NO: 278752 - DNA, 515 bp, Glycine max
  unsure (1)..(515): unsure at all n locations
aggacgtgtgactgatacctccgagatcgacacattgaatagacaccctcgcagcaccngacaccannngaaactcaagctagagatgaggaagtttagacnggcgacactttctgctatnattgttgaccacagagcgcgaccgcgagatatgtcgcatgggtcacgacaccttgttgacgatcacgtgaggtgctattgccgcaaaccaagcttgaccaatcccgacccaacaccgccatagacgcgcagcgagaacctgagaattacctaatccagcgaactcctgtgggggaaccgataatatgaacacattacctcacctcaaagccgctcggggaggctggccaactgagatttnagtgaatatcgtggattgcggcctatggaaataattactagcgctgcgagatcgatacaacgctcgaaaataatgacggacgcctagatggtctctgggatcattacaaagggggaaaggtgccagctgtaatccacgagcactatgagcttgg

SEQ ID NO: 278753 - DNA, 360 bp, Glycine max
  unsure (1)..(360): unsure at all n locations
tatctntattcaagacaaagaaattaaagatattcaagatggatgatcaagacagtctatagagtcttagaaagggtatattaaataggaagggaattccaattgaagtagcaaaaagtttggccaataatttttaagttaaaaagtctttttcaacaaatttactctctggtaatcgattaccagaggatgtaatcgattaccagtggccaaaactaatttacaacagctactaaaatttgaattcaaaatttgcactgtgtaatcgattacacatatatggtaattgattaccagtagtttccgaacgttctaattcaaaatttaagattggtatcgattacatatatactgtaatcg

SEQ ID NO: 278754 - DNA, 423 bp, Glycine max
  unsure (1)..(423): unsure at all n locations
gtgagaagnagtctattgctnttctctcatatccattcatggtttgtgatattataatgagagcccaacatgataatcctgttgttgtgggtgatgcccgaaacacttgaataccctntacgatagctccacacttgcagtacatgtcaataattatggtgagaacaacgacattcaactcaaaattcccctttttacataatcatgaacccactccccatgtagaagtgcacctaagtgagcataaacacttaacaaactcatcactgtaaattcactaggctgaacccttcgtctctgcatcttgcggaaaagctccaatgcctccataagccttttattcctaacatatccactaatcatagaatnctaagtaactctaattcttgtaggcatgttatcacacaaccctctagatttatc

SEQ ID NO: 278755 - DNA, 436 bp, Glycine max
  unsure (1)..(436): unsure at all n locations
cactcgacccngatccttaagtcacctgcggctgcaactgattgagtttgccatacnaattgaagatactgtattgcaattgaacacgaacattaaattcgctactacgaaatcanaagggggaggtgcanagttttaccaaaacaaaagcaaattcacaaacctaacagaaaaggatcaatgattgaaacgaggggtttgtttctcanaacgaaagaaagaagctatgtctctgtctgggagcgaatcanatgaaacaaagatgaagttgaaactacggtttggtttgatgttgntntgttttgtttgagtccaacacggaacgtctacttatactttctgtatacgcctcgaatcgtccctttcacaagtaagcttcgttgtgttgcaaccttctgtcanaaactgacacctaaatgcatanttntttcatttt

SEQ ID NO: 278756 - DNA, 463 bp, Glycine max
  unsure (1)..(463): unsure at all n locations
ttatatatataaaaataattaatgtcgtgtagtttccagatgaacagtttaggttacttgattgggtccaatgagggacgtgtgtgaaatggnggaagaggggagcatctttgggatgactgagcaagtgcgtgtgaacgtgcatatgccattggaatcttagacttaattagggataactggcttgtttttttttccatttaattntagcatatcacgtgtgggcttggttaatttaatcactttccataaccttttatcctccatgatcgacaaacccactaacgcggtaaagaatcttgtgctttcaaattaaaccaatttttttagcggtgctgcgcagtttctcttcttgttaattaaatttctggaaactacaatatcgttgaataagtaacttattattttatacgataatctagaatcattgatattttgaatcgaacgttataattgaattggg

SEQ ID NO: 278757 - DNA, 260 bp, Glycine max
ttaaggaccggggaggcagcatttattttttcaagctttccctgcctcgcttattggatcccaaatatcagccttcggcccttaaaaattcattttgcggtgataccattgtggagggaaatcccagatgtatgatttatcagttacatgtacttgacgctaattgcttctaagtatgatccttttggccattgttcactggatgctgatctcttattaagtatttgtcagtgctttactgctaatttgcacttgtaaat

SEQ ID NO: 278758 - DNA, 393 bp, Glycine max
  unsure (1)..(393): unsure at all n locations
gcgcacccgctatcatgggggagttctatcggaagatttgtcatttcaactaatcttatatgtgcacatatcattgctcacttaatttattgcttcattcaatactataaataaaatccctgatttctgatcatgtattcatctgactttgtgcatcattacacaccacatatatatagatatatatcatttaataaggcatggagcaaatggattgtctgacttcccgttgaaggtcctcgataattagcattataaagccgcattcatgtattccacgacgatatttgtatctatgaatgccctgctcaaattaacgcaagaaaatagatcttaaatccacctaatacctanggtagatcgaataaactcatgatttttaatctattctga

SEQ ID NO: 278759 - DNA, 113 bp, Glycine max
  unsure (1)..(113): unsure at all n locations
aaatttcgagcgtctcgatatattacgggactcaatcggacttccgagtgaaatgttattgtcgttcgaatatgctacgagcttntgttttaaatttcgagcgtctcgatata

SEQ ID NO: 278760 - DNA, 335 bp, Glycine max
  unsure (1)..(335): unsure at all n locations
cgaacaacaataacttttcactcggaagnctgattgagtcctgtaatatttcgtgacgctctagtgntaaaaccgaagctcgtagcatattcgaacgacaataacatttcactcggaagtcctattgagtcccgtaatatatcgagacgctcgaattatagaaccgaagctcgtagcaaattcgaacgacaataacatttcactcggaagtcctattgagtcccgtaatatatcgtgacgctcgaattttataaccgaagctcgtagcaaattcgacgacaataacatttcactcggaagtcctattgagtcccgtaatatatcgagacgctcga

SEQ ID NO: 278761 - DNA, 219 bp, Glycine max
ctatatcagggaaaatgctacacgtatgtagtatgtagacattgttaattctcctgatgcttgcacctgatggcatataatatacccatgtatctaatgaagaagttatttacctttagtgtttttcattgttcactctcattatctgatttctgtttctcacgtttctgatcttaaactctcagtggatcacttggaaaaagacagagacttttactt

SEQ ID NO: 278762 - DNA, 238 bp, Glycine max
tacatcttactgatggctatcgaagcattatcctggagaagtgcagaacaatcattagttgctacttaccatggaggctgagttcatttcattatctgaagcgacatcacaaggcatttggttaaaaagtttcatgggcgatctacaagtgattgattatgttcctagaccattaaagatatattgtgataattcagctgctgttgtcttgactaaaaaaaataaaagtggaaggtga

SEQ ID NO: 278763 - DNA, 326 bp, Glycine max
  unsure (1)..(326): unsure at all n locations
tttcttgttgganaactngatgccttggtcaacctagtgacccagcttgccatgaatcananatctacacctgttgcaagagtctgtggtctatgttcttctacagatcaccatacagatctctgtccttctttgcagcaatttggagtcaatgagcaacctgaagcttatgctgcaaacatttataatagacctcctcagcagcaaaaccaacaacactagaataactatgatcttttcagcaacagatacaatccaggttggagaaatcatccanatctgagatggacaagtcctcgacaacaacaacagtctgtcccttcttt

SEQ ID NO: 278764 - DNA, 390 bp, Glycine max
  unsure (1)..(390): unsure at all n locations
tctggacacttgctctgtggacaaggaggtcttcttgatctntttacagtngatagctaaagactnttctttcttaattccttcgtcctattgaagttcttgttcatgaactttgagagtaccaactggttcttcaagggaatagagtcaagattctttagagcccttagcgttgttacatgtggtctccattttctagacaaacttcttaagattttgtcaatatgattatagttatcataagttcttcctagagatcttaattcatttagaatggtttgaaagtgcctaaacatactttgtatgtcttcgccttcttccatagagaagagttcatgcttangagcgatgagactcaatttgttcctctatacctgtgatgttccttct

SEQ ID NO: 278765 - DNA, 337 bp, Glycine max
  unsure (1)..(337): unsure at all n locations
agcttttttaagaggcttcctccagaagcttcctcgtggtttctttgagaagctttctcaagaggtttctttgagaagctagatccttatctatccacccccctctattaactaaattaacttccttaaaaataattaccgatgaaaataacgcaacanatattcaaacatcaaacataattactaatagtatatagatatatatatatcagggtgttacaactctcccacccttttagaaatttcgtcctcgaaatttaccttactcaaacaaggatgggtgagcttctcacatctgactttctaattcccatgtggcatcttctcctgatgcacc

SEQ ID NO: 278766 - DNA, 716 bp, Glycine max
  unsure (1)..(716): unsure at all n locations
agggaaacgatgggagactttgatcngccngttgnnaacnatccgattaccccctangcaatacnaccgacngacacgactacgcaataactacatagactntggtacnggatntactagtgtagtgacgcncgctnncacattgttagtgctacntacnggngcgcangtttcttgncnganntggnngcagcgaacacagtntttaccacgatgncaacatanagcagacgcgatagaaacncacacgcaattccccacttgtatgcncacacnacatcgcaacatcgagcgnntcacgtgacntcgctcacagtnatcnccagtagacacttcggttatcatcttcaaacatacgcgggtcnccncgatcatatgcgcttcctcaatgcgctctcctcaaaccatcagaaggtataatcgaagcattgcactacgagcaacaatatttactcacatgcccaatgaaactacaggggcaagagcgcaggaaagaagctctgccctaataacaccgaacgcaagagtcacgagcgtgtttctcactttaaacgaaccccagtaacaaatggtcgttcgatccgaattctgttaatccgttgggatgcgactcccagaaattctaccggaacgtctataagtacataagcactacatttttgagcagtgtggatctactagtaaacatccagaactcattctgcactaatgtttcn

SEQ ID NO: 278767 - DNA, 342 bp, Glycine max
agcttgtttgtcagtgaattgattgaacattgtatgcagtggctggtttggtataaaatgagtgtttgaaagtgattgattgagcaaatgtatgaatttaatggattgggatgattggatgattgttttgatcaagtttgctgtcattagaagagaatgagcatatgattggaattatgtatgaaaatgttagtcggttgtcagattgattgtgaaggaatacattaaccgtatcccggtgagagtgtgatcttaaaattttgagagaaacgactatcatttagtgctgatttttgcgtgaatctctgaagtatggattggatgcattaacttgacgatgat

SEQ ID NO: 278768 - DNA, 461 bp, Glycine max
  unsure (1)..(461): unsure at all n locations
tgacatctcaggctaagcgcanattgcttatacaatttaagtgtttgcctgctgtgctaatcccaaaactctctagaatttgannaattggaattgggcttagcgcgaggtcgggctaagcgcaaggctttgttaaaaccaaacgtcatattgactcgctaagcgcgactgtgcgctaagaaagcaatacattnnttgcttanaaggaaattacttaggcagtttcattcacccagaagctnttatctcttgtgcttgtgcctacattcgttcttttgtgcatttttctgcctgtgcttcaagttatcttctgcatcctttntgctctcatcctgcatttcaatcacaatctaagtaagcttcttgttttattttcattttcttttcaaagcttanaccttagggtagatgatttattgctttntagtttgcatttctatttagctttagtgttttcagtt

SEQ ID NO: 278769 - DNA, 471 bp, Glycine max
  unsure (1)..(471): unsure at all n locations
ttgcagtagcaagctttccttctcannttcaatatgaggggaaccttacaagcttgaatgaagatgaacgaaagctcaacataatacacccatggtgacttagctctataaggggctcaacaaaagaagagagctaaagatgttgttgttgatgctactgttgtaattgatgagcaagaagctgctactactgctgagaaagttcaagctggagcatctactanagctgcggacaacaccaatgtgtgtggggtcatcattgaccttacaaacactagtgtcatggatgagactggtgaagcgtccaatgtagatgaagttgaaccactcattccagatcttgcatccaagctgttagagataaggggagaaacatgaagagttagcattgaagcttgaagaaagttttcttttacatgccaactctcttagtgactttgcatgatagtcgatttatgttcatctagtctc

SEQ ID NO: 278770 - DNA, 442 bp, Glycine max
  unsure (1)..(442): unsure at all n locations
actaagcttgatgcctaatatacctgcgataatanatataacaaagattggacatganaaagagaacattggagaccagctaaatcagacagtcaaagtatgatttatttctacttcaataaacaggaaatttcataagaatgaaaataaaattacaacaaagtaccttttccagaccaaataattgtttcggaatgctcctctggagaggtctaatcctggggacacaattccacaaaaccacaagttactacttcagcctacatgtgtctgacgtggtgactgatggacatcatcaaaatgcagttagctaggtggtatagttataggacgtcaaggtttagttggtcttgggagggtgtccttaaacatatagctacatcaaatgatccctgaaatacgcatggttgagagcacctaatantagtatatttcattcatg

SEQ ID NO: 278771 - DNA, 431 bp, Glycine max
agctttctctctgcaaaattcatttcttggttggtgctcttggtttgtgctaaaggtggtgttcgtcattggaagtgcggtagacagactttgtggctgatttagggattgcctttgtggataactgggcggtgggtaaggagaaggtttgttattggctgagtaatgacattgttgggttggtgggaaacttggctgtataggaatggcagtcacagcatgggcttctccttcatcctcaccctcttcatttgccccagttttctcattcgtccaagcaggatgactaaatttgcctcttttaagacccacatcgatcctttcactggcaaagaccaaatccgcaaaagctttgaaagtgcgtagcccaccattttccatagtagaatactggtaatgtgtctactatcattgtcatcgttttttcgtca

SEQ ID NO: 278772 - DNA, 283 bp, Glycine max
  unsure (1)..(283): unsure at all n locations
acgagctaattgaggtcctgacgctaagcgctattatggcaactaagcgaaatttattgcggcaatatgagcgctaagagagtacctctcagctaagcgcatgctcctctgtacttaagatgcatcattatagctaagctggccagagccatgcttatcgagagttgcagcntttctaatctgcagacctcgctaagcggacttactctctcgctacgctgagtntcagttaagaaaaaatattctcgaatttgaaacgtccgctaagcgcacgtgttcgcta

SEQ ID NO: 278773 - DNA, 353 bp, Glycine max
  unsure (1)..(353): unsure at all n locations
ttcttttatagacatgtcccatggaggaaaatcaagagagagagagagacagatatagatagaacgggagcaccaaattgaaggaggaaaacggggaaagacgttgaactttgagttgtgtctcacatgactctcattcatcaataacacaacaagtgttacacatgttattatttatagcctatgtagcatacttgagaaacttccttgagtaagttcttcgatcagctagagtatagatataaacacccttctaataactaagcttacctccttgagaagcttccttgacataattctttgagacctttcatgagaaaattcctagagaagttatagctntgtcacacaca

SEQ ID NO: 278774 - DNA, 287 bp, Glycine max
cctttcttactccaggaactttcaaaagctttaagatgcccctcacaaactttcaagaagctcctacctataaataacactgtgtacacttgagtacttgataatgaactcttggagacacactcagaggaaacttctctcccttgttctggcttcaatatagtgctccaccctcgatctttctctccctctgtattttgcaccatcgaagcctcctctccaatcttgttatccgatgctcatctaggtggagaaactttaacttgcatggctgattccttaatgga

SEQ ID NO: 278775 - DNA, 425 bp, Glycine max
  unsure (1)..(425): unsure at all n locations
agctntttaatatttaaattcaaatttctaaaagctgtgacaaatagtttaaacttctggtaatcgattacgtaccttgtgtaatcgattacaggcttttaaattcaaattcaaaatttgcaaatttgtttagaaatcaatttaaccactggtaatcgattaccagagacgaaatatcatatttttgaaaatatgattgttcttaaaaaacttttgtaaaatatttcctttagtcctgtgcagcatcaattaagggaatttttctaagatcctaactaagtacatcattcttcttgcatttctaaattcttgacttgaatcgntgtcatctttggcatcatcacaacttcatatcatatatatttctacacataatttcattaaaaaaataagtgtatatttttaaaataaataacataaactga

SEQ ID NO: 278776 - DNA, 151 bp, Glycine max
tactggacctgtcagtaactatgtgtttgcgagaccacctttatattaaatctggaccaatgttgttaatggcggatagcccataatccgatatacaactatggcgcatggcgtggcggacaccaaacaatacatatatttaaactcctcg

SEQ ID NO: 278777 - DNA, 448 bp, Glycine max
  unsure (1)..(448): unsure at all n locations
ttcttctaatgtccatgatntatcttgttctatacattttttagttttaacacacaaactcgtgatttattcaaacaaaaaggatgaaattgggagcacgcacgcaagaaacttacttgttggtggcatagttgacaaggttggaaaagagaatgccaagggtgatattcaactggaaaagtatattcaatgctgcacgtattcttgaaagtgcgatctttgaaagaaaaactggcacaacctgttgtcataaaaaaaaattaaaccaacaaagataagtgagttcgaagaagcacttgctattacacaacattgaacactggtttcataaataaaataaacacacacatgcatatggcagaatgtctatataacgaaaatagaatgacanaccctcattacaataaattaatatcttcaattgaacaacattttgacctatttattt

SEQ ID NO: 278778 - DNA, 540 bp, Glycine max
  unsure (1)..(540): unsure at all n locations
agcggtgtggacgtttgacnnccagtagnangtttganggccttcgnactgatcccactcgtcaanacccgacacnatagaatacacaagctgtgagnctaataatgtcatgcataaaagattttaggnngcacttatatatctnctcgctactctaanatgtcgaaactgataatacactcattctcctatcaaattacatcctcttcatcatgcacaagcaaatataaaaacgaacggcgaaatacagaaccagtgaagatatgaatccaaatcatgccccgtcctagacaaaacaaagcctaacaaaattatcacatccgtccatgcttataataacttctcaactaattcatatcccgctatcacaaaaattagtttaggtaatcatattaaatttatcaattatctatactatgattttgacaaagttcttttatgcttctatgcggagaatactttttatacatgtctggacataaataattaactagggtatgaatgaaaaaactcatacatataagtaacaaatagctatac

SEQ ID NO: 278779 - DNA, 426 bp, Glycine max
  unsure (1)..(426): unsure at all n locations
tctctaaagaaaagtgacaatatatttagccggcctcattaaatttggcttganaattaactcacttatattggagtctgatatatgaatattgctagaaagatatttgtacccggtttctgggatgataattttccctcctaattgtcttcctataatgcttgttgagaagttatctaagctgacctaaataatatctactatatggtgagtcaaatactatcccagtagtcctatttgtagcatggttttgtcagctgagttcaactngcattntttttcttttcatgatttgactcaacatttcttttgttacaatctgaagtgcgttgaacatctgatatttctcaagtgggatgatggatntttatattggggattcttctcatgttaaagtctgntcttcaagttttgtgttcactatan

SEQ ID NO: 278780 - DNA, 225 bp, Glycine max
atctatactttaatgtagagacgttatatcctaatacacaatcgtagattcttgacttactatacatttatgtgaaatattaaaaagagagttctaatatatatctaacaaaaaaaattagtcaataatcactgtattgactctaaaaaaacagcataactttaagatgtagggtaagtcctttatcattatagcctcccgctaaatcactcctctaagtatttg

SEQ ID NO: 278781 - DNA, 342 bp, Glycine max
  unsure (1)..(342): unsure at all n locations
atggtatgattacctgttaaacattgcttctattagtatttgatgtttcctgagattattaacattagagacagataaaagatatcctatgtttcattcattnttctgttgagcataagcataataaaagtcatttgttcaattgctgatgcattactcaacactcactaggcactgaacttaaaaagtattaatttattttacaggcatgggaactaaaattgaatattccataaatcttctagcatcctcagtagacagcaacaacattgtgggtggtgtggatgtctgggagcattatcagaacaaagtagagactaacaaacattgtagtattggagt

SEQ ID NO: 278782 - DNA, 329 bp, Glycine max
  unsure (1)..(329): unsure at all n locations
tgttgaagagtcaaattntgattcggtgggaatttaagtgtaaatccagtttgagcaagtttagatggatgttatggactggtgtgaggtgagagtttgcttcaaatttacctcattctcaatttcacttctcanacctaganaacccattgaatggaggggtgttggacacctagattatgtgttgctgtgttttgaagcttggttntgggttagacatgattgatgcatgatttgggacttgtangaagtgatttgggcaagattggatgagaggaagtgtgattttcgaaatctgcactttgtgcagaattttgctgtgaaattgt

SEQ ID NO: 278783 - DNA, 511 bp, Glycine max
  unsure (1)..(511): unsure at all n locations
aaattcagggcttgggagcttgcatcactnaaacnatgccnnaaacagctgccactctacctcaggtgttgaaaggtgtggttatcttggatttctangtatattcaactaggagaccttggtggtggaaggaaatggtacggtgggaattcaaaaaatccttccactcaagcttaaagatcctatgagtgtaaccattcgttgttcaattggagaagtcactgtgagacacgctcttattgacctgtgagccagtattaacttaatgacactctacatgtgcagaacgttgggagagttggagatatgcgcactatgatgacatctacactggctgaccgctccattaccaaaccatatggagtaattgaagatgtgctcgtcaaaataanacattttatcttcccgacagactntgtgggtatggatatctgaagataattgatatcttggagatttggggagggcattcatgttaacttgcaaccgcataatggatattgggattaag

SEQ ID NO: 278784 - DNA, 450 bp, Glycine max
  unsure (1)..(450): unsure at all n locations
agctncatnattatgcttcctccagaagcttcctcgtggctgctntgagaagctttctcaagaagcttctttgagaagctagatccttatctatccacacccctctattaactaaattaacttccttaaaaataattacggatgaaaataacgcaacaaatattcaaacatcaaacataattactaatagtatatagatatatatatatcagggtgttacaactctcccacccttttagaaatttcgtcctcgaaatttaccttactcaaacaaggatgggtgagcttctcacatctgactttctaattcccatgtggcatcttctcctgatgcacctccccagatcaccttgaccaacagaatctctntccctcttaagtgtgttgtgtgcctatcctcgatcctcaaatgcactgtttcatatgtcacaatctccttcacttgtacat

SEQ ID NO: 278785 - DNA, 233 bp, Glycine max
tgaaacctgttgaaatgagaactttggagaaatttttaaaattgtgaccaaatttcagaacatggtttctttagacatgaaggctttcttttcaaagaaaacaaattgtgtgtgcctaaatggtctactagaaatttgcttggttgtgaagcacatgaaggaggtttaatggggccatttggggtccaaaagactctagaaacattacaagaaccattttattggcctcatat

SEQ ID NO: 278786 - DNA, 328 bp, Glycine max
tttttaaaaccttgtgcctctattgaatagaaacccctcactaccagaaaatatgtaattgctacaaaacaaggggtgtgaataaaaaaccatcttttgttgtcattctccaataaatctccgaatactaaaaagagggcaatctcaaattggataaaaagatatatcaaatgttgtgatttcacaattttgaatatgattatatgaatgaaccgctactgtacttgctgcaatgatgaatgatgactaaactgagatacgtgatcccaaaatatgtgcctcttataatctaaaaaccccttttgtgttgcgcatgaattacataaac

SEQ ID NO: 278787 - DNA, 281 bp, Glycine max
  unsure (1)..(281): unsure at all n locations
gtgctaaaggtggtgttcgtcattggaagtgcggtagacagactntgtggctgatttagggattgtctttgtggataactgggcggtgggtaaggagaaggtttgttattggctgagtaatgacattgttgggttggtgggaaacttggctgtatatgaatggcagtcacagcatgggcttctccttcatcctcaccctcttcatttgccccagttttctcattcgtccaagcaggatgactaaatttgcctcttttaagacccacatcgatcctttcact

SEQ ID NO: 278788 - DNA, 455 bp, Glycine max
gaattgcgaaagccgcactccatcattaggattatttcctgacatctcaaacaaacaaatcagacgtaacaagacaattatagttgctgcttgaatacctcacccactcaagtgtatcacacaattatggcttttctctaatgaaacactcttgccttttaccactctaattccccttgagttcttacgcaattcaagagattatggccacaacaaagaacaattcaccaatatgtgtaagggaaggctagacaaggaaaaggttaaccaagaaaaaggctaacaatgtttttaggcacaaatgaaggaaacaaaattcagaatttacgaattcaagtaacaatccttcatgccaccaatatattaccttaaagagttttttttttagttcttcagcatgaaccatcagcccatttttttttttttaatttgctatacaaatctgttcttttttt

SEQ ID NO: 278789 - DNA, 542 bp, Glycine max
  unsure (1)..(542): unsure at all n locations
aaaattcccaaagtcnagcgtgtgccganaatnagtcnanncaccagccagccattctagtcagcctgcctgcatgcaagcaagctttttgattatatctaatgagagctcgagcttagctgcagcatacctatataatagactaactcacctccttgagaagagattcttgagctcagctacgctcatcctataattgctaaactgacccccatagccaatcacgtgcactttcaggttcaaagtgcttactgcttccactactcaagatgcccctttctacattgctgttaccctattctacatcaatagccaagactcaaggtcctgacaaaggagaacactctctcatatatatattataagcgggctcatactcatgccatgggatcaatatctactctaaagctcatgacaaacacttggtcttctctgggaactctacaccatcatcgtggagtctattacccattgccctatcggggtaagatagcctcagatgtgtgtgaaagttgtcaatcatccataatatgttgtgacan

SEQ ID NO: 278790 - DNA, 227 bp, Glycine max
aactgaggcaaacatagatggtgagaaagagggataaacccatgctgtgactgccattcctatacgaccaagtattccaccagcccaacaatgtcattactcgagcaataacatacctccttacccaccacccagtgatgcaccaaggccatcccttaatcaaccactgagcctgtctaccgcactttcaatgacgaagaccacctttatcacataccatataacac

SEQ ID NO: 278791 - DNA, 359 bp, Glycine max
  unsure (1)..(359): unsure at all n locations
gttgatacgctgggctgtgactctgaggataaacaaattttctanttttatgattttcccaaacttaagagaaaaaaaaagaaacctatataacacataanagaatggaaacctgatgacggcttcaaattgcaattaataccgaatcgattgaactcttctgtaagcatcttaatgattcgatctacaagaatatctacagcaattgttaaatttcctcgaagacaatgcgaaataagaagaatgaaggatatgaaggaaagagcgagtaccgtccttgacaacgtagaatctgaagaagaagaagaacagatgagatttcgctgacgaattcagagagagtgggagagatttgctta

SEQ ID NO: 278792 - DNA, 277 bp, Glycine max
  unsure (1)..(277): unsure at all n locations
agcttctgtatctctgtgangatgacatttatgacgtcacactggacatgcttccaccttccgtgacctagagaaagcacagtgaaaggcccctttcagacttccggctctaaaggtaggctatcaggttgatgtccggctctagtcatccttaccctgctagctcctaaggtccacctttatccncctttgatgctcaagatgttgttgcttacacgaatgtttctaattcttctttgcctccttctccatatattgaggaaaatcctaccccttc

SEQ ID NO: 278793 - DNA, 101 bp, Glycine max
aacacgtattccgtaaatacagcatatatttacattataaaactctatgactgtaatcaataactgttaaaccactattcaattattaattcacatatcaa

SEQ ID NO: 278794 - DNA, 447 bp, Glycine max
  unsure (1)..(447): unsure at all n locations
aattgagatcagatctnntntannacgcgccttaaggatgagagggcnctttttttaaaactgccgggggtctttaaccaccccttgaagaaactgactcacacgccccctataatactaactcagcccctgacacactgacttacaggtaaaaggcttactacatagactactcagaatgccccgaaatacatggctgttaccctattctacatcaataggcaagatacacggtccagactatagatatacctgttcttatatatataatgaaaagcgggctcatacttaacccatgggatcaaaatctaccctaaagctcatacaagaccacggccttccctgtgactctatccaagatacgtggaatcttctacccaatgcactagcggtgtaagatagctccaaacgtgtggaactttactatcgtcctcatatgggtaacag

SEQ ID NO: 278795 - DNA, 513 bp, Glycine max
  unsure (1)..(513): unsure at all n locations
ngggatcgtcgatnncctttgattgctgagacantccagacacnatagaatactcangcttagtgtgacattgantgtctatgcacggataatctctgtgaagtcctatttcgaacatggacaagagagtatcagaagcttcagccatttggttttcctttctaagagtgtgatgaaatgatatatcatcaccgatgttcatccactcctatatgtacgccctgtaaggcatcaacttatggtcatttggctcgcatcacctttgaacagatgaattacgcacacttaatctccatacactatgagcgactgaccctacagtcgatggtagctcagatatctanggcacatgctgcgtattctgacatattatttgtacaattgaaaaacaatcacgccgcgaaatgaaacatcatttgtctggcgatacaacactngcccacttcatgctccatgcattgaangcacatcaaanttcaatccattcttttgtctcatctaccatttcctaag

SEQ ID NO: 278796 - DNA, 393 bp, Glycine max
agctttgatttatattctttgaaaataataagggaacatgataaataattatatcctccgatttaaaattaatctttgatttatctccttaaataatttataataacaatggtttaaattttataattgttaatttgaataattataattaatgattttatctaatttactaaatcattgctccatttttaaattctacattattttatttatatatttatcttagtttagattaatcttacgttccattatacaaatatatatacaattcttttttgaccaaattccagagttaagtcttgtttgtcactaactcactattattgaagataacatgataaatgagaaaaaaaatactatattttaatacattgtccttcaatcactcataac

SEQ ID NO: 278797 - DNA, 396 bp, Glycine max
  unsure (1)..(396): unsure at all n locations
tctcaggaagttntctctagataacttctcaaggatatctaccttantctataaattgaagcatgtgtaacacttgttgtaactntgatgaatgagagtcttgtgagacacaactcanagttcaacttctctcccttntcttccttcaatttcgtgctcccctctctctctgtctctccctctatcttttcctccattgaagcatcctctccatggtggaaaatcaccattaaaggacctcattgaagctcanagatccagcctccatagaagccccacaagcaagcctccatcaacttgtgaccgcaatgcganattcgacatcgagatagtcatggaattctatgccgatgccttgcctaccgagganggagctcgggatatgcgctcatgggt

SEQ ID NO: 278798 - DNA, 401 bp, Glycine max
  unsure (1)..(401): unsure at all n locations
agccacccttatggctggcctccggatatcactccccgtgccacccttaattatctattccaagcccctnactttgaggggcaactcccgccttatgacgactatcccggacaagacgatggggaaggagatacccatcttggccccctgctccacctcaaagatccgtccccccatgaactacccccaccgaacatagtctgccatattccaacctcacccacacccgtaatagaatctgttcccttcgccgaagataacggaaagatcgacgcgcttgaataaaggttaagagcaggcgagggccttggcaattacccattctcggatttaacagatttatgtctcgtgcccaatatagtcattcctaccaagttcaaagtatcggactttgataagta

SEQ ID NO: 278799 - DNA, 322 bp, Glycine max
attgcacagtgactaacactcaatcgtattacagacagataaacaatcttagcacgtactcttttctctcaaaaaaatcaaggtattttgagagctattttaaacttcaaaagaatttacataaagtgatttttacaaaaaagaatttgaatgagtgctttagttggttcttcatgtcttcaacaagtgttcaatgtctctaaatggatagatttctcctcttaagctcgtgtttgaaaaatgtggtcattgggcatttaatgcttgattgctagcatgtacttcttcaaaaaccactattctttgctaacatgttgaacac

SEQ ID NO: 278800 - DNA, 288 bp, Glycine max
tctttacccaagaggggggttgggatttccccggaagcacacagataaggtaccagagaagagcccatccctaggaaaaccaggaagaaacttaccccacaaggtttgttataaccaaacagaacccatggagagaatgaggaagaaagaacaaagcggaagtacgacaagacaaattactttaatggtcacaacttcttacaagttgacaggtatcatgtttattactctagccaactaagaccttctaaacttgtgtaaccctgaaactcatcaacaaactactcc

SEQ ID NO: 278801 - DNA, 501 bp, Glycine max
  unsure (1)..(501): unsure at all n locations
aaannnaaggggnggcnnttggggcgcttcgtatcacctnanacntaggctncaacaatatggatggcttggcctccaaggcccagaggagcgcaatctttatccttctcacactcacccatacacaagggcattgcgcaaaatttggtatacctttcattttacccatcacagaaattccgctccgggttatgcctcctattgaanaattaaggagattttcttctaagagaaggccttgtcatttggtataggacatactttaccattgacctacctattgaatatcccctcactaatctgacctaatttgtgttgcttcctcaacaccttctaggtgctaagatcaggtcaattaaactaaaattgattagaaagattgaacagaaataagacaacctttatggtanggagagtgtaggagtagtgtctcctcagaagttactagaaggaagcatttaaataaaacaacattaagaactccttctaaccaccccattg

SEQ ID NO: 278802 - DNA, 359 bp, Glycine max
  unsure (1)..(359): unsure at all n locations
aaaaacttgctgataccacacttaataccccctatggaagagcgcctaatgggaagcttttccgttttgcctcgaacacaagcgacctgtctcctttcacccctaatcatggaacagttatacatgatactatccaagctgttgtttgaaaacatcatgattaaaatcattcttatggaacccacaaaactgttagaaaatcctgactcacagttaaaagccgctcccaaactttaaacctcagttgctattcagtaaagcgagaacccgtataaaaggcatttaacccacttataacagcgaggtctgagccccctgacataaccgcaaatgaaataactccgacaggccggcgaccn

SEQ ID NO: 278803 - DNA, 205 bp, Glycine max
gcttgtgccacccgtgccccgaagacccctcattctatacatgaatgtgttggatgagtcgatgggatgtatgctgtggcaacatgacgagtctgggaagaaagaaagggtcgtctacaacaactactctttgcttgaaaggacatgttgtgccttggtgtgggcaacccatcgtctaaggtagtacatgcctagctacaccact

SEQ ID NO: 278804 - DNA, 359 bp, Glycine max
gtttgatccactgacattattacaacaacaatagtcctacatactacatgcccttagagtttagaagatttgtcaactggatccaaaaccatagcagaaaagaatgtaaataacatgtgaataaaaacctgaccaaccaaattgcaaatatgaatttgctggggaagaaaggggtagtcagtataagtgtaaaaccaagaaccggatcagaaatgtagaatgtctccctgtgatacttgttgagaggagcattgagagcaaatctctttggcaaatctggattagccaagaacaaacgaccgtaagcaacagatcagccctgtcttcagctactgcattgatcccatcttgcgatcata

SEQ ID NO: 278805 - DNA, 376 bp, Glycine max
  unsure (1)..(376): unsure at all n locations
agctagtgttttcttaccctgatgaggatgtcccatatgtgcttataactggactgattcatttgcttccaaagtttcatggccttgcaagtgaagacccgcacaaacatttgaaagaatttcacattgtctgctccaccatgaaacccccagatgtccaagaggatcacatatttctgaaggctnttcctcactcattacagggagtggcaaaggactggctgtattaccttgctccaaggtccatcacgagctgggatgaccttaagagagtattcttagaaaaaattttccctgcttccaggaccacagccatcaggaaggatatctcangtattagacaactcagtggagagagcctgtatgagtactggga

SEQ ID NO: 278806 - DNA, 514 bp, Glycine max
  unsure (1)..(514): unsure at all n locations
aaatataaggggatcanngcatntcgcacantctanannactgaagcgctgagacagcgagaacgctactcacgatgacgattaccaatgtattaaatgttttattcatatgatggaactcatcataaggacttagctttcactactatataaatcttctaaagatataatcttctaaagggactacgtgtacagacatgactagtcaatataagcagagctctcgtttccctacgtatacaactagtgctgtgaatgattgcattctcttgtgcctcttgcagacagaagtggcccacgaccaacaccccgaattatttctgagttacactctcccttttcaaaagagcgacaggcgatccgccggaggtcttatgtgtctcgcttctccctatgcaaatattctttgctgacacagtgagagaatcctcacgacatttccctctgcttagtacaagcgtgttagtaggctagacgactgtgaatatggttgacttcgcatttaccagcatct

SEQ ID NO: 278807 - DNA, 539 bp, Glycine max
  unsure (1)..(539): unsure at all n locations
ncctctacccaattcangagtntcnncannntagctcagacnccccgagactctctagagacgagctggaagactgccagcttatattaaagctgaatctatgaacttcaatgagttggtgcaatggtgattntccaccatggagatgcaacacaagatcaaggagaagaggagagaggaggcaccatccactatggaataagccatggaacgagaagcttcaccaccacgagagtgtctttgataagaagcctacagaggaagccttcatggacgaagacaatgacggagataaatagagacagacaagcctggaaagtttaagggagaacaggagaaaagtttgacttttaaagtgggcttaccagaattctttattttcaaagtattaccagtggtattcctgtgttttttatattctagggcctaactaaatgaaagctctcttgagaagctctcttgagaaactttcttgttatacctccctgagaagctatagcttatctatcacacacccctctaattatctctgctcaccn

SEQ ID NO: 278808 - DNA, 83 bp, Glycine max
tagtcgaagagaagttcaagtccatagccatcaaagtctgaaaagagtatgatgaactaagggatgtcaatatggccaccgat

SEQ ID NO: 278809 - DNA, 162 bp, Glycine max
taggaagcaagccgacatacgcccctttgtataaccgatctacatctgccaagatcataattgccccatgatagatatgccagctagagatgaactctagtgccagatcttcccatactcgagatgagtggggactggggagcgccaacccatatgggttat

SEQ ID NO: 278810 - DNA, 403 bp, Glycine max
  unsure (1)..(403): unsure at all n locations
acactattaatactcaagcctctatgtganaggatgtgactcttcacatttgaatttgaatttttatcgttcttaggcactggtaatcgattaccaaaacattgtaatcgattacagctttttgaaatcaattggaacattgtaaattcagttgaaaactttntcaaatccatcttgctattggtaatcgattacaataatctggtaatcgattaccagagagtaaaaactcttcgataaacatgttttgagaagaatccatgtgctactcagtttttgaaaaaaccttttcatacttatcttgattaagccttctctcgattcttgaatcttgatcctgattctcgaaagcttgatcctttgaatcttgattcttgaaatcaactttcatgttgaatcttga

SEQ ID NO: 278811 - DNA, 273 bp, Glycine max
  unsure (1)..(273): unsure at all n locations
cgctcgtcttcgttgcgcagaggtgctatacaggtatgtggtactggtgttattcggctatggttttggatcttttcttttaatattgttaaagttttgtatgctatcatgtaatcatgcatcatgagatcattaaatgagtgtgactatgacaactacttgaaaagtcaaccatgtccaatcatgtatcaacaaatgatgagaattactcanagtttctcgtgtcagctaaatcaatgacgaatattctatcgagacgatagctaatcccta

SEQ ID NO: 278812 - DNA, 446 bp, Glycine max
  unsure (1)..(446): unsure at all n locations
gtgagtngaaatttctaccataagtatatgtattttgtgaaatccatctggaacttgactctaattatcaatatgctgctaaagtttcacaacaatttatattttgtattaaaactctgtcccagttgttgcacactttataccatggcatgcagcattacatttgatgttctgctagacagtgccattagaattttgggtatcttccatccatatattgaagttttagacttagctagtacttttaccagaggaaattatgtcagtgaatgctatgctatgattctgtcctctttcatatataatatgctngcatgctcaaccatntattgccgatcaatttggttaaggatctngacaatattcttagttgtatcttggagtaagctacgaagaaaaataagatgagaagttagatgtatttgtagttaatgtctaattattta

SEQ ID NO: 278813 - DNA, 338 bp, Glycine max
  unsure (1)..(338): unsure at all n locations
agcnttgnctttttggtcttcgctggcgaaatgagcgaagtgggtctaacaagaggacaatatgatcatcatgctttgatcaatgcaaaaaanaatttgggcaaatgaagagggtgagaatgatggagaaacccatgttgtgactgccattcctatacagccaagttttccaccaacccagcaatgtcattactcatccaataacaaaccttgtccttacccatcacctatttatccacaaaggtcatccctaaatcaaccacaaagcctgtctaccgcacttncaatgacgaacaccacctttagcacanaccaaaacaccaaccaagaaatgaatt

SEQ ID NO: 278814 - DNA, 496 bp, Glycine max
  unsure (1)..(496): unsure at all n locations
nnnaaagaaaggtcaatccatgngacnctcgcannaccngaancatgantactcaagctcaatgtgacattgactgtctatgcacggacaatctcattgaatgtctattttgaacatggacaagagagtatcataagcatcagccatttggttctctttctaggaatgtgatgatatgatatatcttcaatgagttccattcataccttgatgtaagcttggtaggcatccaactatggtctctggtctcccattcacctttgaacagatgaattaccacactaaatcttctacactatgacaacttaaccctaaagtcattgttgcttggatcctaaggacatgctccgattctggctattatttggcaattgaaaacaatcaaccggaatagaaacattattgtctggcgaaccacactgccccattcgtgtccaatgcttagagcaccataaacatacaatcactttatttggttcatctcacgtcttctaan

SEQ ID NO: 278815 - DNA, 386 bp, Glycine max
  unsure (1)..(386): unsure at all n locations
agctagnttannnttcgttaaggatgagatgggaagtgaaaggaagacgcatagcanacaaacaaacaaatctttaattatataagagtaaaaaatcaagaatattttntagttgcttaagagggacaaatacagcaaactagaagcaacaagtaacacatcacatacctttttctgacttgatcccggaggagtgcaaagcaatgtcggtgatgccagtgtcggaagagtggaggtggcatccatagttgatggttggagttagaatgttggaattaaaactggaaagaacccaagtgcaagtagaagaagagtctcaaaagtcaaaactcattaataaataaagcatcatcatttgatgatcattgcatttgatggcctatata

SEQ ID NO: 278816 - DNA, 354 bp, Glycine max
  unsure (1)..(354): unsure at all n locations
catganagnctttctgaaattatgagaaatactgatacatttcattagaaatctacaacgtatgacttgatgttgtgttgaacaggaggttggtggagtggcatgcctacactgtcttatgacaggtatcacanactatcatttgctcttttgaatttgtctctgtgtgcatgaattatattattcctttctttcctttcttcaacagtcagttcttagccaaagttgaggagatgttccccaaagatgctgaattaattgttgtatgccagaacggactgaggtgagattatgcattcagttggtgattgacactcatggagttgttctgatctaattttctgtacttaaaat

SEQ ID NO: 278817 - DNA, 323 bp, Glycine max
tcataactaagctcacctactagagaaacttgggtaagaggattcctaaggaagctagagcttgagtacacgtacctctctaatagcgaagctcacctccttgagatgagaagctatagcttagctatacacgcgctataatagctaagctcacccccatgacgaaaaacatgaaaatgcaaaaaaagtccttactacaaggagtacgtggagggccccgaaatgcaaggctagagccctatgctgctagaatggccaggatacaaggcccagacgaaggataaacctattctaagatttacaaagatgagcgggcgcatact

SEQ ID NO: 278818 - DNA, 474 bp, Glycine max
  unsure (1)..(474): unsure at all n locations
actaagccactccgcacaatggtgacctcttggaaatgaagaggaaatntttctcttttgaagactcatggacacttatccctgatccaactacaattcgtgtgtaaggtcagccaaaatgaactatgataaggaatgtgatggattggctcgaaccatctgagcactgacaacaatgtagtagatgtggaacagaaggacacaatagacgtcaatgtccaatgcaatatgaacgaggaagttgctaaattaattgatntatgtatttagtttgtgttcttcaatgaaatcgtagctatccatgattagtttgttttgaagttatttattatgttatttctgtgcacgacataaactgcatccattagtaaatcttcataaaataaacaatcatacaagtctcanattgatatgacaaacatacaacaacatatttaaatagagacatnaaaatcattcattatgatgcccgtg

SEQ ID NO: 278819 - DNA, 269 bp, Glycine max
  unsure (1)..(269): unsure at all n locations
ttttggtagaactggggtggaaactgaaactggtgctttcttacagtgttaggatgtgtcatatatgtagatgactcttaatatcagtgttgtattttttaaagattacnaatacgcatgcacatgctttctgtatgtgttgtcaactacaccaatgacgtgacatgctttagctngcatcagatctgcatgtgtagtcatgctgtgcanggtcctttcacgcgctntatgttaatgcagaccacaatntatcatacacgggttttcac

SEQ ID NO: 278820 - DNA, 289 bp, Glycine max
  unsure (1)..(289): unsure at all n locations
atacttctctaatagctaagctcacctccttgagatgagaagctagaacttagctacacaccccctataatagctaagctcacccccatgacaaanaatatgaaaatacaaaaaaaagtccttactacaaagactactcaaaatgccccgaaatacaaggctaaaaccctatactactagaatgaccaaaatacaaggcccagacgaagganaaacctattctaatatntacaaagataagcgggctcatacttagcccatgggctcgaaatctaccctaaagctcatg

SEQ ID NO: 278821 - DNA, 510 bp, Glycine max
  unsure (1)..(510): unsure at all n locations
aaggccnngggnatgctaccgtgcatngcaacactnataganaagcnncccgagcagcttgagcttagctacacgaggggatggaaaatcttgctcactttcttgagaagcctccttgagaaggtagagcttagctacacacacccatctaaaaactaagctcacccttcttggacaaatacatgaagatacaaaaaaacgtccatacttacaagactacttcaaatgccctgaaataccagggctaaactctatactactagaatgggcaaaaacaaggctcaaaagaaggagaaacctatctaatatttacaaaaaagagtggatccaacacttgaccattggctcaagaatctaccctaatgttcatgagaacacttagggccttcttagtagctctagcccaaccacttggagtcttatttccatgtaaatgcaaagattatggggaatcaaagtggatcaaggtgttngatgaaacaatgatataacaacatagatgacaacgcg

SEQ ID NO: 278822 - DNA, 207 bp, Glycine max
acctgagggataggaatggtgaggtgaacaacaattgtgacctggactaggcctgcataactcttcatgctgataaagatcacatggaggcaactctgtggagcattggcattgttggggacaggagcgataaaaggaatgatccacatggtgtatgctgctcggaggctcaggtaaacaacgcacatgtggaaaattatgcttttg

SEQ ID NO: 278823 - DNA, 380 bp, Glycine max
  unsure (1)..(380): unsure at all n locations
ttctgccttcttctatcctcagattgggaatgcctctaacagcacctttgtcaatgattttcttcatgcctcttaagtgcagatgtccaaatctntgatgccatattctgacttcatcttctctggagaatagacatgtggaggagtaactggtttcttgatgtgtccataggtaacagttgtcctttgatctactgcccttcatcagaacttcactcttctcatttgtcaccaagcattctgactttgtgaagtttacattgaatccttcatcacacagctgactgatgctgatcaagtgtgcagtcagtcccttcaccagcagtactttgtccagactaagaagtccatcatggactaactctcccattcagagatct

SEQ ID NO: 278824 - DNA, 316 bp, Glycine max
  unsure (1)..(316): unsure at all n locations
atactcaagctngagatgacgaagtgtggaagggtgaaacttcctgctctttttgttaccacacagaggtacctgcagatatgtcgatgtgtcaagagaccttgaggacgttaggtggggtgctattgcccataaccaatcttgaccaatacctacccaacacgggcatactcggtcaatgagaacctgcgatgtacctaatcaggcgagctcctggccgtcaacagataaaatgaaaacaagaccactactccaggaagctcgtggtgggtggccagctgcgaagtttgtgtaatatgctgattgagggctctgg

SEQ ID NO: 278825 - DNA, 400 bp, Glycine max
  unsure (1)..(400): unsure at all n locations
agccttcacatttcaatttgagcgtctcgtaatattacgggactcaatcagacatccgagtaaaaatttattgtcgtttggattggctcagagattcaacattcaatttcgagcgtctcaatatattacgggactcattcagacatccgagtaaaaagttattgtcgtttgaattagcttagagcttcaacaatcaatttcgagcgtctcgttatatcacgggactcaatcagacatccgagtaaaaagttattgtcgtttgaattggctcagagcttcaacattcaatttcgagcgtctcgatatatgacaggactcaatcanacatccgagaaaaaagttaatgtcgtttgaatttgctcaaaggttcaacattcaatttcgagcgtctcgttatatt

SEQ ID NO: 278826 - DNA, 417 bp, Glycine max
  unsure (1)..(417): unsure at all n locations
ctgcagatntggtcttcgccagtgaaaggatcgatgtggtttcttataaaaggcaaatntgatcatcctactaggacgactgagataactggggcaaataaagagggtgaggatgagggagaaacccatgctgtgactgccattcctgtacggccaagtttcccaccaaacccaacaatgtcattactcagtcaataacaaacctcctccttacccaccacccagttatccacaaaggccatccctaaatcaaccacaaagcctatctatcgcacttccaatgacgaacaccacctttggcacaaaccanaaaaacaccaacaaataggaattntgcagcaaaaagcctgtanggttcaccccaaattccgttgtcatatgctaaacttgatcccatatncactcaataattcaatg

SEQ ID NO: 278827 - DNA, 390 bp, Glycine max
catggaaggacttggcaactgccttcattcggcagtaccagtacaatacagacatggctcccgatcggaaccagcttcagggtatgactaaacgagagcatgagtccattaaggaatatgcccagagatggagagtgaaattctgataccaggggacagatgtcgtacaggatgtcacgacatcacgcttcagaacatgcagattgtatgtgtccgtatgaacagattaaacaagtaaataacacaagagaattgtaacccagttcggtgcacctcacctacatctgggggctaccaagccagggaggaaatccactctcaatagtgttagttcaaggtctaacaacccctgtttacaaccttctcacctaaccactacccgtgcgatct

SEQ ID NO: 278828 - DNA, 391 bp, Glycine max
  unsure (1)..(391): unsure at all n locations
ttacgagcgtctcgaaatcctacggaacacttattggacatccgagtganaagttattgtcgttgtaatttgctcagaacttctgttttanaatacgagcgtttcgatatattacgggactcaatcggacatctgagttaaaagttattgtcgttggacttttcttagagcttccgttntcaacttcgagcgtctcgatatcctacgggactcaatcggacatccgagtaaaaagttattgtcgtttgaatntgctcagagcttctgtnttcaattacgagcgttttgatatcctacgggacacaatcggacattcgagtcaaaagttattgtcgtttgacttttcttagagcttncgtttacaatttcgagcttctcgatatattacagg

SEQ ID NO: 278829 - DNA, 360 bp, Glycine max
  unsure (1)..(360): unsure at all n locations
tctcaacatgaatacgagcaatgcctcttgcgcattctaagtttatttcagtcgagtatcccaatctaaaggcaccctatcctctcctcttttgcctgaaatttgcagaaagcagaatggcttttacacgcaaggacagtgtataaatgtagtcgtgtaatgtactaaaatagcattttcaagacaaattatntatttacatagtttgaatcttgacttcttttgcaaaacagaatatattgtgtgtaaggtacactaagagtgagaaattgcaagatgtttctaactatggnggcattaaagttatacaagcactcaaatattgaaaatgcacagaaatatcaacatatttactttcct

SEQ ID NO: 278830 - DNA, 209 bp, Glycine max
cctcagaagggatagtggttgaagataatgacaaaatggaatacgataattctaaagaatcccacgaagaattatctaactttgaaaattaggaagaggaagaaggttatgcctcaactcagaagatggactagaaaaaagaaccaatcatgttagggttgaagaggattacagtgctttacttcgtgtttgaatcgacttttatcact

SEQ ID NO: 278831 - DNA, 519 bp, Glycine max
  unsure (1)..(519): unsure at all n locations
ggccagggaacttatccatgatgattctngaactttgagtcagncttcagacgcatgtgaacctggggcatcagtggtgacaagnagcnnngtcnctttgtctacaacaccaccataaccgtggggtggtgtttctttgattttggccttgaaaacccctcatttagaatatatatatatatacgtgggtgcgccggtagggagcgcagaagcaacaaatcacgtgccactaccccttacatacccactcatacttatccaagcctcccaccgcgtgggagtaccttcgcgcgtcgtcaaatatggatcttccggcttggggaaactcaccgagtcgtggatgatcaaccccactcggaatataccgatcgttagagaccttctctcgatgggagcgcgtatcacatcttgccataccactccggcctgtctgagtcgcgggaaaagaacttcatagatacctttggggggaggaatcaagtcgccatgacaatctacatgtaattccctccgttgccc

SEQ ID NO: 278832 - DNA, 502 bp, Glycine max
  unsure (1)..(502): unsure at all n locations
agcccgtcgggtctttgtantctngctagtgagcagcacccgggacctcaaaggcaccggcaggcaggcagcnttgtagtntaggcgctacagaaaacgggcgaggtccaagagctatgacacacccgcggcgcgaggatcggcacagaccatagcctgcagtggaagtcggtctgagagcttgcgaggactctgtgagacggcgcgagaacctagaggtgacggagacatcctcaccacgcgtatcttgcaatatcgcacctagcgcttctctacggggcacaggaggcctcccaggtatggaaagctagaatcctctattggatcttccctgcacgtaccatatgtgaacgtctctctatccatctagagatgttcagcgtgccactgagccatcacgcgtcatgactaccgccgatgcccagacacgttatgccggctcgggagggcatgcacactccaactgcccgcacagggacgccccggacgggcaacgtgcacc

SEQ ID NO: 278833 - DNA, 510 bp, Glycine max
  unsure (1)..(510): unsure at all n locations
agagagtggtgancctgagcnctccanancncacacnatagaagacacaagctcganctgnctatnaattatgatctagaaggtgtatctttcactgttcaatcggaggactcctcatagagacctggatctatctttcaactgtttttcacgaaaactttccaattccattaaccattagaaggctcttaactatctggatnttcattcagctgaacttaaaagacctattgctttgtgtttatcttatctcacttggacctttgttggaacaatntcngccgtgagattccatcatcactttcaaatcctcaacatcttgcatacattgtttattctcataatagcttcacctggagccattgctaaatgtcttggaacatcgcacaagtaaatcgttaggggctcggttcaataacttacgtgatgagatccatcattacttttcaccctcagcatcttacttaatctttatataatatttggtggtaaatcaccgattgttgacct

SEQ ID NO: 278834 - DNA, 284 bp, Glycine max
  unsure (1)..(284): unsure at all n locations
agcttgtaattttgaaccatantcatgactgcaaaggacaggagctacccttctctgccaagagttcatatcatctgattcatcctcctacataacaaaaattggagtgagtaaggagagatatcaattatcaactaaacccagacattaatcaaaatgccacatagccccacaccattgtttccattgaatcattgtcatactgccccaactgctccgacttaattaaagcatctgaaggttgctcaaatcctgcaatcttgagcaaccaagcttcagtatat

SEQ ID NO: 278835 - DNA, 164 bp, Glycine max
tgggcacacagtttcccgatccaaatgcgcaaaacccaccatccctgatgccacctccactgagctacgtactccacgtaccatatcctcgttctctaacatcaggtccatcaatctccaagctccccacatcatgtaataacattcaacagcacaactatcac

SEQ ID NO: 278836 - DNA, 279 bp, Glycine max
  unsure (1)..(279): unsure at all n locations
ccttttttttgggattcttttttcgtaaagtaccggcacttacgaatttcgtaacgatacttgttttctttccgtaatgttgcggaaccttgtggattacataatcatcccctttttgacttacggaatgttacgaaacctcactaattgtgcaacgatgcttccatttgaattctggtgtgtcacggaaccttacggattgtgcatcaatattttcttttgtttccagcacgtnccggaaatttcacaattgcctaatgatgggtgacaagcacctta

SEQ ID NO: 278837 - DNA, 425 bp, Glycine max
  unsure (1)..(425): unsure at all n locations
ctaagctcgaccgattcccatggtgggctcgcaatcgatcaacatgtgttctttactgttctccctatgattttacctagtgagagtgacctaacttaccagtgtgtggtttgttttgtcatatactcgtaggtgtttgatgaggattttcactgacatgatatcacattatatataggattgagtcttagtgtatctgctgtataacacatgtgtaatgaatcttgtgatgatttcgaaccttatgttcgtgggagcacatggttaggtggatgattataaagaaccttgtgctagaggatgctgaaacacaacgctatgatangatgtgacattgaaacatgagtntctgtattatttgcataatatgtcgaacatgttactttatgttatttcgctaattaacttgttccttttgtaaaaaa

SEQ ID NO: 278838 - DNA, 545 bp, Glycine max
  unsure (1)..(545): unsure at all n locations
nnnntttcccttagcatgattnctggcaatttagctacgaccccgggatcctctgagtcgacctgaggcatgcaaccttgacgtgttattattccagtgaccggnaccaagaaggatgaganagaccagaaagtcttggtatggtgtggtgcttatgggccatggggagtggccatttggggaaagtgtggccgacagagatcttacgtggactttttgggacccctagatgtaagaatagagaataaccatttaacaaaaaagaatgtacagcgccagagaatataaagtgggagctacatattgaagaaagagaaaaacattctaagacggttnttacaaaaccgtcttggaatgacagtcttctaaaacgatgttcacaaaactgtctttgttgaanaatccatatttacaaaattgtcactgtcttatatactaagacgattcttgctgaacgttgtcgtttcgctgtcgtanaacatgctttttctagtagtgttcagaagggtattatgtttgctanggatcttcatcttatcaatgcn

SEQ ID NO: 278839 - DNA, 311 bp, Glycine max
tttatatgtgagagagcattttttaagagaatcatgttgattgtatcatatgtatgaaaagtatggcaattgtacttgaatcttgtatcactttatacaaattagatactcttttgatgtaatattagatagtgataataggaaatataatgtggttttgctctatagatgctgtatacatttttcatttattgcaaattcaaagttatttgagccagaaggagggctttggtcttgcaagattgaaatgaatgtgaataggtattttccattgtgtattcatgaaatttggttggtttaattccttgtct

SEQ ID NO: 278840 - DNA, 359 bp, Glycine max
tatggaggctggatctttgagcggcgtgaggtcctttaatggtgattctccaccatggagatgcagcggaagacatatgagaagatgtgagaggaggcaccatccactatggaatacaccatgaaagaaggagcttcaccaccaagatgagccttggataagaagcttggaaagatggttcaatggaggacaacaacgagggagataaatacagaggggggagcacgaaattgaacgaatgaacgatggagagaagtggcacttgaatatgtctcacaatactctcttcatcaaattcaacaagtgtaccatgctttatttatgactggaacttccttgaaagcttcttgaaaaacttc

SEQ ID NO: 278841 - DNA, 488 bp, Glycine max
  unsure (1)..(488): unsure at all n locations
aaacgaaaggaggggatatatactcacnctagaatgcccaggtcgcccccccacnctactagataagggctgtattttcctctgtgcaancccctgcaccggtgggaccggtcaatcctaatcggacaaccttgaagggggtcacattaaaaccaattanggtgtggttgtggaaccaaaatattaaaaaaactaattttgattcgtaacccgagactatcctttacaccattaacaaataatgtgtaaacagcatactataaaaatatccttgcacagctcctgatttatcaaaagtgcaagctctggtgccttcattgtaaactcgcactgtgcccttcaatagacagatgagatggcttcatgtggattccgcattntcgtgctcatattgtactggccgatataacttctcagaatcaatttggttcccaaattttctagacctatgagaaaaaacttcttggacttgtcactatacaagaccg

SEQ ID NO: 278842 - DNA, 371 bp, Glycine max
  unsure (1)..(371): unsure at all n locations
ttttggtggcctttgagaggaaatggcagaagggattntcctgtgcactagtgaagatagaagcatgttctcaactcaactacccaacaaaagggataagagactgtccgttgagacttgagaaggttctttctattgcatttttcctaccctgaattcttctatgattaccacgttacctttgcctctttgaagagcccaagcctggagagggaanatgtcatttaacttaacccatgccttacatgataagtcacaaaattcctagaggccgttatacaatgagactctatgcacaatagacaaatcaactaaccaatatcacacacacattgacgttcttctcttaatgagataacaacactatgaca

SEQ ID NO: 278843 - DNA, 281 bp, Glycine max
  unsure (1)..(281): unsure at all n locations
aaactattataattccttggatgctcatangagtgatttactctcctgtcattggaactaacctagggtgtaaatatgatatttgcatttcgaaagactatgttttacaaagatctaaaactattcatttgatttttcctgccaaaatctattgggcgatctttcttgtctcatcagacaataacgctgatgttgtataaaaaagatgttcaactcagttagatcacaatccaaccctcattctagagatattgatctatatcataatgattcatcatatc

SEQ ID NO: 278844 - DNA, 148 bp, Glycine max
tttactcggagctgtgagtccgatatatcagacgcttgattgatgtgaacttgacaatcaacacgatattttatcagtggtgatgatccgtatcatcaaccctcagatgatgtgagctctacaatcaacacataactttactggtgtt

SEQ ID NO: 278845 - DNA, 191 bp, Glycine max
gcctcattcctgataacagagacaaaatattaatgttgtgtaatagatagcaaaaaaaagttaagaaaaatgaaacaaaaaaaaaagttattaacatatcctctatttatcttttaacgtgaataatgaccgtgctgagattagaacctatgacccaatgaattctatcccaatccctccaccacaatatg

SEQ ID NO: 278846 - DNA, 276 bp, Glycine max
  unsure (1)..(276): unsure at all n locations
acatattctgcaactgantacgagccgtcacaggtgggtgattgcatatgaatggacatgtatgatgactcatatatagctatacactgaacatacactatgcgtatgatgatgattctgcgtgataagtattagtagtcaagctcctcagaatgtgaagggaggacagcatattgtgaggcatggagaacacctgagacatgtacatgacagtgacactagcatgtatagctgtatcaactatgtatacgtgactcactattcacaaggatccct

SEQ ID NO: 278847 - DNA, 387 bp, Glycine max
  unsure (1)..(387): unsure at all n locations
actcttgctcgagaatggagaattgcactaagcaatcactacgcatagctctcttactcgaaggtggaggacacatgaacgagaacacaattcatggnngctccgaaaaggggttgagaatggagaattacactaagcaatcactacgcatagctccaaacttgaaggtggaggacacatgaacgataacgcaattcatggtgctccgacaagattgagaatggagaattgcactacgcaatcactacgcatatctccaaacgcgaaggtggaggacacatgaatgaaaacgcaattcatggggctccgaaaagattgagaatggagaattgcactaancaatcactacgcatagctccaaactcgaaggtggaggacacatgaatg

SEQ ID NO: 278848 - DNA, 233 bp, Glycine max
agcttcattttgatctctaagcgacaccttgtccttggctgagcacgactcagagtcgctaagcgcaattccttacggtcataactgaggtccatgaagttaagcgccattcatggcagctaagcaagattcattgcggcagtgtgcacgctgagcgagtccttatcagctaagcgcatgctcctctgtacttaacatgcatcattttagctgagccacccatagtgtggctt

SEQ ID NO: 278849 - DNA, 420 bp, Glycine max
  unsure (1)..(420): unsure at all n locations
tccatcacagtgagactaaataatggtagaggaggagtgtttgaccatttttgttaaaaatttcctttggagactaaaagttaaatttcaattaaaaaagtataaaaaccaaaaacataattagtcctatagattattatctattattaaattattatattaaatactaaattaatagagttaataaccgcttaaggaaaatttcacaaaacggacaacaataggttacaacatagtcatacaagataaactgaagctttaattattgtntaatcaaataaggcgcaaaacatacaacaatatgttacaacaaggtctatatcacctagtcactcaagacaattatagcctcactgctcatctctcttgtgtcaaccacatgtccctttataccatcaacaacaacgacctttggcattt

SEQ ID NO: 278850 - DNA, 371 bp, Glycine max
  unsure (1)..(371): unsure at all n locations
agcttgctattggagcttctatggaggctggatctttgagcttcaatgaggtcctttaatggtgattttccaccatggagatgcagcggaagacaaaggagaagaggtgagaggaggcaccatccactagggaataagccatgaaagaaggagcttcaccaccaagatgagccttggataagaagcttggaaggatggttcaatggaggaaaagaaagagggagagaaagagagaggggggagcacganattgaaggaatgaaagagggagagaagtggcactctgaagtatgtctcacaagactctcattcatcaaagttacaacaagtgttacacatgcttttatttatagactacgtagcttccttga

SEQ ID NO: 278851 - DNA, 507 bp, Glycine max
  unsure (1)..(507): unsure at all n locations
aagggaaggagaagctaggcatgcatntcggacanttatanannnaacccaccgtacaacanagagaagagaataatggggagggaagattttctttactggggaagcccctacaccgggtggaccttacaatcactcacagactcatctcatgctgttaggatggcttcttcttcgctttcattgctctttcaggatatgtataacagatgctctcataactcatcctgaacttggaccttttctcttctacagatatctaatcatgcacaagcttagagaattgccccaactccccttccatttctgatattaggcttagataggatggcttgttggggctcggccgcttaacgcaactttggctccgttaacgtgcatagatgaatcccgcataatggccaatctcacttgagtctgaaatgaatgtgcgaggcaaatcttgtaaccaaatttactgatctagatagcgaattctactatggtctatccattattccaaaacag

SEQ ID NO: 278852 - DNA, 199 bp, Glycine max
agtctaccaaagcgaccaagatgggtaatatcaaagggtaataggttatgattattgcgcttacacgacaacatggttagcccacacatacatgttacatgtatatgtgctactacgtgatgatatagtggtgtagtcaacgcagctgtacttctaggagcataacacactgcccccttctactcctataagttctata

SEQ ID NO: 278853 - DNA, 291 bp, Glycine max
  unsure (1)..(291): unsure at all n locations
aagctgacacattgatcccactactaagagagcgcatgacgactctatacccatttcataancncctaacacaccaacattacagaggtgttttcaaccaccaacaaaggccccatgtaccaattggaattcatatgcaaccctaatcttgcatgtccacttcattccagcaaaaattacgagaataatattgtgaagctattagatatggacaatcttgtaatttctatacttgacagagtggtaattttctttttcaatctaaaaatcaatattctattcatagtatta

SEQ ID NO: 278854 - DNA, 311 bp, Glycine max
  unsure (1)..(311): unsure at all n locations
agcttgtaaagggttatacatgatacatgtcaaggcttggtttggttcaaggataaaatggatgccccacattatttccatgacacaaatgcaaaaaatgatgatttggaaattttatgcaaaactggtcatgcatgcgcctatgcggacgctcaagtgtcaaatttttatggtcatgtgatgctagggctcaggattcatttcctctattntagtcaacccaatatttccaaaatatgttcttttatcaatttgtgcattcctccaagtccatttcgggcgtccggggaaattttcacagcattcaccct

SEQ ID NO: 278855 - DNA, 348 bp, Glycine max
  unsure (1)..(348): unsure at all n locations
ggacactactcttaaaacaagaatggcatacaacctcctcccataaatacaaacatcaatgtaaatttagagcaagcttatgcgcatgtttccttacgaacgttcacttgcggaagacatcctattaactaagaaaaatgcacccatatacaatcaaggtagcttcattacctagattatntacatgtacctccaaggtgtatttgttatttacatcacacacacctccttggctgaatttacatacatgcataactcaaagcatttggggtaccaaaaactgcacatgcgctcatcttggtatttctaatacccctacatatacaaacttcacgatgaatcttgact

SEQ ID NO: 278856 - DNA, 425 bp, Glycine max
  unsure (1)..(425): unsure at all n locations
agagcgtcatcctaganctcganaccagaacatanatactcaactgctaccctggaactgctattctgccctcttttggttggccatctagatggcctgatttctcaggtcacttgacccattctaccactacaaaccctaaaaactatttatctaccaaacgtcacttcttatattgcatagaggtgtttcctaagactgaagaacttgctgaatgtctagtgatctcacgctctacttacctaaatatctcaaataacactacaatctacctatgaaccctaaacatgatcataacctataaagtgctggtgctagtgacccaaagcatactaccatcatacaacaaacttgtctgaagcgtttncactcataccttttcatctgattgtgataccactttagaccattttgaaagatttgcg

SEQ ID NO: 278857 - DNA, 325 bp, Glycine max
catcttcctcaacctttgtgagtggagactccattgcattgaagcgcatatccactcgcaaatccaaagtgtcaaacctctcacccacacacggttgaagaccatcaaacctgtccttcttcaacagcattgctagcaccctatttcagccatgagccatcatgctcctttatatacccaaacgatgctatgactgaagcgcctatgatgaatgatcgattgattggaacatactgttcacaatcaatagggatgttgaactgttgacggagaatggtaaccaagatgatgataatgcgatgtggcattcaatcgcaatgcctta

SEQ ID NO: 278858 - DNA, 437 bp, Glycine max
  unsure (1)..(437): unsure at all n locations
ggaatctgactaagcttgcatnacggaccatagatactaagcttgctgcagcatttctgaactatcggtagatctattctctcgatatgatgacctgcaacttgtctgtagcgagaacaaagagggattgactcaccttatcctacattacaggtttgcagtcttacagcgctgcagatctcaatgctatatctttgtgggcgcaatagagttttctcacacaccaatgtagacttctctgatggagtgtgaggttctgtaattctttgaacgcaccctctactacttggtgccatgcatcttaagttctgacctactttcatatataaaaaaggaaacggatcattaactccttgagttaaacactacttcgaattcactcttacttggtatatactgatgactgtcatctatgctaagaatagtagtacatgctt

SEQ ID NO: 278859 - DNA, 514 bp, Glycine max
  unsure (1)..(514): unsure at all n locations
gcggggcagaggacggtgatcncttagtaccgtcactcagttagacccgngccncttaagtcacctgcggcatgcgagcgaaccattttatactttgcgacctgacgnacggcgccggaatatttgagtgaaagtaccatcctctatcctaaatgagccgtcaatctgtcgacatggagtcctaactttttattctcctaactatagtatgaatgctatgcgatgcaacaacctaaaacgcgcgttgatctatggtggccaccctctactgctagaagatgaaatattctcatcctgagcaaagtgcanagctagatacttagtctcaatggattgcaggcttcagctacactttncggacattgtttattcgaaacgttcgtgatacccacaggccttttgcgtgggtgataaccatgacttatcttaagatgctaccacaatcccctttgacgagcataggctatgagcctctcacatgaataggatggtactcatgccccacaaataaatt

SEQ ID NO: 278860 - DNA, 245 bp, Glycine max
ggttgttaatgaatgaagccggctagacggaggagaagtttgactacgcccaggggttgcggatctaatacgctattcgcccatatcgctatcactccaaagagcatgatggacttatactcacgtgaatagagaacactcacaaatttatgtaatggaacggtcattcacgccattaagcacgataaccacttgctgttcaaccgtcttacgtatatccgcacactcgtgatgcttgatgaagc

SEQ ID NO: 278861 - DNA, 218 bp, Glycine max
  unsure (1)..(218): unsure at all n locations
tactcaagggacttgaaattcaagctccaaaaactaacccaaggcaacaagggggttgaggagtatttcaaggaaatggatgtgctcatgattcaagcaaatattgaagaagatgaggaggtaactatggctcgatttcttaatggtttgactaatgatatccgtgatattgttgagctgcaggagtttgttgaaatggatgatntgcttcacaaagc

SEQ ID NO: 278862 - DNA, 504 bp, Glycine max
  unsure (1)..(504): unsure at all n locations
nnnnaaggggtaaatgangcnttcaccactagactaagcctgagcaatctaacgacatacttttactcgagtgccgcttgtttccgttaaaaaccagacactccggattggtatttggaacctctaaccaattccaaccaacattaccttttaactcggaggtctgattaagtcccgtaatatatcaagacgcttcgaatggaataccgaagctctgagcaatatcaaacgacaattactttttatctcgatgtctgattcagtcccgtaatatatcgagacgctcgaaattgaataccgaagctctgaacaaattcaaacgacagataattttntactcagatgtctgatgaagccccgtaatatatcgagacgctcgaaattgaagaccgaaactctgagcaaattctaacgacaataactttntactcggatgtctgactgagcccnggaatatatcgagacgctcggattggatttcgaaactctgagcatattctatcn

SEQ ID NO: 278863 - DNA, 526 bp, Glycine max
  unsure (1)..(526): unsure at all n locations
agggaagttcgatcttgatantcnnccattttggaacnatcggcgnactctcagaggcccgcagaagagtagcagcaactnttatctgtgttgcttgngacatgatcaccgggacatgtttggtgatatgtgagcctcacccacataggatatggtctaatctttaccagaatccattcatcatcctcattgctgttctttcttacatcatccaatgattcataaaagatggtcttaatgattgccattgcacatgctcacccaatggtcacttatcaaatacagtataccatggccttatagcgggtgacccatgactacataaacacctaaagtgtcggtcatagaaccatattgaagctttgcaacgtcatttacttatataataatacctatcatgcggagatgngttaccagattcacaagactgatatacgttatatgcgaatcttacctgaaactctcatatggaatacatgcttatttactgtactaacaccttatgccatataaaaagaatcatccg

SEQ ID NO: 278864 - DNA, 256 bp, Glycine max
  unsure (1)..(256): unsure at all n locations
accaaaggttccaaaacacaaattcagggctcctttgaatcaagatattgatagatatgcacaaaagtttccatatacaccagaaagcttctatcagaaagcttcttataaacaaatntatttgaataaagcactaatatctcttttatttnttcctgttgcgattgttattgatgatgcaacctctgtgctctgtgttgctggtggctatgtgaagaatgctgctgaactacagttcaagataagagagctatat

SEQ ID NO: 278865 - DNA, 155 bp, Glycine max
aatatgttcttttatcaatttgtgcattcctccaagtccatttcgggcgtccggtgaaatcttcacagcattcacccttcaggtggtgacaccgttgttcttcaaaaatcaggtatgatcaatgaattttttttcatagaagaagtggaaatcat

SEQ ID NO: 278866 - DNA, 289 bp, Glycine max
  unsure (1)..(289): unsure at all n locations
aattttctcctattccttaaccctttttgtcaccaatttaattactgattaactctaattgtcaaatttattattcagctttatcaattgggcccatttgacntaattggtgtttttaattcaatttcaggataattataagcaattgggctgagccagattggactagaagagagcaaacaattntattagatttcgtctaatttcattntattgcgttcaatttttatttcgttttaggccaaaataatgtaatcaggtccagtgactttgagtgccctttaaaaat

SEQ ID NO: 278867 - DNA, 444 bp, Glycine max
  unsure (1)..(444): unsure at all n locations
cagatttgcatctganatatcaagcaatggttagtgaatgncatgatgtgatataacattattggatgacatttaagatttcatttattactctatgtttgagatccattntacagaggacatcctcttaggatctgtcaaatcctatgaagaataaatgaagttcgagatctgaaagttgtcaaacaccattaaaagatgcgcactgcttgtgatagatgtgcttgacttanagcaagtagttttctgctgaagtgatcaactcanaagctcacaaaagtgatactaaacatagtatctatggtagaaatgaactagtataaatctgtgtcttatatgctttttttactcttctgctttaactaacacagggtttgaattggatttattttgaaattctgctatttgtaaattgattccatcgctaaagtgttttgcaaaatc

SEQ ID NO: 278868 - DNA, 395 bp, Glycine max
  unsure (1)..(395): unsure at all n locations
gagctntcttcttatgtcttcacaaataatcatcacacagcaganaactaacaaaactacccctcatatctcccagaaccccatacccacgaaatttaagagagaaagaagtccacccaaacctggattttcgaagtcccactcgtagccacgcacttcacgaccccgaaaatgccctcctttcgcgatttggagcagaaatgagcaccaaaggttggagctttgttggggtttcaatggagaatggaggagaatgattaagcaacgtgaggaagaggggagagcttctgaatttctgttttggctgagtgaggagagagaaaagctttctggtcttaaataanaggttttcctctttttctattattttattcaagctctaccacatgtcccta

SEQ ID NO: 278869 - DNA, 502 bp, Glycine max
  unsure (1)..(502): unsure at all n locations
gaggcgctacatgatctcaccacttganaattacccnnngnccatnnatagangagaagtgggaggcgcagccttcttctatttatgagaccgaaggggatgtgagngctgtgatcattcattagcgtaacatatacatgatctagtggcatgctcaccacagtatgttcctttaggactactcactataactacaatagcgcaaacgcagccactatacgcccgatgcgaatgaaagatgggtgatgaagagggagatgacggaccatatgaatgacgatgtgtgggctatataagatctatggcttatgtgaccgactccatgctaaaagatattattcaacagaagacgatggtacagatggcgcttaccgcacaactagggaagcagaccagtgctacttcccgaagtgaactcgggcctatacagaatctccacaggttttgaatctaatgtatggatctcaagcgtaccatacagcgtgcctcacacttaattccg

SEQ ID NO: 278870 - DNA, 441 bp, Glycine max
  unsure (1)..(441): unsure at all n locations
agcttacagttgtccataaccacatgtcactgcacttacaacaatgcatttcaaaccgttaaaaccttggtattgatgaaaatttcacattcataattgattcactagcttcttttcagttgtgtcaaacaacccatggacaaatgttgcaaataagaaactaaatagcatgccttctgcaagctataacccatgtgacacttatcatcttctgaaagctataacctttataacaagtgcaacatgcctttntctccacaaaatggtacggcaattgcaacatattgtggctctgaagttgttatatatttatttatttataaagaanaaaggagttgggttaacagaagaacaagattgatatggagaatatgcgatctatctcacaaattctgatagttaatgcaaagcaatttaatgatactagctagtatatgtagt

SEQ ID NO: 278871 - DNA, 353 bp, Glycine max
  unsure (1)..(353): unsure at all n locations
cattcaatttcgagggtctcgatatatgacgggactcttctgacatccgagtaanaagttattggcgtttgaatttgctcagagcttccgtattcaatttcaagcgtctcgatatattacaggactcaatcagacatccgagtaaaaagttattgtcgtttgaatttgctcagagcatcaagattctatttcgagcttgtcgatatattatgggattcaatcggacatccgagaaaaaagttattgtcatttgtatttgctcagagcttcaacattcaatttcgagggtctcgacatattacgtgactcaatcagacatccgagtaaaatggtattgtcgttttaatttgctc

SEQ ID NO: 278872 - DNA, 518 bp, Glycine max
  unsure (1)..(518): unsure at all n locations
aggggatgttgatcttcgtcgtcangcattagatanagaccgcgcccnctcanagacgacctgaagcatgcaagcagnattccttttttgtctccaaaccaacaaggggcggttttaatacatgaacgatactccaacccgctggcggcgaccctggtttcggcctatcttgtggccatgatggcttcccatctcataacatgtctaatgcctaatacatgtagcccctgatattctacatcggctctctacatgtgtgcaatgctgcgttttcaagatcaaacactatgagttagatgcctcgatcaccgaacctcactcttttagatactagattgtctcttgctccccactcatagaagctactcttagctatacgtaaagacctacatgaacggttgctatagcactttctagagagttcttgacaaaacaaatctggtggtcgtgtatccctgaatagggagaaccattactaggctctgatatgtgattcctacggtggtgagggaatgtcg

SEQ ID NO: 278873 - DNA, 318 bp, Glycine max
  unsure (1)..(318): unsure at all n locations
tcaagtggtcgcgatatactatgatgatgttccgagtactttggatttggtacgaccatgccctcctgatttccagctgggaaattggcgagtggaggaacgccccagcatttacgcaacgagcataatgtanacctttacngttntaanagctctatagtcnggcctaggctttagagttnttccttttgttaaggctntgtgtcttttgtttttgaatttataatacaaggatctttcttcatctgttcctacgtctctacccattctcattcatttgcatgtttacttctttttctgaaacggcagatccgatga

SEQ ID NO: 278874 - DNA, 251 bp, Glycine max
agctctagtgtttagttttactctcgccttttaccactcagggcctctgaagttcctggatgaatcatattaaacacacaaggtatataacaggaaagacagtctaattatcactgagtagcacatctaattgggataacaaatcacaattgatgctgggtaatggactagacttgatttggattcagatccgaattggataacagattggattggatctggataactgactagacttgatttgatttgga

SEQ ID NO: 278875 - DNA, 295 bp, Glycine max
  unsure (1)..(295): unsure at all n locations
aatcactcccgcattgtatctctagcatgctttttatgttggtctcgtcctttgtcacgggaagccgggaggtccatatcaccttcttaattgtacacatggggcactgcacccncaaatgcacatgtaagaagagataattttccgggctctcgtgtccgtaaaatgcattcatatcatgcatcgcataagcatctcttgacaacatcataatggacatatcctgcatttgtccagtatcatattccagcctcacattgtgcatgagtcatggcatcatcatgcatatgcgttc

SEQ ID NO: 278876 - DNA, 383 bp, Glycine max
  unsure (1)..(383): unsure at all n locations
agctttgatttaagttggcttgctcattgntntctcgagcaatatgttgaatctcatntttaacaaaggcatctttgagtcgagtatccatgtggtagtatcttgtcatttatggatctttggtttagtattctccattcaacctaccaatgatgagtntggagtcgctccaacactntatgcatttgtcccttacttccttagctaatagaacttcatactcgacttggttgtttgttgtttcaaattcgaaccttagagaatgctctangatgacttcctttagcctttcaagaatgactccagcccattccccttttcattatataaaccatctacatacaacctccaccactcagattntgtctctgtgttggttgata

SEQ ID NO: 278877 - DNA, 380 bp, Glycine max
  unsure (1)..(380): unsure at all n locations
ctcagctgagttgaaaaggtcaaggactctcttgtctccatganttttctaacattacattggctggagacaactcgaacttgaaggcttgtgtcgctgcccttaagctagagtcaaaagggttggagaatcgcgctacaaatgtcanagactccgcanattaaatgtgaagaaatggaaggctganactctgttgcctttggtgagaaggagagagnatgctaaaaggaagagaanacgtgggttgaacaaacttcctatgatgacgtgtatgaagcgtacacatctggttttaatcattgcctctgccaagtcctttttcattgtgaggttcatgatgagtcaattntttatattgaaaaaaatggttataatggaaa

SEQ ID NO: 278878 - DNA, 298 bp, Glycine max
  unsure (1)..(298): unsure at all n locations
cctccacctctntagtggctctcaacctctgtatccaatctataccttatgcgtaggctttcaaccatctacggtagccaccgacggccctgttgctacttcccctgagttccttgtccttctttggcaccatntcccatgccttgttgaccccctgaagcacccacgcgtggggggctattgaacctcgtgcaataaaaggtgtgaaggccttctctgatggtgccccnctcatggggtagccaagttgccttatggcgaggacgagattataattaatgcaacccctcgtcccatc

SEQ ID NO: 278879 - DNA, 222 bp, Glycine max
  unsure (1)..(222): unsure at all n locations
ataaaaagatggatgaatgaatatcggtaattcaacttacgatgtgaaaaatatgtagtgacagacagactataatgacgacangtggacctcacatttatgatccagtcatatacgcattttctatagatcgcaagaattgcatgtttgacactcagaaatattgttgacagctctacagtntacgactttgtgatatctatgatcgtgatgtatacagac

SEQ ID NO: 278880 - DNA, 237 bp, Glycine max
cttatttctccctcagatggcccgtttagcatatcatataattctacacgcaatgagatcaaagacactcttatgaagctacttcacatagtccgtctttgcatgaccacctatatgcttaataacagaaccattaagcaaaccatcaagaagagtaaatggaaaaaaccataaacaacttcaacatgagacaattagtggtgccatgaacaactctataggatgcaaatacaacat

SEQ ID NO: 278881 - DNA, 219 bp, Glycine max
  unsure (1)..(219): unsure at all n locations
taattcttacaatcaatatcccaacaatttcaatcaaggacaaggcttcaggaaagtcaagggatgtataggcctcaaaccatgcaaaatcaaaggcctagacaagagaaaagaaaacctactcttcaagagaccatgcttcaatatatnggcccaaatgatcagagaatgaagctggtggagtctcaactcaccaacatacaattccttttgtcacaa

SEQ ID NO: 278882 - DNA, 310 bp, Glycine max
  unsure (1)..(310): unsure at all n locations
nttccccgatcccgcgacactagaaacccccaacggctcggtcaataaactgacatgtttagtactggacacgtgcatatttacaaatttaacttttggctttcctaaagattttttccaaccaattatatggtgtttttatacaagctcaacctcataaaatgggctctccatgtggacttatacacccatgggtgattatactcaacacaatctgtgagttctatgtcaactaaatcttgtgataggagacttgccttcagttgttctgaactttttttccttactcggacctatcaggaatattcgt

SEQ ID NO: 278883 - DNA, 233 bp, Glycine max
atacgatattgctgacacaataatctcttctatatagttactgagaatcattgtgtctgcaacacaaatggaatccaggtcatcacaatcaagatcagtggctgcaagcacttccatgatatggctcttgttatcctgaactgtgatcatcttcatatcctcttccaattgagacttccagctgacaagatgtgattcatcttctgggggcctgatgtctatgttgtatggga

SEQ ID NO: 278884 - DNA, 433 bp, Glycine max
  unsure (1)..(433): unsure at all n locations
gataagaanaaganaggagaatagatctaccttgaaaccncgccggccggcacgagagagctttttacccaccggaaagggggcagacccagcgccagacatggaccaccgaaaaagggaaagccaagccgcaagctggcgnaaaaaatgaatccgaaatgtgacaaatggatcagccttacgtccacaattggtttgcggatggaaggaagctccataagattggagggacagaatcggacaggacaacacgcctatgagagaagaataaatggacttactctacaatctaaagatgaaaattcgaccgagagcttatacaaatatgataatggggaataataccgcatcactaggaacgaacgcaacctgagttcatatgatgccaaaagaacggctgaccgcggacatacaactgaaaggagaacccccn

SEQ ID NO: 278885 - DNA, 336 bp, Glycine max
  unsure (1)..(336): unsure at all n locations
agctngtgagttatgtttcactctngcctcttaccactcagtcgctcttaagttcctggatgaatcagattagacacacaaggtatataacaggaaagacagtataattatcactgtgtatccgatctaatntggataacaaatcagatctgattntgagtaatggattagactcgatctggatttagattcgatttggataacagaatggatttgatatggataactgactagactcgatttgatttggataacaaatctagaattgattcgatacggataacagatcagatccggataacacaatgaatatagtttggataacagatatgataa

SEQ ID NO: 278886 - DNA, 313 bp, Glycine max
  unsure (1)..(313): unsure at all n locations
aaaatggtgacaaactccacatactacacatgtaaaacattaacaagccatcctgattcctaaacacatgatatgcatcttcattttcaaagccacggactgaggtccatcatctacaccaagcttctcaaggtcctcaaaaaaagcatcgggattnttcttccacaactcttccaccttatttatttgctgttcacttatntggcgagcccttaactgcttcttaaggtataagacttgtatattctctatgtgataaccctaaaggcactttcttgaagcatcatatgatatgcccaaatcatcacattct

SEQ ID NO: 278887 - DNA, 345 bp, Glycine max
  unsure (1)..(345): unsure at all n locations
gccatttgaatttttcaagaccttccgctgctcaatttcgagcgtctcgatatattatactcctgaatcggacctccgagtgaaaagttaagaccatttgaatntctcgagagcttccgttgttcaattttgagcgtctcgatatattatgcgcctgagtcggacctccgagtggcaagttatgaacatttgaatttctcgagagcttccgttgctcaatttcgaccgtctcgatatattatactcctgaatcggacctccgagtgaaaaagtatgaccatttgaatttctcgagagcttccgttgttcaatttcgagcgtctctatatgtgatgcgcctgaatc

SEQ ID NO: 278888 - DNA, 353 bp, Glycine max
  unsure (1)..(353): unsure at all n locations
acgacaataactgtttacatggatgtctgtttgagtcctgtcatatatcgagacgctcgaaattgaatgttgaatctctgagccaatccaaacgaacaataacttttactcngatgtctgattgagtcccgtaatatatcgagacgctcganattgaatgttgaagctctgagccaattcanacgacaataactntntactcggatgtctgattgaggcccgtaatatatcgagacgctcgaaattgaatgttgaagctctgagccaattcaaacgacaataactntntactcggatgtctgattgagtcccgtcatatatcgagacgctcgaaattgaatgttgaatctctg

SEQ ID NO: 278889 - DNA, 583 bp, Glycine max
  unsure (1)..(583): unsure at all n locations
ccggannnacctnnttcttttctcagtggtgcactctcaaacnnccaatctctncgggnnntcgaagacanacnctntnnctttcttcccttnttagttgngccttggtnnttagccatangcntnntttatnttnttccctttctcanatntnntgatcatnnttgaccttcttctnntatngaaagcntntctntcgaccattangtccccgcncctttagctgtagaccctntctnnnttatgcctnntaaaanacaagaaaaccattatnggcccaaaagaaatcaagaaggggagttagtgggggattaaaaccccataanacanacctnntcaaaagggagaaaccaatnntagtggtggcccattgaaccagcttcttatttcgtaagcannaattcaacattgagggtannaacaagcccttcccanagttnntttaagttatttctctctannaactgtcncctaagcannagttccccaaagtccttattaaccaacttcccgtntgccccattcggttngttgggtgaaccaagtggttgaanaataaccaatttcantgcccaaactttgn

SEQ ID NO: 278890 - DNA, 414 bp, Glycine max
  unsure (1)..(414): unsure at all n locations
cattcggaattgcgaaagcccactcctcattaggattatatttgacatctcaaacaaacaaatcaaacgtaacaagacaattatagttgctgtttgaatacctcacccactcaagtgtatcacacaattatggcttttctctaatgaaacactcttgccttttaccactctaattccccttgagttcttatgcaattcaagagattatggccacaacaaagaacaactcaccaatatgtgtaaggtaaggctagagagacaaggaaaaggttaaccaagataaaggctaacaatgtctttatgcacaaatgaacganataaaattcagaatgtaagaattcaagtaacaatccttcatgcaaccaatatattaccttaaagagaatttttttaaaagttcttcaagcatgaacc

SEQ ID NO: 278891 - DNA, 443 bp, Glycine max
agcttgagcttttgctgtggatagggttgcccaaatccagtcccagtggtcaagtgaatagtactattgttgccataatctaagagcactattcctcccccatcacctgcatataacaaacataaagcctcaaatcactctaaagttgccaacttttacattaaaatgtggaacccatttttagcatgctgaatcaagagctcactcacataagaggacaaaaaaaagaaaaccaactttcttttattatttgaatgttgtaaaatatatagtacttatttgattccacatcttggatctgaattttcagattttggatgtgattctaagaaacttgtagttatagtttttacatcccaaattgtccttcttaacaattcaaacacactattaataaatacacataaaaaattattgatgggctggacatagattatacatgt

SEQ ID NO: 278892 - DNA, 384 bp, Glycine max
  unsure (1)..(384): unsure at all n locations
tcctgactcaccataaaccttgacccaggtgttagaatgtcaattcttaccctcggaagcaaaaaaaaaggggagagggaaaatttccaatcaaagaggaagcananaaggagagaatgaaaatttcaatcaaaggaaaaaaagagaggaaagggaattcccaatcaaagagtgggagaaagcaaaaagaaaagaaagaaaattcccaatcaaagaatgggagaaagaaaaaagagaagaagaaagggaagaaagttcccgatcaaaaaaaaataatatgcagaaaggtctttggaccggacaatatctgaacaatacagaattgtcaccaaatgaataaaaagaaggaaagggaaccatgacctanaatggtcttcccccttt

SEQ ID NO: 278893 - DNA, 267 bp, Glycine max
tctaccccattttcgatagtacttgtgtaagcccaatccaggtggtaccaaagaaagggggcatgacaatcattcagaatgaaaagaatgacctaatcccaacaaggactttcactgactggagaatatgcatcgattaccacaagctcaacgaagccacgaggaaagaccactttctttttcctttcatggaccaaatgttggataggcttgcgggacgggcttattactacttcttgtatggatactttggatataatcaaatta

SEQ ID NO: 278894 - DNA, 132 bp, Glycine max
tggctttttgttttcaatgtatttggttcaagagcccagtgcagttttgtacatgtttaatcaatattgataaggattatgaagattagtgccgtttgaaaggattacatattgaagctgggatatgtcgtc

SEQ ID NO: 278895 - DNA, 167 bp, Glycine max
  unsure (1)..(167): unsure at all n locations
ctaagcccacctagaactccaattcactcaacacactcactgccgaattcaacacacagacttnctcagcatgcgaattacccgtccatactacaaattttactcctatccatcattgcgggaatccgaaggccaacccttccatggatgactaccactcatccatg

SEQ ID NO: 278896 - DNA, 303 bp, Glycine max
  unsure (1)..(303): unsure at all n locations
ctttggccatccgattcagattagagcgactctatagatatgtctgttgctatttccgaagccgacctgaaggctatggcttccgcaatttgcggttcaaaacaattagggagaagaatatagcccaccgccaaaacttcaccacaatggttccaaaagaccactcccagcccagtacgtacctttgttttgctnntgggaagcgccaaagttngccttgataatgcctcccttggacaagtctaccctctatgattcaacttgngatgctcagcacgatggtctatatgaacctgaatagag

SEQ ID NO: 278897 - DNA, 261 bp, Glycine max
  unsure (1)..(261): unsure at all n locations
agcttgtatatcctttcatgaataaagataccaaatagaggggtgttaagtgagtaactgtgttaactgtgtgactggttagtcattattgtctctctttgggttcctaacattttattattttgattttggcaaaatcttgtttccatagattcaaatgctatcttaagcttcattgagccatgaagtactctnttggtgaaatgtatatgtcatatgatgtatatgtatattgatgagctattaatgcttaacatgtgt

SEQ ID NO: 278898 - DNA, 127 bp, Glycine max
tgggcttttgaccccatgctctgatggagctgaaatcccctgcagagagctctgagactctctcggactatcactcacctttacttacaccacttccttcatattatgataatagacactcctaaca

SEQ ID NO: 278899 - DNA, 511 bp, Glycine max
  unsure (1)..(511): unsure at all n locations
naaaaaaaacatgacgaatcccgtcagtatntgcgngacacnncttgggtaatcatgccggaaactntaaataaatgggagatatcatgcattaaaataatgtatatgtggtnttggaaaatacaatccatgaaaagatccttcttttagccagctagaaccagtaccagaattttgaggcaatctttcaatcttcgacatcacatggttcagtaacacgtgattgctttttggtattgggcatttggcatagtcaatgataactgcattgtgctaacttattttgtaagctgttttcaaatacttaatttcacaaaataaatcagctcttctaccttttgtgntagtacacttctaattgtattgacattaaataagtttatctgggtgaagtcatagccaactgttctcaatttgtgtacgattaaaatggaaatcatggctggctngactctgcatttctattgcaaacgttttttacttgaagagtgaatatatcattttttttgta

SEQ ID NO: 278900 - DNA, 364 bp, Glycine max
  unsure (1)..(364): unsure at all n locations
nnnttcttggcttgnngagttttgtaccnacataanacnatagcgcgcaaccttcggtgcccatttctgctccaatcgcgaaggagtattttcgtatcngancgcgtcttcctgtggaccttcaattcaggttggtgactcttctcctgattcgggtatgggtttggaaatgaggatttctattctctctaatattgaaaattggagctgtactcctgtgatattactaccctctttaggttaatatctgatgtatgctaatcctttgaactttaaagaggtaataaccagttaaaggaatggttttaggaaaaataggtttaactgcgtaactgccctgttttgacgaacaaccttctcctcc

SEQ ID NO: 278901 - DNA, 329 bp, Glycine max
  unsure (1)..(329): unsure at all n locations
gatctttcactttcaggtgatatatttaatgatgtggtgggcagcccatactatgtagccccggatgttctgcganagcgttatggtcctgaggcagatgtttggagtgctggtgttatcctttacattcttttgagtggagtacctccattntgagctggtgagatcttttgtatttatttggacagtgtaattatgacctctattcatataaatgtatgcctttcttttttctgattattaattctcccttcgtctttgtgtggttcatatggttgtgtagaanacgaacaacggatatttgaacaagttctgcgtggtgatcttga

SEQ ID NO: 278902 - DNA, 119 bp, Glycine max
  unsure (1)..(119): unsure at all n locations
tctctcttagaagagatagatggacaatgaagatcaataaaaattccttattgaatatgcaagtggttgaccaaggaatctttttgagaggataaaactattgggcaatgaanactctc

SEQ ID NO: 278903 - DNA, 527 bp, Glycine max
  unsure (1)..(527): unsure at all n locations
cggggagagctagngactgnagtancnnncanttgatcangnaccccggcgatctntagagacgaccaggaaggtgcgagcgnnatagtgacttgctgctctacatgaaccaccctggggggcgcttacaatggcacagactccactcattaagggcgatggacatacgctatagacaacgttatctgtagcaataaatggatggacaaaataactccagcagagcgatgaggaagcggaactatacaagctactcgcaaaatgatgtcctatacatacagttagacggtaaaagcgactagcactgtgcacgacagggngtacccgacacttgccgcctagtattacatagtgaaagtgtcttgcatgatggctatcgcaaatgagtgaacgatgggacgacgtagtatcgggagtaaaccctgggcatgcggcatatgaccatgattgaccggccagttgaaaaattgctgcaagggattcaggccggccgaatcagagaatctgcacgaacgagaatggcgcgc

SEQ ID NO: 278904 - DNA, 504 bp, Glycine max
  unsure (1)..(504): unsure at all n locations
aaaaaatcgggtttgatntctnacactnattaanattnccncangangacccnccntanggaagcttcgaaggaggggagcttttttttgattttgtgtgtatgnagctaagcgactagcttagggatgatatgggagtatgtanctaatcctctacctagggtattaatagaatcatgtgtcacacttgttgtaactatgatgaatgacaaactcgtgagacgcaactctacgttcaacttctctccctattattcttcgttgatatcaagtgccgcatgtctctttctatcccttttttatatcatccattggagcactctgctcaagctacctattaaatgctcatcttggtggagcaccacatgcttacatggcgtattccataaagaaacggcgtgtgctctcacctatactactatgagataccatggaatacatggtggataataacattaattgaacccttgtagcagcagatttcggctctatagtccataagca

SEQ ID NO: 278905 - DNA, 395 bp, Glycine max
  unsure (1)..(395): unsure at all n locations
ctatcactgcctcttatggaagaacaatatgcacttcctgcattgtatatttgtttgattgtcgtataactattggcattgtgctccttcagtgttagtagaatatttcttggtttcaccattgactttgcatgtcagcaataatcgtcttttcatccttagtcaatcgaccagggtatagatgtccaactaatgactttggcatttcatgattgtgactcccacacattaacttcactatccatccttggcctccaaccactggtttcctgcgaagcttatagggacatctatatntcctactgccaatatctctttttacaaaatcttgctttctagacctatactgaccactcttttcacaatcaattaagacaaatgaaagtctttctcta

SEQ ID NO: 278906 - DNA, 494 bp, Glycine max
  unsure (1)..(494): unsure at all n locations
ntttaaaaaggttcgagagaacttagaaacacacccgagcgnaacccgctctgagatttaggcaaaattggccttctagggaccctgtgccctttaggggaactttgttatccacaaacctacattcttcagcggagtgggaggattaacaatatagtggcctgaatgtgcaacatcaatctcatcatcagcactatcttgaagttgctctttcccttgacctatataaagaatcgaaggatcttcagataccttaagaaacaatactcagtctgatgtcatcaaatatttatgtcaccaaattagtcactttgaacgatatctgtaagattttagtatattcaagggactaattcggtgacaaacatctttaaaggactaatgtggcggcaggctggcaccataacctttggatgactagagcatttactcctttatatcaataccataatctttanggtttcaagtctatattatactaaccatatcctcct

SEQ ID NO: 278907 - DNA, 194 bp, Glycine max
gggatatactgagactcaataatgaatcccgaacgtctaaaatcaaggaagccgcttggtgattctgaaatccgaatgggcggcatccaaagagggttttgccaatccggagttccgaacttttcaaagttaaaaaagagtaatcataatagtacgatcgaaccttgcgaatgaaatagtatcggacaaattct

SEQ ID NO: 278908 - DNA, 474 bp, Glycine max
  unsure (1)..(474): unsure at all n locations
gggaggcgatgtccatgattctgcccctttgagaagccgcagacgctgtgaacctgtggcatcataagaccattaactnggtcccttggcttacacttcctcctagctgagtctgtagtgctttggatttgggcatgaanaacctcaaattagatatatatatatatatgtgtgtgtgtgtgtgtgtgtgtgtgtgtgtgtgtgtgtgtgtgtgtgtgtgtgtgtgagtgagcgtaatactaacgaacctcccaatttacacttgatagcactccacttggatacaattagatattagcacatcgtggaagtatcaactgtggtgattaaccctcttgaatgatgacaccctagatacttctctgggtgtatccatatagatagctcggacttctgaactagtgctgttgacaacaaattagggatctatggtgttgaatgaaggcacttgatgtttatgttgacacttttagc

SEQ ID NO: 278909 - DNA, 353 bp, Glycine max
tgctttctaaccaacttgaaattttaacagaaacacttggtaagtttccaactaaactgtctattggtcaaccaacacattcttctgttttgcaggttataggttgtaccacctgtggtgaggctcatgaaacagaccaatgtattcccattgaagaaaacactcaagaaattcattatatgggaaatcaacagcgacaagggtatgctcaaggatgattttcagtcttccaacagggtccttataataaaaaaggataatggaggtcacacccttgcaatcagttcaacaaagaccagggtggaccttcgaacaggccaattgttcgcagccggcaagtgtactggatcaca

SEQ ID NO: 278910 - DNA, 101 bp, Glycine max
  unsure (1)..(101): unsure at all n locations
atcctcattcagcgatcagtttggttnttgcgtattattttgaacaacggctcacanatggcggtgagctgcgatatgaaatctggcatataattcaagcg

SEQ ID NO: 278911 - DNA, 194 bp, Glycine max
gccgcttggcacgacatcctatcctcatgggtcacaaagagaatctagtcgtctggcttcatgagcgaatgatacctatcagggagagataacggcgtatgatgttcgggcgaagacgaaggaagtgcttttatcccgggctaaattgtgaaggggcaaaaggtgcatacaatgctcggtcccactctagacgg

SEQ ID NO: 278912 - DNA, 275 bp, Glycine max
  unsure (1)..(275): unsure at all n locations
ctgtgaacgttacatcaagacatatatgcctgatgctgattttgtgccttttntgcttccttctcctggaagattaccgctctacgatccaatggtcctttctcctctctcttttcagatgttgactttatttctcttttttagtttaacaccaagacatgtcgccattttcatattctttagtggtagacgttctctcatttattgctataaaatgcgtgagtctcgttttttcacgatgttgatatcatggtaataaactccctgctgagttc

SEQ ID NO: 278913 - DNA, 287 bp, Glycine max
  unsure (1)..(287): unsure at all n locations
agcttaactttcactnttggcacttcatgacttagcctgtgtgtcacctacaattgcacatatttcatcattaaatccaatggacatattctagagacaactttatccataaaaataaatttatttacaaaattactccaaaataaccataaattgnggaactatacaagttttggaaaatgatttctatacaaaagttagtcgtataaggcgactagcactgtgcacgatagggtgacctcgacacttgctgcctagtttatctaagcgaaagtgtcatgtacaca

SEQ ID NO: 278914 - DNA, 399 bp, Glycine max
  unsure (1)..(399): unsure at all n locations
agtctcgtatcggtttaatcaattgtcgattctgtgtaatcgattacactattgtttgagacaatgactaatttagtcaggagtctctgctttaatcgattaccaaggggattaattgattacttctctctcgttcagttgttcanaggtgaacaagaacactttaattgattacttaggtcatctaatcgattacattattcttgggttgttttccagatgttggatgaacactntaatcgattacttagataatctaatcgatcactttgctaanataaccgattaccttatagatntaatcgaatacaaatgggtataactantttttctataaataaccaacttgtgttcacatctacacatcacgagatcattagagaatactcaatacatctc

SEQ ID NO: 278915 - DNA, 634 bp, Glycine max
  unsure (1)..(634): unsure at all n locations
ggggncacccccccccaagaagaatgttgttangcctttcatagtacnnaccgcgcgaatttcagctcggcaccccggnngatcctctanaagtcgacactgcagagcgatgcnnaagctnttatgtttagtatagtgtagcnncagcntgngatagacctanacgtgtagcgatacttctctagacatacntctnngatactcgacgtaccannatactttcacntgcnctgcncgacagtaccgaacacctgagtgtcacncgttatgtatgtctgagcgatcaatatctcagagtacagtactctctaagacaccctctaggatgatgntttacaccttcatttcgttccccttggcagcgtgtttgtgaatatttcaccgttntggtctccgcaaatctagtagtgtttacaaacatttttaaccccccagaaaccatgctgtctagcttcttttccacctgatgaacatcgtgcacccctttgaatttaacaaacccgtatctctctcaaattttgtttcgattcggagatatgaaaaatctccctccataaccacctgctcgaaatgcctacaaaggtctttttctgtggctcttcagagatccagaaaataacacgaagtacgtccg

SEQ ID NO: 278916 - DNA, 488 bp, Glycine max
  unsure (1)..(488): unsure at all n locations
aggaacggggtcangacntcgtanantcaaanaattnagaaanaagccnacacggaagccatgaagggcgaggagagttttttgttttgttgcnccaaggaaacggaggctagagagagtgtcacatgcatctcattaaaacacgctaataaatactagaacagtggcggatgaaccagatggtaagactgcaggtgcatcaagacgagtcatggaagacatatggggtcgacttcatcaacaacaattagcatgcaatgacatgtcgtggcctggtgagggcatcctcttatatgcaacgtcataaatgcaactctaatcatctacatgctatatggaaccgacatagatctagtcagtgttgcaaacctgctgtatcatacgctaatttggggaagcgcacatgttaccttcctatatactttcaacgataaatgaaggcttggacattactctgagagctccttacgactccacttgtcctgagg

SEQ ID NO: 278917 - DNA, 192 bp, Glycine max
  unsure (1)..(192): unsure at all n locations
tgaaatgaccctaaacaattaagcttgagtgaaacattgactatgaagttgtggttgatgatccttccttgatatatgccatccttactagcttatttcagttgtgactctaatgtgtatgttcttatctttganaagctgcatgtttgtgaaaatcaattgattgatgcagtccatgatattcagttcata

SEQ ID NO: 278918 - DNA, 501 bp, Glycine max
  unsure (1)..(501): unsure at all n locations
nnnatgggatgccgattgantncttcngtatnancncacacattgagtactcaaccttggaatgaagtggatggatcacataatcaaccttttttccctttgtagaccacctgtaatcactggcctcccaccaacactacctacctatggcaccaatggggactcattatttcttcttggcaggtttcagggtaagtaatgaccaaaggggtaggaaaaaccaatatattgtccctggtccacattttttgacacatcaccgacaacaaatccgttgaaaacccttgagcccatgaaattaattaattgtagggtgagaatgaacttanttatttgtagcctttctaacacttgagcgtgtagatcaattgtgtaggataattccaatntaatcacgacggttcctagttaggtgctatgagagaatgtnttgtgcttatatccatatattacctcgatagattactttaacaaagatactattgctagaagaagaaaaan

SEQ ID NO: 278919 - DNA, 206 bp, Glycine max
tcatcctattatgccgagaatatgatatcgatggaggaaagatattgcatagctgaaaacgtatgtcgtcctaagcatagtctacacgttgacagctggtggtgctcgaagattctgtaacgtacatactttacagtgtcatattcgagtgaacttcatattagcactgatatatattcttatagaaacatcatgcgtacgtggta

SEQ ID NO: 278920 - DNA, 352 bp, Glycine max
  unsure (1)..(352): unsure at all n locations
tctaacctaatagaagcatacctgccagcttctncgttttatctaactcaaaagcatccaactcaggtctttctggtttagtaacaggcatacacaacgtttccacacatactaagccttctttgttgatgacaaatttgttgattttgacgagaacctcattacaatcttcaagcacatattcaacctttttatagaatgttctgatagtgccaaaaagaagttagccaagcactctgtatgatacagcatcaatttcttgcanaatcttgtctgcagaaggtaaaaatgaaatgaaaataatggcaaaacaatagcatatatcacaaatcttataatgatttcacagaag

SEQ ID NO: 278921 - DNA, 495 bp, Glycine max
  unsure (1)..(495): unsure at all n locations
ngggtgggtcggatttgaactctaaactatgctccttggtgnnttttacattcttctcttggtcaggacttntgttatgggttattttcctccgaanttntaatgggtaattatataatctttcagattaatttaattatatagggattatattcctcccaattataagggccaaacctttctttaactttggaagagagatacacanntgaacagcctatgtagagacagcgtagnttggttggatcacccaatgaacatcgcatganaagtaatgagaatgtggcgaaactgtaccattgacatctcanaatgctgttcacgaagataaaccatttggcaatgtttatggagtggttgatatatctaaatgttgataatccttatatgnagaaaaagtgcaaggtgaagcacacaagaaatcaagcacgctaccccaaaccaaccgcgaaacctcccacactcacttcaactctgcgtttgagcttaatcaan

SEQ ID NO: 278922 - DNA, 514 bp, Glycine max
  unsure (1)..(514): unsure at all n locations
gggagatttgcatgattncggcaattacgagaccgcgatctctnagtcacctgaggcatgcaagcttgtggtaatgataaaaaatnggaccatggagaggagcgatgatccttcctttccaggggatatattaattgattgtgtggggcagcccttactatgttgcccgggatgttttgcgaaagcgttatggtcctgacgcagatgatcggagtgctggtgttatcctatacattcttttgagtggagtacctncattctgagctggtgagatctttcgtatttatttggacacgagtattatgacctctattcatatagagctatgccttttgtattctgattattaattntccctccgtctatgtgtggttcataatggtgncgagaacacgaacaaggaatatttgaacaacttctgcgtggtgatcttgacttttcttctgatccctggccttcgaattctgaatgtgcacaacatttagctacaataatgctggtctacgacctatag

SEQ ID NO: 278923 - DNA, 384 bp, Glycine max
  unsure (1)..(384): unsure at all n locations
ggtncanaaaaannnnaagggacttactgattcgcacantaaactagctatacaaggtgtggttcatattagatgagatttttacaaccttgaaatagggtggtttatcctaacgtgacctttgatgcagaggaaggatattgatgaattgactgaaggaactaaataaagaagtgtggagtgatcagtaaagagttaatatatatgagagcttacactatacttctaaagtggagaatggcattcaaaatttttagcacactatgcatattccaaaaataattatatacagaatcaccttcagtgaatattttgttcttattattttaaaaatacttgcaatactgatagaatccgaatattattttttaatattttaattat

SEQ ID NO: 278924 - DNA, 359 bp, Glycine max
  unsure (1)..(359): unsure at all n locations
aacacaagcgacctgaagtaacacaaanaacngctaaccatttacaggccgggagaaggatttcccttttggttatgaaaaagaaaatggagagaaaaaaataagaagcttgatttgaaaagaaggagataatttatcttacacatactttttatattcaataacataaactatccttaccaatttacctatgtggtacacctactgctctagtgagaccctttgctatgcgaactaacctaaagatagataaagtcgtagaatcaaacaatattacatatatatcctggctaaatttcactcttctttacaaatcatcatacctaacactttgctttatgaatgatgaatgcattgtg

SEQ ID NO: 278925 - DNA, 500 bp, Glycine max
  unsure (1)..(500): unsure at all n locations
atttcctccccncagccccctctcccnnactcgggaaaatcccgccggcnnnncgtgtggaaaggcttctttaggttatagacaccccncaaaaaagcgcgcgcgttgagtgataatanacacaagaggctntnntgtttcaaaataaaagggtttcctcttttcctataatttaattcaagctctgccacatgtccgtcggggccagttttcgaaagcaagcaatatatatatcacaacgctcataataaaaccccgagcgtggctcacaggttggttttgttaaattctaagtcgcacgcaaaacgatgaattttatactaattacttaagagttaacccataacctcccagttatggatttctctctcttaattagcctaacccgcatatcttgcccccactattcctacttctaccaagaacatatatgcatatacactgaataatacttatatatatataatcattcaanatacatcgttttcaaaaatatccgg

SEQ ID NO: 278926 - DNA, 183 bp, Glycine max
ccagaggggttgtcattctcataaacatcaactacaatggggtgtctcgcgcaaatccgcttaatagcgcttattcatgcaaacaacgcaccctattaagggacccttaatgctttaaaacaaaaagaccgtcctcgatgatacagaccgctgcattcattaggggacgcaaacaaaatcaag

SEQ ID NO: 278927 - DNA, 123 bp, Glycine max
tagaggggacaaatataacctagataattgtataataaaaatctacattaactatttatttataaagaaaaatctaaaatctattaacacacactatgatgaatgccttgtacaacttaatat

SEQ ID NO: 278928 - DNA, 314 bp, Glycine max
aagctacaaaaggagagagcatgaaatgaagagccaatggttgatacatggacggagatgaaaaagatcatgaggaagcggtatgttccggctagttactcaagggacttgaaattcaagctccaaaaactaacccaaggcaacaagggggttggggagtatttcaaggaaatggatgtgctcatgattcaagcaaatattgaagaagatgaggaggtaactatggctcgatttcttaatggtttgactaatgatatccgtgatattgttgagctgcaggagtttgttgaaatggatgatttgcttcacaaagc

SEQ ID NO: 278929 - DNA, 318 bp, Glycine max
  unsure (1)..(318): unsure at all n locations
catcagaccacttccgggtgctggagctacttcattttttcttgatggggcctatgcaagttgaaagccttgtaggatagacgtatgcctatgttgttgtggatgatttctccagatntacctgngtcaactntatcagagagaaatcagacacctttgaagtattcaaggagttgagtctaagactccaaagagaaaaagactgtgtcatcaagagaatcacgagtgaccatggcagagagtgtgaagacagcaagtttactgaatactgcacatctgaaggcatcactcatgagttctctgcagccattacaccac

SEQ ID NO: 278930 - DNA, 236 bp, Glycine max
  unsure (1)..(236): unsure at all n locations
tgtagcttcaatgcaaggaggcatgcttaaatttggttntagagtcagaacatcatgaaaattatgatgctcttgcgagacttcttgctccaatatgggttgccccatgtttgatactttacatagaagtagcatggaacacaccttgcactagtgtgtcttcataggtcaatataacaactatgaactccctagcaaagtgtgaatgattgtcttcctagatgaatgtatgatag

SEQ ID NO: 278931 - DNA, 400 bp, Glycine max
tactaccttagcctaatcgctagcgacagcttatgtgggcaagcggtactcattgtcccaagcgcaattccttacgaccttaattgaggtccatgacgctaagcgctagtcatggcagctaagcgagattcattgcggcaatatgagcgctaagagagtccctctcagctaagcgcatgctcctctgtacttaagatgcatcattttagctaagctggccagagccaggcttagcgagagttgcagcttttctaatctgcagacctcgctaagcggacttactctcgcgctaagctgagtttcagttaaacaaaattattttcgaatttgaaacgtcagctaagcgcacgtgttcgctaaacgagcttggttgataaaccaaacatctctcttgctcact

SEQ ID NO: 278932 - DNA, 377 bp, Glycine max
  unsure (1)..(377): unsure at all n locations
agctattaattgtatttgctacgttccaattgatctcagagtggtgtaatcgattacaagatattggtaatcgatgaccagtgtatttgaaagtcgaaattcaaatgcaattagtgaagagtcacatcctttcataaaaagctttgtgtaatctattacaatgatttggttatcgattaccaacgacaaattntgaacaaaatcaaaagatgtaactcttccaatggttttcatgtttttctaaagggtataacatcttcaatggcgttcttgaccagacttgatgagtctataaaagcaagaccttgatgtgcattttaataatcttctacaacctgtacagacaactattacacatattctttcacaacctttga

SEQ ID NO: 278933 - DNA, 395 bp, Glycine max
  unsure (1)..(395): unsure at all n locations
ctcgtcggatactctatgtcatgggtcttcgcacagtggttattggccactgnatggtcaggggtggtcgtggcggngttggctgatggaccgctgggtaaaatcgacattcttctgttcgctgtggtatcggtggggttgccgtccacccattccggtgtgattgcatgccccgctccgcttacaagcttcacacgggcttccatggagtcctaacgagtaccctcgccctattcagtctacgcaactcctgcacatgatcatccatctccaccaaatctcctatcggggcgacaatcttacggatgcttgtcgtatcccatgcctctaatgggatgccccaacacaagacccatactagtctatggcctattttgatattgctgctccatttc

SEQ ID NO: 278934 - DNA, 350 bp, Glycine max
  unsure (1)..(350): unsure at all n locations
tatgctccttgaaggtggcagtccatgaggaatctccttggaaaagacatctttaaattcctgcaataacggttgaacactangagaaacataaatagttaactgattagaattatcactctctctcttttgtgtatcactcttttcctcgggtgtatcactcttctttctcatattcctttgtggagcctcacgtatttctttctcttgttctctcttttctctcattctgaattggtcatcacatgcttctctacgggatagaaggttaagagtaaacgaagaagaattgactattcgtctgtaaggctcttctttgttacngatcaacaaacgttgcatttgtatag

SEQ ID NO: 278935 - DNA, 376 bp, Glycine max
  unsure (1)..(376): unsure at all n locations
tgcacaacaagnnntccacatcctcgttgcgttcataaacccaccgtcccctccnacccacctccaactganctcacntactcccacatancccataacctcntttctctcaacaccgggtccccatcaatcctcccaagcttccccaacatcaaagtaaatcaacattcaaacagcacaaattaccacagccaagaaaacagggcaaaggcagaaaactctgcccaaaacaccaaccaaaatcacagctnttctcacttaaagaccccagtaacaattccttcgatccaattcgttaaccgttggatcgactccaaaantttactggaagtctatagtacataagcctacattttgaccgttgggatctactaat

SEQ ID NO: 278936 - DNA, 219 bp, Glycine max
  unsure (1)..(219): unsure at all n locations
agcttttagtgattacccaccattttcatagtagaacactgttaatatgtctactaccattgtgataatctctntctctattattgagggtgctacttaagctgtcatatccctccacctttgggcatattctttgaaagattcatgctcctttatgcacatgntttgtagttgcatcctatccagagccatatcataaatgcactgatactgcctaac

SEQ ID NO: 278937 - DNA, 325 bp, Glycine max
  unsure (1)..(325): unsure at all n locations
atcctatctccgacagccaatgggtgagtcctgtcccggtagtcccgaagaagaccggccctacagtgataaaaaatgagaaggaggagctaattcctactcgggtgcagaacagttggagagtctgcattgactatatgaggctgaaccaggttaccaaaaaggaccattntcccctgccattcattgactagatgctngaacgactggcangtaaatcccactactgtttccttgatggttnttctggttatatgcaaattactattgctcctaaggatcanganaggaccacattcacctgccccttcngcacttttgccta

SEQ ID NO: 278938 - DNA, 341 bp, Glycine max
  unsure (1)..(341): unsure at all n locations
agcttatctttttgaagtctgtaagatggtatgtcttattgactntgttagccttaagaacttgttcatttcttgttgttaccaaaattctgctacctgatccaaaatggtcaagagctattttgttctaagtgatgtaaatcattcacgtcatcaagaacaataagaaccttcatatggccaattctcctaacaatatctttgggtaactgcatccacgtcatatcctagtagtgtagaaaatatttttttcttcaaagaaattattccatgtttctttgattcttctctttcatgggctaaaaaataacaaccatcatattcagaccgtaacttttcta

SEQ ID NO: 278939 - DNA, 303 bp, Glycine max
  unsure (1)..(303): unsure at all n locations
aaacaatgcatcaacctcatgtgtcagagttaagtccccaagagtcacccgcgtcatatgaactacaaatgagtaacatctttcaatatacttgaattgtactcaaaggcatgaagccatagatattgataaatctagcatgttcacacncatagggtagatcgtgagtaactctaagtgtgtagccacaagcaaaactgttagtacctatgttgtcaatccgtttcaactcatgataaatgacatcttgtgcttctcttgatacaaagccgcatatgttcttatatactangatattaaaca

SEQ ID NO: 278940 - DNA, 522 bp, Glycine max
  unsure (1)..(522): unsure at all n locations
ngagggtagtnccgttagnacantcnncnaattaagcnangccnccgngatcctatagaggcaggcatgaggcgangcaacttnnatattattctctgacgccacgcaccccagaggggaggtattcttgtcaggccttcttatcttgagctcgttactgcgaccccacagagccgctcggaactagaactagcatcaatctttacttcggacactatatgatggccgctctatcgcgtaataagtggttacgttgatgtctttcatctgatcacactatttcctgacgctagtgactgacgtcctcaacttctctctcaccttcgagctgtgccgtaaagcctgcacttgttactttgcggaagaatttgagcgctttactacgaagctttttagctttgggagcccagttataccttgtggtctacacttcagccactagtgatagccggagaggacgccagagtacttccttaagctgctaatttttcttcgacactaatcctgctgaaagtatccgag

SEQ ID NO: 278941 - DNA, 422 bp, Glycine max
  unsure (1)..(422): unsure at all n locations
nccattttacttcttccccagccccctcntgcncgaccnggtgtgncncnnnnnngnnntnnnnnntnnnnnnnnnttanatacaacaaaannaaaaaantattttttttaaaattngtgnccnccaaaaaacacnnnnnnannnnnnnnnnannnaaaanaaaancnaatanaaaaaaaanaaaaaaaaacaatacannannnaacaaacaaaaacaancaccattcacaacaaacaacaaaccaaaacaancnaaaaaaacaaaaaaaacaacaaaaaccncaacaaacaacttcaatatataattaataaccctttctatcactcataaaaatataactaaccatatacttatccaaattttcttttaaattaaaacatttttatatcataataataaatttatatattatcataacan

SEQ ID NO: 278942 - DNA, 255 bp, Glycine max
  unsure (1)..(255): unsure at all n locations
ctataaatagaagcatgtgtaacacttgttgtacctttgatgaatgagagtcttgtgagacacaactcanacttcaacttctcttccttttcttccttcaatttcgtgctcccctccctctttctctccctctntcttttcctccattgaagcatcctcttcaagcttcttatccaaggctcatctntgtggtgaagctccttcttccatggcttattccttaatggatggcgcctnctctcacctcctttcctt

SEQ ID NO: 278943 - DNA, 459 bp, Glycine max
  unsure (1)..(459): unsure at all n locations
gtgtattncttctgacntggttcttccccgaccnttgctttcnanaaaananagnannnnnaaattnnnnnnacattttttctttnnnnnnanccnnnccancgtttggtgtacacattaggagacttcccctcttcacnatctnccnnaacattcaatcaaaactataactactttacctcatttaaaccttcaaaccattttcctccatttttaaaacctattntctaattcctttccttaaatccaaataatatctatatatttccaatattaattacaaaaaccttncaaaccccttcttaacaattttttttctttaaaaatcaaaaaaactttattaatttattaataataaccataatttttcaaattcttaattaataaaatattttacaccaatttaattattctttttttccaaacataaccctttaaaatcattaactacataatttn

SEQ ID NO: 278944 - DNA, 392 bp, Glycine max
  unsure (1)..(392): unsure at all n locations
agcttgtattactaccataaggaaagaaagtaatgggtgtctacaaacaatatggatgaggcaggtaacgttgtcagaaacaagacaagattggttgccaagggttactcacaacaaaaaggtgtagactatacaaaaacctttgctcttgttgcttgtctagaggcaatatacattntactctcatttgcatgtcatacaaaaatgagactatatcaaatggacgtaaaaaatgcattcctcaatggagtaatataagaagaagtctatgtagaacaacccactgngtttgaaagtaacactgttccacacatgtgttcaaactctataaaacattgtgtggacttaagaangctccttgagcttggttgaacatcttagttcatttcatg

SEQ ID NO: 278945 - DNA, 356 bp, Glycine max
  unsure (1)..(356): unsure at all n locations
ttcctagcttntaccatgnatnctccncnnnctaaacaccgtaggtttttacttcatttcatactagaggaaccatgcaggtgaaaaactgatcacgatcgtttccaaaatgtaccactcgccgaaatacgtcaggttttaaaacttactgatgaaccgatcaactcttcctttgacttctccaatttattacggatgatataaacacattgccacctcggaataagaagcccgaatgcttttaaccacttatgcagcctttaaaacaatgtcgttatttttttcctgtaaaagtttgtgttggcggctttaaatgcatgtgtaggaaggttttgtcaccaaataataattagccc

SEQ ID NO: 278946 - DNA, 378 bp, Glycine max
  unsure (1)..(378): unsure at all n locations
caaaatctattaaagaggattgtgattattaaaaatggtcgctatattttaattaattatttcaaaatttaaaaccccaacaactttaatatcaaattaacggatgacctatttgttacaaattaaatgaccaanaatgcaaatttaaaaaataaaggaccanagcaagagttacgtaaaacatatagaattaaaagatattgtggcttttatataaaaaagaaagataattgaattaaagataaaagaatatatatatatatatattactattaatatacgtggcaataacaggacaatattctaggaatgttttttattgtaatcttttttctttttttcgctttttctccaaaaaaacggcgcaatgcatgggtt

SEQ ID NO: 278947 - DNA, 331 bp, Glycine max
  unsure (1)..(331): unsure at all n locations
ggaanaagataactagatcatgcanacacnaccnatcgggccctcattagtgggcgccgctgttgtttttttaaangcgcggtgtggcacaaactttatggcttcaaaacaatgctcttcactgtaaaaactaccctaatcattctatatttttaataaccttaaatttattcttaaaccattactgccgaatgttttgacaacttttagattgatcccggaaattgcctaaactagtttctaactattctgctgtccacaaaccattaaacactttaatagagcaaaggtaatcatttaagccaactataaattgagtgtcgggtgcctg

SEQ ID NO: 278948 - DNA, 399 bp, Glycine max
  unsure (1)..(399): unsure at all n locations
agcttgcataatggattcagcgatgtctttctatggggggcaggataaccctcatcaattctgtcccaacagccctccctatctaccttctctcttttttcagaattcctaaaaaagtgatacataaggtagtttctattcagaggaactttntgtgggggggtggttctgaaacagctaaaataccatgggtgatctgggatattgtttgtcttcccaagactaaaggagggttggggatcaaagaattgtctaagtttaatgaggccttgattggtaaatggggatgtgatctggctaataaccagaatcagctttgggctagagttttgatgtccaagtatggtgggtggaatgctttatgttttggaagaaacagtgcagaatgctccccttggt

SEQ ID NO: 278949 - DNA, 470 bp, Glycine max
  unsure (1)..(470): unsure at all n locations
aggtgtgatcgatgcnatgcgaacaccanttaaatatnnaacctncttaggattctccttanggaagctcctcagggaggtgagcttantttttgaagggtgtatgtacctaacctttcctaagtaataagagggggtgtatgtacctaatcctttaccaagtcaataaatggaaccttggtgaccacttgttgtacctttgataaatgaaagcctttgtaaacccacctttaagttcaactcccttcccttttttttcttccttcatttgcgggctcccccctctttcttcctttccctctttcatttcctccattggaacatgctttctcagcttcttatccaaagcttatcttggtggngaaacccattcttccatgccgattcctaatggaggcccctccttcaccttttctctttgcttcccctgcttctcatggggaaaatcaccataagggacctcttgaacc

SEQ ID NO: 278950 - DNA, 354 bp, Glycine max
agcttgcatattggaatcagcgatgtctttctatggggggcaggataaccctcatcaattctgtcccaacagccctccctatctaccttctctcttttttcagaattcctaaaaaagtgatacataaggtagtttctattcagaggaactttttgtgggggggtggttctgaaacagctaagataccatgggtgatctgggatattgtttgtcttcccaagactaaaggagggttggggatcaaagatttgtctaaatttaatgacgccttgattggtaaatggggaatgggatctgctaataaccagaatcagccttgggctagagttttgatgtccaagtatggtgggtgga

SEQ ID NO: 278951 - DNA, 448 bp, Glycine max
  unsure (1)..(448): unsure at all n locations
gagggtgaactgagcnttccactncgagnacncncaatctnctttaggaatctcctaaggaagctctcaggagggagcttattatganaggtttgtatgtacctaacctctacctatattatgagaggggtgtatgtacctaatcctctacctaatctataaatagaagcatgtgtaacacttgttgtaactttgatgattgagagtcttgtgagacacaactctaangtcaacttctctccctttttttcttcctcaattcgtgctgccccctctcttttctctcctcttcatttccccattgaagcatctctccaacttttatccaagctcatctggtgggaagctatctccatgcgtattcctagtggaggcgcctcttcactctctctttgcttcactgctctcatgtgaaaataccttaagactcatgagctaagatctactn

SEQ ID NO: 278952 - DNA, 443 bp, Glycine max
  unsure (1)..(443): unsure at all n locations
aagtcaatcttcccagccccttcntncctgacctctttanncnnnnnnnnnaaggaanntcacttcacaagacactttatctctaaganaaaccnccccatagcatgtggaaccttatgggctagactatcaccannacttccaagatattctngtaccaacaaacacacatttctttgacataaggacctacatgactactctaacactttggctatcaaaagagcctacgcgcacaccttgggattctaatacctaacatacgcaacttctaaagaaacttgacaaccacacaaaaaggctacatttatgccatttttattcttactcccaaaagtgattcaaatcaatatatttatttggccactaaaatgaattcaatgaacgggttttttatcccttgtttaatacatgcacaaattaaaaatttggaaacattgatt

SEQ ID NO: 278953 - DNA, 375 bp, Glycine max
  unsure (1)..(375): unsure at all n locations
tatcttaagctttggtctaaaattgttatatttgcatggaggctaatcagagatagactaccaactagagcgaacttgcggaggcgacagatacaggttggagattcatgatgcccattctgcacagttgaggaggagagcgcaagtcatctattctttttgtgaagcaagatcattccagtatggtgggaatccttatcttgggtgaacttgtcgggcacctttgcatatcatccaaggcaccactatctccaacacatttatggaatgatagatggaatggggtctatgagatggacatggtggtggatggcactgacatggaccatttggaagaacatgagtaatattatcttctcanaaggtacattcaat

SEQ ID NO: 278954 - DNA, 498 bp, Glycine max
  unsure (1)..(498): unsure at all n locations
tatggggnnnnaagtccccnnnnnatnactngaanactngacnnnnagactnnnnanccttagganaggatggagcggaaagatattggctcctgctntgttatngngaatagtagctgagggatgtaatgatgattgtgatgtgacacatgtnttactcctttaaacaatcgcgtcatttgcatatttcatttctttgacgtgcaggtctacttttcaaaacttacagaactaatagtctgatataaatagaaaagtcactggtgttaatttgctaactcatgcacactctatgcttggtgggtagggacctacctactgtaattatttttaaatggccagccttctcttggncatatacgccaggggggatagggaaattccattctaacccacatagtggtgatgttttgactcggaataccaagggtntcctcgcgtttggaattcctcctccccacggtaaaatcacttccctttggtaatttcaagtattcg

SEQ ID NO: 278955 - DNA, 348 bp, Glycine max
  unsure (1)..(348): unsure at all n locations
atctngtttactcttacctgagtcagtggtgcctaccactatatttcattatacagcaccctcaaatcctgtcaaaattctggccttattttgttatctgtgtaacattactcatgttgaaattactgttaagtaaattatttgatagtgtacaattgtaaggtaaccagttcaattctaagtctctatcaggaataaaaataaaaacaagtcattgatgaatgatccttatccttactactctaaacatgacagcaacacaagacatgattcattgaccactacttttactataaatcaaagccttgtattctggaggtacaaaagccgaaatatcaatgcttcata

SEQ ID NO: 278956 - DNA, 141 bp, Glycine max
agcaaatgagaggatgtacatccgtagcacagtgtcaattggtcctctccatcatggcgaggagggtctataatacatggaagatcgcaagtggcattacctcttcacacttctgagtcgacaaccaaatcagcttgaatc

SEQ ID NO: 278957 - DNA, 259 bp, Glycine max
atcttgtgttctttctttttcagcatctccttgaattgtctagacataagagcaacttcatcgttcatgaactctttacaattgttgtatggcttttcagactcaacaatatgtactttgagagctttagaatagctgttatcttcttgttttcgagagatggtctctttagacatgaaggcagtcaaatcttgttttggaagatgatctatattctaaagatgcacttcgtggactcttatgatacccaaccattcat

SEQ ID NO: 278958 - DNA, 197 bp, Glycine max
tttctgcctgtgcagatcttgctatagctaaatggggggaacaaattcatggccatgtattgcgtttacgtttggtaatgctatgtcactggcaattccattgtactcttattcaaatctgggttgtaacctcaactttctagtgttcatggtttactagaaaagatttatctcttggagcactataatgctgaaaa

SEQ ID NO: 278959 - DNA, 219 bp, Glycine max
ttctttgttcaaattcacacgatattaactggtgaatcggatgtctgattgtgtctcatacgatatctagacgctcgtaattgaaatcagaagttcttagaagaatcacatgacaattaagtttaactcggatgtacgatctgaccctggggtgtatggagacgcacgaatttgataacgggagcgctcagagatatcgaacgaacttacttataactc

SEQ ID NO: 278960 - DNA, 427 bp, Glycine max
  unsure (1)..(427): unsure at all n locations
gttagtcttcaaggacgagcgtgaggggtagtgactgttctctatangacttctgagtagcaagcgagtgcattgcactgataagggagcatcccgtctcaacttcaaccggtcgatatattacacggctcgatcagacattcgagctaagactaattacagtctgatgatactcaaacttccgttctcaatctctagcctccttatattcttcgaacacagctgcctctgagtcagaattacctgtgtgtgaactgcatagagcttcctcttcaatcttcatctgctcgattattacggaggtcaatctgaactcncattgaaaattcttagcggataggcctcccaaaacctcgtttcctatgcttcactgcgatatctggtgaacaccaccggactcgacttaatgtgcttcagatcaactccc

SEQ ID NO: 278961 - DNA, 165 bp, Glycine max
tccgtgcccgatgatcctgtagagtcatttctgcgctgcatgcacgccttctgttttaatctgtacacgtcgtgattataagacacctcctcataaatcaccatctttgagacggagattacacattcctgagatgcacgccaaaatcatacgtgaacttcttat

SEQ ID NO: 278962 - DNA, 380 bp, Glycine max
  unsure (1)..(380): unsure at all n locations
nggtgcaatcctcgacctacacnctgtanaccanaccgnaaaaggaaggtggaggggaacctcggcttaattgtactttaaggtcccggaatattcccgggtttgaaccctgggacctaagggggtgtttgccaaacacttacatccaccaccggttacgcaggaaacttgattcctaaaagcaactctggctcaccattaaggaccaacccaaccgggagctgtgttgttgccaccataaccttgatggatgtggtattgcctctgtatcaataccanggtggtaatcatacaagctaaaatgagacagagctagatggctctgtatcatacacggggtaatcatacagctgaaacgagcagagctaggagctctgatn

SEQ ID NO: 278963 - DNA, 392 bp, Glycine max
  unsure (1)..(392): unsure at all n locations
agcttggtattcagtataggttaaatntgcattatttaccatctgctctgcacaacttaatttgngcttctgctctatgcagcattaaaaaccataggtaaccctatatttangctagtaattcgttcttcaaacatgcaacanagaggtcataaaatcaaaccccttacacaattttcagtcgtccatagaggcaagtcctaaaggcatacaacatgactaaaccctaaccatcatcatgctgagcatataaagaagaaaatggcagacatcaaaggttggtaaagagtttgcgttgagcactaaacttgctccaatgtgccccccaaagtccatcacgttacccaaataagaaaggaccttgttcaacacattcaaccactccaatactt

SEQ ID NO: 278964 - DNA, 236 bp, Glycine max
tgctcaaactggcctcgtctatgctgtattgtgcagttgtggaatacaaagatctttgaacatctcctttactacatttttgcaacacctacccctttctctctctctctttcactcatcctaagtttgatttttccttctctcaattcccaacctcgcatctcccattattttattctcaaaccacgacaacaaaagcacaaacttggtttcttaatttcttcttctcgatccta

SEQ ID NO: 278965 - DNA, 273 bp, Glycine max
  unsure (1)..(273): unsure at all n locations
aaattaactcgaaagagaggttttcttagatacaggggaaaaagtctctctataatcgattccttctctttgagtgaatcctttagcaacaagtcttgtcttatgtctctcaatgttgccttctaagtctttctttgttntgaagacccatctacatctgatggcttttacaccaacaaccaactcaacgagatcccaaacttggttagatgccatagaatccatctcatccctcatagcattataccacannattgattccttagaactcat

SEQ ID NO: 278966 - DNA, 476 bp, Glycine max
  unsure (1)..(476): unsure at all n locations
ggtgaaggttacgngatgcgatntactaaacncagcctggaagangaancgggaacggcgaaacagccgccagatatattttaccttanttnngnacaccccaagctgggcaagtgataccccatgcatggcaagctgtgtcataggttattaagagtaactcccccaaaattctaaacactaacactcagaacgagattccttttaattttaatagaattaacttaaatcccgctaattggtttgcagcacatgtgaatatggtcgaatcaacaatgaaatccactattgaagtagtttgaaattgttaaattaagcgtgggacctctaaattattctcagtgatatttgacaaaaagaagttgattgtgactgactcattaccattagtgaagtcataaaccgatagcattgattcattattccaatatatgaatattctgacncacgaagcgattctagaccagcgtgcgccg

SEQ ID NO: 278967 - DNA, 380 bp, Glycine max
  unsure (1)..(380): unsure at all n locations
gcttcaatgcnaggaaacgtgcttgattctggttttagagttagaaaaacatgaaaattaggattttcttgtgagagtttttgctcgaatttgggttgccccatgtttgatactttacatagaggtagcatggaaaacaccttgctatagtgtgtatacataggtgaatataagaagtatgaaatccctatcaaagtgtgaatgattgtcttcctagatgaatgtatgatagtgtggaatgccttttttgaatgcaaatatgtgcaggatgtaattagttctccaatatgcatataaataaataggagtgaaacagtaaaaatttgtatggtgtacttcaaatgtatgtaagtagtttgtgataacaaatgtttatgata

SEQ ID NO: 278968 - DNA, 106 bp, Glycine max
  unsure (1)..(106): unsure at all n locations
agcaaatncaaacgacaataactcaggactctgatgtcttattgagtcctgnaaanatcgagagctggaatggaataccaactctaacaaattaacgacataacct

SEQ ID NO: 278969 - DNA, 365 bp, Glycine max
  unsure (1)..(365): unsure at all n locations
agcgngctttatatccttgaggtaanatgcgtcaagctagtgacgttaaagaagcgctaactgggaggctacccaactctttntctttggtgtcttaatcattgcatatagtcaggtttcaacttgtttgggattgctagagtaatacatcaacatgttctgtatgagaaaaaaagggtagttcacgctcctgtgaagctgtggatgagagataactctgaaaaattttagacatccactcgcttagcgctctctgtacgctaatcgaatcatccttcatgtgtcgagcgagtgctgactcgcgctaagcgcaccaacccttacccattggctgaagggtccatctaaacgagacagttgtgcca

SEQ ID NO: 278970 - DNA, 365 bp, Glycine max
  unsure (1)..(365): unsure at all n locations
gactatngctattnctatgcatnacanaacctnaatggnncccnncccacccctccgaaaagaatattccttagtttccaaaaannggggaaatggcctggtttccttccaaatggaaaatacccatttaaccgtgtagcctattctcttggccaataggcctaaacagggggacaccattataccaccttaataccgtaccaccttattgagcacttttggaccccaataaaatatgatgctggggccagggcccacatcctgacaatgctctaccaaccgaatacattgcggagaccgtaatgcccgtatatccacaaagtcaatattaaatatgatggataagatggaaatattccctctcg

SEQ ID NO: 278971 - DNA, 406 bp, Glycine max
  unsure (1)..(406): unsure at all n locations
agcgggattcttnnttttaactttngacctttgaggatcagatcagagtcctagaatgtaacttgaataaaaaagttcattgtaaacagttgaaccatttgttgctagagaacttcattatctttgattcactgggttcactcgagcagagttggctctaacattttacaaagtcttcaagccattgttgacaatgaaattaatatccagtagatgatcaaatctttcaacattttatcagtacaaatattggcttcacgtgaatatctttatatatataaagtatatgtgcgggcatatttgtaagatcaattttccttccttggtttagtctctatattagtaaaattgcatctcatattttcttcaatacaaaatgaaaattataaaaatctataaatatatg

SEQ ID NO: 278972 - DNA, 320 bp, Glycine max
  unsure (1)..(320): unsure at all n locations
gctgactagtatgcaacntaaaatacccccccgggcccccaggggggcggagagagcttttttttctcccccccaanggcgcggatattttcttaaaggggaagtgattaaccccaatcggttgcagggaccatatgcccttcccccttctctcctaaaccgaatcccaggaccaccttatggacgccatccgtgtcataccttcaagggccaaactgctgggaaggaaacccacctcttggaatcctgattcaacaccacaacgacggacattgtgggtgaacccccctaggacccataggctttttagaccttgcttc

SEQ ID NO: 278973 - DNA, 245 bp, Glycine max
agcttgtgtatccggtgatgatgaattctttgacgttacacttgacatgcttccaccttccgtgacctagagaaagcacagtgaatggcccctttcagtcttcgggctctaaaggtaggctatcgggttgatgtccggctctagtcatccttcccctgctagctcctaaggtccacctttatcccccttgattgctcaagttgttgttgcttccacgaatgtcactcaatcttcttgcctccttc

SEQ ID NO: 278974 - DNA, 371 bp, Glycine max
  unsure (1)..(371): unsure at all n locations
gggncnnnggatgcttctgnatgtgcttttganaacganacatgacacnaacnnggcgggctcggagagaagcattatcctctnattggnncaggccgagagacttgtgggggagggaaccactcaggaggcgtgatattgaagaggatggatgataatttatctttacacagacattatataatcaaataacataaacatccatacaagattagcatagtgaaacaccactgctctaaggtagacccttatgctaacaaactaacatgagatagatagagccgaagaaccaaacaaaatacaatttatacctggcataaacttactcttcttacaaaatatcatcctaacactcttgatttatgatgagc

SEQ ID NO: 278975 - DNA, 275 bp, Glycine max
attgcttctgtgaacaaaaatgcacaccattaaattgcaaaataatgactaacttcacacaattctcaccccatccaatcaaataaataaaaggaagacccagacagacatggaaagatggagcattgacaatattcagataattgtcaaaacagaacattaatataacttttggatgagatatatcccataagtccatcagacatacttcaatttttttggggtgtggtggtgttgggagggggagacacctaatctgatgggtttttctctaa

SEQ ID NO: 278976 - DNA, 462 bp, Glycine max
  unsure (1)..(462): unsure at all n locations
gatgatatgnacccgtcgacggacnntcttgananatagactagncaacctaatggcgaacagcgcacgagagagcgcggaagattgccngatanctcanacaaccncnncaagcggaacagagacatttatagctgctgggtgaatccctcacccactcaagtgtatcacaccattatgggctttcccttactgaaccactctggcctttaaccactctaatccccctggagttcttaggcaattcaagagattatggccgcaacatagaacattcaccatatgggaaggtatgctagaacaggaaaatgtaaccatgaaaaagctccaaagttttctggccaaatgatgaaacaaaatcctaattagaattcaagacaatcttatgcaccaaaattacctaagaattttttttaagtcttagcatgaccctcacccactttttttttaatttgttacaan

SEQ ID NO: 278977 - DNA, 362 bp, Glycine max
agcttctatattcaatttcgagcttttcgatatattacgggactcaatcggacatccgagtaaaaagttattgtagtttgaatatgctcagggcttcggtattccatttcgagcgtctcgatatattacgggactcaatcggacatcagagtaaaaagttattgttggttgaattttctcagagcttcagtattccatttcgagcatctcgatatattacgggactcaatcagacatccgagtaaaaagttattgtagtttcaattggctcagggcttcagtattccatttcgagcgtatcgatgtattacgggactcaatcagacatgcgagttaaaagttatcgtcgtctgaatttgctc

SEQ ID NO: 278978 - DNA, 456 bp, Glycine max
  unsure (1)..(456): unsure at all n locations
gtctancctcgngtacgantcgagaacatnaatantnaacnnggccagagaaccaggaagagaggaggattgtgccatantgattcctnanancccnagacccgcggcgagggcaaacctaggtatnncacaaatccaacccaaagaccccgtgaatcgcaaggtggcaggagctgccaatgataatgaagatcctaaatatggaaggaaacgcctccccagattcgccgccattcttcattgcttcgatggagataagacccgaaaatatttaaacccgtggcatagatatttgtccataggtcaaattgaccaattcaaacttgtctctcgaagctcgttagccccggtgaaattggcaacgttgatattgaatggggggcctccggcaacgtgaaacagatgatttcttccttggagatgacggtcccattggataccacccccttaatgctt

SEQ ID NO: 278979 - DNA, 350 bp, Glycine max
  unsure (1)..(350): unsure at all n locations
ttctnttcttagtcgtctgtaaggatgattgngtgttagaaagcggcgatgcctactgtagactgtttttctcccatgtttcagttgtatgtaacttgtattttcttcacagatggggcatgcatgatgacccttaacactgtaaccgctgagatttccatatgctggaaagtcattaatggtacaaaaaagcattgcacgcatttcaaacgtctctttgcgaaacgcatcatacactacaaccccctcgtcccacaactttctcagatcttcgaccaacggacttagataaacgtcaatgtcatttcctggctgtcttgggcccgatatcatcatacacaacattctgt

SEQ ID NO: 278980 - DNA, 240 bp, Glycine max
  unsure (1)..(240): unsure at all n locations
aacatnactcccactattttttttatgcataatcatcaaccaaatctacatcaaaatcataagaagtaatnggatgaaatctgtatattgtaacgagaagattggtttaagcctttagtttggcaccacaaactttggatcattggaacaatgtttcttctgctcctttaaattttttttatcatatacttattcgaacatatcttatttcatatatgtgctctcatcaattattacatt

SEQ ID NO: 278981 - DNA, 350 bp, Glycine max
  unsure (1)..(350): unsure at all n locations
atatgtcannggtgtgtggctctggttctagggataaaagaggaatgtcccacattatcttccatgacacaaatgcaacaatgatgatttggaaattttatgcaaaactagtcatgcatgcacctatgtggacactcaagtgtcgaaattttttctggttatgtgatgctaaggctcaggattcatttcccctattttaagtcaacccaaagtctccaaatatgttcttttatcaatatgtgcattcattcgaagccattttatttggtttcaggaaaatttaacaacattcacccttcaagtgtatactcattttttttttcaaaacttggtttgattagttgaaaaaa

SEQ ID NO: 278982 - DNA, 439 bp, Glycine max
  unsure (1)..(439): unsure at all n locations
gatactcggatcganacgaccataaatccagctgagcctcgacggaatggagaggggttttacttttngtatcncggaccnnncncnctcnagaggcnctagacatgcaaagctttaaatcccaacccaaactcctttaacaaaatctgatttcaggcttaaataagtggccttgttcgtgctcgggcgcttagcgcatagctggactgcttaccgcacataattgaattttggcttaacacgtgttattctcgcttagcggaaggactgaagcggagcgcttagtgacatgaagcggtgcgcttaccgaaactgaaaagttgatctcttgccaaattttcatgcgcttaccaatgagtgttggcttaacggacactcctaaccaacggattgcttagcgagaagtgaaaatacacttaaaaaactgcttattacctga

SEQ ID NO: 278983 - DNA, 237 bp, Glycine max
  unsure (1)..(237): unsure at all n locations
ttcttgatgtatgctaagcctcgcatctcagactaagcgcatattgcagaaagatttttggtgttgaaaaaagcgctaatcgtcgctgccgcgctaagcctaaattcttactgaattttacaacctcaagttgggcttagcgcgaggctaggctaagcgctagtgttttaaactcaaacgtcaaattggcacgctaagagcagtngtgcgctaagcatgccatccgaatttcaattt

SEQ ID NO: 278984 - DNA, 442 bp, Glycine max
  unsure (1)..(442): unsure at all n locations
gggaaaaannnngggccgtgtacggtgactgaanacgtaaacananaccnngcagacngngaacannggggggcacaagagagagaagacgacctaacatttctngngcanccnagccacagggggnaggggaaggncaaaaccacccaaccacggngcccccaaaagaaaacagggaccgggccgccaaaaccccaacaaaggcagacnncaccgagggcaaanggcaaggcnnnagannncgcananaccaacaccancaagcggacaggnaaccgccagcccagaagaaaaacgacgagggaagaaagccacgggcaccagacacanacaccgcaaccaagaacaaccgaccaaancaaagccacccaaagcaaacggggaacgaccaaggcnccacaacagagggaggggagcgagccggagcnccacaacccccgcc

SEQ ID NO: 278985 - DNA, 183 bp, Glycine max
  unsure (1)..(183): unsure at all n locations
ttcacaacaatccttgtgataaaccttgaacttattacaagctataactgcacttatacgagtaactgattaatgtcatcctcttcangctaaagttcatgtcatgtggataatgaccagaccctccttctagatacatcacgggtacttgaaatttttaccttacgaaactaccttactgaa

SEQ ID NO: 278986 - DNA, 155 bp, Glycine max
atgagtctacgtcaatcctttgtattatctcttctgcagcgctcaaactcagagaagtaacaagttgacagaagcaacaaatgacatgctcttataaatactgttagaaaatcgtgatcccctgaatagcctccttttctacatggctatgattg

SEQ ID NO: 278987 - DNA, 388 bp, Glycine max
  unsure (1)..(388): unsure at all n locations
agcttaagtttccgtctaaaattgttatatttgcatggaggctaatcagagatagactaccaactagagcgaacttgcggaggcgacagatagaggttggagattcaagatgcctattctacagagctgangaggagagcgcangtcatctattctttcagtgcagcaagataattccagtaaggtgggagtccttgtcttgggtgaacttgtcgggtgtctttccaaatcatccaaggcaacactttctccaacacatatatggaatgacagagggaatgaggtctagtaaatggaaatgatggtggttggcactgacatagaccatttggaagcacagaaatgatattattttctcaaatggtacattcaatgccaacagaatcct

SEQ ID NO: 278988 - DNA, 288 bp, Glycine max
  unsure (1)..(288): unsure at all n locations
tcgtccatgactttatcggagctgaanatctggttattgaaatctaccgaanngctatgcttccaaatagacatggatagagctatccaaagcacttcccatctcttgtctagatatcttttgctattccaatgagagaattgtatacaatgattcttagggtcaatggggaaagggcccactctactaacccaactcagaacctcccaccaaaggctcctatttgatgtgcaggacaacatgatacgaccaactgtttactcctctacatcacataaagggcatcta

SEQ ID NO: 278989 - DNA, 391 bp, Glycine max
  unsure (1)..(391): unsure at all n locations
agctttgttctcagaaccctcttgttggactatacttagaccaaacaacattattgtaatagcatacttaaaaccaaaacttaatccgcagattcctcttataagactaagttctaattctgcttcattcaagttctaaggcaacaatacattntccaatgttaaaatcacctatctaggcacacaaatggttgatcagaccaagagcatacaaaatttaagcattgaaagaagcattgaacacaagaaacacaatcaattagatatgaaaataattacatcagttgttcggtagaaatacccaacaagggtgtttagccagccattacagaagagaccctaacaataataagcttacaaaacctaggtatctttgcaaaagctgcttctc

SEQ ID NO: 278990 - DNA, 468 bp, Glycine max
  unsure (1)..(468): unsure at all n locations
gggaggtactcgatgagnctattgannaacnnaacctgctgggaattaggacaggggctncctgctggtgtgtgattttccatttnccatttttccggaccaaatccattatgatggtgtgaaggttagaaccatgaattccttattaaggaattcatgggccaatttttgaattactttgtaatggaccaagtcttattagaaccaaagaccttttaacccttatttccaaggacaagaaaacctccattacacttaagggaacccccttgaaatcatctctctaattcattacttgcacctgctttatatattatttggcaatcttaatataaccaacttcacaattgatcctatattgttattagatggtaacaaatgataatggcataaaaactcccaatggttgaacttactctggtacttctatgcagtgattcatggatggagcttggacagttacactag

SEQ ID NO: 278991 - DNA, 391 bp, Glycine max
  unsure (1)..(391): unsure at all n locations
gcgatccatttctgannctngcnatngcaannccnngcccnnagcagagggaagaggggggtataatttttanncccnaaccaggccgagggggatcaaaccaccaaccacacccaaccagaccaagacgagacacagggacacaaaaacaacaccaagaaaaacagcaaccgatagcagaaacgaaagaacaacgacagcccacgccccgaggggcctcaaaccacagcaaacagccacgcagaaccgcacaacaaaaccaaagacgaacacgacccacacaccaagccaacaccgaaaccacaccccacccccccagccacccgaagcaatacgagcgacgcacgccagccacgctaacaaagactccaggaaacacacacaaagaacg

SEQ ID NO: 278992 - DNA, 409 bp, Glycine max
agcttttatctatcctttttagctactaattaacttttcagtttgcaattagattttcaactaattttatcgaatataacctatatctcattttaaaaaatataaaacaataaaagagcatttgtttcataaaatctttttacatttattaccaaaaatataacaagggaatatcatttccttgtatttaaaaaatcgtttggttacatttttatattattgagaataatttttgaaatttaaaataatttagataaaaaataaataaaaagaagtttcagacgtattagacaataaattctcacattctcatgaaaatatcactttctcaccctcctcatgggaatataaatattagagaatataataaaaaaattataacattaattctcaagaatcaataatacca

SEQ ID NO: 278993 - DNA, 355 bp, Glycine max
  unsure (1)..(355): unsure at all n locations
agtgcatgatcttganncacaccttcctttcgggggccatatggcgaaaattaattttctttcggccaaaaagggcccaggaaggtaatacacccttccatcctcttgacaaaattggatattgtggataatatcttccggctttggtactcgttgaggaaccatttccggccaagagttatcttggaacctagaatttgaggacttcctaaaacataatgaaccactgttccataccagagaggagtgatggcaaaattttaccccgctatagatcaactcttaagcatcttaacctgacaccaagaatccctatatagagaatttagactagattgaacacggccaaaatgct

SEQ ID NO: 278994 - DNA, 374 bp, Glycine max
  unsure (1)..(374): unsure at all n locations
agcttgtatttagttatgtgccacctggataactaacttacatactccagctactctgaactgagtacaatactcactgcctccgcatacgacccttgttcacctttgtttctggcatcattctcaggtacgtatctctagacccctctggatgatgtttaccctcatttcttccncttgcagctgtatgtgaatattcacgtattggtctcccaaatatagtagtgtttacaaacacttttaaccccccaaaaccatgctgtctagcttcttttccacctgatgaacatcttgcacccctttgaatttaacaaacccgtatctctttcaaattttgtttcgtatcagagatatgaaaatctccctcacatcac

SEQ ID NO: 278995 - DNA, 443 bp, Glycine max
  unsure (1)..(443): unsure at all n locations
ggaagattcangcttcgtacancttanaaattaaccccnaccatggatggcttggccatcaaagcccaagggagccttcttanctttcttcactccacaaaccccaggacttccgggaatttggaaaactttcattctccaatcaaaaattggcctccgggtaatgcttcttttgaaaataagggaaatcctcttaggaaggccttgcaatttgataggagaaccatttcatggacctactaatggaattaccctaacattcttggaactaaatttgggtgcatcctcaaacactttttcagtacctaaggatcaggtccaataaactaaattggattggaaaggaatcaaaaagaaatagaccacctttatggttaagagaatgtaggaagaagtgctcctcaaaggtaactaaaagaaagctttacataaaacaccttaan

SEQ ID NO: 278996 - DNA, 409 bp, Glycine max
  unsure (1)..(409): unsure at all n locations
aaaaannttgtatcctgatcgantcaaactaacataacnngaccaggactcgagcgaggagaggttcgccttnacttggnnaccaggggagagagaaacgaaagtggcaattggagccactaggccccaacaagcgatgacacagacagcagggaaactgagatacgccaaagaggccgccaaatcaaaaacggctacaggcccccaattttacccaaaaatggacacgctacctccggcaaggggaggcccgcgcacacacaacctttcaacaacaaatgacctcaacccggaaaatccattacccccctaacaccgaatccaatgggccgacaaccctaatcaacacatttcaaacggaccaggccccactgaacccaaggaacaaccctacacctaacgtaaccac

SEQ ID NO: 278997 - DNA, 394 bp, Glycine max
  unsure (1)..(394): unsure at all n locations
tttctntattatgctccatgantctactntacaaaacagataaacatacatgcgaatgttaaactgatgacagtgacactgaataaatttagaatgttaaactgctacttcacttcatgatgataatgtttatctttcttgtatttttaaacaatttatctactatgtaaatatattatcaatgtgtaatctattttaattggcacattagttttcattttattcctactttataaatcagataaacatacatgcaaaattttttacaaacaacccgtgtgtacgcacgggttgccaactagtgtacatatataaaatgagaagtgtggggttagttctgaaatataaacagaaatggatggggtattttgggaaaaattattttagaataatg

SEQ ID NO: 278998 - DNA, 281 bp, Glycine max
  unsure (1)..(281): unsure at all n locations
atgcgccatattccctacgaacgtgcacttgcacaagacattctattaactaagaaaaatgcacccatatacaatcaaggtagcttcattacctagattatttacatgtacttcaaggtgtatttgttaattacatcacnacacgccctcctttggctaaaatttacattacatggcatactcaaaagcattttcggggtacccaaaattgcacatgcgctcatcttggtatttctaatacctatacatatacaaacttcatgatgaatcttgactaccta

SEQ ID NO: 278999 - DNA, 406 bp, Glycine max
  unsure (1)..(406): unsure at all n locations
agctttgattagtgttgcttttcaccttctcgctaagccaatctgcaggtttagcgagcatccgctaagcgcacgcactcataagctaagcttgaggaagactctggacgaagatgagttatacaggttcactaagcacaccgctgcatctcactaagtgcaccacttcatcacatctgctaagcgagaaaggcacgcgctaagccaaaattcactaatgtgcgctaagcggtccataagtgcgctaagcgcgcgagcacgaataaggccacctatttatgcctgacattagatattagaggggagtttggactgggattcagagctntgtatgtctagggtttctagagaaagagaggtgcaagttccatagagttgtgagagattgtgctgactgaagatctgc

SEQ ID NO: 279000 - DNA, 363 bp, Glycine max
  unsure (1)..(363): unsure at all n locations
gatgtgacctgtactatcgannctgaacattgacacnaacctggctccccttcactaacctcaggaattacaactttatgtcccagctaaaccaacataacatcgtcctaatgtcatacctttaatggtggtcatacgccctctaagcttaccagttaatatccacagcatggctgaatacaaatttatctcagcaaaggacatgagggctttgcttaaagcaaggtccatcttttgtgaaaaaatagaattttgagtattgttcccagaccttgaactaaagaataccaattcacccatctgcacaggtaatcctttgaatgctggttattttaaaaccatattgtggaaaacatttgcgaa

SEQ ID NO: 279001 - DNA, 356 bp, Glycine max
  unsure (1)..(356): unsure at all n locations
ttcttacatatgaagatgtgtttgttggagaatttaatgcatgcttccattaaatgcacaccctttccataccgagaaaccactttctttagctttcttgaagaatacttcaattaagcagataaccatgtgcttttggtaaaatcagttttgtcacaatagccacaacaatatgcatcttttgaaattgtttgaacttgaaagtgtcaaatgttatcttacttcttaagacttcgacaaatcccggaagaattnttttaagacagtttctataaaacgaatatcagacacatggtattaaatgaagtcttaaatacttcactataacataacatatgtctattttcgtctaatac

SEQ ID NO: 279002 - DNA, 89 bp, Glycine max
  unsure (1)..(89): unsure at all n locations
tctagctcacccttcacgatatgtcattgaacatttttcttttttgtgcatgataaanagatatagggttccaagtgggaaatacaagt

SEQ ID NO: 279003 - DNA, 303 bp, Glycine max
  unsure (1)..(303): unsure at all n locations
ttctntttgttaagacacatatcttcaaaccattttgaaaaggcatgaagggcctatatatatgtgtgtccgacttcaaaaagtaagagagagagagagatattctaagagaacttaattgccaaattctctcttaacaactcttaggcaaacacttgcaaatctattgagaattcatccaggaacttcaaattgtatatcatctctaaaagagagaaattcctctaagaacttcaatctgtatcatccactcctaacgagagaaatattcctgttcatctcaaaaagtcaattgtaatcaag

SEQ ID NO: 279004 - DNA, 263 bp, Glycine max
  unsure (1)..(263): unsure at all n locations
cctatactcgggctcctttacagccaattacacaaacgaagccttccttatacctgtgntgtgtagacctacaatcaccgccgaaatcatttcataacaacgattgagcccaccgagacatccttcgattgtaaacactataacaatttgatattcagttcctacacatttatttataaatcctcaaatatgacatatacctgaaagattgaatgctcgacatcacatgggtcattactacatcttttatttatatcatatcc

SEQ ID NO: 279005 - DNA, 260 bp, Glycine max
  unsure (1)..(260): unsure at all n locations
ttcttgtgcttttcaaatcactcctacatctcatctctagcatgcattttctttctttacccactcctcacgtttggttttttagggaaaaacaccataactaaacgcgccgcaagggatccctatcgcaccagatccaaatctagaacgatgggtgatcaagaggagacgcangaacagatgaaagccgacatgtcggctctgaaagaacaaatggcctccatgatggaggccatgttangtatgaaacagctcatgga

SEQ ID NO: 279006 - DNA, 201 bp, Glycine max
  unsure (1)..(201): unsure at all n locations
tcagaccanaataactcagaatctaggcatctaaatcctctctttttagtggatnnnncaaggtttgagaagtgaaaatgagaatggggtaaatttggagcanactttcacctcagacaagtctatatcatcaatctaaacttgctcaaactggttntacgcctaaaattccaccgaatcanaatttgactcctcaacacc

SEQ ID NO: 279007 - DNA, 160 bp, Glycine max
  unsure (1)..(160): unsure at all n locations
agcttctatctcaatggacttaccttgaattaattccttcgatagcccttttgagccttgattccctttccttgttttgaagctcactacaagcctcaagtgaaaaaccatgatatcaccatatacttaaggaattntggagctgtggaattgttttggg

SEQ ID NO: 279008 - DNA, 267 bp, Glycine max
  unsure (1)..(267): unsure at all n locations
tctcaacaagagaccagagcctccattcagagcttnctttatctatgggacaatnggctacacagttaaatcaacaactgtcccagaattntgacagattaccttctcaatctgtccagaatcccaaaaatgtgagtgccattacattgaggtcgagaaagtagtgtcaaggacctcaaccagcaacatcttcctcatccgcaaatgaacctgcccaacttcactctactccagaanaagatgatgacaaaaatttaaagagtaagt

SEQ ID NO: 279009 - DNA, 386 bp, Glycine max
  unsure (1)..(386): unsure at all n locations
agcttctttgttagacctcgatcggtcatctttccaggccgaggtcgaccgtcatttatttcgatccatttcggtgaataatatttttttgccgagatgggctaattgtttcctggccgaataaatgggaaaatgccagtttcggccgaaacgaanagtcggttgggctcgcacaaaaaaacctagccgacctacattttaaattttttatgcaacaccaaaacaagagaacttcctgtgccgtaaaaaaaaaacattacatgacagcgagcgttttgaaaaacaaaattgcgcaacgtcggcttgaaaatatcaatcggtgctttttcacgaccgatgccggctattgagtgttcaattcaatccgtgaacaaaatttgcatgat

SEQ ID NO: 279010 - DNA, 402 bp, Glycine max
  unsure (1)..(402): unsure at all n locations
caccggatgacgccgatcgaacatttcctaaccgatgtcatttaaattncgnncagggatngaatngaaagctcgttatgcgacatctgtcgtgaagtaccgaccgatatttttcagccgacattgcacaatactttttagaaaagctcgctggtcgataatgtctttttacggcaaataagttttcttgttttggtgtgcataaaaagttacaatgtactcggctaagttttcgtgcgagtccaaccacttttggttccgccagaaaacatatgccaacctctgcaaaaaatatttgctacccgctncatgcattttgcatcaacgattgaataaaaactcatacccgacaccgtcgtaaaaatcccgctgaaatttcacccggatgcgcatttttttaaa

SEQ ID NO: 279011 - DNA, 403 bp, Glycine max
  unsure (1)..(403): unsure at all n locations
ggggcaggtggtgagcatgtacatgngctctaactctacacgcgatccttaagtcaccgcaggctgcagctgagtataatgtttagctcggatgatagtatgaactccagattgccattgtcagggatgtgatgggtaccttcacttgaggtgggactatatctcattggattgtgctaaggtgtgctgtttggggtgattttgtacgatggtaaccttgaagactatgagaagacagtcatttatgaagtaaaactggctatgatataggagtgcttgtgatctttgcccgcttataacattatttgatctttagtaagtctcgatcttatgtttaccttgagtgaagtaagaacacctgtctattgatttctttgttaatgatatttacggttatatggac

SEQ ID NO: 279012 - DNA, 458 bp, Glycine max
  unsure (1)..(458): unsure at all n locations
nnaatgctcgacgagtcagnggctactngcannancacnnaaccnngaggcatggactcacggccaaaggatgaggacgaggaaggtgtcnntcttaaatgatnnaaanaaanntagaaaaatggggatggttcactttttccagagattaaggggatctattattacaagggcaatgagttccagttntggagattccttctcaatccagggacctagtttaggtgatgagagtctcatgtatacgcccgttttaatctttgaccaagttaagggggggacccttctccagcatggaacaaatgtcgcctattttattggtgctgattaaatgtgtttgcctccacttatccaggctctggtttttggttggcaaactctaatgagcgctttcatccctaaagaaaagggttttaaacctgccaccccacccttttctttgtggtgcatcccttggg

SEQ ID NO: 279013 - DNA, 384 bp, Glycine max
agcttggctctaaatgatccctactcgagggaaaccacatattaaccctagctgaggtcaaccactaaccctagttgaggtcaagcaaaaatagtctagtcgagtggctaataataaccttgattgaggtctagctaaaatagccttggtcgaggtcatttgagattagtcttactcgagtcgaccgaaaataaccttggtcgactttgtccaaaaatagtcctgaccgaagtcaaccgaaaatagttatggtcaaggacgacccacaataattctggtcaagctcggtcgaaaaataactctagttgaggttgatcgaaagatgtcggccgataattgaccctaattgagatcatactgaaattaaccctacctgaggtcagt

SEQ ID NO: 279014 - DNA, 527 bp, Glycine max
  unsure (1)..(527): unsure at all n locations
ggacggatgannccatgncgncgttancngtancnnnctgtngannananntanaactnnggcaacggcgaggtgcganngnaagccgaacgctgtgagcgtgaggcatgtgtatccactcnctggnntaagaaangagaaaaatcccccaagaagagagatgttnccgggtgagatttctcnctcttatatttacttaaaagaggganccttntatataatacaataatagtttaccccctttttggattcccacctgggttcggcgccaacgaaccaatcggaattcttttaacccgaagttaacggatataccatttaaaccagatcgggggaaaattaatttattttttaggttaacaaaaatgacttaataaaatggtttagcccgtcagaagggggttctaacaaggtaatgaattgagaataaaattctccgaaacccattgtggccaccccgggtacttataatgattcaaaagctgggtccaggacttacccgtgaaaccgagaacgatagaccatga

SEQ ID NO: 279015 - DNA, 388 bp, Glycine max
agctgacttatctcccatggctaccaacgatctgattcggatcattctcttttcttgcgcataaccggctccacaattaccatcctcttagtatatgtagacgacataattcttacagggaacagcttgacggagatacaggctataaccactctgttggaccaagagtttcgaattaaagaccttgggaacttgaagttctttctggggctggagattgctcgaacctctaaaggaattcatctatgccagcgtaagtatgtattagatatcttatctgaatcaggcatgttaggttgcaagccgcattcaacaccaatggattattcaataaaactacaaaagagctcgggtaaccctcttccgaacgagtcttcttcctcttatc

SEQ ID NO: 279016 - DNA, 429 bp, Glycine max
  unsure (1)..(429): unsure at all n locations
gatgtattcatgcantccaacaccntnaacacnaacctngggctctgaggactggctccantggctcagcatgactgctattgtcctcttctncttaggccggaaaagaacccatcattgggcctacggcctttgaacctaattcctaaaactctccataccccaaacaccttattcaatttaccaattaggaccgaaggacttttccacaacccaaattcttcatatttctacttacccttcttttgttcacataaccacaccttgtgccaaatctagataaattcgaatccttcatatcatgatcaaactcctacgtaaagttgtaagccaccttttttccttataacaccttaaggagttttcaatctccatctctttgatgggtgcattacacaactgacatactctccaccttgagataaatac

SEQ ID NO: 279017 - DNA, 387 bp, Glycine max
  unsure (1)..(387): unsure at all n locations
agcttccattttgatttacatgattctttagaatttccaccgattaatcttgctatagaagctacatttgattttctatggttcanatttcttgttcttgatcttgttcttgaaccatgaattgtgttgagtataagttcctttgagttttgtcttgttatttattgtggctgaaacctaaaccataaaattatttcaaaaacattaaattataagaaaacctcataaatatagagtggcttgttcacctattgtagttatgtcatagaagtcatgtctagtcatgaaacttgtcacataagatatcttatattgtgctgaatcttatttttcttgcttctttgtctaactcatttgttcatgattgtatgaaattctttcacctat

SEQ ID NO: 279018 - DNA, 476 bp, Glycine max
  unsure (1)..(476): unsure at all n locations
nnttcgccagtcangcatcagcgactccgtgaananntnaaccnnggaggctgtggagaagaattacatgtggctcatcatcaaatttggagttantgtgtttgtatccatccgtgatgtggataaccatggcttcagaattattacagaattgctcacaccatatacgcgtggttccaagattattccaagatggatggctccacactataccatggcttcaaaattattccagaatggcttcaccaattaaagccttccttcangattacctcaaatttcaagccttgccttanaacaaagtgctttcagaacttgcaaggctttgataatcaataacctggcagtgtaatcgattaccagaagatagggtggaaaaattgctgtcgaaaggggttttgaatttgaattttcacatgaaccgtttacatatgtcggtatcgataccacatcgaacctcctgaattcaaatcaan

SEQ ID NO: 279019 - DNA, 329 bp, Glycine max
tggatgcaaaagtttattatgactatggttatgatgactacaaatgatacacaagtctcaagagaatcctgcggtccatatgccctgttgagggaagggacaataaatctgcacccttggattttcaaaccccaaaaagatttggcaatcactacttcataaacattcttgaagggaaagacttgttaggttctgacaatgttcttattagccatgacttacttggaaagattacagagcaggtgtgggattatgcctctaatgaaaaaatcttgtctgcttcatttgctaaatctatgattaggatgggaaacatcaatgttcttact

SEQ ID NO: 279020 - DNA, 458 bp, Glycine max
  unsure (1)..(458): unsure at all n locations
tgggatganctttttgannacngcactcgtagaaccccagcgcntaggtgtataatcaatagcctcattaggagagagcgcaatattgtccaattgggttttaaaaanaaaggaggaggagaattggtcctggaccaccaaataacccacattaggtcttccagataaccacccgccaggaatntaacagaatttaccttagaatacggggcattagaactaaaaaaaatntttggggaaatgctagaaaaacactttgagaccttctttaaggataatactcattctgatcctgaaatgtgaagcaggacaaattaatctgaaaaagaaaaatcaatttagccctatggacaaaagggtgcagatggtcttgccttaattgggaatcatttgaatggcaaaatcaatttgcctgcctatcttgagggacagtttaaccttcttaccccctaattgtg

SEQ ID NO: 279021 - DNA, 401 bp, Glycine max
  unsure (1)..(401): unsure at all n locations
gttccaattacaggacgtgaccgtggcagagagaactgtgaaggcatgggaatacaataagcgatgcgactgggatatgggaacaccacccatacaatacaacacagatatccgttcacattacacaggcaccacttagcagactctgctgcattgatgcgaggggaggcttgattgagcttcgtttttcctttccttaccgccatattacgttgagaatggcattgccggtattctccgatgccaactacctaaggatgtcgaccatgctcgccgaatctcctcgcactcgtcgctaacaagaactgcgctcctctcatgctctgattagcagtacttcatcatcttcctctctctcactctgtatatattagtttncttcttcaattaaacgattgact

SEQ ID NO: 279022 - DNA, 489 bp, Glycine max
  unsure (1)..(489): unsure at all n locations
ggagacatatcgagcattgcacnncnnnanaaatnnacccgcaaccngncacgcggacncccnaggaagagagaggagacatttacctactngancnannnnnccncagcccacgggacaggccagaacagacaacancccccacccggaaacacccggaaancccccacccctaccaaagacggagaccggcacatggacatacacaagggcccacgataaaacgcacacactgccaaagataaaacacaggcacctgccagccccgcaggacccaatactagataaccggagaatgcacagaccaacctagcgaaatatgccagataacagactttgccaggcacgacaaacagatgggaagaatggaatagtgatacaagacaaaggcaaacacagacgcatcgcgcccaccccggaccaaagccaacagacgcagcgcccgcggcaccacacaaacgaagggccgacaaacaccaacaagcaccc

SEQ ID NO: 279023 - DNA, 109 bp, Glycine max
atattctcaaatatctccattcattccttatttcacttattcagcgttcgaacagccgtaataggcccaatccatgcataataaatcttcccccactgcactatagacg

SEQ ID NO: 279024 - DNA, 686 bp, Glycine max
  unsure (1)..(686): unsure at all n locations
agcnnannaagggttgcgactgatgccatgacagcnatcgcacactccannggacgaattcgagcctcggtaccccggnggaatcctnnctagagtcgactcgtgcagggcgatgccatatgctntacttatcagnganacncnnctatctntcnnatgagtgctatngacgcagtnttnnttcttggacccacgtcntgnngtcttccccgtngtntngtntngtnntcntcngtnntcttnnntatcantgtnnntctacacctnntctcccttttatcctntcacanacntnntcttnntctggtcattatnncacagtcatttcccttttttcanacatgtcattatcttcacgtgtatcaccagtgctattcaccttctgtcagacatctctgttcgtaccccttttacttgcgtgctagtgccctattatcanaccatatcttttcatcacactgatcttgncgtcttattcccctctattcaactgtcattgtaatcaccttgtacaccccgtctatcaccttgtncanacgttctatgtctcccctgnttcacgcgctatcnncttttcgtctttaccnncgtacaacggttcacgcttatcatgcctcctgtattcacaattcccttcatttctttcccttttggtagtattttacttctttcacttatcatttgcn

SEQ ID NO: 279025 - DNA, 167 bp, Glycine max
  unsure (1)..(167): unsure at all n locations
tcaagctgtgatattatcttagaatgtgggcttaagaccctacttcaactctccanaaccaactngtaaggggaggattgtctaagctntataagttctatttaagtcatatctctaggtggtgtgagactaaacatgcccccttaagactacaattaaagcaaccc

SEQ ID NO: 279026 - DNA, 397 bp, Glycine max
  unsure (1)..(397): unsure at all n locations
tgcttctttgaganaacttccttgagaagctagagtttagctacgcacacccatctaaaaactaagctcacctccttgagaagcttccttgagaagctagagcttagctacacacacccatctaaaaactaagctcacctccttgagaagcttccttgagaagctagaggttagctacccacccctataatagctaagctcaaccccatgacaaacaaacatgataatacagagaaaaaatcctactacaaagactactcaaaatgccctgaattacaaggctaaaaccctatactactagaatggccaaaatcaaggcccaaaagaagaaacaacctattctactattacaaagatgagtgacccaaccttggccatgggctaaaaatctacccta

SEQ ID NO: 279027 - DNA, 158 bp, Glycine max
  unsure (1)..(158): unsure at all n locations
ngagatgaggaagtgtngaagggtgaaacttcctgcttnnacttttgacctcttagtggnaccnggagatatgncgcgggggtcatgagaccttgnggacctcaggtggggtgctattgcccaaaaccaagcttgaccaatcccgacccaacccgggc

SEQ ID NO: 279028 - DNA, 141 bp, Glycine max
tgattgcttagatatgtgctgtttgcctctccctggctgtgtctgcctatatgaatataatccaagtctataaagctaataactctctatctatcctccttaatcatgttaatactcttcaggagctaaagagagagagag

SEQ ID NO: 279029 - DNA, 316 bp, Glycine max
atacaaactcatggttggggggtaactttaatagatagccaatgaacccttattgaatgccctcacctaaaaagtgggttaattggtagaaatacaatgcataatttaagtggcgtttaaaaaaatataagtggggcagagcattggataaggaggccagacatttttttcagggttcataattctttttttcaaaattgaaaggaatacaatttggggtgacatgacttttagacacacttgctccgccttataacaaccaaaattgtgattaataacatcttatttgatcgttataatactcattatggattgg

SEQ ID NO: 279030 - DNA, 351 bp, Glycine max
  unsure (1)..(351): unsure at all n locations
agcttctatataaggttcgttcctaatatctctacaatttcatcacctctcaatgagctagtgaagaagaatgtgacatttacctgcggtgaaaaacaagagcaagcctttgctctgctcanagaaaagcttactaaggcacctgttctaactcttcctgacttttctaaaacttttgagctaaaatgtgatgcttctggagtgtgagttggagctgttttgttgcaaggtgggcaccctattgcttattctagtgataaacttcatggtgcgacccttaactaccccacctatgataaagaagcttatgccttaataagagcactccgaacttgggaacattaccttgtt

SEQ ID NO: 279031 - DNA, 283 bp, Glycine max
  unsure (1)..(283): unsure at all n locations
tnttggttngtattggatgatgctagtttaagaatattttggcttgtgtgtgaatnnatatnnngaagggttcaatgattgacttatactatgtattgctttattactttaattgtatcatgtatgctagtgaataacanattgacaataggaacacaaactattaagttgtagcgctagtttgatgtccctgccttctttcattaaccaatgtctagttttgctaaaagtttctcctacttcagtgtttgaagcccttaaaattattctttcattagaatcc

SEQ ID NO: 279032 - DNA, 348 bp, Glycine max
agcttcacttcacagtatgacagtcacacagaaacagtttatttgttttttttaagaaaataatatcttatacccattaattattgatctaggaggtgcacaaattacagcggcttcgttcttcttatatgattgtttagctgtctgaactttctcttttatcatttcggtgacaaaagtgtagaactactaacactggtgttgagataatgattcttagcacctgctagtgccactatttaatagtagacaaactgttattcactgttcttatatagacaagaagaaaatatatttgtgtcacataaaaatgaaataattggttacaatatgcataatatcttaaca

SEQ ID NO: 279033 - DNA, 360 bp, Glycine max
  unsure (1)..(360): unsure at all n locations
gcgtctgttcattttctttatnntgcacacatgaaaccaaccggagatctgcagggcatgaannangcnaanaataaaannnnagcnaaannnnggngnaagatagagagaagaccacgccanncaggngaaccngngaaaaaaaacnccggggggcannaccaaccaacacccggcggncccaagcngaacgaccgacaagnggaaccaaacagcagggcaccgcagcaaacacaacgcccacaacaaaaaccagnaaacgcggggcccgaacaaagacgaaagcacacgcnggcagggaccccgncagacagaccgcgccggagacaaagagggaaacaagggcaggaaaaaacacaa

SEQ ID NO: 279034 - DNA, 317 bp, Glycine max
  unsure (1)..(317): unsure at all n locations
agaagattcctagagaagctagagcttagctacacacacctctctaatagctaagctcacctccttgagatgagaaactagagcttagctacacaccccttataatagctaagttcacccccatgccaaaatacatganaatataaaaaaaaggtccctactacaaagactactcagaatgccttgaaatacaaggctaanaccctatactactagagtggtcaaaatacaaggtccaaaagaaggaaaaacctattctaatatttacaaagaagagtggacccaaccttggcccatgggcttagaaatctaccctg

SEQ ID NO: 279035 - DNA, 470 bp, Glycine max
  unsure (1)..(470): unsure at all n locations
aagcactcgatgcagtgctaatgaanacacnaacctaaacataagtcatancccaaaatatggcncaaaagggtttttttttttttttaannaanaacaagggacaggtcatttgggaccatctaaaatcttttaatntttttaaagtaaaccaaaggacaattcttcaaagggaaccaaagaaacttaaaaaattattcctttttggaataattaatttaaaaataatattatttttaaaaccttaaaaaaaatccggtaatttaaacctgaaccaaataccacatggcactggattnttcccaaaggtaacccaaccaagcttatgattntcattgaaaaaccaaatcgtgaaaaccaatgcgtgaacaactatatatnttatttaaatataaaagaccggaatcttgggtttttttttccttttaatataattgggaaaaaagttaaatacctgtttnttagcagcn

SEQ ID NO: 279036 - DNA, 377 bp, Glycine max
agcttagttttacttatttacaaacaaggccgtgcttcaagcatgttctactcaaccgtcaatactaataagacaatcaagacttaaaattggctatatgtgcataatgatggattatagctcacgtgataatacacgatctagcttcatttgctgatgataatatatgatttcatataatttacaacctatgacttaaatgaagcagctgatgattctactttatggttgcccttcatactaccggaatgaacttagaatactaataatttgatctgcaaaactaattaatatgggatagttagaagggacagagtcggccattgatttgctgttgatgcataatggttcacaaattgctgcatgcctgcctgtac

SEQ ID NO: 279037 - DNA, 414 bp, Glycine max
  unsure (1)..(414): unsure at all n locations
gtgtgaactagacctcgannncgtgaaaatanactnnncaccgctcctacancaatggaagaaaggaccagttttgactttttgacagnaangacancctggggaacgttcaaccaatggtaattcccttttgacctatatattacagacctcaatatgtatcccatgagatagcctcaagaatttacctgctgacaatatttaaaaaccaacatgaaccagtctaccttaacaaattatcagtgcgtttcaatattaaatattctaacttatgaacctttgctatctgtacatttaatagctgcgttttaaaacctgccgataataatttgcactgcgatgctggcttaggaaaacacatggtggtataggtcacatccccaaacgctaggatccatttggttactaaccacg

SEQ ID NO: 279038 - DNA, 385 bp, Glycine max
  unsure (1)..(385): unsure at all n locations
agctatgattcttgctttggactctngaaatctgccaaagttggtcgaaacattctcagagtttttattttgaccaatatatttccgacatgtttcgctatatttcatgttttcagatacttttttctttcttttttctctttcttctttaatattgatgtatcgtatcctccaagttaaaagtgttttcaacacattccaacttgtggggtattagacataaaattaatttatttagttattaggaacttatctgagtaatttagtagattactcaagttatagttactagaaattatttgagaaagttattgttggttactcaagatagatattttctatcttatataaatacatcaaccttatagtactttgatgaatgaat

SEQ ID NO: 279039 - DNA, 214 bp, Glycine max
  unsure (1)..(214): unsure at all n locations
gacatgagctgaacnactaaaaccaacagagggaaatccgcattccacccgccgccgaaacgaaaaaacccaccccggaaccacaacaaaaaggaaaaaacacgacaaccccccaaaagaaaacaaagaacgccgcccaacagaaaaagggaggcgaaaacaaaaaagaggcacccaaaacaggaaaaaaacaacagaaagaagaccgcaaacc

SEQ ID NO: 279040 - DNA, 398 bp, Glycine max
  unsure (1)..(398): unsure at all n locations
agcttgacttatccctacccaacccgggcatagtcagtcagtgagaacctgtgatgtacctaagcangcgagctcctgacagtcaacagataaaaggaattaagaccacaaagcaaggaggcttgtgtggtggctggccagctgtgaactttgattaatatatgggatatggcctctggtaatcgattaccaagggtgggtaatcgattacaaggcttaaaaatgaagacaggaggctaagatggtctctggtaatcgattaccaagggagtgtaatcgattaccaggcttgaaaacgatgtcangaagctaggaaggcttctggtaatcgattaccaaggggtgtaatcgattaccacgcttaaaaatgaagacagcatgtngtggaggcctctggt

SEQ ID NO: 279041 - DNA, 424 bp, Glycine max
  unsure (1)..(424): unsure at all n locations
ggggnnnnngggtgtaagcttgctatgctacncnntnaaannaacccggggcaangacccggcggagcaaagaggggggcaattaatttttaaaaggaggccaccacggggatcattaaaaaaggaggtnacctaaggagttaccataacatccggttccacagaaaccggtggttaacctactaaggtaccatcggttttccaanaaccgggggtcccaattaaggtaacttccgtttttcaaaaccgatgtaaggaaactaataacatcgttctttaataccgatgttacaactccctttataccatttgcaccggtaaccttacacaatttctcaactgatttaaggacatgtaaatgaacggtggaccacttgaggagggggcctcctgacaaattggatgcttctcagaggctgtcgtc

SEQ ID NO: 279042 - DNA, 324 bp, Glycine max
agcttggttatgatgcttcaatggaggaaaagaaagagggagagaaagagagaggggggagcaccaaagaaaggcctttcattggaagtgtgttggggggtaggattgcatcagctgcgcacatcacatatgaaaacttgttttttttgcgttgtgactattcatgaccctgttccgcatcacgcatcgacctcacacagattattaagatctacattaatgcggtgtctgtgcatgttaatgaacagtgtgtagttgcacatattgcaaatgttagcctggttttttgtgtcatgactattcaaggcattgttccgcatcatg

SEQ ID NO: 279043 - DNA, 419 bp, Glycine max
  unsure (1)..(419): unsure at all n locations
ggggataacatgcaatcgacnncngaaannnaacctnnnagcgtagccnctagcagaaggcgtggcgaagcactcattatcttattgnctntgaaatgaaagacaaagacatggaatctttaaaatgggactgagacatggaatctttgaaaagaaaaagactgagcgattgaatctttgaaaagtaaaaggtaaagacatggaagctttaaatgtaaaggctgaaacatggaacctttgaaatgtaaagatgaaacataaagctttaaatgcaaagacggaacttgaagctttgaaatgtgacaagacatgaatcttgaaatgtaagactaagacttgagctttggaagaaagacgaaaaatggagctttaaatttactaatggacatgctgaagaatcaacctcaccataaacccct

SEQ ID NO: 279044 - DNA, 293 bp, Glycine max
tgctttttgtttcaattacgagcgtctcgatgtactacgcgacacaatcgaacatccgagtaaaaatttattgtcgtttgaattagctcagagcttctgttttcaatttcgagcttctcgatattttacgggactcaattgggtattggagataagagttattgtcgtatgcatttgctacgagcttctattttcaatacccagcgtctcgatatcctgtaagactcaatcggacatccgtgtacaagtacttatgggatgaatttccaacgaactgctcgtttcgattacta

SEQ ID NO: 279045 - DNA, 506 bp, Glycine max
  unsure (1)..(506): unsure at all n locations
ngggatggactangaccttcnannncgtgnaanatagactcncaagcttgccgccacggagnnnaccgagtatgcggcgagtgatgntggaataaggctncaanangganaagaccaagaaattgatgagccaatgggntgatccatggaccggagatgaaaaaagatcatgatgaaaccggattgtgcccgcttagtaactcaaagggacttgaatttcaagctccaaaaactaactcaatgcaacaaggaggttgaagaggtatttcaaggaaatggatgtgctcatgattcatgcaaatattgaagaagatgaggaggtcactatggctcgatntcttaatggtttgactaatgatatccgtgatattgttgagctgcaagagtttgttgacatggatgatcttgtttcacaaagcaatccatgtggagcgacaattaaaaatggatggagtggctaagaagagtttaaccactgtaggtcttctagttggaaagaccacggg

SEQ ID NO: 279046 - DNA, 377 bp, Glycine max
tttctttgtttcctagaaaaaccatgatttgttggaagcctaacccaattacaagcctagaaagtccttcggattcattatgtgtgttcattgctgtatgatatgggatgaaatgcaaaggttgggacttgtgttagttgtttatgatgaaatgagcctaaacaatttaacttgagtgaaacattgactatgaggttgtggttgatgattcttccttgatatatgccatccttactagcttattcagttgagactctaatgtgtatgttcttatctttcgaaagctgcttgtatgtgaaaatcaattgattgatgcagttcatgatattcaggtcatatggttgaatttctctgtgatgcaacaccatttttgattg

SEQ ID NO: 279047 - DNA, 439 bp, Glycine max
  unsure (1)..(439): unsure at all n locations
ttacaaccagtattgtttatcctaccaaatcatgttcanactcanataagaagannnatnngnggggatggcacagngactaacactcaatcgtattacagacagataaacaatctagcacgtactcttttctctcaaaaaattcaaggattttgagagctattttaaaacttcaaaaaatttacattaagtgattcttacanaaaaagaatntgaatgagtgctntagttggttcttcatgtcttcaacaagtgttcaatgtctctaaatggatagatttctcctcttaagctcgtgtttggaaaatgtggtcattgngcatttaatgcttgattgctaccatgtacttctatcaaaaccactattctttgctaacatgtcgaacacttcaacaagaaatcactttcttttgtgtcgagccatgttgttaatagaacc

SEQ ID NO: 279048 - DNA, 179 bp, Glycine max
tttcttcttttgagccgaaccacgaggctggggtcatctacgccttgcccggcctcttatgagaacctctcactatgtaacaatgacgaggagcttaatctgcctacagggctggctgcctgcttgactagtataaatgaaactaacaccgacttgacttgcttcatgcgcctatgtgt

SEQ ID NO: 279049 - DNA, 299 bp, Glycine max
  unsure (1)..(299): unsure at all n locations
gcnnnnngggtagtgtatcacacttaaatacccgctgaaccgggcaaccgagggggattcattcnttanccccnggggtttggggaaactactacaatcgcctttaagatcacacaacctgaaggctaaacagaccctgcaccgttattcataaggccctacatgttgagctactaccggcgacatgacataggacgtaagaatggctctaggcacgctacatccctagtggaaacaaaatgttcccctcaattaagagccaactcatggccctatcaaagtttgtttccccatataac

SEQ ID NO: 279050 - DNA, 125 bp, Glycine max
  unsure (1)..(125): unsure at all n locations
cgaacccgggatcctctcgancgagcggaggcgtgctatctncgttgtgggcatgtccattccgatctttgattatcggatagtctatcaaacagacggactcctggaacactgcgtataaatga

SEQ ID NO: 279051 - DNA, 369 bp, Glycine max
  unsure (1)..(369): unsure at all n locations
ggcgcatcgagcacgcatncngaancaaaaccggagctgggcccggagactcggggagcgggcgaatgtcattttncccanncngcccggaggggcgagcgaagcccccacgctgaagggccaaaagaaccccggggcccgccagctcagaacaacagccccggaacgaggaacagaaaaacaccgcaacaccacccaccgcctggcatgacgccgcctgccaacacacaaaaaccaggcagagcgaagacaaaacccgcaatccgactcccgcacagaaagacacccacgatccacgaagaggcggcgaggaagcccagcccccgggaaaaagacccaccccgaaaccccccgacgcacagaaaaacc

SEQ ID NO: 279052 - DNA, 304 bp, Glycine max
  unsure (1)..(304): unsure at all n locations
atctttgcgttaataagactttgttttctcacaacaagagatggttggaaaatgctctaacacccatgcctgtaaaacatagaaactattcttagcatcatataatattaacaaagagacaattaagtatacaaaataattcttaccatgagtagtgtcatataacctaccatatgcttgttgatatataggctcacatatgacaattgatcataaagaaatgtcagtgcaactactccccaggcgtactacttgcagtgacttagatcactgangtattgcacgtagcatatgtgtacatgca

SEQ ID NO: 279053 - DNA, 495 bp, Glycine max
  unsure (1)..(495): unsure at all n locations
ggggnnnnnnngggggtcggacaaacgagnatgatccanctgcannnacccangnacacncaagcttncaccgangganaaaaaggagggagcgcagngatgaaatttaganctngccggaccnccnagggaggtgcacgggctacaactgccacacaccgacacggccaaaggccgaagaggacgacaacggcgcgtatactgtcaacgcatactcacagggtgacatggtagcagcttcccacggctcacagtgacagcacatgtttcaatacacgaagcaaaagatctgggctcgttaggttctacgcacatgaaactcattagcccttccccatcacacgacaatgacatacacgtaacgggctcgggcacacacgtatactacgaaagccatggagaagcctgccccataatcaaccggacacaccccgttaactatgaaggctaagacccgctaaggacccaccaaaggagggcaaccaacaacattgg

SEQ ID NO: 279054 - DNA, 338 bp, Glycine max
  unsure (1)..(338): unsure at all n locations
agcttggatagaagggtgaccatgagagcgtttggagctgaattaatcctcactgatccagccaaaggaatgggaggaacagtatagaaggcttatgaactnttggaaaacacaccaaatgctcacatgctgcaacaattttcaaaccctgccaatactcaagttacctgaacctaaattactattgctgtttgaaatctcctaccaagacagaaaaatcagtagaactaggctngtattatgcttgtgtgatgcttcattgtacttaaagttaatactagaatatatgtctaacatagatgcttggctgtacaatggtgcatttatttattaaatga

SEQ ID NO: 279055 - DNA, 342 bp, Glycine max
  unsure (1)..(342): unsure at all n locations
gctattatagccttgaatagggatactattcgtngtgctcttgtgtcnggaagaccaggcagagccgaaacttacactccaatcaaacctcaaacgttactggacttgatatccttctatgattcatgtatatggtgcaccaattaagccacattattttatcagggtgatcatggcttcctagtaatccaatcatattttttatatcagaataattaatatttagtcaaaataaattaatataaataatgaaactttttgttcaaacatgcagtctcatattcagaaatctaatttaggaattataattaacctaaataattttatacttatccacctgca

SEQ ID NO: 279056 - DNA, 96 bp, Glycine max
agcttcactatcaagagagtgacttggataagaagcttaaagaggaagcttcaatggaggaagagaataccagagagagagggggaggatgggggg

SEQ ID NO: 279057 - DNA, 294 bp, Glycine max
  unsure (1)..(294): unsure at all n locations
tcttatccaagtcactctctnnggggtgttgcttctccttccatgactnatnctctaggggatgacgtctctctacctctttcttatcttcctgcatccatgctaaaatacatgaagactatgaactcaaactacctctaaactctaacacttcacatggataaccaaactcagagctctaactcctatttacttctctctcatgtgtctcgtcttctgactctctgctggcgagtgtactatttaaatcacatactgttgaactattattttgtaatctgctgtctactatgg

SEQ ID NO: 279058 - DNA, 405 bp, Glycine max
  unsure (1)..(405): unsure at all n locations
agcttaattgcactattcaatggagttgacaagaacattttcagactgatcaacacttgcacagtggccaaagatgcatgggagatcctganaatcactcatgaaggacctccaagtgaagatntccagattggcaactcttggctacaaaattcgaaaatctgaagatgaaggaggaagagagtattcatgacttccacatgaacattcttgaaattgccaatgcttgcactgccttgngagagaggataacagatganaagctggtgagaaagatcctcagatccttgcctaagagatttgacatgaaagtcactgcaatagaggaggcccacgacatttgcaacatgagagtggatgaactcattggttcccttcanacctttgagctaggactctcggatg

SEQ ID NO: 279059 - DNA, 335 bp, Glycine max
  unsure (1)..(335): unsure at all n locations
acatgctgatncatgaanaccaacctgatcactatgattacctattcctgggattttatttgttagaaggaatccaaaaaacgccatagttttttttattaccaaaagatttgaaaataatataattgccctttttggttaagtggtttgcttaccaacggcgaattatttaaaaaataaaaagtccatccaaagatgggaattattattttattagcaaaaagctaattatactaccagcaaagggtcggaagattaataaataagcttcaacaatgggacccaggtcttaataataaagtgattcgaactccgttaaacagacacaaacaagg

SEQ ID NO: 279060 - DNA, 378 bp, Glycine max
ctcccccttggagcatcaaagagccaatactgcgtggcaaccaacacaagatgatataactaaagtgtacataatcaatcataagtcacaaccaaatataagccaatcatacataagtgaaaaccaaatataatccaagcataagtaaggcatagcctaatctaatccaagcataaaagactaagtgctaattatcaaaagataatgaaaggtgagaaaatgataacgcaaaaagcataaccatatacacggcttataataaaagactataacatcctaaaaactaagacggtggtggaaggtcatagccccgacgaagataagtgacatactcttcaagctgggtgatgcgggtatccatgccttcaaagcaccatc

SEQ ID NO: 279061 - DNA, 412 bp, Glycine max
  unsure (1)..(412): unsure at all n locations
gtttttttttatcttacnnttgaaaatngacagaaccggggccacaanngggggttacgagaggagtttcattatttcncacagcacgggacgggggaccagaggccaacacaggcacaaaaaggngacngaaaaacgaaanggcnaaaagancnacaaaacaccaagaggggaaccccaaaaagcaaaaccgngaagccccaaaagaaanccaggccaagcaaaggcagacaaaaaggaagcaacgaggcccaaacgcaaaacaacgccagcaggaaaaaacaacccccccgcgcaaacccgaagaagaaaagaccgagggcgccggggaaaaaaaccgaaacaaaggaaagggccccacggggccaccgcgaaaagaancacagaaggggacccccaccggggggggggg

SEQ ID NO: 279062 - DNA, 292 bp, Glycine max
  unsure (1)..(292): unsure at all n locations
agcttagtgtatgcattgctgggatcatcttctactatagagagtggccataggctccgatgctaggacacctactagctcgcagagctaccgttaaagagggaagagctgataccnctgangatagtgaagaggtgcacgtcttgaatgcggaactcaaaagaacccaactggtcaaagagaagttcaagactacgaccatcaatgtcctgaaagagtgtgacaagctgaaggacattatcatggccacagctgaagcattataacaggttgaaggtatgatattacagga

SEQ ID NO: 279063 - DNA, 426 bp, Glycine max
  unsure (1)..(426): unsure at all n locations
gagcgatatctactggcagtncaaccnncntngagcacanaagccgaggggcatgnaccancaggggctaggccgacggncgaggagatccaactctgnccggccaanaannagggggagggtagggagagcaaccaccccccncaaagggcggcnagcagggaacaaaaccccggaaggacaaagaggcgccaaggaaccacaccccgggacgaagaaaaanccaaccacgcgggggaagcaaaagccgcaagagaccgggaaaacaaacagggcaagccgcccggggagcaggcggggagagaacaaacaagggggggggggagaaaaggcaaggangggggaacacnacagaaccagacggggcacgggggcaaaaacgagaaaaacccaccaagagagaacggcacgcgagcaaagaaggag

SEQ ID NO: 279064 - DNA, 399 bp, Glycine max
  unsure (1)..(399): unsure at all n locations
agcttgtgttcccattatatgcagcaataaccaaactataagctatcctttctacattgaagggatacaagaacccttttgtgggtactcctagttgtggcctatcttgtggcaatgatggcttcccatttctcaacatgtctaatgccaaatacatgatccaccagatattctacaacaactcactacgtgagtccaatgctgtgttttcaagatcaaacactangagttgttttcctcgtacaccgaacctcactctttcagatacgagattggctcttgctcccaaccaaagggagctattcttgttgttcggatgtgacctgcatgaacggttgaagagcacataattgggtgtttgaagagaacaaaccggttctgtgtggcatgaatgggaaa

SEQ ID NO: 279065 - DNA, 433 bp, Glycine max
  unsure (1)..(433): unsure at all n locations
ggggnnnnnnnggtgtcttattgttacttananctntaanaataaacacgggggcctngctggagtngnggacccgaagaggacgaggggttttttgctcacnnggncgaacccaaaaaggcgggggggaaggcacaaccaanccaaaccccccggggcccaagnngggnaaangnccacgccgggacnaggaacaacccaagggggcacaaagagaacaggcnncggaagacanggcnnacaagaaccaaaccaaccanngaangcccccaaaaccagggagccnnacggccaacaacaaacgngggggnaaaaaaagagngaaccagaaaaaccaaccaccccagccaggaaannccaaagaaaacaccccaacccaaagaaaaaaggggggacanggccccgggaacaggggacggcggggnaacccccg

SEQ ID NO: 279066 - DNA, 366 bp, Glycine max
agcttctcctccattttcttataaatagggggataggtgaagagaaatttcgttcagccctcctggtaattcagaatcacttaaaattagtgaaaaaaatcggttccgtgaagaaaatccgagctgaggcgcttccgtaacgtttccgtaacgtttccgtgggtgatttcgcgaaggttttcgaccgttcttcgacgttcttcatcgtacttcgggcttcaaccggtaagttccctaaatcaaacttttcaattcattctatgtacccttagtggtcctcatttgcgtttacgtgccttcatttacatttcatgtactttccgtacccccttttgacgtgctttagtcatctgcttaagttatttt

SEQ ID NO: 279067 - DNA, 337 bp, Glycine max
  unsure (1)..(337): unsure at all n locations
ttctatcagaatcacacggaacaaaccgcagcagacacgcgcacaangcaacgtatacatccnggcaccaacacgggataagcggagcaaagacccagcagggcccctgagacaacgaacaggagtacacacaacgggagcagcccaagcaaaaacaaacaaaagaccagtaagcaaagaacataccacatggaaagcacgcaccatcagtaaaatcaaagcaaaaccaaatgaacatgcagccccaggcaaaaggccaaagagccaacactgcacaaaccaacaggaacgacaccaaactaaccaaccccaaaaaacaaggaactatctcagcgga

SEQ ID NO: 279068 - DNA, 214 bp, Glycine max
  unsure (1)..(214): unsure at all n locations
ttctttgtttgtctagtgattctagagagagaaaggtccaagttccaaagagtttttgagagattntgctgtgtgaagatctgcagagaccagagcttgaagtggaagttgttctgagagcttgagatgagtttgtgagtggttgtgagatcctataggtgaaggagacgtcctcaccactcgtatctttgcaatatttcatctaggtcttctc

SEQ ID NO: 279069 - DNA, 471 bp, Glycine max
  unsure (1)..(471): unsure at all n locations
gagttagcatgcgatcnatnnccgaaaatngacaaganccctcnacatngaagatngagacactcatgagagancttgccnatttcnttatcacnacccanccatncccaacctgggatanatgtgaagttgtgcatggctaacaagaatgcactattgatgacaagttaggtacaaccatggatgatttcaactttgttgggcagaaaataattcttacagtcaatatcccacaatttcaatcaaagacaaagcttcangaaagtcagggatgtataggccttcaaccatgcaaaatcacaggcctagacgagagaaaagaaaacctactctttaagagaccatgctctcatatatggcccaatatgatcagagaatgaagctggnggagtctccactcacccacttacatttcctttgcacaaaaacagacaacaacctctttacaactgaacaaatcataaggaagag

SEQ ID NO: 279070 - DNA, 366 bp, Glycine max
  unsure (1)..(366): unsure at all n locations
agcttttattttatcctctaacgtcatgctttccatccttgattcatccctgccggcccttctaatcttgagctcgttactgctaccccacagagcccttcggaacttgttcttgcttcattctttctttcggaccctttttgtttcccgctctatcgcttcaattgtggttaggttgatatctttcagcttatcacactctttcctgaccctagtgactgtcgtcttcaacttctctttcaccttcgagctctgccttcaaagcctgcactttttcactttcctcangaatttcagcctctttcctacttaaactttntaagcttgggagccaagttatcccttgtgttctagacttcaaccact

SEQ ID NO: 279071 - DNA, 478 bp, Glycine max
  unsure (1)..(478): unsure at all n locations
gattgtcattggngttagtatnnntgncacacnatagaacacncaagccgggcaaagannggangnagcgagtaggaagcgaatcttnanaattcaatgttcancnnnnnaanncnnacngggngcgttatctatgcttaaatgcaaacacgtttntagttaataaaaaatcttaaatcctttcgtactatacatttatgtgaatattaaaagagagtgctatatatattaacataacaaattatttataatcatgtaatacttttataaaaattgcataacctttaagaattagttttaaatctctttatcattttaatccctcgcctaattcactgctttaaatattttgatataagctttcctaagtatatggctctctataatataaaactttaaaaattgatatatattttaccaccatatcccttttaaattagaaaatcctttaaaggtttctattaataaatttaggtga

SEQ ID NO: 279072 - DNA, 391 bp, Glycine max
  unsure (1)..(391): unsure at all n locations
ttcttctctcctattnngctataaataggggaagaagtgaagaagaaaagggttcagccccttaggcacttctctctctctcgaaattgctgaggaaaattatttccgtgaagaaaatccaagccgaagcgcttccgttacgtttccgtgaggaattacgcgaagattctcgtccgttcttcaagattcatcgctcgttcttcgtattctttagtcttcaacgggtaagtacctcaaaccaagcttttcaattcattctatgtacccgtggtggtccacattttgttccatgtatttttatacttgtgttcatttatattttatacccccttttgacgtgcttaagccatttatttacgacattactcggcctatctaaaaataaatatat

SEQ ID NO: 279073 - DNA, 469 bp, Glycine max
  unsure (1)..(469): unsure at all n locations
nggtggtcagttcatgcatttccacnnccgtgaacnatagaacacgcaagcttatccttatggctggccgccggaggacacgccccgttccccctcaaagancnaagccaagccgcgacnnttgaggggcaacacccgccccacgacgacnancccggacaagacgaaggggaaggaganacccancnnggcccccggcnccaccccanagaaccgnccccccangaaccacccccaccgaacaaagncngccanancccaaccccacccacgacccgaaaagaaacngnccccccccggaagaaaaaggaagaangaggcgcncgaagaaaggaaagaccanccagggccccgacaacaccccncnggaanaacagaanaaggcccgggcccaaacggcaaccccccaaggccaagaacggccaggacaaaccaagggacacaggccaagggcacccnggaggaagcg

SEQ ID NO: 279074 - DNA, 353 bp, Glycine max
tatgcttccattagaaggcgcatggagtcgccaccaacgtttattctaggaaaacgtcatacaaactggaacgtgtggtctacgaactttaatcatgaaaggtttgggagttgttcttacgcatggggaaagtatcaacaccccacacgtctgtcacaagggacgacaaccttcaatcaagtgtgcaagtatgacttcaaaactacgtattttccctttttttatgttttcttgctttatatgggccttctttgtattattcatctttttgtggtcgacacaagtgtgtgcctcactactacgtatcctctattgtgatgaggaaatcgaacctacgttcgtctttcagaact

SEQ ID NO: 279075 - DNA, 186 bp, Glycine max
ctagctacatacatccctctaatagctaagctcacttctcttgattgagtatctagaacttagctacacaccccctataatagctaagctcacccccatgtcaaaatacatgaaaatacaaaaaagtccctactacaaagactactcaaaatgccctgaaatataaggctaaaaccctatattact

SEQ ID NO: 279076 - DNA, 401 bp, Glycine max
  unsure (1)..(401): unsure at all n locations
atcactcctacatctctagcatgcattgtatgtcggtctcgtcctttgacacgggaagccggaaggtccatatcaccttcttaattgtacacatggggcactgcgcccccaaatgcgcgagtcagaagagataattntccgggctctcgtgtccgtaaaatgcattcatatcatgcatcgcataagcatctcttcataacatcataatggacatatcctgcatttgtccgttatcatattccagcctcacattttgcatgagtcatggcatcatcatgcatatgcgtacaacanactatgtgatctacaaaatagcataccatatgttttcatgtttgctcatccttgcgttttcctctacgaaacanaaacaaagaaggtggaagcgtgaaacttcacac

SEQ ID NO: 279077 - DNA, 464 bp, Glycine max
  unsure (1)..(464): unsure at all n locations
gcgggttatganccnttgnttagcgactactgnanaacnnnnaacacncaaccnngcggcnnnnnnncccaggaagagcaaggaggcttcttccattttcacttccnncnggagggcccaagtgggcctggttgctatttgcaccaccctctttactaaatgtaccgccccttctattattctgtaatactttatccgtaacgttacgaaactttgtgatttccataacgatagttattttcgtaccgcaaggtacgaatcctaaccgatatgtatttactctttttagctttcgataagtacgaaactcacgatgcgcataacaccttttcgactcgcccatacggaattcacgatcgccaacctgtgctttgattctggacgtctggactcattatgtgcatcaaggcgccaagatttcaagcgctaaccaaggtggtgtcttaagtagattcccggccaan

SEQ ID NO: 279078 - DNA, 391 bp, Glycine max
  unsure (1)..(391): unsure at all n locations
agcttagttatcacgagatcataaatnccaaaacatagggggagtatggaatgagtgaatgttctatcttgcatatattcaatcttgtatctcgatttcaggaattaaattgtcatcatcaaaaagggggagattgtatatacaaagactntgatgttttaatgatgctaaaggatcatgcgcttctcaagtttaattcaagaagatcatacgcttctcaaggttaattcaagacaagaatccaagacattcacgatatatgatcaagataatctctagagacttacgaagggaattccaagttgaaacaacaagaggttcggccaaagaatatgagttaaaatgtctttacaagagatttactctctggtaatcgattaccagagaatgt

SEQ ID NO: 279079 - DNA, 149 bp, Glycine max
  unsure (1)..(149): unsure at all n locations
atggcctgtttacgcctggaacatgggtatatagcatgctcttagcacgangaggcgagagatcccgggcgttcttacactcgatgctccttgaggagacttctaatgcacgctccttgcagtggaacggcatagtaggataactgcac

SEQ ID NO: 279080 - DNA, 158 bp, Glycine max
  unsure (1)..(158): unsure at all n locations
tctagccaaatggacttaccttgaatnatttcctntgttagcttcttttgagcctngnngccctttccttgggttgaagctcactacangccttaagtgaaaaaccatgatattaccatatccttaaggaattattgaactttggaattgtttttgga

SEQ ID NO: 279081 - DNA, 404 bp, Glycine max
  unsure (1)..(404): unsure at all n locations
agcttctctctcaattttctataaatagggggagaagtgaagtagaaaagggttcgaccccttggcactctctctcttcgatntgcttangaaaattgtttccgtgaaaaaatccaaaccgaggcgcttccgtaacgtttccgtgagtgatttcgcgaaggttttcgaccgttcttcgatgttgttcattcgttcttcatcgttcttcagtcttgaacgggtaagtacctcaaaccaagcttttcaattcattctatgtacccgtggtggtccacatttggtttcatgtatttttattcttgtttcattcactttntatacccccttttgacgtgctgaagccattntatttaaatcatttctcgcttaacctaaanataaaataaatttccaccgatcgtttg

SEQ ID NO: 279082 - DNA, 379 bp, Glycine max
  unsure (1)..(379): unsure at all n locations
aagtgtngctagctnctgatgcangacaannagcctaaaccctggaaatgagggaggagattgcccggaacaatttggttttctttcctaacaccctaaggccaaaggtgaataataaaatagttttttttggctttggcgagagattcatggctatgggccccaaggtttcaccaaggccttttccttaagaatggtatgcattaaaaaggctcagaagttagatgggtgctcttcttggacaaaaggttgctggaaatactactccctactacggaattctattccgctgattttgagattgcaccccgtagcagatgggagcgtctctgactcatggattgcagatatctcgggagagcgcacgcagagcgggtcn

SEQ ID NO: 279083 - DNA, 356 bp, Glycine max
  unsure (1)..(356): unsure at all n locations
agctagcatttggagcttctatggangccggatctttgagcttcaatgaggtcctttaatggtggttttccaccatggagatgcagcggaagataaaggataatatgtgagaggatgcgtcatccactanggaataagccatggaagaaggagcttcacctcctttatgagccttggataataagcttgcataggatgcttcaatggaggaaaagaatgagagagagaaagagagaggggggagcacaaaattgaatgaagaataagagagagaagttgaactttgagttgtgtctcacaggactctcattcatcaaacttacaacatgtgttacacatgcatctatttatagact

SEQ ID NO: 279084 - DNA, 377 bp, Glycine max
  unsure (1)..(377): unsure at all n locations
ctactgttgaccggaataagcgggcaggnctggtaaccaagagccgtttgattatacggggcanggagggaagtgctataaaactataaaatccttctatgagaaaagtggtccattttgtgtgatgaccaccattttgggttaacctttaccaacacactttcttgaaagattgatcaatcctatggttctactccgctatcttccccttctgattacttcaaaagtgactgtccaccatgcatgggagtcaaacattgaacatacgctcttctcctgcatgtgatggagcaaccacttccaggaccatgaagggggtgctctgtgtggtgatatatttcaacagaatattttttttagacccaatttcttggacn

SEQ ID NO: 279085 - DNA, 370 bp, Glycine max
  unsure (1)..(370): unsure at all n locations
agcttgagtcttttgttaatggcgacatttatagcatgaatagtggtgtgtgtaaccaacaagtcatcaactacttctgcctgagaggtaccctagaggtactggggtattgacgatgggagcttcccatatagtggcttcggatatttgaaataccagtgctcagatgaaccaatgtattgtatgaccactccgtataggaagatacttgaaccactatgatggtcgatcatggacaaacgaatggaagtattgctctaaaacatggttgacgacctccatctgtctatcgatctgnggatgataagcagtgctcatccatagcttcgtcccacataagcgaaagagttcccgccaataggcacttatg

SEQ ID NO: 279086 - DNA, 412 bp, Glycine max
  unsure (1)..(412): unsure at all n locations
ggcgtgactatgcattgcatgcatgacacnaacctgggcaataagtcctccccattaatctcaagcaggcatttnggttggcctatccnnggcccgggaggccggaggggcgctatacctcctaatggacacatggggccctaccccaatgcccagtaganaaagaagatttcggcctctttggcctaaatgcatcttatttgcacacataacatcttttctaacatatatgggcatatcctgcattgtcgtatcatttctagcctacattttgatgaatatggttcatatgctatgcgtcacaaacttttgattgcaaaatgctaccattggttcatgttgctcatctgctttctctcaaaacaaaaagggaacggaacttcactcatctagttatgtgttgcccacaact

SEQ ID NO: 279087 - DNA, 247 bp, Glycine max
ggacctgaagcaccgaggcagcaagtgttttcttacgacccctaccgtatgtcttacgagaccagcagctgtgaacatcatgctatgtccacaccctgctaggggtaatcattaactatctatgttgggcgatacaatatttttgagccatgtggcacagtattgtcacctacttctcctttgagaatgttggacaatgtacccttgccatctaatatatccaatctctcgactaattattaattgg

SEQ ID NO: 279088 - DNA, 333 bp, Glycine max
  unsure (1)..(333): unsure at all n locations
gggannnnggtgtagctgtatcganncnaaannaccggggcnngacagganncgggggaggaggctatcttttgtggagcccaaggaggggtaggaaggcctccctaaaaaaaacaatccatttattggacaacacctcttggaaggaaccattcatgcccaaatggtaggtaccaaaggtgggccttacaccaaaaaaaaacttaaaggggggaaacctactaggcccggatctcctagaactggaaaaacatccctgcaagggaggatggaaacacctttctattgggagacatgtgccaaccagaagagattcttgtaaaaaagcacaaa

SEQ ID NO: 279089 - DNA, 350 bp, Glycine max
  unsure (1)..(350): unsure at all n locations
ttcattccaccgttgggaattttaagggtcaaagagaataaaacctttgatcctcaatacatggaagatatgtgtccgaggtcacaaggtccaagaagagttaagatcatggtgatgccagggttttatgttcaggatagggtcttgaggtgtaaagttctctgcacgtacaaatctgcggcctangtaagagttggaataagttttatatgtacattttcttttacttttagactcactcatcttaagtctgtaactagccaaatgtacgtgataattaataatagttcaaagtgatctaatctattgcatgttgcaatttgggtgctngtcattggatagataaagat

SEQ ID NO: 279090 - DNA, 322 bp, Glycine max
  unsure (1)..(322): unsure at all n locations
gaaaaanggggattcttgatgacctctgaactacccacctgtgtaggcccccataaaagaatttgttttacttaaaaaaaccacctgtacgatggtctttttacttccggggacgggggaaaaattaattgaccctcacaacaactgattccgggaacacgcccccgcagacatgcgaatcgatcttaatacatatctgtcacctatcgttcgattgacacagtatgcattttgggttgaaccgccgcgttgtttgggaaaattatattttttatgaattgtcacgtgattttaaattttaaatttgattaataaacgaaag

SEQ ID NO: 279091 - DNA, 209 bp, Glycine max
tgcttgctttctctggaagctcctaatagctcccacactatttggggtgggccattctcggatggccttgattaactcacggaccacttggaccccatttctaccaactacacaacctgagaagactatattatctacacaaaaagtacactactgtatattagcatacagggagtttttcctatcgactgacataacttgtctgacat

SEQ ID NO: 279092 - DNA, 449 bp, Glycine max
  unsure (1)..(449): unsure at all n locations
aaactagggtagcnatgnatnncnnnnaaatnagcnagagccnaatggagagagccngcggggaggcgggggngagtttncttttttgtnangcnagagcnaaacgggcacggcggccctattaacgcaacccaacctcctcgaggagcggccctggagagattccttaaaaggctggagcttagctactcttacctgtattagaggtggcctcacctccttggaagagaagcatgagcttaactacgcaccccctatgatagcttagctcaccccctgacaaagaactggagataacaaaaaaagggcttattccaagcgacgtacctgccccaaatacaggctaaaccctaatctctaaatgggccaaatctaggcttcacaagaaagcctttctaatattccagataacggccctcctaaccctgggcccaacaaccttaggcctg

SEQ ID NO: 279093 - DNA, 384 bp, Glycine max
  unsure (1)..(384): unsure at all n locations
ttctntcattttattttccaactcttgaaagtttttcaataaagtaatcctttctttggatattttatcattctcgaggaatagcttggtctcttttatcttaagtgtttcacaagaataacatacttgagtggactcatgcatagaaatttctgctttatcatgaaaggcctttttanattctttatgatcttttgatagctttttgaaatcttttcccaatttcttataatcttttgaaagaatggatgagtttgaaaagagttcatgataggcttgtttaaaagacttggggtcatcaaaatgtacctcatcgtcttggtctgatttagattctttagaggttgtgtcggtcatcagacatatgttggcttcctctacttc

SEQ ID NO: 279094 - DNA, 419 bp, Glycine max
  unsure (1)..(419): unsure at all n locations
cttgaggaggagtgtngaaaaccatacaaaagatngttgatcctattattattnacacnnnaagagggagataatctgtgattaaaaggaaccaaataatccttaattaatgattaataaaggaaataatctaatttaaccccatccgttgtggacttctgacccaccggtttaagcctataatccctctattattcctccttaattacagaagcaaatatggaaacggcactattctctctgggcattnttttaatattagtttatagatcttcttccgtagctaatgggtgcggagataagtaattactagatttggatttgagattctgcattggtgttggcccaccaaacaatatgtgtatagagcaaaatctcaatcttcattttttaacccattcggtttcggagttagtttt

SEQ ID NO: 279095 - DNA, 217 bp, Glycine max
  unsure (1)..(217): unsure at all n locations
tttcttcttttcactccanacatcttctcgaagatcccgacggtcagatcatggacgattgtcttgtgaagttgcaaaccaaatnctgagtgtattcaactgttaacgaaggctgtgcagcgcttttaccgatgcagcttcatgtacttttctctacaagcttgactaacaagcttctaacacactccagatatcttctcagagatcccaacggtca

SEQ ID NO: 279096 - DNA, 99 bp, Glycine max
  unsure (1)..(99): unsure at all n locations
tggatactacactctctaaacactatgtataccctgccagaaaagactanaactgtacagtgatttatctgtctatatgacgatcacaacttagtcaat

SEQ ID NO: 279097 - DNA, 255 bp, Glycine max
  unsure (1)..(255): unsure at all n locations
ttcttctatatcttgngggaaacaaccattcttatggtgttgaccagttaagaaatatgggagttcctattgaagaaagtataacaagagatggtagcatggtctccacgggtgtttctaatgaaacattagtagtttttaggcaacacatagatcatagtaatcatgaaatggttaatactttgacaaatcacatggcctcaattttaaatcctttattgagaactaccaatgaaagttatcaacttatgaatg

SEQ ID NO: 279098 - DNA, 253 bp, Glycine max
  unsure (1)..(253): unsure at all n locations
tactcaagcctgttacctccttcttcactacatcaagagggaccttgttgtttcttctctgnggctgnctaatgggtttagccccatcctctaaaagtatccgatgcatacatgtgaatgggctaataccaggaatgtccgccagggtccagcctatagccttcttatgcttcttgagaactgatgacaacttctcctcttgctcatcaacaagggaggcagatataattactggaaaacttttgctctcatc

SEQ ID NO: 279099 - DNA, 256 bp, Glycine max
  unsure (1)..(256): unsure at all n locations
agcttattttctgaaacatccacaagggtgaggcatgactacttttcactttcactattgagactatacaaagtggaaagaaaaacagacgcatatgaactcactngtgcagcatgctgctatgagcctcagtatgcatatatcttgtgctgcttcgaaattgaaagcatcatcatcaagtgaagtagtatccagaccaacagaagccatttcgcccattgttctctgaatctgcatgtaccatgattacaaattc

SEQ ID NO: 279100 - DNA, 229 bp, Glycine max
  unsure (1)..(229): unsure at all n locations
taactgaattacttggggatagagagttggcttcctgaattatcacgnncccaagagtcactatgaggcgaagaatatttatgtccagtaggaatgaagtaccaaaaaatccgtgcatgccctantgattgcatattatacagaaatcaatttgtngaatgcgttagtgcctcacatgtggggtatcacgatacaaagtcaggatgatgaagacattatgatgcacccc

SEQ ID NO: 279101 - DNA, 376 bp, Glycine max
  unsure (1)..(376): unsure at all n locations
agcttatgtctganatatttacaatagacctcctcagcctcagcagcaaaatcaaccacaacagatcaaatatgacctctccagcaccagatacaaccctggatggaggaatcaccctaatctcagatggtccagccctcagcaacaacaacagcagcctgctccttccttccaaaatgctgctggcccaagcagaccatacattcctccaccaatccaacaacagcaacagccccagaaatagccaacagttgaggcccctccacaaccttccctcgaagaacttgtgaggcaaatgactatgcagaacatgtagtttcagcaagagaccagagcctccattgaatcaacaacagtcccagaattctgacaagct

SEQ ID NO: 279102 - DNA, 210 bp, Glycine max
tggtggtactatagctgcactaaatagttgttgtggttatcttatgcagatgcaatgcagtagaagggggtaaagacaatatattactacaattatatgagattgagtaggtaatactaagaacagaatattagtagcatgaccgagaataaaatagccgctgtgtcaaataacataacaattgtctcaaatacaggaaaaagaaatact

SEQ ID NO: 279103 - DNA, 360 bp, Glycine max
  unsure (1)..(360): unsure at all n locations
agccttgttaagtgatcatgggggtgaattcaaaatgaggaattcgaaactttntgtgaagaaaatggtattaatcacaatttttctgcttcaagaactccttaacaaaatggagttgttttgagaggaaagatagatttctttaggaattaacaagaactatgctaaatgaaaaccacctacctaaatacttatgggtggatttcatttgtacaacttgttatgttctcaatacaatgattataagaccgattntganaatgacaccttatgaggtctacaaaggtagaagcctaaatacatcacatcaaanagtctttgggtgtaaatgctttgtgttaaacaatggtaaataatcac

SEQ ID NO: 279104 - DNA, 227 bp, Glycine max
tgctgattggttcaacattccaggtgtctttgacctcttcactttctaagatgttccttcccctcaaggcacccctgccaaactaggcacatctgtcataggattcaccctccatgactttgcagatataatcttccacaacaatgagaattacacgcagtcatggcacatggatggatctagcttctatgttgttgggtaggacatctatttttattatttattta

SEQ ID NO: 279105 - DNA, 375 bp, Glycine max
  unsure (1)..(375): unsure at all n locations
agcttctagtcaaatgtacttaccttgaattaattccttggatagcccttttgagccttgtttccctttccttgtttggaagctcactacaacccttaagtgaaaaaccatgatattaccatatccttaaggaattttggagctttggaattgttttgggaataaggtgtgggggggtttnntgtttcatttggacaactttgttttgttggctatgcttcatgatgtattttgggccatacttgatgtacattgtatattggttaaatgttggacatgctgaataaaatgttgtttctcanaggctaaagagtaaaaaaaaaaaaaaaaaaattcgaaaanaaaatcgaaaaaagaaaaagaaaagcaataaag

SEQ ID NO: 279106 - DNA, 458 bp, Glycine max
  unsure (1)..(458): unsure at all n locations
gaagagacctagaatnctgatacatnaacaccacagctctaaggctgctcaatggctccaggttgctgcatagaagggcaattgtcggatttgttgttcgccaaaaaaccttaaccattgacattttccacaaggattgaatttttaatccaaggcaacttggttaccaggttaccaaaggctttaatttaacttccaactctttaatttcaacttaataagaatggcataaccttattttcttccaggccctttcttgaatgacttgcaaccttcctttgttcctgtgaagttcttggcaaccattcttangctaatttgtgaatttcaagacattgcggaaaaccaaaaatattgatcacaatcgtaagtttcgtgaacaccgaaatcaaatgagcatcgtgcataatagtgaaaatcgaacattcgtaatcaaaagggatgatatgtatcgcagg

SEQ ID NO: 279107 - DNA, 410 bp, Glycine max
  unsure (1)..(410): unsure at all n locations
agctgttgttcaagatctctatttatctccgaaacccagctgagcaagcatatagtctaagaacgcccaacttatcgagttgtatgcttttctgaagtctactttaaattaaaaacaattccagtgaaatctttgggcccaatccaccacctcattcatgatcatcacgccatcaaacatttgcctactaggaatgtangaaaattgaacttctgatataacagatcccaagaccttcttcattcgtgtggacaacaacttagatatgattctgtgaagactccctantagtgataagggtaaaaaaatttgacatagactatggattcttcttctttggaattaaagcaatacatgaataaaccacagatttgggaagagaagcatntaggtaaaattcttgcacacat

SEQ ID NO: 279108 - DNA, 435 bp, Glycine max
  unsure (1)..(435): unsure at all n locations
gtcgtgactcggcgtagcancnncgtnaaacatnagaccggaacccaatnttanagggagagttgggactaggattaaattttcctttgtttaagttcaaaaagaagaagggcgaggtctctagaagtttagagaatttctggtgaagatattgcagacaccaacttggaaccagaacggtttgagagcctagataaattgtgagtggatgtgagaatctctaagtgaagagacattcttccaggtttccatccgtggggggctcataaattggccatggtttccacttaagaaacacttcgaaaatcttatatgggaatcacagccacaaggtttctcaaggagatttttagcttcagcaggtcctataatcacaggacagtggagaacaccctgtaccagtcacaagactgagtggccttcaacagccatcan

SEQ ID NO: 279109 - DNA, 59 bp, Glycine max
  unsure (1)..(59): unsure at all n locations
agcttcttttggaccttgaacaggcaactaactcctctntcaaaaccatgctatgtgct

SEQ ID NO: 279110 - DNA, 416 bp, Glycine max
  unsure (1)..(416): unsure at all n locations
gctgtacctgtgctatcaacatatagacactcagcttgcaactcatttggaatctcgacattcttcatcggatgtaccttttgctctctccgcgactcggcatgcggctgaaggcttctcgccatctgtaccaagtttgaaagttgtagggctccaccttaaatcgcacgcactctaggaaaaggttcttattttgcacacggcttacaattttgccaaaattggaaagtgctcttctctacctgcttanactacaaggcngcgaggtacatgggcgatcactgcgcatatgagactgaatgaccgcaaagtttaaactttaaaggtcgggaagatgcttttacactaatgcactccctaggacgtaggagatcacataactggtttcattatgtaagtggctgatgagatgctcc

SEQ ID NO: 279111 - DNA, 393 bp, Glycine max
  unsure (1)..(393): unsure at all n locations
aaccgacttcaaattcncctttagggagccgaataacaatccattggcgcgcgtttacaaccgcctgaactggaaaacccttgccgtaaccaacctaattgccctgtgaaacaatcccctttctccacatggccttataaccaagaaggccgccaccatatgcctttcccaccattggcccaccctgattggcaattggggcctgatccggaatttcttcctaacccatctggccgtatttcaaacggataatggtgacctttcatacaatctgtctgatgccgatagtaaacaagcccgaaaccgccacacccgtgacgcaaccctttgggcnntnnnnnntnnctcnnnncggttccttcnnnngttttccgcgacctcgattctttgtct

SEQ ID NO: 279112 - DNA, 371 bp, Glycine max
  unsure (1)..(371): unsure at all n locations
accttgctatcccatggaagctcctaatatctcccacactttttggggtgggccattcttggatggccttgattttctcaaggtccacttggaccccatttctaccaactacaaaacctaagaagactatattatctacacaaaaggtacacttctctatatttgcatagagggtgtttttcctaaggactgaaagaacttgcctgagatgtcctaagtgatcatctangctcctactgtacactaaaatatcatcaaaataaacaactacaaatctacctatgaaatccattaagacatgatgcataagcctcataaaggtgcttggtgtgttagtgagcccaaaaggcatcactagccattcatacaaa

SEQ ID NO: 279113 - DNA, 140 bp, Glycine max
gagaagctagagctaagctacacacagccctctcataactaagctcacctccttgagaagcgtacttaagaagattccttaagaggctagagcttagctacacatacctctataatagctaagctcacctccttgagatg

SEQ ID NO: 279114 - DNA, 397 bp, Glycine max
  unsure (1)..(397): unsure at all n locations
ttctnatgtgcatattncatnacgaacgttctcttgcccaagacattctattaaccgaaaaaaatgcacccatatacaatcaaggcagctttgttacctagattatttacacgtgcttccaaggtgtatttgttacttacatcacacacatctccttggctaaattcacatacatgcatactccgagcattttggggtaccaaaaattgcacatgtgcacatcttggtatttctaatacctatacatacacaaatatcatgatgaatcttgactatctacacaatanagtgctacatttcatgcctttttccaagttttcgctacctaaagccgcatgcaaattcaagcatattttcctttgttgactaaaaattgattcaaatatatatatatatt

SEQ ID NO: 279115 - DNA, 495 bp, Glycine max
  unsure (1)..(495): unsure at all n locations
nnaagaccggaatcnnngcgtangctatcancgtgnaactatagaatacgnaagcctggtaatgagcctncaaaacaaagataagggaaacatatttttanattggctnntcaagggatnaattcaagggaaagccatttggctagaggctaataagaccaaaatggcctaaatcatttccaaatatgcatgtgaattaggaagcatccagcagaatcaagccaaggctattgtgcaagcaatcattgggcaaaacacaccaaatgatatgatgatggcttaaattctcacaaaggtaaacttatcacttccaaattgagctttcaaaactatcataagcgacttttattntcaaaacaattactcattacttgaaacatatctataattcaaagaanaatatgcaaagttgtacaagcacacagaattgacctaaatattaaactagaaaacccacaaaacttacaacattaaccaatnaacacaacctacaag

SEQ ID NO: 279116 - DNA, 404 bp, Glycine max
  unsure (1)..(404): unsure at all n locations
ttcttctctcttattntgctataaataggggaagaagtgaagaagaaaagggttcagccccttatgcacttctctctctctcgaaattgctgacgaaaattatttccgtgaagaaaatccaagccgaggcgcttccgtaacgtttccgtgaggaattacgcgaagattctcgtccgttcttcaagattcatcgatcgttcttcgttttctttagtcttcaacgggtaagtacctcaaaccaagcttttcaattcattctatgtacccgtggaggtccacattgtgattcatgtatttttattcttgttatcatttatattctataccccctttagacgtgcttaagccatttatttaagtcatttctcgcctaatctaataataaaatatatctccatcaatcc

SEQ ID NO: 279117 - DNA, 432 bp, Glycine max
  unsure (1)..(432): unsure at all n locations
ctatccttatggctngcctccggattgcactccccgttctcccttgatagatctaagccaagcccctactttttgagggcaactaccgccttatgacaactatcccggacaagacgatggggaaggagataccccatcttggccccctgctcaacctcaaagatccgtcccccattgaactacccccaccgaacatagtctgccatatcccaacctcacccacacccgtaaaagaatcttgtcccttcgcggaaaatacggaaagattgaggcgcttgaagaanagttaatagccatccaaggcctttgcaattacccattctgggatttacaagattattgtctgtgcccaataacgtccttcgtcccagttcaaagattcgactttgataagtacaaaggaccacctgtcctaagggcatccttggattt

SEQ ID NO: 279118 - DNA, 406 bp, Glycine max
  unsure (1)..(406): unsure at all n locations
tcttcttgtgtcctcaaagattatacatatataggacccttgacaggactcctataatactgatacatggtgtgattaacaagcttcacacactctaggtacgagggatttcaatcatggaccatatgtatatatatacgcgacgcgacatacctgtcatgaaaggttcactccaccattccacgacctatatggaagcacattgttatggaaacacattgtgtgtgtgtgtgtttgttctaaggtgaagctgtacattctaatattattttatgcataattaactatgcatgcacgacgcacgcattaaagaaattgagtntattgaattctaaaactagtaaatttaagaatttaatctttatcccaataattttgttaaaaataatttggcatttactaatat

SEQ ID NO: 279119 - DNA, 441 bp, Glycine max
  unsure (1)..(441): unsure at all n locations
ggattttaactggatcatgacnncgtgaacatagacacnggcctangtatggtntagtgaggcggaggagagggattttnttttttnnggnncccaaaanaaaggatgggggtaatctttgaaactacaaatgctggattaggcattctgcaagcatgagtcaatatgagataggaaatttcattttgcgcaacctttgacgctgaatgtaatttttctatttacatttaaagaatcctctagggatacgggggacctatataaccctggaaaattgatactgtgatgagtctctgaaattggcgtgacggagtggctttggagccttgacgaatatgtgtcagggacggattcctaaactggggtgttattcatcatgaatcatggatttaagattggttctatacggggtggtgagctccaggaaatggtaatcttccg

SEQ ID NO: 279120 - DNA, 405 bp, Glycine max
  unsure (1)..(405): unsure at all n locations
ttctntatttaagacaaagaaatttaagatattcaagatggatgattaagacagtctatagagtcttagaaagggtatattaaatacgaagggaattccaattgaagtagcaaaaagtttggccaataattattaagttaaaaagtctttatcaacaaatttatctctggtaatcgattaccagaggatgtaatcgattaccagtggccaaaactaatttacaacagctattaaaatttgaattcaaaatttgcactgtgtaatcgattacacatatatggtaatcgattaccagcagtttctgaacgttttaattcaaattttaaagattgtaatcgattacatatatactgtaatcgattaccagagcagattttcagaaaatattctcaacaatcacatctt

SEQ ID NO: 279121 - DNA, 261 bp, Glycine max
  unsure (1)..(261): unsure at all n locations
ngagtcatcctcaactcactttggaggctgttttagttttattgtattangggttccagttttcaaaattaagttaaaggttaataattcgtactttctaaagtaagcattagaaattagaaaaaactgtctttatctattttaatcccagttgctgtagttgaataaataggttaaactatagtattccatgacatgttagatccgaaagcacatagtagaggtaaaaatacgtagtaaatgtgtatgtcaattgttttt

SEQ ID NO: 279122 - DNA, 156 bp, Glycine max
tgcaagcttcttttccaggctcatcttggtggtgaagctccgtcttccatggcttattccctactggatggcgcctcttctaacctcttctgctttgtcttacgctgcatctccatggtggaaaatcaccattaacaggatctattgaagctaaag

SEQ ID NO: 279123 - DNA, 573 bp, Glycine max
  unsure (1)..(573): unsure at all n locations
gggnnnannnnnnnaaatggttgaagcctagnnagtacgntnctncnannaacngcgacacnnatngaactactnaagcccccgaaactnnngagcgaggagggagagcacaattgttccactttgannatttctagnnggcncnncagagagtcttaaagaaaggggngnngggttgaatccaacaatattaccaaaccttttttcccctaaataaanaaatctaatcttacctttttactttaagttatgaaattccccttaatcaaccaatcttctttaaatatttaatttcanaatgaagccaacttgaatattgaatattaaagcanttattaattaaaggaagattaacgggaagagaaaattgcatactcaagtcttatacttggttcncgccacaccccttgtgcctacgtccagtcccaaagcaaccccgcttgagagttccactaccttgtaaattccttttcacattcctaaacacacaaggccaaccctccctctgtgtttaaagattcttacaacacaaaaactccagcctcttattccctgatagatagaaaacaaaan

SEQ ID NO: 279124 - DNA, 382 bp, Glycine max
  unsure (1)..(382): unsure at all n locations
agctnttctatctaatntttccagaaattaactcataggagaatttgacgccttattaatcctctcataaatatctatggggaaaaaaatccccaaagtcttaaacatgggtcaagccctaatgccttgtataagtattgatgctaaattatattgtgggcttctgaaatatatattcttatcaaataattaaaaaaatttgttaataattaatgttgacgaaatatactgcaattgagcatgtcagttatatttgtgagactcatttagtacaaattttaaaattggtaaattggagaaaaaagttactcgttataaaacaagtgaaatatttaaattctaaataataattatgtagtttaattcttataattgtgtacta

SEQ ID NO: 279125 - DNA, 481 bp, Glycine max
  unsure (1)..(481): unsure at all n locations
aggggcnnnnnnngaggtgtgtttgagatcatagcaatagcannncccatanaatatnnaatccncangcttagacattgnnggcactgagcatgtcctatgactgattggattttgnancagccgcaactttcaaggagtgatgaagacattaataaatcaataaatcagtcaaataaataagtgatgattatgtcataaatgttcatttaggtcaacgttaacctacagcagctatttacaaaccactcctgacactttttgttttctgacgcccaaaacttttaacagagcatacagatgaggagctcttgaaacacccgaaacaacgccgttgctacagaaaagcattaaacgactacctccagggagggaagattactcatccttgaaattaaatgaaccttgaaggatctctaagcgcaatatgggtattctggggggtacaaatgactaatgtccatggggatctcggatgatn

SEQ ID NO: 279126 - DNA, 477 bp, Glycine max
  unsure (1)..(477): unsure at all n locations
ngggtgttgactgaatcgatgctatgcannnacggacacttagaaactcagctcggnnaccccttcggactacgtgaagattnaccgttttgattcttcncnngggcngncncatgggnngagccgcattctctaaaagcaaccgatgcatacatgtgaatgggctaataccaggaatgttcagcagggtccagcctataacactcttatgcttcttgagaactgataacaacttctcctcttgctcatcaacaagggaggcagatataattactgcacaacgtttggtctcatctaaggaagcatactttataattgatggcagaggcttcaatttctggagtgagcggctcgataatggaacaaagagatggttcctaccctgtcctctaaagaaagtaaaggtttggactttctgaacatggtagtttatctgctctagaaatcaattcaaaggtaaacatccaaactttttcg

SEQ ID NO: 279127 - DNA, 53 bp, Glycine max
  unsure (1)..(53): unsure at all n locations
agctttgttaatngttcaagctcccttcccattncagatgacgggcttaaata

SEQ ID NO: 279128 - DNA, 214 bp, Glycine max
caatgtaattgattacactcttgatttaatcgattaagtgttcttgatcacttttgggaacacttttcagaatgatgtaatcgattactatatcctcgcaatcgattaaaccagaaactcgaaaaacaatcatgatctcaatttgagttgtgtaattgactatgaatatatgataatcgattaaactagagacatgatttctctacaagttatc

SEQ ID NO: 279129 - DNA, 248 bp, Glycine max
aaaaaaaaaaaaaataaagagaaagaaaaaaaaaaaaaaaaaaaaaaaaaaagaaaaaaaaaaaaaaaaaaaaaaaaagtaaaaaaaaaggagaaaaaaaaagaaaaaaaagaaaaaaaaaaaaaaaaagaaaaaaaagaaaaaaaaaaaaaagaaaaaaaagaaaaaaaaaagaaaaaaaaaaaaaaaaagaaaaaaaaaaaaagaaaaaaaagaagaaaaagaaaaaaaaaaaaaaaaaaaaaaaa

SEQ ID NO: 279130 - DNA, 151 bp, Glycine max
  unsure (1)..(151): unsure at all n locations
ataaaaaaattgacatatactntaattatgagtcttctcctcacttatatgatatggactcaactttttattttactcgatgtgaattcacctacacttgactcagaacatctctttgcatagaatgaggagaaatctattcaaaacatca

SEQ ID NO: 279131 - DNA, 272 bp, Glycine max
  unsure (1)..(272): unsure at all n locations
agctttattgtattatctgtggaaagcacctgtaccagatgatgaaagtgatgaccaaattgacggcgacagcgacgaagtctatttcattgaagcccttaggaaaagacgggaccgtgaggcgccatttggcagaggagattccgattgtggtgcctaggtacgccatcaagcctctagcgacaatggcattggaaagtacggaccanaggtgacgcggaggtaactaaagtcgccgccagcgacgggcatgtcgactacaaacttggtgt

SEQ ID NO: 279132 - DNA, 246 bp, Glycine max
  unsure (1)..(246): unsure at all n locations
tatatcgagacgctcgaaatngaatgttgaacctttgaacccattcaaaccacaataactttttactcggatgtctgattgagtcncgccatatatcgagatgccttgaaattgaatgtgaaacctttagacaattcaaaaccacatactttttactccgatgtctgattgagtcccgtaatatatcgagacgccttcaaatggaatgttgatggtctgagccaatctaaaccgacataacttttt

SEQ ID NO: 279133 - DNA, 229 bp, Glycine max
tgttgcgtaattgtaactcactcattcacgttctttacgactttaactcataaatatgcgtgatgctaactcattcatacaggcccttatcgactttaactcataaagttgcgtgatgctaactcaatcatacacgctatttacgactatcactcataatgatgcgtgattgtaactcacatcatcacgctgtttatcatataacatcataagttgcgtattctaacta

SEQ ID NO: 279134 - DNA, 212 bp, Glycine max
aggacaggggggttaattaagaaaacaccgcccccagagaaccagccaaggccatgctacgagtaatggtttagggcaaataatatctgagtgcacttctcatgttttgtatcatgggtaagattggtccttgaatttcctaaaaaaaaagttaaaaaatccattccaactattcgttcttcatgactctacgcttcttattacatatcaat

SEQ ID NO: 279135 - DNA, 480 bp, Glycine max
  unsure (1)..(480): unsure at all n locations
ggaagcctttccattgatnttcaactatcactacacacnagagcgcngctngnaaggacagatctaagcatacataattctttantatcatatgcatacangatggcttctatgtgttgtcgttccaaatcattcttatggcattatgcccgactaaatgtgtctctntttgaattggaatgggtgatgctgagcaattnttcatcttgaaactctctagtactntattgatatatgttttctagaacaagcctaatagtccttgtgatgtagctctgaatatttatattcctatcacatagctcggctcacccatatccttcatttcagaattactaaagagaaacttcttaatctcaccgaaataccaagataattngttgcacgcaaatatcataccatacagaataaagatattccttatttcactgccttgaatatatcattgtcaacatcgatcctttaatcaaagangcatgt

SEQ ID NO: 279136 - DNA, 285 bp, Glycine max
tttctttttgccaaaatcctgactcaccataaaccttgacccagggtgagaatgtcaatccttaccctcggaagcaaaaaaagaatagaggggaaatttccaatcaaagaaaaagagaacgaaaatttccaatgaaagcaaaaaaagaaaagaaagaaaattccccaatcaaagagtgggagaaagcaaaaaaagaaaagaacgaaaattccccaatcaaagagtgtgagaaagcacaaagaagagataggaatattcccaatcacagaatgggagagagtaaaa

SEQ ID NO: 279137 - DNA, 314 bp, Glycine max
  unsure (1)..(314): unsure at all n locations
ggaatacttacttgttggtgatgaataatttcgcttatcggaatcgaaaaatgcaaaagatagtgaccctagggctgcaaactcgtaaattccgtgggtattgcttttgaatggggggaaaagaagtttttgaatgcaaaaacgtcccccttcttcattttttatatattggtgcaggggttgctcgcccaagcaagctcagctcgcccaggcgagctaacctgcactattttttttttacaaaagggacgaatgatttaagaagcgactgtacacgggaatggctcgcgtgaggggaccanagcttttgatgc

SEQ ID NO: 279138 - DNA, 368 bp, Glycine max
tgtcttattgttggtaatcctaatattctactccaagcgattattctattttaagacactacactacaattgggtcaagtttttttaagagtcaccaatagttttgggcaacttttgttacagtcacgaatgtgataatgttaataaaaatgagctgataaattaactaacaacttataccgtttaagttgaatttaaagttgaaaactgaaaacttgaaagcttataaattaatttaatccgtctaattagaaatattttttaagattaactacgtaatatataatatattcttagtattggaatatatctttaaaaatttatcatttctaaaaatagaataatatttctttaaaaattatatctta

SEQ ID NO: 279139 - DNA, 405 bp, Glycine max
  unsure (1)..(405): unsure at all n locations
tgacgtgcgatttgaatcccatgatggataaacctgactttttattatctccatttggccacactttagttagatgtctataattaaaacttggtccattgatcttttatttattagtctatattataagattcaattttttactttttaaaaatactttntaattcaaagataattttaaattatataatttttgtccttaagaaaattgttttactattttttaaaagtaaaaaatataaccttttaaaaaaatattaaaatcattaaatgaccatttttttactttaaacagactagttcataacaattaatatcaaagtagtgtttagcttcgttctgccgtgtaaagttgaagcaaatgattggttgaaatattaccgtccaaagtaaataacggaatct

SEQ ID NO: 279140 - DNA, 393 bp, Glycine max
  unsure (1)..(393): unsure at all n locations
tacctttttaatttgaattaaaacgttcaataactgctggtaatcaattaccatatatgtgtaatcgattacacagtgcanattttgaattcaaattttaatagctgttgtaaatcatttttggccattggtaatcgattaccagagagtaaatctcttgaaaaagactttntaatttanatttcttggccaaaccttttgctacttcaattggaattcccttcctatntaatatacccttcctaagactctagagactgtcttgatcatccatcttgaatatctttaatttctttgtcttgcataaatctttgagaagcatgtgatccatgtgatcctttggcatcatcaaaacattcagcttgatcctttgtctacaatctcccccttttt

SEQ ID NO: 279141 - DNA, 352 bp, Glycine max
tgagatgaggaagtgttgaagggtgaaacttcttgcttttattgttgaccacagagtggtacctggagatatgtcgtgggggtcaggagaccttggggacgtcaggaggggtgctattgcccaaaaccaagcttgaccaatcccgacccaacccgggcatagtcggtcagtgagaacctgtgatgtacctaagcaggcgagctcctggcagtcaacagatgaaaggaacaaagaccaaaaagcaaggaggcttgtggtggctggccaactgtgaaacttgattgatatgtgagatatggtctctggtaatcgattaccaagggtgggtaatcgattacaaggcttaaaaatg

SEQ ID NO: 279142 - DNA, 327 bp, Glycine max
  unsure (1)..(327): unsure at all n locations
tgtcttgcttctntttctggtgttatgttttggtgtaattgattactgcctcgttttaatcgattacatgttatggtttatggcttcttttgcctttgtgttcttttttaatcgattaccttatgttttaatcaattataaaggcctcaggggagtttttctggcatatttaattgattatgcctgcattntaattgattactgtcataccctaatttcgtccggngattattatttgatgatatacaacctttgattggccgcttcgagatatttggcaccctttgttgcacaatatgtgaagtcccgagacgtgccgaaaatcaa

SEQ ID NO: 279143 - DNA, 382 bp, Glycine max
  unsure (1)..(382): unsure at all n locations
nttggaggaagcctcttaatgaagcttctagataaaactctttgatctgcctcgngaaaaacgctgcccagctttcgttaaccgttggatcttctcgaaatttggtttacaacttcacatgacaatttaccatgatttaaccgttgggatcgttgagaaactatctggagtgtgatagaagcgtccgttcccgagagcatctcttatttaagcatttcagcctttgctttcttgtagcttangaaaaatgtcatttcttcttctttctttcttccaaatccatttctaaagttacaagtactttctccatcacccacattcaccattagccaccacaaaccatcattgttctccatttgaaacccacaccgagaggaaccct

SEQ ID NO: 279144 - DNA, 346 bp, Glycine max
  unsure (1)..(346): unsure at all n locations
agctntgttaaaccaganaacttcagaaagcttttggtacaaagaagaagaagaagttcaaagagattcaaggcttgtaaaggattgattgaataagtgtaaaagtttattgaaaggcaaaacaaagccttgcttttaaagactcttcatgtctggtcaagccaaccatttaaaagagttataactttanaanaaacttaaaccaatttgaaaaatcaaaaacctttgaagaagtacatcttttgattattcagaaacaacactggtaatcgattacaaatcagtgtaatcgatacacaagggtttatgtgaaggatgtactcttcacattgatttgatttcacgt

SEQ ID NO: 279145 - DNA, 365 bp, Glycine max
  unsure (1)..(365): unsure at all n locations
ntttctctgtacacctacattcctatacacaaaatattttttctctatatccacacgcattgaacaactctttctctttataccaacatggtctatataaaacctctattccttttcaaagatttctttttcctttttcaatatacactcgttatttatacaaaaaatttctttatatacactcattgctcatatacaagaatttcttttcacacattgtttatatacaaaaaatctttgcacacatgtgttatatacaaaaactcttatcacacatttttttatatacaacaacccttttcacacattgtntatatacaaaaaatttcttttcttttctttatatacagatatgacattttgtt

SEQ ID NO: 279146 - DNA, 497 bp, Glycine max
  unsure (1)..(497): unsure at all n locations
tgctattaaannnnnnnnnnnnnnnnnccgccctttaactgangctgtatgnctgcgaannanaaacnanccgcngcnacnnggnngcangnaggtggcaaagaaggcatttatttttatggngancnacagaagaacggagagtatggactctagcaacagggcaaaatattgatcatggcaacctgagttactaagttgaccaatgcataaagttttccctcaagcttnttattttgagtagatgaagagaatctgtggcaccctatggactcctctaaggacaacagcatcatttcttgcactgaattgttgtgagtgggaagccatcttctcaatcaagattctagccacagcatgagtcatatcaccaagagctcaccactggaacataatcatactctctcatgttgctagacctatagaatattgagaagagttgctagaatctgtggtggggcacttgacacattgtgaatcttccacactcatacacg

SEQ ID NO: 279147 - DNA, 506 bp, Glycine max
  unsure (1)..(506): unsure at all n locations
tgggactnccnnnggggnnnnnnnggggcgtccccccgatttccncgaactncntgaatagaaaacaagctcctcaggacatcaacaacaataagttaaatnnggtttaattttttaatatataagaactnngatgtctagccgtgatttggctatataatatgaccattgacaattaataattcttttaatttgctaagattgactgaaccaataataaataatgtatatgacctatggggttttatatatttgatataatcatgttcctggctcatgatgggttaaaattttcaatgaatgtctttgtatgatagtcattgtgaatgtttattattgtacgcactttggttttttgtgatgccaanggggagagaaatanggattatatcaagactcacatanngtantaacttaatttcaagtgaagcttaaactcaaaaacaanggtgtagatatggacaattaagtgagtgatcgactaggaaaaaatatgtgcatgtgtn

SEQ ID NO: 279148 - DNA, 441 bp, Glycine max
  unsure (1)..(441): unsure at all n locations
nnnggatgacctangatntntatgnacatncannnggacncgggagcctcttagagnggaccgtggggcaggcaagcagggttctttctctcnaggaacacactctcacggcacgtgtggatccctttatacaccatacatccaaggtttcttcgggtttttccttttcctcaaaagaagagaaaaagttagttatgacttatgacgtataccagatgatttgtgttacagtcctagggggtggtggcaactctggtaggtctgatcgctaaggtccctccatgtgtatgagccatgcctgaaattctatttacttatactagcgcagaaacattctcccactatcatatgtggaagcatagatttcaacccgaaggttcaatggaatcggcgtcaccggcaatcccttgtcagactgatagtggttattgagactggctg

SEQ ID NO: 279149 - DNA, 483 bp, Glycine max
  unsure (1)..(483): unsure at all n locations
nnnttgcggcgaggatcgacgcgttacnccnnaaannnnagcttncctagaanaatccttaaagaggctggagctaagctacatttacttttctattagctaacctcacctcctggagatgagaagctgaacctaacctccacaccccctatattaaataacctcacccccttgacaaaaaccttgaaattcccaaaaaaggtccttattacaaaaactactcaaaattccccgaataccatggctaaaaccctatcttactaaaatggccaaattacaaggcccagacgaaggaaatacctattctaatatttacaaagaatagcggctcatacttagcccatggctcgaatctaccttaggctcatgagacnctanggcctccntggatctctagccatctacttggagcttctacccaatgccttgggngangattgatcattcctccccttgaaaggattgactcnnatctgnggtctt

SEQ ID NO: 279150 - DNA, 261 bp, Glycine max
  unsure (1)..(261): unsure at all n locations
tgaatgacagtcttatgagacacacttcanagttccacttctctccctctnttattccttcaattntgtgctcccctccttctctctntattttcctccatcanagcatccttttcgagcttcttatccaaggcacattcttggtggtgaagctcttcttccatggcttattccctagtggatggtgcctncnctctcctcttctcctttgccttccgttgcatctccatggtggaanatcaccattgaaggacctcattg

SEQ ID NO: 279151 - DNA, 480 bp, Glycine max
  unsure (1)..(480): unsure at all n locations
nccccttaggggcccgtctatnctntcgagtgcancnccatngacaaggctngcggatcctatagagggacttgaaggcatgtattcttatatattctcgaatatcatgacttacaaaatgatttatcaaagaatcactaataaaaattgaaattgatgtttgattcttctagtccaaaaattagaacttgggactattttccatttaattgtcggactggctcctacgactttaattcaatanacagaatacatcatcgttttatattaagtaggtaaaatttaaggatgaaaatcgaacttgaattgaactaatattctttaagaataattacgacgaatgaagtttctatatgtcaaatgagtttcagttcagatctaaataaaagagtctgcangatgtttactttntaatctgaaatacacacacatcattattaacttcattcaaactcaacatttcacaccttatattatagt

SEQ ID NO: 279152 - DNA, 431 bp, Glycine max
  unsure (1)..(431): unsure at all n locations
taacacactctccactgttggtccttattttattgagaattataaaatcagaataatgactcatcatatgagtagttggacctgtaaaatttgtgatttttaagaaatttgagccaacaaaaaagagtgttcaagagaatgtgttagagacagtgttgctaccatttctctgtttaggaatggtgtttgtagttattagtgaaaatagaaatagaaaatattttccttatgtcaaacaggcttctgcattactatttttagtttttacaacattatgatagatcattatatattttttctttctctaaaacaaatgatttgtttattgtcttgnggtggtgtatataaaaactgatcaacacantttacttttctttttttgcctgttcattccaatgtacaaatgattggcttatgatgcaacaaaatct

SEQ ID NO: 279153 - DNA, 277 bp, Glycine max
  unsure (1)..(277): unsure at all n locations
ggcccacatgggcccaatgctagttacaccccactttgatgagtgcatccgccctccagaaatgtttaaatggggtcagatgggcccaatgctagttacaccccctagtttgttgagtgtagccccccagaatgttctagatgggcccagatgggcctaatgctagttgcaccattaagtgtgatgagtgcaaccccccttcagaatgttcttgatgagcccagatgggcccaatgctantgacacccccctactttaatgagtgcagccccctatt

SEQ ID NO: 279154 - DNA, 361 bp, Glycine max
  unsure (1)..(361): unsure at all n locations
aagcagnactccttgggcctgagatgctacaacaaattaccgaacaagtganattgattcgagagaaaatagaagcatcccaggataggcagaagagctattatgaccgaaggacaaagccattagattttctagaaggagaacatgtngtttttaaggtttctcctgtaactggagtcggaagagctctcaaatctaggaagctgacgcccaagtatctgggtccgtatcaaattntgaagaagggtgggcctgtagcttatcaaatcgctttacctccgagcttatcgaatttgcaccctatgtntcatgtctctcaactgaacgatacaacccggatccatcacatgtactcgcactg

SEQ ID NO: 279155 - DNA, 257 bp, Glycine max
  unsure (1)..(257): unsure at all n locations
aaaaaatcactaaaaaggattttaaggttcgatacctcagtttttctcaccaagtaaaaatgggtcattttaaggtccaacgccttaaaaggacatccttccaagtaaaaagaatcgcttgatttcccctttagaaagaactacgtangtctgatttcctcttcgatggagggtacgtangagcaagaagcccgcttttgtcgacctcaaaaataaaaaagaaataaaatttagatcacaatttccacattctaatt

SEQ ID NO: 279156 - DNA, 428 bp, Glycine max
  unsure (1)..(428): unsure at all n locations
atgcctaatcatttccaatgttatttttatctctactgagttttaaaagattggctaagattttgttaaaacataagcacttagacaatgaaggaaagctggagttgctgcacatgatgtccaacgttatgtcaaggaataagatcgggctacacaatgcacaaggcaagataaaatgtcaaatgaagaattgaagttgcaggatccacgatgtcggatacaatgtcctgacatcctgcccgaanatactggagttgttgcacaatgcataagtcaagataaaatgtcaaatgaagcattgaagctgcaggatccacgatgtcggatacgatgtcctgacatcttgcccganaatactggacacataaatctgttatatctttaacagattattgtgcagttagcaaaagattagatgatctatcttt

SEQ ID NO: 279157 - DNA, 295 bp, Glycine max
  unsure (1)..(295): unsure at all n locations
catggaagctcctaatatctcccacactttttagggtgagccattcttggatggccttgattntctcaaggtccacttggacctcatttctaccaactacaaaacctatgaaaactatattatctacacaaaaggtacacttctctatattttcatagagggtgtttttcctaatgactgaaagaactagcctgagatgtcctaagtgatcatctangctcctactgtacactaaaatatcatcaaaataaacaactacaaatctacctatgaaatcccttaagacatgatgcat

SEQ ID NO: 279158 - DNA, 495 bp, Glycine max
  unsure (1)..(495): unsure at all n locations
nncccgttggaactgaangatantctaacatanaaaccangcgacgcangtttggactcgacccgactatgtcggcagctctatattttgtctacagaccccatgtgcgtgcaggcagagtactggaaagtgaccccatcttcttgagaggcttcacatattcagatgctctgagtatggagtacacttaaagggagaacacaaggtgagagccctactgcaccgtgcgataatggacgcagtcgccatctggtcttctcaagtccctatgagagctccttaacacatgaaagctctggcagcactgccttcttgaccgtcttcaaccgaagagagacctgtctaatatatgttgaatcaatacattggatttcgccgatgaacctccgcagtgatgcataagaatagatcactcactgttgcatggttatatacagcgctacactcacgtgcagatgatgcgctgtgtacatcattgccctgacgaatggaact

SEQ ID NO: 279159 - DNA, 275 bp, Glycine max
  unsure (1)..(275): unsure at all n locations
ggtcttcattcttgtttttgcgagctgattttagccttagttttactttagttattagtcaattcaattaagaaagagagatcccaaagagaaacgtccgattgcttttttggtttattttactaaaagatatttttttattattatattattattttacctctttntggtttccaacgtggttacgacatgaccgaacggtcagatttcattntaacagaagttaacggatattacaattcaaatgatcggtggaaatttattttattttttga

SEQ ID NO: 279160 - DNA, 443 bp, Glycine max
  unsure (1)..(443): unsure at all n locations
tcaggaacacaaaatggaacttatgagactatttcaacatgtatgattatgancaaganaaagaaagaaattgcatttaaagcctcatcttctattcaagaagaaagtgacagagaagacttgaatgaaatataagaagatgatgattttagtttcttcgtaaagatattcaacaagtttctaaggaacaaaggaaatcaaagaagaacaaatttcaatccaaagaaaaaaggagaaaactctccttctgttccaaagtggtatgaatgtaatcaacctggacatctaagagttgattgccctagtttcaaaaaaagaatggagaagtctgacaagananaattcanagacaagaaagcatagaaagcttgcatcacttgngaagacaacgatatagattcatcgggagattcagaaaatgaagtcgtgaatctgagtctcat

SEQ ID NO: 279161 - DNA, 230 bp, Glycine max
  unsure (1)..(230): unsure at all n locations
agctttattcaccgccgnggggctttcatcgttgtcatcttctcatgaccatcgtgtcactgtcaatgtcgaagtgtgaactcctccaccacaagactctcatcattagaagctatgaacccatctcttgcattntcatgtcttctttgttgaattttgtgggatcagagttggtgtggttggtgatgacattggctttatggtgcggcggaaggagccgtaaggtttgt

SEQ ID NO: 279162 - DNA, 174 bp, Glycine max
  unsure (1)..(174): unsure at all n locations
taactactaagacacgatgcagagatttattgctgttatattaaccagagnnaagccagacgcatatgcgtgcgtcgacaagaacattatgaacagcacacaggaaacagactttgcagaaggtcagtacctgcataacatgtaatacatagggtcagatactctgcattgaca

SEQ ID NO: 279163 - DNA, 395 bp, Glycine max
  unsure (1)..(395): unsure at all n locations
ntgagacgcatgtganactntggcatcatcaaaacattcttctttattctttgtctacagacttcatatgaaacaatgcaatgtaatggaaagttgtacaatgttcatgacattctttccctattttctgattttgattttgatttaaattttttggaaaacacaggttgattgtccttttgaaaaaggtgataattcatgcaacctcatcctatcttttgcaaatctctctgggaactccctcagagtgtatgttctgtttgatttagtcacttgaccattttggagtgacggcaatggagtcgttttgatgtttaatcaatccattgaaattccaggatttgtcccccccccctttttttgtttaanaacatcgacgggtgagaaatttttat

SEQ ID NO: 279164 - DNA, 331 bp, Glycine max
  unsure (1)..(331): unsure at all n locations
ttcatccctatgagatgttgttgaagtattggcgatcaaaattgccattccttggattatagaattgaaccaagctcatgcttttacaaaaaggttcatcaagtcaagttgaaatatggaagtaaccgtcttgcaaaattggggcaaaagatgaatcgagtcacatcactgcttcgtctactgccaaacatatttangattatngatgtccttgttactttcagtttcaccttgacaaagatgtcatggaccatgttgaaaatctaaattgattcaaccccatatcttgcgtaaaattcgcaatacttcaactgtacatcattcgcatgca

SEQ ID NO: 279165 - DNA, 132 bp, Glycine max
tttttaccctttatatattataaacacacacacatatattaccaaaacactggttagaacaccacttatacacacagtgatgttaaacaaaccatattacaatatatacaatttatgaatacgaaaagctat

SEQ ID NO: 279166 - DNA, 215 bp, Glycine max
ctaagcttgctaagttcggtcccagattccaatatacatacactcatttcttggttcaaagaaaccccataaatttccccaaatagatcaatcctttagagagtaagctataaacatgcacaaaatctgcaagcttcacaacacaaccctatctagctagcgctagcccctctcattggggcattggttgctacactcatgaacataaatacctg

SEQ ID NO: 279167 - DNA, 434 bp, Glycine max
  unsure (1)..(434): unsure at all n locations
gcttaagatttggataagggatgatgtttggttcacttattttattgttcgtgacccattgatgaaattctccctgttgtttatccttttagacacacaacaattggtatcaaagctgatggttcgacttggtaattggctcagatgagtaagatgactatgacaaatccatggacatggagatccctagtatcgaaagtcttcttgatgggtgagttcgtgcatggaggccangtagcangtcccgcaggtgttgtaatggtgcaaggtactagagcatattggcaacaatgactagacgagttanggcaatcacagttaagctctaatggaaaccattggatactcttgggtngaaaatgacttttgctcgaaggagagactaccatgtggaagagacttacacttaagggggagattgttaaaatacaagt

SEQ ID NO: 279168 - DNA, 352 bp, Glycine max
aggggggagatcaatctcccaattcaaatcaaacccaatgtgtgccaaataaccttccaagtaatggactaaaatcctacctacaactgctaataaggccggccttggattcattcggtgggggtggtcccgtcaacactgcaccagaagttaaaatttgtggtggaggacattggatatagtttcagagaataaacatacttgtaagttgtcatcttcatgcctatgagaggctgtaaagaacattggaacatctttgaacatagaagtgtgagcatgctacgtggagtctcccatgcaccggctcattatgcacttgatgtggtcagtatgtaggcacggattgaccaag

SEQ ID NO: 279169 - DNA, 492 bp, Glycine max
  unsure (1)..(492): unsure at all n locations
nnttttaccggaattaganagcngncntcnngaacatnaatactaagctaagagaatagtgatgataaaatggttttttattatgcactcatgtagcgccgcgagacctcgcgaagaagaattccttagcataacgatcctcccagtcacgatgtggttttcattcctggatctaacaatcaatttgagcgatccttcgaccttgcactgaaatcggtgtcgaatgataaaagcattccccanatgaaattanggtttgacaataggcaatgtggggttgttgtttaaatgacgcccatgttttagccttagtaagagtcaagggatcatggtggatgacgccacanagttcgtgcgggtttgtcagagtttgtctccatgctntcctggcgagtgcttcccttatccttcttaagttattggatctttaaagtggtggtgaatgcttntattcttcccatttatcttaacttaggataataatatgggaat

SEQ ID NO: 279170 - DNA, 376 bp, Glycine max
  unsure (1)..(376): unsure at all n locations
catgcctcgttgaaattcaaaggcacgacattgatgtaagtgatattagtaaaaactttataccattntattctaatgtttaaaaagggtacattccaactgcagggtcccatttaacatacgtgtggtgaaaatttatgcaagtcgcacatccaacagatgaaaggatccttctgtccttcatgaaattacttctataatattgttccctttggaaaactctcttgtctggctgaagagacaggcaatgattctccttanatttattntttttagttcctataataagtgattattttcttctaaattatatattgtaattctaacaaatccctgtccttagcattttttaattcattattaaattttaaaaatt

SEQ ID NO: 279171 - DNA, 208 bp, Glycine max
gatattgtgttgcgggagggaattcccattggattaactcaccatctttcatttgctagtttgatatgacatttgttcgtggatcacctatgatgtcttgctttcatgggtaatctatatcctttccgatggtataacccatgaaccaacaaagaaattgacttatatttgactcttttgacaatccatagaactagtcttgatctat

SEQ ID NO: 279172 - DNA, 428 bp, Glycine max
aactaagctttgaggggccctattggtgctgctgtattatgtaattccattgcaatcccccaaattaaggactgatcataacttgaaacccttatgctctcttagaaccctaaaacaaggtcaaggatatcaaaattaggctcaggggtttattcaaataaatcattattacttttggctaaacaagggtgcaagggataaattcatcacaaattggctttttggctgagtggcgaaaataaaaagaaacatgccttgatcatatccaccttatgcaaataatctaagagtctaagaatgatgcaaaattaggaatttaaaaacagacattctctcataattaagttcacacagctcaccgggacaagataaagttattggcttaccggaccatgatctcttatcatcaagcgtaccttttctctctt

SEQ ID NO: 279173 - DNA, 318 bp, Glycine max
  unsure (1)..(318): unsure at all n locations
ccttccttttatagtgcctaataaatggctcttctactagacttgacggcctaccaaactcatccaaatcgatgtcaaaagtgttaaaatggagaatattctagtgnaattggcagccactcaaacaactctgtctacttcactacaaactntggtaaccttctcctcttcagcactattgtcctcgattcggatgagtctggtaggtggctaacgctggcataagagcccattttcaaccacttttgaagctcattggtggatgtttacctctttgataggtctccgcttatagatgatgacgattattaagaatca

SEQ ID NO: 279174 - DNA, 367 bp, Glycine max
  unsure (1)..(367): unsure at all n locations
caaatttgatcatcctactaggatgactgagacaactggggcaaatgaagagggtgagaaagagggagaaacccatgctgtgactgccattcctatacggccaagtttcccaccaaaccgaacaatgtcattactcagtcaataacaaacctcctccttacccaccacccagttatccacaaaggccatccctaaatcaaccacaaagtctgtctaccgcacttccaatgacgaagaccacctttagcacaaaccaaaaaaaaaacaccaacaaaaagggaatttgcagcaaanagcctgtagggttcaccccaaattcccgtgtcatatgctaaacttgatcccatatctacttgataattcaatg

SEQ ID NO: 279175 - DNA, 299 bp, Glycine max
  unsure (1)..(299): unsure at all n locations
cttgaaagcaacctggttggattattctttaccatcatcaaaactatgtattcatacattcacattctccccatttttgatgatgacaatcattatcaagtgaattctttcgacatcatcaaaacctgcatgaatcatattctcctcctttttatgatgccaatcattatcaagcaaattctatttgacatcatcaanacctgcatgattcacattcttcccctttttgatgacgaaaatcatttgtaggttaggagtaacaaaaaatatctatctgtatagtttactcccccttgatt

SEQ ID NO: 279176 - DNA, 408 bp, Glycine max
  unsure (1)..(408): unsure at all n locations
aataaagagaataatgcttatgccattaaatgatccaacagatctatgtgcttctctacaaggaggtttctctagctttaaaaatcaacagcttgtacagtatgagaagactgttaaaaattcatgagaatgtgagggtattacgctatcctgatcattntgctgctcgtgtgttgcagatttaatttcacagggttcaattctaggtgttgaggtcaacgtttctagaaaatcatattctactcaactggttgtcatggaagatgagaatgggaaccaaaattctgcgccacctcaaaacgaagggtttctcatcccgaatatatttactttaactataccgcangttaatgaatagcttaatacgtagcttttgatttcgtgaatagnttggttgagttttcttgg

SEQ ID NO: 279177 - DNA, 227 bp, Glycine max
  unsure (1)..(227): unsure at all n locations
ttgggattttgtgacaaatggataaagtggatcaagcttgtttggaatctttaagagtctcggtgtcggtgaacaaaaatcctacacaagagnttagccctcanagaggtctctgaccagtgttaacggcttgacaagtgtaccanatgtccaagtagtaaagactcgaaaatctgagtggcgatntttatacggactgtatcttgtacttgtgttggattatttcc

SEQ ID NO: 279178 - DNA, 362 bp, Glycine max
  unsure (1)..(362): unsure at all n locations
aactcaagcttatgggaaggcccatttgcctgagagagctgtgtacttgtttcacagaatgnggggtgagtngcagtgcaaacaaaccgtgaaatcattcaattctgttctcaatgtgattggtcaagagggtctcttcaatcgtgcattggagttttacaatcatgttgttgcatccaagagtttgaacattcaccctaatgcactcacttttaatttggtcattaaggccatgtgtaggcttggttcggttgataaagcaattgatgcttttagagagattccactcaggaattgtgctccggataattatacctattcgacattgatgcatgggttgtgcaatgaagagagaattgatg

SEQ ID NO: 279179 - DNA, 208 bp, Glycine max
  unsure (1)..(208): unsure at all n locations
tgtttgctatcttgtgatgaggaagtgtagaagggtgaacttccgtgctttattcgttgaccacagagtggtacctgcagatatgtcgcgggggtcacgagaccttgtggacgtcacgtggggtgctattgcccanaaccaagcttgaccaatcccgacccacacgggcatagtcgggcagtgagaacctgtgatgtaccttaaacag

SEQ ID NO: 279180 - DNA, 242 bp, Glycine max
cctgagacatcttaagacatatatgtctttgtgactctaacatgcatgctagtatgattagcttggcaagccattattctcatttatgaaactctatcacattaaactaaatattctcaactcgccaggggataatactatcttgcactaactatgagatatattaactaggccactaacactatgtgtcatacttggatatgcccctaaaccatgtttctaataggatcttgaagttgcat

SEQ ID NO: 279181 - DNA, 351 bp, Glycine max
  unsure (1)..(351): unsure at all n locations
tggctatgatccccaacctttgttcctttctaatcctcataccccggtcaagtgaatctaggaaaaaggaatggattggctgaactcttttgtggtttcatcaaggcaccacaggtggaaaaactcattacagaagttcataagtccactgcttagagaactgtatatntgcctgtaactatttgcttcttatttgcccctttatatacatgtataactactggttgtttggcattctatatggccataaaagttgagtaaaagtataaaaatcttcataacacataattcttttgcattattaattttttattacagttgtgacctgaccgcattaaatcctataggttn

SEQ ID NO: 279182 - DNA, 333 bp, Glycine max
  unsure (1)..(333): unsure at all n locations
agaaactcaagcttgnatgtggacaacattaaggacatttatgatctgtattttttgnacctnagnagatgaatcattgtaagacttgatcgctatcatatttaccttttttttgggtactatacatagaggccaaagaaactgttttggtgtacaagagtctacgactttggttgaattttccaaattctcctaccactataccgatcctaggggatggttgaagaaactctttgagcacaaacttgaacacccagtttgcaacttagaccacctactttgcaacttacaaatattaattatgcttgtgaaactaaaaaaaaggaaaaaaaa

SEQ ID NO: 279183 - DNA, 126 bp, Glycine max
caaaaagctgtcttagttctatgtgtagtgacctcgcagtctttgctccaagcctagcacaactttgactccctaatacttgagttatatattggttggacaaaaagctgtcttaattctatgttt

SEQ ID NO: 279184 - DNA, 317 bp, Glycine max
  unsure (1)..(317): unsure at all n locations
accccattgagtgactttccatgaatcaatttttttagataaaatttccctcatatagaaagggcaaggacactctgtgcttttattcaagcaacaaatgacatacttggtcgatttgctttcaacaactttgaaactttgatgcaccttcataacatattggttgactgcattcttgaccgcatctttactatcaaaatctatgtcaacatataattctttgccaacattaaaactcaatggcatctncaaaccacaaatgttcttctcatcaagatgactccaggtgatattattataatgcaaagcatcattcc

SEQ ID NO: 279185 - DNA, 456 bp, Glycine max
  unsure (1)..(456): unsure at all n locations
tactcaagctggtcccaacgctntgttcaggctctcccaaaatctagatgtaaacctagtatctctatcagacactatgctagatggcacaccatgtaatatgacaatctcactaatatacagagaggtcaacttttccaaggaaaatatgatattaatgggaataaagtgagcagacttggtcagcctgtcaacaataacccagatagaatcaaaacctttgggggttctaggtagtcctacgacaaaatccatagaaatattgttccatttccactgggtatctccaagggttgtaacttccctgaaggtctctgatatcttagccttctgacagactaaacatgcatacacaaactcactaacctctctcttcatgttgggctaccaaaacatcatcttcagatcttgatacatcttggtagcaccaggatggatgctcaaactactcctatg

SEQ ID NO: 279186 - DNA, 377 bp, Glycine max
  unsure (1)..(377): unsure at all n locations
agcttaacattcaatttcgggactcaatcagacatcgtttgaattgctattagcttttcattcaatnntgagcatctcactatattacgggactcaatcagacatccgagtaaaaagttattgtcgtttgaattggctcataggttcaacattcaatttcgagcgtctcgatataatacgggactcaatcagacatccgagtaaaaagttattgtcgattgaatcggatcagagggtcaacattcaattttgagcgtctcgatatacgaaggaactcaatcacacatgcgagntaaaagctattggcgttcgaatatgctcagagcttcaatcttcaattacgagcgtccctttatattacgggactcaatcaatca

SEQ ID NO: 279187 - DNA, 308 bp, Glycine max
  unsure (1)..(308): unsure at all n locations
gcgagtctagcagagaaaaaggttataacgttctcggctttcttatgtgggttgcaagccaaagtgaatgttggtatagcagcaaagatgggttgaagaatttagcattgccttanagctaaaggaaaaaagcaaaatgaaattggattcgatccccttagcaaagtctcatgctcaaaacttgaagatgganaaacgtgattagaaaaaaagaacccacacaaagtgattagttatattcttcgagagagattagtcgcgtaaatcaatatatattttatatcaataacatgttcttaaaaaaaaac

SEQ ID NO: 279188 - DNA, 473 bp, Glycine max
  unsure (1)..(473): unsure at all n locations
ggtatgttacctttgaanactgcactatganactaagctttattgcaggcctctgaacatgtgccacgcgctccttttttgagatatatggggcaagggctggtcaccttggcttcctttcttcaaagtggtaaaaccaccccacatgtnggttaggattgaaaaaaaaaacctttaaggaccacaccctgtaagtggccttactccacaagtccttgtccattcacctaatttgacctcaaccttattccccacatgtggacctcatatctcaggcccatgtatcaccacaccaatangagtccattgttagcaaaatgaaatctttntctagtcttttatactgcactggacataatggtccangctttccagaaagttaatcttgcgggcagcatggtctcatgaataacttctaattcttcagcatgtgatataggcttgatctatctgagaatctggattgatcctcn

SEQ ID NO: 279189 - DNA, 275 bp, Glycine max
  unsure (1)..(275): unsure at all n locations
gagcattctcgcaaaacaacgtgacccggactagtttccctatgattttacctangcgcccgatgaggtttatcactgacatggtaccacattgcatatangattgagtcttagtgtatctattgcataacgcttgtgtattgattgatattgatngatctagtgatattgtgtnttgatccttgagtacatgagtgatgtgaaaatgaatgacatgtgtngtgttgtgatgtgatagttcgtgacacagtaatggaatgccgtgagctatgttt

SEQ ID NO: 279190 - DNA, 231 bp, Glycine max
  unsure (1)..(231): unsure at all n locations
tgttcatctaaagcatacaagtccctaatattatcaaatcctanaatntgagctcctagggagcanaacaatgtgtgtctcctagagagggcatcagctaccacantttgttttccctttttgtatntataacatatggaaattgtctaggactctacccatttgatcctcttgtaacttgcttgcctctatgacttaatgatgatacactataatgacaattcttggaac

SEQ ID NO: 279191 - DNA, 312 bp, Glycine max
  unsure (1)..(312): unsure at all n locations
agctggtttgaggcctggctacaaaaattcattggtttttctctatgattcagaggtttagattctcagagagcacaaatcccaaacttatcacaatggtctttttaatacacttaggttgctcactagctttttacttttatttgcttttgaccttgttacatcaacacactttattcttttctttctctttnttttttttaacatacaacttatttgttgtgtgtgctgatgctttctctttttctttgcatcccaattagttccactcccccaaatttggggtaaatttgccttgaactatatgctctc

SEQ ID NO: 279192 - DNA, 260 bp, Glycine max
  unsure (1)..(260): unsure at all n locations
acacacccctctcataactaagctcacctccttgagaaacttccttaagaagattcctaaagaatctagagcttagctacacatacctctctaatagctaagctcacctccttgagatgagaagctagagcttagctacacacccnctataatagctaagctcacccctatgacananaacatganaataaaanaaaaaagccttatntacaagacaactcanaatgccccgaaatacaaggctaagaccctatactact

SEQ ID NO: 279193 - DNA, 306 bp, Glycine max
aactggcagccttccagccttatataaaggccacaccggattccatagtaaataacctctaccattccttttttaatcaggaaaataattaatgactttgaattggaaccttatattaatttggatttgaaggatgacttttttccattcacaaaattcaaacttaaattcatcaccaccagaagaacaaattgattttgacaattaaggaaatgtaacttgtggctttgtgagtgatcaggtcatgacagcgcttcaaactgtaaacggaggtacaaaatctggatggtggctgaagcttatcgt

SEQ ID NO: 279194 - DNA, 413 bp, Glycine max
  unsure (1)..(413): unsure at all n locations
tctctggtaatcgattacaagacttgtgtaatcgattacattctttaaaatttgaattaaaatgttctgtaactgttggtaatcgattaccatccatgtgtaatcgattacacattataaattntaaattcaaatttctaatgactgttgtaaatattttcagctgttggtaatcgattacaatcctcatgtaattgattacatgccttcaaaaatattcaaaattaatctaaaaatgtttcaagaagtgttttggccactggtaatcgattacatcctctggtaatcgattaccagagagtaaatctcttgtaaaaacattntggcttanattcattggccaaacctcttgttgttcaacttggaattcccttcctaaatcactagagatcttctagatgatgtatcttgaa

SEQ ID NO: 279195 - DNA, 312 bp, Glycine max
  unsure (1)..(312): unsure at all n locations
aaaaaaaagatgtccaaagagattcagcgtttgtaaaggattgtaagagattgattggaaaagtattcaggattgaaagaatgatttttaaaagcaaatcaaagccttgcttttatagactcttcatgttgggtcaagaagacctnttagaagagntataacttttagaaaaacttanactaattcgaaaaatcaaaaacttttgaagagtacatctttcgattatttagaacagtcactggtatcgataccaaataatgtatcgatacacaagctttatgtgaaagatgtactcttacatttgaatttgat

SEQ ID NO: 279196 - DNA, 457 bp, Glycine max
  unsure (1)..(457): unsure at all n locations
agatactcagcttgcaaatgtggtccaccaatggctagttatgagcgttgattaatttatgcagaaggtggcctggcaaggagtctagccttctccttcaagaggggttgaggcctctgcagcttaagagcctcagcctgcacaggaggatgcttctagtgacatctcagagccctctccacctgagcccttcattntttaggaggatgttgcagtacccgagccatctcctcaacctgagcctgagcctgagccatctgcaccagtgccggacttgcctatttctcaggatccaccatctgcaccagcactagacctgaacgagcatgcagaggatcattcataggatggttgacaggatctttattttcttacactttgaaaaatttatattattctgtcttcagtacattntatgtnntatgtttcaattttaaatttcagttcatagttatat

SEQ ID NO: 279197 - DNA, 378 bp, Glycine max
  unsure (1)..(378): unsure at all n locations
gaatctcatcctttaatcacattttctttttcgtaccaaaccaaaacccaattcgctaactttttacctcctttccaaaatattaattaataaaggaggggcacacnctatttangaataaattaaataaatcaaatcaaatctattgtccgaaagagcgccgttgagtttctatcctaaatcctacaatnnttcctttcataattctcactctctgcaatatttatttccttcaaagtcattggtaagttaaagacattttctttttttaattnttccccatcttagcactgctcattntattagtcttctacaattttctgcttgttatttttacccgaatctcactgccaataaaataatataattccatttatc

SEQ ID NO: 279198 - DNA, 363 bp, Glycine max
tgtctgtttcagaataaacataaaacatcctgtcactatcttttccagaacgagcaaccccaaaatcgaaaggtaatcttgggatttcagtccatttatttgacacagaatcatatatttctccagagtccagaggctcatcccaagatcccagacctccaacagctatcaacaaaaatcttttactgccctttgagcttgaatgctcacttttttgcctaaagaatttgtatgtctttcgactgggcagagacaaagcttcagtctcattaaaagcaggtctgcaatggcgtctcattgaaagcttgtggggatcctcatatacgtctgaaaccccaccaatccttgatcttggaaaacgtc

SEQ ID NO: 279199 - DNA, 299 bp, Glycine max
ttcttgtttatcagaatgaaattacatgtgtagagtgaaccgataatgatgatacctgttgcgcccaccaatatgtccaacatgatccaagcctagataatgaagtatctaaaataaatttagtgaaatgaacataattgaaattaaatcttcattataaagcataatgtaatttataacttagacaaaatacaccttttgtacatggtgaaactagttaacatacaattgagaatccttatactaaaatgaatcttaagtcttgactttcactgaaaaactaaagccaacaatttatt

SEQ ID NO: 279200 - DNA, 457 bp, Glycine max
  unsure (1)..(457): unsure at all n locations
tactaagcttataatatttgctttgtgcacggcagacaccttctttctgtanttttgtaagcatactcgaatgcatatgtagcaattcgctctgaacaaaactttgttattacctagtaaaatatgagtatcaacagcaaacataaacccatactgcatcaagacagtatcaaggtgataccttcatgacatatatacatcaaagatcacatggaaaagaagaaaaaaaactggatagaaattccaagcgaaaagaactttacataaaatgaattagccctcttgaaatcataaaatacaggaataccaaatatgttcactttcttttgctagcacgatagggaacgttntgctaacatatcaccagaaaacaatcattatttgcaaaagctctctaataaaaaataaaaacaagttatttatctatagcaagctgaatcattcaactggtaataca

SEQ ID NO: 279201 - DNA, 372 bp, Glycine max
  unsure (1)..(372): unsure at all n locations
atatatatatatatatatggatgaggtaatcaacacaatgttacggttgttagaaattaggactttgacttcgtgatctggtttcgtaacagaatcccctcatttttcacaagtactaccaatatattgtattgtcatgacttcatgacttngccccggtgcaacttagctcctacattatttgctgactgcagtatagggctaagtgatccctcaattaactaggctggtttcccagtttcacattttccatgtaattcgaagggttactatctcaataccatttgtttttattaactttcaactagatgtttggggcgattattccatattcccctaccaaaaaatcagaaacaatccctcgagattttg

SEQ ID NO: 279202 - DNA, 278 bp, Glycine max
  unsure (1)..(278): unsure at all n locations
tcaattaaggtctctaagtattaaatttgcaaatggtttctattgttncttaattttagtcaattgaatctttttcctcaattaggatttgtcaccgtttcaaatccacattatatttattattatttttaaattgagaaaataacaatccaggagaagatcatcttcccttattttggaatcacataggaattcaaatcaccccagcattcaacttcgtggttatccattctcacgccgcagaaagggttatcccctgcggatagagagactaatcg

SEQ ID NO: 279203 - DNA, 125 bp, Glycine max
cccccttgaagaaacatgaagatgcatgcagccatactatctcactcagtaaataataataaatagtgaacttgtaatgatatacgattctattgtcttactcagtaaatagtaagcatgacaca

SEQ ID NO: 279204 - DNA, 127 bp, Glycine max
agaaaccatgtggtacactttgtcataacttttgatgaatgagaaacttgggagacacacttcaaagttcaacttctcttcctctttctcttcatatgcgtgccccccctctctctctctcattctc

SEQ ID NO: 279205 - DNA, 396 bp, Glycine max
  unsure (1)..(396): unsure at all n locations
gtttctgttttccaaaccttgttcttctgcagattacatttgtgtgctatatcttttcattctcttctacctttgccaanaagaattcaacaaggactaatcgcctgaattcttttgtgtctctcttctcccttttcccaaaagaacaaaggactaatcacctgaattcttttgtgtctcccttctcccttttcaaagaattcaaaaggacacagtctgagaattcttttgattcttccctttcccttaaaaaaaagatttcaaaggactaaccgcctgagatatcttttgtntcccctttacaaagattcattggactaaccgcctgagaactttgtcttaacacattggagggtacatcctttgtggtacaagtagagggtacatctacttggg

SEQ ID NO: 279206 - DNA, 154 bp, Glycine max
tcttgcaggtgaatatcctcttaaccatcttatggagttccatattgtgtgttccaccatgaagcctcttgatgtccaagatgagcatatctttctagaggatcttcctcattctctatacggagtggctaaagatcggctctactaccttgct

SEQ ID NO: 279207 - DNA, 490 bp, Glycine max
  unsure (1)..(490): unsure at all n locations
nnnnnggggactgatgtcagttantctctgacnanccnanncnanggnnnaactgngctgtatagatgtgcgtagaattgatttatatctatatgtgtngaaatgcgatcttcctcaagcaattgccatagtggcatgcatgctancatggtatgtattttacgggttctcctcattctcctgtacactatattcactaatggtcaattcattgttctcgttaagcaagctactcacgtcgtgattgacatanaaggatatnggcatggaattgcaacaagagcagcttagagttaccttgatgtaaagttnggttgacttaattctgaatcaaaaaatgagattgagatgcatacttaaattaatatatctgaatcacattagcaggatggtcatggaatagcaacagctacctcttccttggtttgcgtanaatttaaaggttagtctaattaatataatcngaatcattgaatgtactgacatgttg

SEQ ID NO: 279208 - DNA, 210 bp, Glycine max
ccattcacaaatcaccattggaataactttaggataataattttaaaaataaaaaccttccattatttgataggtggggttaaaatgaccttctaaaaaaattactttgtcagtacataacctttttctctatcttattagtgaaacaaacaaaaaataccatatgatgtaatggtatcatatcttatcctatcatatcatatcttgata

SEQ ID NO: 279209 - DNA, 504 bp, Glycine max
  unsure (1)..(504): unsure at all n locations
naaaaaanngggagaaattcgactacgactacgtgaaataanaaactagccttgatatagctgggcggacatgatttgagacttgtaggattcaatttgggcaaaattggatgagggaaagagtggttttcgaattctgcactttatgcagaattttgctgttgaaatgtgcagcanaaattttgtataagtgcagaanaaatgcttgtatatggctgattgtaaaaacggtagtacatatggggttccngacattttctagcagatcccaacggtcaaaatgtagacttatgtactagagacttccagtaaaattttcgagtcgatccaacggttaacgaattggaacaaaggaaatgttactggggtatttgtatgtgaaaagctgtgattatgagttgtgttttgggcagagttttctgcctttgccctgttntgcttggttntgttagtccatgatgaattggatgtgaaattcttggatgtcgtgggagcttgagaggg

SEQ ID NO: 279210 - DNA, 64 bp, Glycine max
gggtgctttcatccacgttggagcggtggtgaccgtgtgggtatctccttcctttttcctcgcg

SEQ ID NO: 279211 - DNA, 215 bp, Glycine max
gatcatgcgctaagcgggatctttaatcgctcaccgctagcttcactgcacataaaatacattgattctgctaaacgggctcagatcccggcttaacgaaaactgcaatttttctgaacggcagatctcgccaagcggtagatttaactcactaagctaagtatttatgtgctaaaaaaaaccaaacgactctttcgcttaacgcgaaccgcact

SEQ ID NO: 279212 - DNA, 448 bp, Glycine max
  unsure (1)..(448): unsure at all n locations
gagaaggtgaaaatagcacttttgccaattntcctatattaatctataattgagagaagttgattattaaacacacaaaacaaaagtataaattatctattacctatatttaacaaaaattacttataatattacaaaacaaccataaaatgggaaagtttgatacaaaatacacaggttttatacacaaaagttagtcgtattcatcgactaacaactcccccaaatttacagtttttcttatcctcaagcaaaagagaacaactcacttgtcctcaagtggtaaaacatgcagtgtttatgtataaaggtgtatgtatcaaaatttattgattgcatgatgagaaagatgaagcaatgtgtacctatcacttgttttcgcaaaatatgcagccttacaaagaggagaacanaatgtgaactatacagttggatgaagttaatcata

SEQ ID NO: 279213 - DNA, 353 bp, Glycine max
ccattgtcgccaagcgcaattccttacgaccttaattgaggtccatgacgctaagcgctagtcatggcagctaagcgagattcattgcggcaatatgagcgctaagagagtccctctcagctaagcgcatgctcctctgtacttaagatgcatcattttagctaagctggccagagccaggcttagcgagagttgcagcttttctaatctgcagacctcgctaagcggacttactctcgcgctaagctgagtttcagttaaaaaaaattattttcgaatttgaaacgtcggctaagcgcacgtgttcgctaagcgagcttggttgagaaaccaaacatctctcttgctcactt

SEQ ID NO: 279214 - DNA, 221 bp, Glycine max
cgctgcttctgttaggactcaggaaaagaggaaagaaagggaccgactaaaaaaggaaaatgcttgatggttacgatgcttctcagaccagtggctgttttatggctgacttcttaactttgaactctaaactctaactactactcccccttatctactctgtgaactctaaaatcagactactactcccctttatactatactatgaaaatactactccc

SEQ ID NO: 279215 - DNA, 381 bp, Glycine max
  unsure (1)..(381): unsure at all n locations
tcaagaatcaagatcaagattcaagattcaagattcatgaattaagagaagacttaattaagataagtatgaaaaggatttttcaaaaactgagtagcacatggaattttcacaaaacatgtttaccaaagagtttttactctctggtaatcgattaccagattgttgtaatcgattaccagtagcaaaattgttttcaaaaaatttcaaattgaatttacaacgttccaattattttcaaaaagctgtaatcgattacaatgttttggtaatcgattaccagtgcctttgaacattgaaattcanattcaaatgtgaagagtcacatcatttcacttaaaagccttgtgtaatcgaatacatttaattggtaatcgatta

SEQ ID NO: 279216 - DNA, 227 bp, Glycine max
ggcttgcttgctttggttccaattgctggaacacagagctgccactctcctcaagaaaaggatgtagaatctgaaattctgataccaatgacagatgtcgtaccggatgtcacgacatcacgcttcagaacatgcagatgatatttgacagtttgaacagattaaacaagttaataacacaagagaattgttaacccagttcggtgcaacgtcacctacatctgggg

SEQ ID NO: 279217 - DNA, 447 bp, Glycine max
  unsure (1)..(447): unsure at all n locations
tgcttctacatgatcgactaccatatgtnntgtcaatgacttcatgtattaaatcaaatttgtgtggtatacctcttgcacaataagctntcaaggtacaaccaaaggaattggattgtccgttgtactaaggattcactaaaaggtcctggatgcaaccctttgcaaaaaccaaccatattcattctttcatttggctccaagactcgcactattgttgcattgaaatgagtcaaaagttctttcagggattcaactgtctactaaaggatgtcaaagagatcgactgccactgacaacttttccttgttggccacaaattaagtagtgaagagactcaacaattcattgaaatgagaaatagacctatcgactagtccactanaccaatccaacacgacacttttagtgctcctacatggaatttacagcanagagcatcattac

SEQ ID NO: 279218 - DNA, 244 bp, Glycine max
  unsure (1)..(244): unsure at all n locations
tgtttgcaagctntgtcatccataggcgtcaggatgtactgactatggtcattgggcgatcagaacaccctgattgtgtctgtgctgctggagctggtgtcacaatcaaacaacactttggactggctccaaggacctcccacatgtcttcgtccatggctcccgaagagttggagcaactgacgcanaaaatcatggaccagctagaggagtcaatcataagaaaagtgactcaacaactaat

SEQ ID NO: 279219 - DNA, 244 bp, Glycine max
  unsure (1)..(244): unsure at all n locations
tcatatgttgtctacgaatgtgggcatttgcaactttaatttaaacttgagggcctccaaattaagcatccgtgcgtgagcgttgcttaattacgaacctccctaatagatattcactccaccactttctcattttcaattggcacaatgacgaacttgttaatttctctaagctcacattcacattcccacaatattaatggagtgtntcaatatgagctttaattagaaagcttcccataat

SEQ ID NO: 279220 - DNA, 512 bp, Glycine max
  unsure (1)..(512): unsure at all n locations
aaaaatgaggaaccatttgangcatctctcnnttanaatacanaanccnnancgacttcnaannaaacagcaatacgcctgaggaggctgaggcttagttttgtnttngcaannccacnangcaggaggggcaagccaagaatgccagcggccaaagatgctcgcatanngagaagagcaaaaatgagtgatgtgtataattgaattccatcgaaaatatatttaaagagtcgctcaattgtggatgctcttacatgtaccttacaccagactcatgagagcgagattgacatataataacatctttgatattatgaactcaacgattcatcaactcttatgttatcactttctttttttctatctaagactttggtgtccaatattagattagacattacacccgtttaattcgagcttgatatgaccatcatacacataaactagaatctaanaattcccttacgacatctctaacatttagtgtgtgtcaaaacaccatatatgttccg

SEQ ID NO: 279221 - DNA, 346 bp, Glycine max
  unsure (1)..(346): unsure at all n locations
agcttacatctcgcgaggctgagagatcacctgaagatattgtgtgnatattcaatgnncnaagcnngcactctcgagcttggggtattgcccactcaaaagttctgtagataaacttgagatgcttattacaactcgatggaaccttcctanatatttggctanatcaagcatacttgacaattgccagttgatttggaattaagctagcaaaataatgtgctccaaggtctaaggttgcaagatcttgcaatgatgctatntgtatagggacatttccagaaagattattgttattgagagaaagatggaacaagtaggtcanattaccaaaatcttctggaat

SEQ ID NO: 279222 - DNA, 272 bp, Glycine max
  unsure (1)..(272): unsure at all n locations
taacacactaacactgaaaaagagagggggagaagaaaggaagatnttccctgacatggtctgacatttatgatgtggcattacgaaattgactattatttccatctgaatgttcatgcctcaggctatgcaaattgcttatatcattgtctggtgcaacaatggttgcttgctttctactgggggaactttattttaaatgttcatacacagttcacctgctaatcgtgcatctcatttgtaatttttaaatgagaatgctttctttattt

SEQ ID NO: 279223 - DNA, 419 bp, Glycine max
  unsure (1)..(419): unsure at all n locations
tcgaagccctctgtttaaggctgaggctccacacctttctttggatactatctgctgagtctgcttccttcaatcgactgtctgtggagcgcgcatacaagtatcgccctgttaaggtggtggaatctgaacttccgcggcagcagtgtgtggtttacttggatctgaagcgggaggagtgcaccaatntgttcccatctggccgagtatattcacaggcattccatttangtggacaaggggtgctcttatcagcacattgcaacatggaccaacagagctctttccattgctttggcctgtttctatgaatgcangataagggctcagttagctttgcccgtgactatgagtttgctgctatgtcaaggccaacagaggaatttgttagcaagtacaaaggcaattatgtattcact

SEQ ID NO: 279224 - DNA, 238 bp, Glycine max
ataatagcctaattttttttaattcaccaaaaataaataataaattttaataataataataataaaggtccgaactcttattccttcatttctccctaaacctttcttttcaatcacccaaccacaactctattacaagataactcctaatggttgtccactatctgcatgtttggattgaagttaaaaatattatatgcgcttttatacaaactacggataagataaataaaataaa

SEQ ID NO: 279225 - DNA, 224 bp, Glycine max
  unsure (1)..(224): unsure at all n locations
tccaatggaggaaaaaacagagagaagggggggagggggaaggaatcgaacgggacaaaacaggaagagaacnggaactctgaacngnncctcacaaacctctcattcatccaaattccactagtgtacactcccttcttgaaaacttccctgaaaactttcttgaaactataccttacctcacccccccttttaataactagctcacctccctgaaaactttc

SEQ ID NO: 279226 - DNA, 424 bp, Glycine max
  unsure (1)..(424): unsure at all n locations
acacttagaaactcaagctntcctagccaccaagaatagatcaattgcatttctgtaacttctatatacattttccaaaatgaactcatcctgttgatgaaattccattttgagtgtgttgtaacaatgttgttcttcatgtcatgttcattgtttagatcttcatgtctgcaacattcttcttttcctttagttgttgattattttttatggcttgaattttttctcttcatctagtgagcatgttgacttcttcattacaatagacaaccaaggacactntaagtcttcttttgtgctttcaagtttatcatcctttatgagtgattcatggcatccctgagtttacttcaattgttgttattttcaaaaattgtctattctaaacacacttaagcaaactcatcaataggcataaaatcat

SEQ ID NO: 279227 - DNA, 262 bp, Glycine max
cttaccctaatttactatggggagcatctgtttgttgggatgagaccctcgcttaatcactttgaggtacttgacgcccatcattaggcaatccgtgaagttccgcgacatgtcgggagttgaaagaacgtgttaagacgcaatccataaagttctgtaacatttcggaagccacagaagggatgattgtgtaatccgtaaggtttcgtgacattacaaaaagaagacaagtatcgttacataacgttacggataaagaatc

SEQ ID NO: 279228 - DNA, 368 bp, Glycine max
  unsure (1)..(368): unsure at all n locations
ctggcgggacatcttgacttgctttgcaaactgactttatacactttattctgccttcntctattggcagattgggaatgcctctaacagcacctttgtcaatgattttcttcatgcctcttaagtgcagatgtccaaatctttgatgccatattctgacttcatcttctttggaggatagacatgtggaggagtagctggtttcttgaggtgtccataggtaacagttgtcctttgatctgctgcccttcattagaacttcactcttctcatttgtcaccaagcattctgactntgtgaagtttacattgaatccttcatcacacaactgactgatgctgatcacgtttgcagtcagtcccttcacc

SEQ ID NO: 279229 - DNA, 259 bp, Glycine max
atccttggcccccttagagattttgtaaagatgtctgctagttgatcattagaactaacgaattcagtaataacttccttagaaaggactttctctcggacaaaatgacaatcaattcaatatgtttaagtctctcatggaatatgggataaaagctatatataggactgtctgattatcacaacatagtttcatttgttgagtatttccaaacttcaactcttgaagtgtttaatcccatgagacacatgtgactaca

SEQ ID NO: 279230 - DNA, 360 bp, Glycine max
ttttgaagataacatcatggatcaatgtatataccagaaggtcagtgggagtaagatttgttttcttgtgttatacgtggatgacattttgcttatgactaatgataagggtttgctatatgaggtgaaacaattcttctcgaagaactttgatatgaaggatatgggagaaacatcttatgtcattggcattaagatccatagggaaagatctcgaggcattttgggtttgtcttaagagacttatatcaacaaagttctagagaggtttaacatgaaatattgttcaccaagtgtagctcctattatgaagggtgacaaacttgatttgagccaatgccttaaaaaatgattatgagt

SEQ ID NO: 279231 - DNA, 382 bp, Glycine max
  unsure (1)..(382): unsure at all n locations
ctgaagatcgaagaccgatgaagaccgaatgacgaacgtcgaagaacggttgaaacctttgcgaaattcctcacggagaaccgtacggaaacgtttcggaagcgcctcggcttacattttcttcacggaaacaatgcttccaagcaaattcgaaagagagagaagtgccaaaggggctgaaccccttccttcttcacttactccgctatttatagcanaataggggagggtggttgccgcccagctcgcccaggcgagctcagctcgccaggcgagccagtntgcttcctccagagcaacaagcctctggatgaatcttctggagggccaagtgggcctgggtgcctatttcacccccatttttactaagtacaccccctgc

SEQ ID NO: 279232 - DNA, 440 bp, Glycine max
  unsure (1)..(440): unsure at all n locations
ntganaatataatatcttgatttctaaaatacttattttctctccccctttgtaaacatcaaaaaggccaaagtgcgcaaaacatgaataatttaatcatacacaaagcataatttgtaaaacaaacataaaagattctgaaacatacataaagaaaaacatgaataaaaccaaattgaaatgcaaaccacttagtcatataacacaaaccataaatatcatgttcagtcatactaagcaaatattaaaagaaatactaagttttcaaatgtcataataatatagccaaatacacggctagaaaacaaaatactaataataatagtaatgtctaaactgatagtggtggtggaggtaaattaagggagtcacgaatgatggtgaaatcttcttcaacctttgtgatccttgagtncatttcgtcgaatcgcgtgtccact

SEQ ID NO: 279233 - DNA, 415 bp, Glycine max
  unsure (1)..(415): unsure at all n locations
ntgcacaatttgcctaatttccaaggcttatgttgttgtctatcacccttactatcatcaacttatgagccattgctatatataaataggttaagggagggacccattatcccattcctatcaagaagcacctcangagggcacaggagattgcagctcagtgcaaattgccctagatataacttgttgattatgtgctaaagttttttctgcatcttgggaacacaaactttaatgaacaaaaaggattgttcagatccatattagcaaaaataaagccacatttttagagtcttaagattgattttgcttggttaatggtatgctaaaccaaactaaagttcagattntcctatctcatcattagtatcaatagaagccttctatcaaacaacaaaactcatttagagtctta

SEQ ID NO: 279234 - DNA, 374 bp, Glycine max
  unsure (1)..(374): unsure at all n locations
cttgtttctcaangaaaagntngaaggggatttagaagatattttggcttttacatgcccaacttctttgagtggcatttgtattggttggtaacttggatgttgcattctaatacatttcatagctgttttacatcatgcatcattatagtgtgtgcgaaggaaaatttctaagttagaataatttcctcagaggcaaaaactctatgttttaatcgattacaaaattgttgtaatcgattacacaaagtggttgagcttaaagaagtaagtctcgtatagggtgaatccattctagtagtacgttaattgaatcactgttgtttgaacaatgatgattttttcaagaatctctgcttaattgatacttctcc

SEQ ID NO: 279235 - DNA, 443 bp, Glycine max
  unsure (1)..(443): unsure at all n locations
tacacaaatgcttgntgtctctntgctaggaaattcttgcttacttctttgacaaggctcatgaggttttctccaagtgtcatgcacatacaatgatgttagttggctgttgctatttgcgccaaagcaaaattgttactaaacgaataataatattcaattcattcttttcctcttgcaagtgtttgtttgtcttattagaggctcattctcgatcacactgtcttgcattttataaactatcaatcaacaccttgtaatagaaaaanaaagggactttttaaaggtgataacatcctgtgagagagagaatataaatataaagggtaataccatacaacataaagagagaaaaataaaanagtgttaatgagaatttttttttaagacatagagtatcttaaatcattactcttcaaattaaatgtattanaaatattaaa

SEQ ID NO: 279236 - DNA, 207 bp, Glycine max
agcttcttataaattagagcgagccataagtatccaatagtctcatggatctttaccggggagaccggaaattttcttcctttccttgctggcaagtgattggaggccttttttccttaccaggattgattaaccacctaaagaaaaaagaattgacgtaccttttccttgaaaagcccacttaaattattttttccatctactcta

SEQ ID NO: 279237 - DNA, 201 bp, Glycine max
accttgttttaggcctgcttccaaaaatccatgggttttcctctatgattcaaaggttaaaatcctcaaaaacccaaatcccaacctaatcacattggtcttttaattccacttaaggtggctcactactttttacctttaattgcctttgaacctggtacatcaacacaacttaatcctttcttttctcttttttttttt

SEQ ID NO: 279238 - DNA, 431 bp, Glycine max
  unsure (1)..(431): unsure at all n locations
gcttctgagaaaacttccttgagaagcttgtgtgagagaacttttcttgttattctagagcttagctacacacacccgtctcataactaagctcacctccttgagaaactttgcttaagaagattcctacagaatctagagcttagctacacatacctctctaatagctaagctcacctccttgagatgagaagctagagcttagctacacaccccctattatagctaagctcacccctatgacaaaagacatgaaaataagaaaaaaagtccttattacaaagacaactcaaaatggccccgaatacaaggctaaaaccctatactactagaatgggcaaaatacaaggcccagacgaagganatacctattctaatatntacaaagaatagcgggctcatacttagcccatgggctcgaaatctaccct

SEQ ID NO: 279239 - DNA, 359 bp, Glycine max
  unsure (1)..(359): unsure at all n locations
agctnttatctgattttgtaaccgcccaatggtgtttgaaatggtgtaatcaataactatatattggtaatcgattaccagtgtattctgaacgttgaaattcaaatccaattgtgaagagtcacatttttttcataaaattctttgtgtaatcgattacatggtttgggtaatcgattaccagtgacaagttttgaataaaatcaagagatgtaactcttccaaggttttcaagttttctcaaggtataacttttctatggttttcttgaccgactgaagatctataaaacagaccttgcttgctttcaataactttagatatcttttacacctttgaattcttgatcatcttttgac

SEQ ID NO: 279240 - DNA, 360 bp, Glycine max
  unsure (1)..(360): unsure at all n locations
caaggttcatcaacctccatttctccgagaatacgactcgaacgcaacgtgtgcttgtcacggagaagccccggcgcgttccattgagcatggtagggctctgaagcgaaggtgcaacgtctaattgatgcgggctggctganatntgaggagaatngcgtgtaaatcctgacattgacaagagatgccacacatggngcaattttgaaagctgttgtagggtgtcctaatgactcatcanggtttccaagtttatgccattattgtanaccacagctacaatgttaaatgaaatggataaagttgatatctgtgtccctcatcctctcacaaacgcatgtttgcttattcaactttcat

SEQ ID NO: 279241 - DNA, 242 bp, Glycine max
  unsure (1)..(242): unsure at all n locations
gaggctgttttttttttttgcncttatagaagaagaatataagaaggaatattgtaataagcttccaccataagctaatgttagtcaatgagagaaagctatttcattattccttcttattttctatgtcataagtgtgtatggaaaacttcttcaaacaaggcctaattaattttgttggtttaagaacagagaattccttagatgaacataagattcttcaagcccaagcaccataatga

SEQ ID NO: 279242 - DNA, 271 bp, Glycine max
  unsure (1)..(271): unsure at all n locations
ggactttaacaacacgagttctattttcattgcnagtgatgcctacccaagatgaacagactgaggtggatggattccacataaggtttcgacggtgggggacagcattagcaaaattaagataggcttgcttatctgaacttatatcagcaatagctagagggaaaaaaataactatgacaaaaagaacagaagccactgaagtacaacagaacttcatggagagttgtttactgaaaggaataagatatcgacaattaaatttggagta

SEQ ID NO: 279243 - DNA, 102 bp, Glycine max
tgcttcagttcttttcatagggccaattgacagggtatgtaccacgaaatctatgttcttgtcctcacactttacatcagttcaacaccccaactcgttctc

SEQ ID NO: 279244 - DNA, 376 bp, Glycine max
cacttagaaactaagctcgacttgccgtaagcgagaggtgcactgagtgttcttctatttctttcaattcttcttcagggctgtttcttcaatttgtgtattaatatttctttaaaacactggaaatcttttttttttttgtttacttgtactaataagaaagatacaaagatgccaatgttttagctatctcattaaaaagaatagtgaagtgaagaaatgattctcattattaaccaaaaatagctatcaaattaacgcagattaggcaggtatcaataatatataatggtcattgcagaagagcatcatttgattaaaaaataatattctttaatgagataaagaaatatctaacaacttttgagaagtacgt

SEQ ID NO: 279245 - DNA, 265 bp, Glycine max
  unsure (1)..(265): unsure at all n locations
tcttgctattgcaagtaccagaatggtggttcctcagtatattgtttgggagcatggcgctatccttgctaatgggctttgtgtggaaaacggatgtgcaactgccatggtggggtatgctctttgcttttggttaggcttttattgtaacccttcctattggtgtcattcaagcaactaccaaccaggtaccatctccactattattntgatgcagagtgggaagcaatagaggtttaacattttaacactttttttttttttg

SEQ ID NO: 279246 - DNA, 459 bp, Glycine max
  unsure (1)..(459): unsure at all n locations
aaaactaagctgtgtgggccaagtctcttatagataaagatcttctattcattcctcatcacgcttccccccactaatccttgngatattcttctattntatcttcgaaatgagagttaaaaactacttccttanaatattaagatatgttaaaagagtttatctagtttaattaatgttattttatatacattgatccgagaattgagtcgggtcaaatatgattatttgtcaattatatcatatggggtaatattcttcttctattagtccaatggtttatatgcatgttggccaggtgtcgtgccctatgcagttggttatgtcttcctgatgggattggtctgacttgtgtgttggttgttntggaggccaaacacagacaatcacttctctttatcgtccgtgtcaccctttcattntgcttaatccctcatgcgtgtacccttcgtctctaag

SEQ ID NO: 279247 - DNA, 463 bp, Glycine max
  unsure (1)..(463): unsure at all n locations
cccactcaancggggacgttttncgangncannnccaatnnagctcgnccccgggatctccnaagcgaccggaggcaggtgtcctttctattagaaanannaactggccaaggaagcctatcaatattgagaatgtgataaataaaagtcttttaaacactattttgtcagtgcttctctaaaatatggttaaaatataaatattgtttaatccactgaggaattgctttaataaatcatttctcattatttttacattaaagtaaaaatgttgcgtatataaagtatacgggacggaattcggaaaaccattcaagggggtagaatttttgtttactctaactatttaaatatctaacaaatacatattaataatcatgactttatatcattatatattagttgtcacataagactaaaataattttattttaattatccagaatgaatacctgtcctctgt

SEQ ID NO: 279248 - DNA, 431 bp, Glycine max
  unsure (1)..(431): unsure at all n locations
gaaactaagctagtatcacagngctacccaagaggtttattgttactatactctaatccttgaagttggtccagtggtgggatgttcatctccttacgttttgtagctgccatgatcactacccactttgaaactctatacttccttacaaatcctactgctttatgaagcacactataagaagtataaacaacaccaagaggacaagagaacccacaaaaccctacccatattcgaaaaccaagatgcatggagaatgcaaattggtaatgtccacactgtcaatgatcaaattgattatatcatcacttgactaagacacatcatatatctacttcactgtctgaggaagcaaggactgagcatcgcgattctacaaaacaacatanagaagtagatataacttataaccacacattggttccatctta

SEQ ID NO: 279249 - DNA, 376 bp, Glycine max
  unsure (1)..(376): unsure at all n locations
ttctttatttaaacaaattttcattaaattaattaattagtaataaataatgtagatatgttttaattnttaaatgacatttctaatttactaaggcaataataatataacatttctgtggaagcanagctaccatgatgattcaccaaaatgttntgatgatgccaaagctcanagagttgtttcaagattaaagaatcaagcattcaagattccactcaaagattcaagaatcanatgaagaaatcaagaagcatcaagccaagtcaaagtatgtggtaaaaagtatttttcanaaaacatcaaatagcacactttntgttnntaaaaggattttctgaaatcttctaagtaccagaagtttactctctggtaa

SEQ ID NO: 279250 - DNA, 369 bp, Glycine max
cttcgattcattctatgtacccgtagtggtccatcattgtgtttcgtgcatttctattctcggtgtgtttactttttataccccctgttgacgtgcttaagccattttacttaagtcgtttctcgcttaacttaaaaataaaataaatttccaccgaacgtttgaattgtattacccattaacttcggttaaaataaattccgaccgttcggtcatgccgtaaccgcgttggaaatcaaaaagaggtaaaaataatataataataaaaaaaaacatcttttagtaaaataaagcggaaaatcaatcggacgttttctctttgggatatctcattcttaatcgaattgattaataactaaagtgaaacta

SEQ ID NO: 279251 - DNA, 313 bp, Glycine max
  unsure (1)..(313): unsure at all n locations
atcttttttcgcaaaaatcactaaagaccgttttaaggtccaacgccttatacggtcctctttgcttttatcgattaacatggaccgttcanaagcataaaatcaacatgtaactntactgcttttgcaagaactacgtangtctgattttcttatcgcaattgatgatacgtangagcaaaagccccgcttttgtcgaccaccccaagagatcattaatggtccaacgccttaaacgttctctactatcanaaagcaagagatcgttaatgttcaacgccttaacgttctttcctttcaaaataaaagatcg

SEQ ID NO: 279252 - DNA, 437 bp, Glycine max
  unsure (1)..(437): unsure at all n locations
tgcattgtgctaagcctaaagaactccctgttttgaaatattttgtatttgggctaagcgcgcaagggcagctggctaagcttgcatgtcgcgttaaacctaaaaacatctttgttttgtaatatctcaaattgggctaagcgtgcaggcacaggctaagcgagtcatgcattcccggtaagcctgtggtgctcgctaagcggattntgcagganatttcctcctgcaaaactctctaagccctatgtggcatgctaagcccaataatatctctgaagttgcaatttcatttttgggcttagcgcacaagtttgggcttagtgcgcaaaaaaaaaaatcaaaatttcttgtacttctattntggtatgtctcctacgcagcangcttagtgcgcacttacacgctaagccttagtgttcctcaatgtttgtattttt

SEQ ID NO: 279253 - DNA, 229 bp, Glycine max
  unsure (1)..(229): unsure at all n locations
attcttttcttttggtcctcctcatagttgttgcatgagaaaacatgctctattttcatctcccactccaagtaggcctccggatcattctttcctttanagggaggaatgttgagtttaataccatcaattcggttttgtctaagaacaccctcattccctcttctcctcctttcttcttcattatgatctctattcttcatttgatccaacctctcatggagcgcat

SEQ ID NO: 279254 - DNA, 349 bp, Glycine max
  unsure (1)..(349): unsure at all n locations
ntaacctcatcatctctcatagactttatgatttggtagctcttccaatccttgtgtccggactctcagccacttatgatagccgccaatgctcccattactgcttcccctaagctctctgtcctttcttcacaccgcatcacatgccttgtgaactccttagagtaccctcgcattggggtcactgaaaccccgtgtaatgaaaggcgtgatgctttcgtctaatggcactcctcttatggggtagccaagctgtcttatggcgaggacaggattataatttatacaaccccttgttcncattaagggaacatttggaaatccttcgcatgaagatagaatcctgatt

SEQ ID NO: 279255 - DNA, 323 bp, Glycine max
tgtcagggttgggtttggttcaaggataaaagggatgccccacattatttccatgacacaaatgcaaaaatgatgatttggaaattttatgcaaaactggtcatgcttccacctatgtggaccctcaatggtcaaattttaatggccatctctattttaaatcaacccaatgtttccaaatatgttctttatcaattgtgcatcatccgatccattttggcgtctgggaaatcttacacattcaccctcagtgatcacatttttcaaaactagtatgatcaggaattttcaaagaaagttggaagctctctttcaaagcatgt

SEQ ID NO: 279256 - DNA, 424 bp, Glycine max
  unsure (1)..(424): unsure at all n locations
tggttttctcgaccagacatgaagagtttattttagcaagaccttgactggcattcagagagcttcttgaacaactcttaagacacctttganacctttacaacctttacaattctctaagaattcattcacaatcatctntcttcttcttgctttgccaaaaagctntctaagttttttgtttccaaaccttattcttctgcaagtgaaaattctgcagaaaacaaaagtgtgctatatcttttcattctcttcttcctttgccaaaaagaattcaaccaggactaatcgcctgaattctttttgtgtctctcttctcctttttccanagtatagagggaccaaccgctgattctttgtgtctccttctcctttccagagatcaaggactatcgctgagaatcttngatcttccttttctaac

SEQ ID NO: 279257 - DNA, 441 bp, Glycine max
  unsure (1)..(441): unsure at all n locations
tactcaagcttagccctagaggggatgaaccttttcagtgttggagaggatcaataacatttcctatangttggacctcccagaagagtatggagtcagcatcacttttaacatttctgatntaattccttttgcaggtggagctgatattgaggaggtggaactaacagatntgaggtcaaatcctcttcaggggaaggggatgatgcaatccttcctangaagggaccagtcactagagccaagagcaagaggctccaagaggattgcgctagagctgttgaagaaggccctanggttctcatgaacctcanggtagatttcggagcccatgggccaaggttgagtccaattatctntgtgcatattagactaggatgtcattatattcgatccttgtgtttaggactccataatgtangtagggtatcctagaaatat

SEQ ID NO: 279258 - DNA, 316 bp, Glycine max
  unsure (1)..(316): unsure at all n locations
ttcttttattctatatatnctccgcgagtctagcagagaaaaaggttataacgttntcggctttcttatgtgggttgcaagccaaagtgaatgttggtatagcagcaaagatgggttgaagaatttagcattgccttanagctaaaggaaaaaagcaaaatgaaattggattcgatccccttagcaaagtctcatgctcaaaacttgaagatggaanaacgtgattagaaaaaaagaacccacacaaagtgattagttatattcttcgagagagattagtcgcgtaaatcaatatatattttatatcantaacatg

SEQ ID NO: 279259 - DNA, 374 bp, Glycine max
tgctcaatcagccccaactcttctctatgcttttgttttattctcactgcaacactataggattctttcaacctctcaagtgcaaggataagcagcttggtatcatgcttatatgataaaggtggaaagggaataggggagaacttcctatattccaaccaatgtacagttgttgtatagatagcaacagcttcttcaggagtaacatatggaccatctatcaaataattgagtggacgttcctgaaacacgcatcaatgatgacgaagtgacttcaattattaaaatgtctatagaactaattcaaacaacatttcgttcaaaatagtgagcctgcaaaggaatcatatcaatcatagagaacactgaacaca

SEQ ID NO: 279260 - DNA, 295 bp, Glycine max
caaacaacaataactttttactcgaatgtctgattgagacccgtaatatatctagatgctcgaaattgaataccgaagctctgagcaaattcaaacgacaataagtttttactcgtatgttcggttgagttccgtaatatattgaaacgctcgaaattgaagaccgaatctctgaacgaattcaaacgacaataactttttactcggatgtctgactgagtcccgtaatatatcgagacgctcgaattggaataccgaagctctgagataattcaaacgacattaactttttact

SEQ ID NO: 279261 - DNA, 357 bp, Glycine max
  unsure (1)..(357): unsure at all n locations
ncgctattgcatttcgagcgtctggacatataacgttattttatcatacatccgagttaaaagtgattgtcgattgaatttgctcagagtttccacattcaatttcgagcatctcgatatattacgggactgaatcagacatccgagtaanaagttattgtcgtttgaatatgctcagagcttcaacattcaatttcgagcgtctagatatattacgggactaaatcagacatccgagtaaaaagttattgtcgtttgaatttgctcagagcttcggtattctatttcgagcgtctcgatatattacgggactcaatctgacatccgagtaaaaatttattgtcgtttgaatttgct

SEQ ID NO: 279262 - DNA, 253 bp, Glycine max
caatacctttttacaggaatgtctgattgagtcctgtcatatatcgagacgctcgaaatggaatgttgaatctttgagccaatccaaaacgacaataactttttaactcggatgtctgattgtgtcccgtaatataacgagactctcaaaattgaatggtgaagctctgaactaattcaaacgaacaataacttttaactcggatgtctgattgagtcctgtcatacatcgagacgctcgaaattgaatgttg

SEQ ID NO: 279263 - DNA, 439 bp, Glycine max
actcaagcttaacattcaagtttgagcgtctcgtaatattactgtactttatcatacatccgagtaaaaatttattgtcgtttggattggctcagagattcaacattcaatttcgagcgtctccatatattacgggactcattcagacatccgagtaaaaagttattgtcgtttgaattagcttagagcttcaacaatcaatttcgagtgtctcgatatatcacgagactcaatcagacatccgagtaaaaagttattggtcgttgaattggctcagagcttccacattcaattttgagcgtctcaatatattacgggcctcaatcagacatccgagtaaaaagttattgtcgcttgaattggctcagagcttcaacattcaatttcgagcgtctcgatatgtgacgagagtcaatcagacatccgagtaaaaagtatt

SEQ ID NO: 279264 - DNA, 258 bp, Glycine max
  unsure (1)..(258): unsure at all n locations
tcttcttttattttatactcgagaagtattgagtgatatggatagctaactaaccattaattaattcctttcatctttttttgtttttaatttatctaattggttgtcatataaatattatgtcaatagtttatatgattatcacgtcaatactaatatgtcatgttaactagcggtcaatcttgactttggacggtgaaccaatgaanagattanaattatttattttaacaaataaaagaattaacatcacatatt

SEQ ID NO: 279265 - DNA, 388 bp, Glycine max
  unsure (1)..(388): unsure at all n locations
gcttcacagtcaagcactaagctgttgaataaattctcatttagccagtttggataaaattttgaataattacttatagtagaagaaaataaaatgaattgaacttcacttctctcgtaagttaaaatcaacttaggcacttggacttctataaaagctctctcatccgacttctccgaaaagctgagatatattatgttttctcttacatgctacaagggcatattaagaactttatctaaactgatccatggtatttaattaaattgtttactctaacacacccgtagtatcagtatgtcgaacagataataaaattgattntcctaaatcatgttacaaaagaagacaactctccaaaaatccatgataattgatggtagtaaaa

SEQ ID NO: 279266 - DNA, 394 bp, Glycine max
  unsure (1)..(394): unsure at all n locations
tntttacatgcatatganatatccatttatgcctttaatatcaatggaatggtttaacatgaattcttatgtccttcaatttatccattttaaaattttttggatcctattttgaatntaaatattttttaaaaaattatcggatattaatagtatttttcaatttctgacaatggttaccctcttcttgngccgaaaattgctgtcagccctntggcagaaggaaatcttcacatgttgtagtttgactaatgctcttgtcactgcatattgaaataaccttgccaaccgataccacttgaggctatcaacgcgtcaagttttgaagccggaaaggacacaaagttatcatccatacctatacatcatctcatacacttcatgttcaagttan

SEQ ID NO: 279267 - DNA, 461 bp, Glycine max
  unsure (1)..(461): unsure at all n locations
atacaagactcaagcttaagatgaatgagtgtatgatcaaaatggtgtttttatatatgcactcatgtgggtgccacgtcacctcaagaaggggacattacatgcatcaggagccagacagtcatgactcatgtgcacatgagaaaactagaaaactatgttgtattgattgatcatgttgcatatcaatgtagcatagagaaaaagttattaatagcaataattaaagaaaaatgtgtctatgtcgatattgctcgtgtgctctggcaataaggacggcttgaagtaagcaagatctcgtggaaatcatagaatctgaccccaaaacctcaatttttgtgagtgggacaaggaaacatgacaagacaaagctttcagtggatgaaacgtcgagttgcaataaagtagggaatagttntgtgcataatagtgactgaattgtacaataaagtggggaatag

SEQ ID NO: 279268 - DNA, 393 bp, Glycine max
  unsure (1)..(393): unsure at all n locations
agctcggacccgggatccttggaggcaccagatttatgcatcttattctttagagcgccaacgaactagtgggatgattagaacccatagagtgcacaagactacttgataaaaggcgaaatatgtacttacaaggatctagcacgcttaacaagtttctgttaatattgcttttaagactggtgtattgctgggaattgagatatgtgcgttcatgaatagactccacatacatactccgcacatatgtgaacaacgaatnatgtcttgacttggagttacattatcatatggcgtcactaaacaaagtggcacatatgactaaccttcctcatttaggaaatacagatatcaaacgcttataaatacaactaacataactatgataggaaa

SEQ ID NO: 279269 - DNA, 338 bp, Glycine max
  unsure (1)..(338): unsure at all n locations
ctcaagcttgttcaagaccgtcacagtccgatgcggccattgctattatctcctctcccagngaacatgcgagggttgcttatgccatctcccactcaatttcatttgggtcactctttcttctccccatctcataaccttctggtatgtgtatatatacacacaccaccatagttttctttatctcttgtatactctttacctgtttgataaattaatgtatgtatgtacgtactgatacccttttatataaatataaaagaattaattactgattaaagagctaaagataaagaggtgatgatatgttgattctctctcactctctctctatctaa

SEQ ID NO: 279270 - DNA, 189 bp, Glycine max
  unsure (1)..(189): unsure at all n locations
attttgttgttgnaacanacatggtgccctggagtgtgatgtttttaaaatagcttcgctgcgctcgatgcgatgacattttagtatgtgaatgcccattaattcgatgcatgactaacgagaaccgccctgacacctacgtaaactcataaccggaattgagttgaggtcaagatctaatctacttaa

SEQ ID NO: 279271 - DNA, 158 bp, Glycine max
ccatacaaaactcgcacagtagagatgtttgcggacaattgataccttctagagtacctggaaaaattgtgaggactacttagaacgtctactgtgaaaccttaccatgagtgtatagcgggcgacgatagctaagcataaagggatacgagagtgac

SEQ ID NO: 279272 - DNA, 430 bp, Glycine max
  unsure (1)..(430): unsure at all n locations
ttagtcaaacagaataatccanaaatgtcaaagaattgggttttgaaaaagcataataagactttntgtgattggtttaaagatacaatctttgcagatgaaaatgcttcagaaacattaagaaagctagtagatgggtctaaaagaaatgttataaattggcaaggatacaacataaaaaagtattcattntacacaaaagcacaagacgacaaaagtacaaagtagattagcagggtcaccctaaggactgaatctcaacacttcacaagtgtgcatgatgccaatccctgtgtagcttccatccattactttgggttcattgatgaaatttgggagcttaactatgtngaaattactgtttgtgttttcaaatgtaaatgggttgacaacaacaccagtgtgcgcaccaatgatattggatttacgt

SEQ ID NO: 279273 - DNA, 403 bp, Glycine max
  unsure (1)..(403): unsure at all n locations
tttttgnaagggacncncanaggagncgatagcagaagcaaactcaancccccaaaaccggctgggaagaggaagaaaagccccctactcatataatacatctccacatgagctttatctgacgaacgaacttaacatatcccattctactcaatgctatctgtcatgtgagacttttaactattnatatatgaatataagatattcggaatagcctattagataaaaacactctcttctatctctgtctctatattgatctctaataatcttttatgactacatgggaataaaagaaaaatcatatctaccttaatggtcattatatgtccatacgattaaaccttaaatatattatgcatctacattcattcatagtctgaaaaaatcattgtaattaacn

SEQ ID NO: 279274 - DNA, 464 bp, Glycine max
  unsure (1)..(464): unsure at all n locations
gatgagccantttgaggcgctcgtanagcgacctattactctcaactgataggtatgtgctgtctgtgtatgagacctanaatgtggctttaggtcttgtgtcctgagatgatgtaagggacccggaaaagctatggcacatttatcaactggcacagatatgtctgaaactcgcaatgttatggatgcttgtgggagcgtgggcctaacacttactatataagcattgggtgtgaccctgtggagatggccccataccgatcaaggctctgtttaatgacgagaggcatgagatatccggcggaccaacaccggagcctgtatcatcagtttcttaaaggagagaagagtgagtacttactctgacaataaaatgatctttgccacaatgtcttaaagcctgtcaaggcagcgtactgcaaatgaaaggctgattaaaccagtgaggccatgaaccacatacg

SEQ ID NO: 279275 - DNA, 239 bp, Glycine max
tgttttgatccagtgacattattacaacaacaatagtcctacatactacatgcccttatagtttacaagatgtgtcaactggatccaaaaccatagcagagaagaatgtaaataacatgtgaataaaaacctgaccaaccaaattgcaaatatgaatttgctggtgaagataggggtagtcactataagtgtaaaaccaagaaccggatcagaaatgtagaatgatctcctgtgatact

SEQ ID NO: 279276 - DNA, 497 bp, Glycine max
  unsure (1)..(497): unsure at all n locations
gtggggtaactgaacgtggananccatgatactttgattacgcacnctatnaatactaagccttttgggatgatgcngagatttatgaagctaggctnccttctcatgaaagattaccgctctacgatgcgatggttctttctgctctctcttttcagatgatgacaatatttctctgtgttagtttaacaccaagacatgtagacattatcatattctctcgcggctgaagtagtttaactcattgctttgaaaagcgcgagtatagtcttttcacgatgtcgattacatggttataagctgcctgctgagtacaattgacctgtcgtattgtctgaactgagtttatatgtgtgattataattgcgatcacgcagtcttgaatgcatacagagaatatgttatctaattatgagctgaggtctgactactaaacacttaagaataaagatataagttgttgaatgatagtgacaggatatgaatttataatgtag

SEQ ID NO: 279277 - DNA, 504 bp, Glycine max
  unsure (1)..(504): unsure at all n locations
gaggggcccgttgcctttaaatgagccatcgatanctnccagatctnanagtcccctgatgcatgcagctccttatagcaccaccttgaaccttgagctcacctacgcataccatctctaacatgcattctctctctctttagacactactcacatatggttgtttaaggaaaaacaccataactaaacgcgccacaatgcatccctatcgcaccaaatccaaatccaaaaccatgggtgatcaacaggagacacaggaacagatgacagtgcacatgtccgctcttaaagaacagatcgctttcatgatggaagccatgttaagaatgaagcatctcatggagaaaaacttggccaccgctgctgctgtcagttcggctgacgaatcacatccaactctcttgacaactgcgcaccatcctcgctcatatatagtagaaccgggaaagaacacactgcggcatgatggcgaccctgatctgggatacaaccgagcggattacn

SEQ ID NO: 279278 - DNA, 369 bp, Glycine max
  unsure (1)..(369): unsure at all n locations
gggaattgagcctgagaccatgactgtgacctgaaccncnnnagaagagngcagtttatgccgatagtttaccctttttttccccaacgtagggggggggaaaattccttaaaaagtgccgtaccagccccaacatagagactcctgcttagaacagaatccgacaaccatctcttatccgtttggggaccacctactttactaccccaattaagggctatcaagttcaccccctcctgagaggaatcctagactttgggggttaaacccacaatggctttgaaggacacagacttgcgaaactgtagggagctctgccagacctctatatcttggtgaaccagacacgctgtcttccacaagccctgn

SEQ ID NO: 279279 - DNA, 307 bp, Glycine max
  unsure (1)..(307): unsure at all n locations
tgagatgaggaagtgtngaatgtttaaacttcctgctcttattgttgaccacagagtggtacctggagatatgtcgcggnggtctggagaccttgcggacgtcaggtggngtgctattgcccaaaaccaagcttgaccaatcccgacccaacccgggcatagtcggtcagtgagaacctgtgatgtacctaaacaggcgagctcctcgcattcgacagataaaaggaacatagaccacaaagcatggaggcttgtggtggctggccagctatgaactttgattgatatgtgggttatggcctctggt

SEQ ID NO: 279280 - DNA, 387 bp, Glycine max
  unsure (1)..(387): unsure at all n locations
aacaaaagcaatcaactagtcaagagtccatcaatacaatntaaagggtaaaattaaaataaataaataaataaaaagttacaaacaagctatatggtggatgaaagtgtatataatgtaaatcaacttgtaactatgtttcaagtaatcaaaactacaaattttggtgttgtttagtgataattaacctcatcacggtaagcctcaacagggtgcttcccaaaatctttatggatggccttaaatatagcatcttcattctcatgaacaatgtctatgagagatgtgagctaggttttcctccatgttacactcttggttattgcagtttagaagatagcctaactcttcactgctcttcactcaccaccatatcatggaattgac

SEQ ID NO: 279281 - DNA, 264 bp, Glycine max
agagtttgatgaccatgtctattgatattcttggctccctctccaccctcagtctatctcacaagcttaatatttatgactgtatctgtatcagtatcactattttgggattaattttcattctacttacacctatctaacatgccatatcatattatcttttaatcgcgatgtggatctcgcatatgttccattcgttcaataagaacaaattttttgccatgcttctcacataatactgagagctagactttcaaatcctct

SEQ ID NO: 279282 - DNA, 275 bp, Glycine max
  unsure (1)..(275): unsure at all n locations
gaagaggcaggcttcctacctttatttgttgactacagagtggcacctgcagatatgtcgcgggggtcacgagaccttggggacgtcaagtggggtgctatttcccaaaaccaagcttgaccaatcccgacccaacccaggcataatcagtcagtgagaacctgtgacatacctaaacaggcgagctcctggcagtccacctatanaagaacanagaccacacagcaaggaagcttgtgtggtggctggccaactatggatcttgagtgatatct

SEQ ID NO: 279283 - DNA, 326 bp, Glycine max
  unsure (1)..(326): unsure at all n locations
ctaccctcacctccttgagaagctctcttgagaagctagagctcagctacacacacccctctaataactaagctcacctccttaagaagagaagctagagcttatctacacacccctataatagctaagctcacccccatgacanaatacatgataatacaaaanaatcctactacaaagactactcaaaatgccctgaaatacaaggctaacaccctatactgttagaatggccaaaatacaaggcccaatagaagaaaaaaaaacctattctaatatttacaaagaagagtggacccaaccttgacccatgggctcaaaaatct

SEQ ID NO: 279284 - DNA, 192 bp, Glycine max
  unsure (1)..(192): unsure at all n locations
ttgctntataattgctnggtctgggagacgaagggcaagtgtgcgcgatatgtgaagatgatgttccaagtacctcggatttggttcgaccatgccctcctgatttccagctgggaaattggcgagtggaggaacgccccggcatttacgcaacaagcataatgtaaacctttaccgctctaaaagctctat

SEQ ID NO: 279285 - DNA, 416 bp, Glycine max
  unsure (1)..(416): unsure at all n locations
gagagagaccagtctagagttgaaggcatgatattgtaagacaagttgaaggcttgtcaaaggtcaaagaggagtttgttcgaacaattgagcatgacggaagataacatgtgggccatcattgaccaacacanagagaagctaagtctagctgcaacccatgagcaaaggctagaagatgagtatgcaaaggtatcattcctgcaagcagaaaaggaagcaagagagagagtgattgattcattacacagagaagaaatgacgtggatggataggttcacttttaccttgaatgggagtcaagagcttccaatactgctagccaaagccaaggcgatggcggacgtgtacttggcccccgaggaagttcatgggctcctcattattgtagcacatgatcgatttgatggccacat

SEQ ID NO: 279286 - DNA, 398 bp, Glycine max
ctagataagaatcgctcaagttgtttcatctaaacctcttcttctagatcaccattcaggaacgtcggtttcacatccatttgatgcaactcacgatcaaaatgagctactaatgccacaattactcgaagagagtctttcttagatacacgggagaacgtctctctataatcgattccttctctttgagtgaatcctttaccaacaagtcattgcttatgtctctcaatgttgccttctaagactttctttgttttgaagacccatctacatctgatggctgttacaccaacaaccaactcaacgagatcccaaacttggttagatgccatagaatccatgtcatgcctcatagcgttataccagcaatctgattccttagaactcatggcttgtag

SEQ ID NO: 279287 - DNA, 293 bp, Glycine max
  unsure (1)..(293): unsure at all n locations
aaggagttgagtcttaaactccaaagaaaaaagactgtgtcgtcaagagaatcatgagtgcccatggcagagagtttgagcacagcaagtttactgaatactgcacatctgaaggatcactcatgagttctctggagccattacaccacaacaaaaatggcataggtgaaagtgaaaaacatgactttgcaagaagctgctaaggtcatgcctcatgccaaagaacttccctattatctctgggctgangccatgnacacagcatgcttcatccacaacagagtcacactggn

SEQ ID NO: 279288 - DNA, 250 bp, Glycine max
  unsure (1)..(250): unsure at all n locations
tttgctatcacgatttatttntcgctggcgaaaggatctaagagggtctgagaacacgaatatttgactatcctgctctgatgaatagaaagcctgcggaaaatggacagaataagaaagagggagaaacccatgctgtgcgtgccgttcctacatggcctagattaccgttagccaaactatatcaatacttggccaatatcagtccttctcatgaccctccaccctaccagcataaacacccaatcat

SEQ ID NO: 279289 - DNA, 443 bp, Glycine max
  unsure (1)..(443): unsure at all n locations
gagatgaaattgaagcctttgaaagcgactgatacatgtttgacacttgtagcacacaaagntgtgacagactcaccagggatatgttgtcctacncaaagttcttccgtgtgtactacagactcaatacatctttgatcgacttgctgccataacatattaccacctttgccaaactaagttcttcccaaatactcagccctcggtggcagacctcctatgaaattgacatcccgagattgacagccagattcccgtgggtgaatntcaaatctaacattttcgaatccaagtaataccaaactcataaaccatgtgggggcctttaatggaaggataaccttgcttgtccaaggatgtacggatgggttatactctggcctcttgctcagtgtgagtcaggttgacatttatttataccctagggccattaataataaaag

SEQ ID NO: 279290 - DNA, 426 bp, Glycine max
  unsure (1)..(426): unsure at all n locations
ttctggaaccctctgatgggcggatttcaactccccatttaattccacttaatactcagaactgtcttctctttcctgtgttttctctgttactctctctccctcaatcttctctttctccatctttctcttcatgaatcttctcctttnttccttttattctttctgtttcttccttcatgcaggcgattactagcgattccaacttcatgcacgcaagttgcagcctacgattcatactgaatatgagttgttatcgcaccacactcaccttcaggtattcccttctttctttatctttatctttctctatcactgcaacttacacacaggtttgaaaccttcaacatgaagagagagaaaaatctatagctatgacccgtgggacttttttccggtatttggcaatttaccactccttttttc

SEQ ID NO: 279291 - DNA, 435 bp, Glycine max
tctcccctattgtgctataaatttggggagaagtgaagaagaattggttcagcctcttatgcacttctctctctgtcaaaattgctgaggaaaattatttccgtgaagaaaatccaagccgaggcgcttccgtaacgtttccgtgagtaattacgcgaagattctcgaccgctcttcaagattcatctttcgttcttcattctcttcagtcttcaacgggtaagtacctcaaaccgagcttttcaattcattctatgtacccgtggtgggtcacattgtgtttcatgtatttttattctcagtttcatttgctttttatacccccttttgacgtgcttaagccatttatttaagtcatttgtcgctgaatctaagaataaaataaatttccaccgatcgtttgaattgtatcgatccgtaattttggttaaaatg

SEQ ID NO: 279292 - DNA, 311 bp, Glycine max
  unsure (1)..(311): unsure at all n locations
atcttgcagattaagtngatccgcgaccttcttacgaatcaacttgatctgcaaagaagcttatggatcaacttgattcgtaacaaagctgtggatcaagttgatccatgaagaaacctgatttaaaatgagtacaaatctggggagaatatatgctcttctggattgttgcaatattggatatgtgtccaccattataaaatggatgtgtctgaaatttggtgcatgcctatgatgtctacccgtcatatttatgaaattagtggatatgttggaaaaactactaatcataatgcttttaaaaaatatgg

SEQ ID NO: 279293 - DNA, 532 bp, Glycine max
  unsure (1)..(532): unsure at all n locations
aaacgtaannnactggatanccattcgtangncccnactgataccntagntaganaccactngtatnaccngacactctanaatgctcaagctggganggttttattatcacgagcgtcacgtgttcatgccacagttgatggccgtggctatacgagacatcttgcgatacaaagtcaggtgcacgatagctcacctgtgcttggtcttccatgctatatgtaacaaagagattgatctagcagtgtcccatgagctggagcttgaggacgcaattatactcggcccattggagatgtcttatcccgctgctttcataaacatgatgattcacttgatcgtgcatcaggtcacatagatcagatggtgcggtcctgtctatctacggaggatgtacccggcagagcgatacatgaagatcttgcgagggtatacagagactctatctcgcccggaagcatctgtcgtcgagaggtacagtcgcccaataagccatcggatggtgctcataatactgatagatgctgcagtn

SEQ ID NO: 279294 - DNA, 404 bp, Glycine max
  unsure (1)..(404): unsure at all n locations
agcttgtagtgttcacttccttttgttgttcgaagactatcaaagtcgactttatcatccagagacaagcaagtccgatggtatccgagacgatgatggtcgtccgtttctaatcatttggagntttttccagcctcttttgtcatccagagacagtcaagtcttttgctatttggaacacaatcaagtctgatggcatgcagagacaaatacatttgtctacttccctggtcgagagactcaatgtctgttgaccaaagctactggagtctcccctgctatcccaagacaagcgagtttgatagcatgcggaggtcatcacggttatccatttctttaatcgctttcaaagcaccaaggctnttgctgatgcacctgatgtcttttatgctctttcttttgac

SEQ ID NO: 279295 - DNA, 530 bp, Glycine max
  unsure (1)..(530): unsure at all n locations
agagagannanttttgaagcccctttggagnaacanatttgtagtccctcgttttgataccttcgtannnacccacacnatngaaactngagctnnaatggtatgcttagcctgcactacagtgttcttacgctgtgtatgagtggatgcacttagcatttatgaacccacttgtgtacttcactgactgatgagcctttctcaggatcacgagcttatttttgagcgcaaccaccgatggccacacagtccgcatactagataggtgttaagagcaaccacacaaagatttctgtaagggaaatgtacgacttcaccagagcgtccgcactagaaggtaagaagcacacactccaccgagctaatggtagaaaaggagttggagaaggacataacagaggcctgtacagatgattggacaaaattcgtggcataaacacatggatcggcgtagaaccaataatngagtcagcgtcgtatcacagctgcaggaagtccaaacgagggaaagaggtgcctgaaaaaaactg

SEQ ID NO: 279296 - DNA, 292 bp, Glycine max
  unsure (1)..(292): unsure at all n locations
agcttctttgttatacctcgatttgtcatctttccaggccgaggtcgaccgtgcattttttcgatccatttcggtgaataatatttttttgccgagatgggcaaaatgccagtttcggccgaataaatgggaatatgccagtttcggccgaaacgaagagtcggttgggctcgcacaaaaaaacctagccgacctacattgtaaatnttttatgcaacaccaaaacaagaaaacttcctgtgccgaaaanaaaaacattacatgacagcgagcgttgtgaaaaacaaaattg

SEQ ID NO: 279297 - DNA, 230 bp, Glycine max
cgaccgatatttcaccgacttgacaatcttttaaaaagccgctgtcgatatggcttttacgcagagtagtttcttgtttggtgagcataaaaagttacaatgtacttcggtgggttttcgcgcgaattcaccgacatttgttctgccagaaacatagcccacctctcaaaaaaatgattgtaaccgcttcatgctattcattcacgattgatagaaacccaataccgaca

SEQ ID NO: 279298 - DNA, 244 bp, Glycine max
agtgtctgaactgaacctgactgaacccataaaagcggggggtattttagagaaagtggttagtagaagaggcttagaaataaggatgacattcgagtaaacaaaaatgaacccggatatctattcatgggatattatgtggaagaaaatcctcagataagctactaaaaatactcttctgtaactaaaaaggtccgtgatgactccacatatcagatttgtgaaatctcaagctctaagaggc

SEQ ID NO: 279299 - DNA, 508 bp, Glycine max
  unsure (1)..(508): unsure at all n locations
agccacgagccnccttaggtcgatagantcgatagcaatggcacagccnnncgngatcctnnacagncaccctgcnagaatgcaggctaggagattttataccgattttnacattatnnccgacttaagccgtcctatgaggccacttagcctgcatatatgtcaagctttacaatattttttgcctctgtatcattgtatacataacgacatggaaactgctagctgtctttatctttctctcctcgcgtatcaagtatgcattccacatattgctctcactctatagtctgaaagcatgaagaaaatggtacgcgcacatccattgttgaacattagatactatgaaaccacatcactgcgatgagatattcacgctcgttctcaaagaaacgacattgaaaaatgactgatgtgttagcggcatccaaatcgtgaaaaccttcaaagacctagcttatgacgttgccacatctaaattgaaccctaataaacagggctactaacg

SEQ ID NO: 279300 - DNA, 589 bp, Glycine max
  unsure (1)..(589): unsure at all n locations
aagacgcncananttttgagttccattggagcgagcgactttgatatccattcgtttgaacccgatccgcaanaaccncannanannaggaggtgngagggangaagttttttcgtagggagacgcatcaatatcgtgtttattcattctatactcgacggcgtcccatctgcggctgtcacgccacgaccgcaacaaccatacgtgtcgcatgctcgccccagactacatcacaccagtagcttagtgaggagaagtcgcacgcggacgcgtaaacgctcgtgagagcgatcgtcaccgaaatgcagtgcgtcatactcaagcgaagtctctttgatgacgcgagcggatacatacgcctcccggagcgcgtgaacagcggaagaagcacaacacggtcgatgtccgctagtatagtgatatcggagcgaggagcgaccaacgcgagagaccacgcccaactgtgacgcgcgacaacacgcggaatacacaaaagggaccgagtgagtaaagaaactctatacactgttgtgagcgatagagagcaaggaggcgagcatccgtcgcttggagtacagttatgtcggcg

SEQ ID NO: 279301 - DNA, 402 bp, Glycine max
  unsure (1)..(402): unsure at all n locations
accttggaggatgccttgctcctttggtggttctgtgaaagagaggaaaagattaaccaacactaccttgcccctttggtcttcacgtgaggtatgaggagaatggggtttattctttcaagtgtactccatggaggatttcngatggatcttggcccccaagatatccgtcactccatgttcttgtgttgtcgcgtganaataaactatttggatggggctaactacctcacatgattccanaataatgtcaagtgattggccctgagaaagganatctgcttcttaataatggattctagaagctactccganagcgctntgtgtangtgaatgttcattttcccatatggttnncttttctccaattntttaacaaatatactcaagggaaatgaaata

SEQ ID NO: 279302 - DNA, 641 bp, Glycine max
  unsure (1)..(641): unsure at all n locations
acaggagcganannnttttgattccccttgntgagaccacnntttgataaccttcgaatnaccanccaannananaannaanaggcncnagagagtgacacgtanannggtctttctctgttatagccgcacncttcttattatatatcacganacacacctcgaaccgaacccgcaagacggagctccacgcacgcgcgcctccaccacaacgctatcgcaccgtgttgcggctcgcacccctctcgccatgaacctaacgagagctcctgagcactgttcactgctccgtatcggaacaacacgccaactctctcngcgcgctactcgctactggtaggtaccaacaccgtacgcgattctcttcgcgatcactctacactatgacacgcgcacgcagtcagaatcgcgtgngctcgcaacggtcggtccgctcgcagaccaccacggacctgtctccttacgcgtcggtttcgactacaacgcataccccatcgcaccactcgctccaggcgcaccgatcgatccgccgcatcgcacacccgtcttccacgacatcagagcacgcactggacgtcatcgccacgaactcctccgcccacgcgccccgactccgagacacgagcacgctagtaccgccc

SEQ ID NO: 279303 - DNA, 191 bp, Glycine max
acccaatgattatgatgatggatggctcaaattctcacagctgctaactcatcccttgcaaatagagctttcacaactatcatgacttgtacagaagaatctatgatctccagtcacaaaatgtcaagaactcttattttcaaaacaattacccatttcttgaacatatcctataatccaaaaagaaacat

SEQ ID NO: 279304 - DNA, 219 bp, Glycine max
ggttctgactgaacctgactgaacccttacgcggtgtgacttttatgcagtttccgtttcaattgcttttgcaccctatcgctttatacagagattaaaagaattttacaatcaagataagagggtcattaccagcggaaccgactggggaatgcgtctgcgacagcgcagcgattatcaaagttccacataactttccataattcagtcaacagagct

SEQ ID NO: 279305 - DNA, 296 bp, Glycine max
  unsure (1)..(296): unsure at all n locations
tttgctnnacgcttannttttcggcncaacctataaaggaagggcatggtcataacttagtcaaaggatactctatcctttatgagctatttcttttctaaagatactctatcctttatggtcataacttatttaaaggaagaaatggaagcaactactcatttggttcaacctatactagcagtgaagagcattcctatgagccccaagcaatattaattgaaatattaactactaagtagtttaccaagtgtttttatgattcattctaatatctcatgccacgtgggataaaa

SEQ ID NO: 279306 - DNA, 398 bp, Glycine max
  unsure (1)..(398): unsure at all n locations
cactctgaagattatgacaactttcgntgatctttttgtcatcgatattntagnagagaccaatctttcttcttcaaatgtcgctcatgatatttattgtaattatcttcaatgtatgtccaaaaagttaaccttttttggacccccacaatagaaatctttgaaatatttagccatgtgttggcaagccattcatatttctttgcggagaaacatgatctattgtgtctttcggatgcttcttctatgtcttcttcttcttcttcttcttcttcttcttcttcattgaccacaatattatccaactcaacttaggtgcaaaatggtggaatttgagactttgacgcanagtcagatggtgcgtcatgctctttcattacattggacatcatntacta

SEQ ID NO: 279307 - DNA, 407 bp, Glycine max
ggtttgctgcgattttgattcttcgagaataagaagggaacattataaataattatatcctccgatttaaaattaatctttgagttatctgcttacataatttataataacaatggttcaaattgtataattgttaattggaataattataattaatgattctatctaattgactaaatcattgctccatgtttaaatcttaaatgatggtatttatatatttatcttagtttaaattaatcttacgttccattatacaaatatatatacaattcttttttgaccaaattccagagctaagtcttgtttgtcactaactcactataattgaagataacatgatgaatgaaataaaaacatactatattcttaatacattggtgctttcaatcactcataacttttga

SEQ ID NO: 279308 - DNA, 173 bp, Glycine max
  unsure (1)..(173): unsure at all n locations
ggaattctgacctgctttctaacanagagagattgagctttttagtactcgctcaacataagagggggttattaggctttctaaaacaggggtaatcggagagaatggcgaagtgtgatcggaaggagaaaagcgtagacgccaaggaaagattggtcgggtggcagagttag

SEQ ID NO: 279309 - DNA, 523 bp, Glycine max
  unsure (1)..(523): unsure at all n locations
gcggttggccncccagtagcccctttganatcatagctatagcangnccncccngattnggnnnagaaccccctcaaacatagaagcnaggaagatatacagcgccatttangtttttcccacagacaggaacaagatgaggctgggattcattaccctctttgacctcgctctaaggatgaggacgactgcggttaatctttacagtgtcctccatggacgatcttctgctggaacttggcctccaacatatccgacactccatgcagctgtgcagtatccatgatcctaccaattcggatcgtctaaactccctcaacctcaacccgaaataacgccaatgatttgcccagagcacgcgaaaatccttcacaaaacttgcgtgtataactatctcagcaaagcctatgcctaaggaaatagttcattttcccactatggctacgtattcttcagatattataacatcattattcacggaaatcgaattgccgtaagtgacctggtccctaattattcaaag

SEQ ID NO: 279310 - DNA, 421 bp, Glycine max
  unsure (1)..(421): unsure at all n locations
aggggnncctgatgcttcgaagccattgataccctgactccagagatgntaaggaggaaagaagagagaggggggtctcgaattggagatattttagaaagagcggactttgaaggagctcatagacttcattctcaaagtcaacagtggaccatgttctattataactaggaccttcttgaaaactttttaaaaaactccctgaaagcttcttataaaactccctgagaagtgctttgagacacttcctgagaagttagtntgccacactcaccatctaaaactagctccctcctgagagctccttgaaagctgaggctactcacacccgcttaaaactagctcacttctgctagccttctgaagcagagctactaccaccctatatagctactcacccatgcaaaaactggattcaatg

SEQ ID NO: 279311 - DNA, 255 bp, Glycine max
  unsure (1)..(255): unsure at all n locations
ggaatttagaagatgcacgtaaaattccaaatgcttatgtgatactttatgaattgcttatatatttaaaacttataaatcgctatctattatgtcatatttattatttggaggttctacagcaattgaagaatcaacttttaccgatgagattgaatcanatgatgaaggtatattcacttttagttgttctagacaaatgtaatattattattcctatctaattgttcagatttttcaaatataggtggatct

SEQ ID NO: 279312 - DNA, 449 bp, Glycine max
  unsure (1)..(449): unsure at all n locations
tttggcatggatatagctcctatgttatggtaacacactanaattttgtgaatatttgcatgtcagtattttcatccttgtatgttctaaatgagatatataatctaagaatatgagtttagaatgtgcagaagcaaaaatatatggcttgaagaggttgacaaattattaattatgttcatatataacactatatctatcatgtttaaataggttcttgaactatatttattgtttaattaagtccctattggatctttgttggaccacaagttaaagaatcctatactagaattaatacactaataactaataatctggaaaaagttcaaaaacctgctgaataattaaactttgttaatcatatcgcattgtgtattatatttagactttactctcatttctcttctctataaatatctaataacagaggtgtacaagaacttggg

SEQ ID NO: 279313 - DNA, 269 bp, Glycine max
  unsure (1)..(269): unsure at all n locations
ggacnaggtgactttctgaacnctactgtgacctgaaccagnaagaaccggttttaaaagggttgaaggttgtgaaagggcttaggagtaaaaaaaggagtaggttatgaggaaatagggcaaagaaatgaaataggaggggaggcacctgggaaacgagaaccgtggccacctagagcacaggctgacggctggggatgaccagaccgagcacgagggaaccaccatgaggacaatgcttgcatatgtaccgtaccgagcgtgcaaac

SEQ ID NO: 279314 - DNA, 314 bp, Glycine max
gccacatttgaaccggctccttggaaaatcaatgctttagtcaatgatatggcctcacctatggagagaaactcaaagtcaggacatgagattcaatgagcaaagacaactccatggagtgagagggttcaaatcatcaatcatgatatcatctatactctaaggtggaaggggataaatggctgtataagagctcattaattcataaatgacttggtgcattcaaaacaaaaggaaaattgataaacattgccatcaatgggggatccactgctttggagggcccttgttagcactggggtactctgtatgac

SEQ ID NO: 279315 - DNA, 440 bp, Glycine max
  unsure (1)..(440): unsure at all n locations
agcggacanttttgagccttgnanagcgcttgatacatgttgatgcattgtanaacccgggganagatgagagaaggggtttttcttaatcanagagagttttcgggcgctttttcccttgaacgggcttcagaaaggtgtgtcttccaaatccagcctggtgacctagctttgattcatagagggggaactcgcttgaaaacgtacttaaaaaactgcctgtcaacttcccgtataaacttcttgaaagttttttgagatacaatctgacaacatgggtgtacaggctacccatctagaacaagctgcctcctgggaacctcctggatacaatgttgtcctccgccctgctgaaacttgatatctgttggaggctttttcaaaacttgcgtggtgacccccgtattaatagccatcccggccaaatctttttatcatgg

SEQ ID NO: 279316 - DNA, 298 bp, Glycine max
  unsure (1)..(298): unsure at all n locations
agctntatgcatttcagttntgccttcacgattgacgaggacaagatcttcctcactgttgcagaggctgttgcatattattctccanagctggttgaggacccttganaaatatatantaaattttntgttggtctacaaaaaaaaatgtggacccatatatagatgaaatgttgtangggaatagaaatagagaccagaagttttgagtntacttgagttagctagtgaatgatatatgaagaaaaaggtgtgaaggatgagaattcatatgacattggtcactacaaaaagctat

SEQ ID NO: 279317 - DNA, 516 bp, Glycine max
  unsure (1)..(516): unsure at all n locations
tgtttttnnnnnnttctggtncctttgnccttagtataccgcctaatacactatgccacaaacctnggatctctgccaagctggctcttctgccgcctctanacctttttcccgaagtatgcactatggggtgctcttgaatctgtgcccatcatctacttaaaatctctacccttattctgcaccagaatagccttaaataggctctgaattcgcaacggtgggccttacgccacccttccccctagcgcgggttaatggattcaggcttancgcccgtcgtgcgttgagcctggatgaagacacctgttgtgcttaacacactaatctcgtgcttagcatgcngccctgatgcttgatgccttgctagattcttctgtcgcactaagtgcactgaagctgcgcttatcggtggatgcgcgcctatcccactgatgagctaagctcaactgtcgcttttgcacttcatgacttagcctctntttcactganattgacatatttcanattaaatcn

SEQ ID NO: 279318 - DNA, 496 bp, Glycine max
  unsure (1)..(496): unsure at all n locations
aagctanaanttttgagaccttgggcaggtccgcctgatnccttcgtatnacccacncatatataataanatatcttcgacatgtgntgatgatagantttatgatagtgagaccatgcgattgagtantatagggagcagttagagagcgtagagagagatagacagacatggatagttccgactatctatcaataccttctgacatccgtcgatacagaagaatctgacccacttctggtagtaatctatgagcgatataccctacacttgtcatcaccaaaagttctatggtccaaacgagtgcgattcttctttatgatctcttcttactctgccaaaagaaccgaagacaacgcgctgggttattatgagcgcttttctcctctgccaaacgacaacaataactgctaaatctttgtgctacatgccctacaaagatctatgactaccgccgaaatctttgatcttcctccctcagcaaagattcaagacn

SEQ ID NO: 279319 - DNA, 432 bp, Glycine max
  unsure (1)..(432): unsure at all n locations
aggtgcnatgatccttganagcactgttactcctctcacatgnnnaccagaaagaactattngctctttataagatatnagatcaccctggcggaccttcaaccgataacgtaaatgttgtaaaaaaaaaacaatatgataaaatttcgctatgtatcatgcactgctttgtcttcgagagatccgtttttgccagaaagaccattattcatatctattttgtcttaagcactcgttttttattatttgatatcagtgtaattatcacattaggcttgagacctaaaatagctctacacagcttaatttttagacctattataaaattaatctttaatcaaaacttaatgacatttaaagttattactccttctcaataatatatcctgcaagagtaaaatcagatttttttacttatgcctacaataaacg

SEQ ID NO: 279320 - DNA, 377 bp, Glycine max
  unsure (1)..(377): unsure at all n locations
gctgccactctcctcaagaaaaggatgtagaatctgaaattctgataccaatgacagatgtcgtaccggatgtcacgacatcacgcttcagaacatgcagatgatatttgacagtatgaacagattaaacaagtaaataacacaggagaattgttaacccagttcggtgcaacgtcacctacatctggnggctaccaagccagggaggaaatccactanaatagtgttagttcgaagatctaacaaccactgtttacaaccttctcacctaaccactacccatgcaacctctacctaagagccactcttagatatgagaacacctctcactccctctcaatcactctcccgtggttaccaataaatcanagacacac

SEQ ID NO: 279321 - DNA, 512 bp, Glycine max
  unsure (1)..(512): unsure at all n locations
gagagaaaanttttgatccccttggnananccantnggtgnacctgcatantccncnccannaannnannaaaanaagtgttggtaangaccaacgtgttattaatgcaanagagtgttttgattacttacttgcacaataaagctctncacggagagcactctactggtattgtgattagtccgttgaactcatggataccactatagaggttctcggatgcaacaccttgtgtgaaaaccgcaccatattacattcctctcatattggctccaagactcgaactattagttgattgaaattgattaaaagttctttcatggatttaacagtctacttaatgatgtataaagatctactgccactacaacttatactgttggcccgattaatttgtgaaaataccaacaattattgaatgagaatagacctttgacagtccaataaacatcaacacgaactttgtgcccttctggaattacagacagacatcttacacagtcttatcattg

SEQ ID NO: 279322 - DNA, 160 bp, Glycine max
  unsure (1)..(160): unsure at all n locations
gaccatgggagncctcaagagcttccgttgttcaatttcgagcttctcgatatgtgatttgcctgaatcggacatccgtgtgaaaagttataccaattgaatttctcaagagcttccgttgttcagttttgaacgtctcgatatgtgatttgcctgaatc

SEQ ID NO: 279323 - DNA, 258 bp, Glycine max
tgtaccgagctttttctcgcagcatacttcttgcttgaacaacatgattgccttaatgttgaaagctgtatgatgtgatgaactttggaaaattttaaaattggaagacccagaaatggttttttacatgaagcttcttttaaagaaacaaatgtggtgataatgtttactaaaattgttggtggaagcaatatagagatatgggctttgggccaaaacttaaacatacaacatctatggccatatgaaagatggaaa

SEQ ID NO: 279324 - DNA, 200 bp, Glycine max
atatgacaacacgaacgccatggaggcgaactgatctgacattggtcactacgtatggctattgttcaacaaaagggcgtcatccattctgctactgtcacgtagtgctgctataacaccaccactcttatggtaccaatgtctgacttaatactataaatcacctcctgatatgctccagggatgcgcagataataaca

SEQ ID NO: 279325 - DNA, 353 bp, Glycine max
  unsure (1)..(353): unsure at all n locations
tatctntcacctttgtatttgttttttatgtgtattggtttggactgggaaactgaaaaaaggcgtggcctttgtctgattctgctttagttcgctactgtttatcaagcatcctctgtcgttttgtgtttctctttgttttggttgtatattgctttggactgagaacaaatgtcacatttatctaatcctcattttgttgtctactgtttattttccctcctttgtggttttgtgtttctgtccattttgattgatgtctaaaaattttttacctttgtatttggttccttttttattccctctatttttctccatcattcttttctggttactctntacctttttcttgg

SEQ ID NO: 279326 - DNA, 430 bp, Glycine max
  unsure (1)..(430): unsure at all n locations
tatatactactcaagctctgacttgagtcatcaagagattataaatatgagaccatggcatgagtntaatagaatccttcaacatcttaatcaataataaacaatcatctatctttcaatctatctttcaatatcttctttcatctctttctacagaattntctgatttatttctcttcatctttctaaaagttttttatcaacactntttcttccaagaaaagttctttgttcaaaaacttgtgttattcatctttttcattctcttcttcctttgccaaaagaacgaaggactaaccgcctgaattattttgtgtctctcttctccctttgccaaaagaacaaaagactaactgcctaaattcttttgtgtctcacttctcccttacaaaagattcaaaggactaaccgcctgagaatcttttgattc

SEQ ID NO: 279327 - DNA, 409 bp, Glycine max
  unsure (1)..(409): unsure at all n locations
ttattggagtcnncncaaggacgctcttgaacgcggtgagcttatgtgtaagaagcgcctccgcanctgagctctaactacacaacgaaatcctctctaagaagctgctcaaggcaaaagtgctcaagacagcttctacgggaagctacctacacgatgaatggaagcatgcgtaacacttgctgtactctcatgaatgagagtcttgtgagatacccatcaaacttcaacttctgtatctttgtcttccatccaaaccaggctccccctccctctttctctccctactgcgtgcctccatagaagatccgctttaagctatttatacgacgctcagacccggagcgcagctccctctccatggctgactcgtatggcaaggcccatctcgcactgctttccttgttcg

SEQ ID NO: 279328 - DNA, 247 bp, Glycine max
ggggtttgagctgaggctttctgttcgcctacaccgatgatgcatttaagaaagttttatggccacccagctctggattggccccaccgactaagacgatacctgaggacaattttttctggcaaaagaggggcaaagataatctagggactttctagggaaatatgcagacttctaaagaagtacaagccatctgataaataaatgcatgttcccaaaccaacctccaatacaaagtgccgctaag

SEQ ID NO: 279329 - DNA, 375 bp, Glycine max
  unsure (1)..(375): unsure at all n locations
tagcttatctatttctatacacagnngatcgngagacaatgactgatttattcaagattctctactttaatcaattacaatgagatataatcgattacttctctctctataagtgttttagaagagaacaagaacactctaatcgattgctttgagtatctaattgattatattgttcttgaagtgtttccagtttttggaagaacactctactcgaattaaaagataatctaatccattacttcattgaattaatcaattatcttgtagatttaatcgattacaggcgcgtataactattttctctataaataactacttatgttctctctaaccacacaacatgttgtgcttctaaatgagctaagatcacat

SEQ ID NO: 279330 - DNA, 466 bp, Glycine max
  unsure (1)..(466): unsure at all n locations
agagagaanttttgagaccctggagggcnntggttaccctgataacccccannananaaangnaaggtagagagganaggttttatgagataaatgggtttttttctcagttaaaggaacacggggggcattaaaggacaagttatacccttattttttgattcattaatggttttgaagaattcttatgcaaaggccgatcgtttgattttctaattgtgctacaaaacaaataataggattggagaacgactgattaaagagtttattaggtgtatgaagttcaccctgttatcgtcaaatggactgtgattgcaattttacctgggggtggattaaatataggaaaacacttgtatattgaaaataggaaataggtggtatccatatatacaacatattcaaacgaggttgtggtggatttaaagatttttgtgtgaagaactataactgaatgatctttatt

SEQ ID NO: 279331 - DNA, 317 bp, Glycine max
  unsure (1)..(317): unsure at all n locations
ttatacttctagttttatagtcctcgatgggccatcattntcttctattttctaaaccctttttgcaccattttaattactgattggtcttaattgtcaattaatcaagcatttttattatttgggctcatttagctaatttgatgtttttaatctaatttcaggaattaatgaaacattgngcttaatccggattttggttatggacttgaagagggcaaattaagcagcgcttaccttaattaatttctaattaagaaatttcncaattttattttatgttgttcagtgtttatttcgttttgggccagagtatt

SEQ ID NO: 279332 - DNA, 613 bp, Glycine max
  unsure (1)..(613): unsure at all n locations
agagataganncctagagnccccttgnangangcgacactgattaccctcgtatntaccacacatctgtataacacctcaagccttgcaatactgacgacacaccatcgcaccttggatgctttgatgttatagatagattttcgtgaacgagtgcgtctattatagaccatgccagtcagatggtttctgtccattccacgagaaaatttcgatagtccatctatatcgaacaactcataagaaatattaacatacgtgctgtcatacatcgcacattaccagagaccaagtaatactgtatgtcacaatattggcaccagttacgacaattcacacgagagtgaatttgttaattcattaaagctgattagttcaaatattctacactgcaccacattttgatttattacttacacttcgttttcaagattattgtgtctacagatcaaacctatatttatagaaatgtcaaatgtggcctgtttattatcgcagatgaacatcagacaccaactaacactacacagcatcattcatttgtggctatgacaggtcacatccagtgatgatgatgtatatatgacacaggacaacattgatatatgtatttg

SEQ ID NO: 279333 - DNA, 228 bp, Glycine max
gggaaatgactgaacctgacttgatctgaaccctttatgactagttagggggttttggtttggccgaataaggtattaacaaagtgtttagttgcaatggacatgatctaagtttccccgttcaagactcggagcggatacttcattccggcagacacgtaaaaagagctcgcctgcgacagaattcttcgtattctaaaatgatcgggattatcctcgagatttggg

SEQ ID NO: 279334 - DNA, 371 bp, Glycine max
  unsure (1)..(371): unsure at all n locations
ttcatgcaagctttgccttantttctaagagctcgacaatggcgggtgtcggaaaccgatcacgcaccgtgattgcatttaaagctctgtagtccatgcaaaagtgccatgaaccatcctgcttgcgaactaggagcacagacaagaaaggtcctttctagagcattgattcaacctgcgattcaatctcatgtttctggtaatgtggataacgataaggccgtacgttgactggcgcagctcgcggcaggaggtggatgtggtggtctgtatccaggccggtggcactgaataaaggggctgatataatgcaagaaaatgatcaatctaagatcggatccgtgggtggggagacatacccatctggggtg

SEQ ID NO: 279335 - DNA, 519 bp, Glycine max
  unsure (1)..(519): unsure at all n locations
aggatgtananannntttggagacccctttgcgagagtgcccattcnggttgnacccctgcagtnaacancnacnananaacanananagacccaaatgtgagtgtgtggananagttttttttagatgagaaagaaggatgtgtgtgtatatcctcgcgtgcaactgagagacancgcggaggtggaatttcgatggacattggattagacacttttatttttgagtactaataaggtgttggaaatatacctttgaatagccaatgcttatcatatttaatttcttgaagaatcgattagagtgagaataacgtgaataagaggtatttttatgtatgtgagatgtgcacccctaggttgattaaaaagggcatgattatgggaattatactcgggggggctgataaatagagaaaaactatcaatttataattgagaatgttgttagctgacgataaatatccaaaggagtttggtgcgttaaggaatattgaggagatatattggaaattttttt

SEQ ID NO: 279336 - DNA, 496 bp, Glycine max
  unsure (1)..(496): unsure at all n locations
aacgtcgnaaaactgatacctttgtcagggcacatgannactttgagcacccccgatgacgccgatcgaacattttataaccgacgtcatgctttattcgttgcaggattgaattgtatactcggtatgcgacatctngcgtgaagcaccaccgatatttttcatccgacattgcacaattctttatacaaaagctcgctggtcgataatggtctctttacggcagagtaagttgtcttggtttggtgttgcataaaaaagtgacaatgtacttcggatgggtttttcgtgcgagttaaccgacattttgttctgccacgaaacattagcccacctctgccaaaaaaatgttgcaacccgctttttgcatattgagtgaacgagagattaaagactcaatacccacaaccggtgcgaaatatcccaactgaattattcagccgcgttgcgcattgcttttaaaaaaccttcctggcagatatagtttttaccatcc

SEQ ID NO: 279337 - DNA, 401 bp, Glycine max
tctcacttttgtggtgcggcgggccaccctcacctattgagatcctacacgaacgttgaccaaagtacatccttatcacgatgctgactttcatgtgcagactgagtgggcttatatcctgaagcctactgaccacgactttcttgggaagtaatcaggctaatactgcccacggtggtgtgtccttatgccatcccgggttgataaccggacccaccataactcgggcgtcattatcgctgcattggacagacaatctgtcaaagagggagtgcccgaggaaaagtgaccacctagaagactgaaaacgagtgctaatagtcttctgggcctcacaaacgctggggatgtgcggctaccagtatcttctctccgacacagaccagagccctcactcaatt

SEQ ID NO: 279338 - DNA, 475 bp, Glycine max
  unsure (1)..(475): unsure at all n locations
acgtgttctatccttgagtcgatgatctctganaccccnataangagacgtgggatatgtcaagttatgacgggcacagcaattaattcgcgggcgtgcacgngaagacgggcacatacattagaaagaatttcacattgtctgcttcaccatgagacccccatatgtgccagatgatcacatatttctgaaggcttgtcctcattcattaaagggagtggcaaacgactggctgtattaccttgctccaaggccatcacgagctgggatgacctttacacagtattcttagagaaatttttccctgcttccaggaccacggacatcacgaatgatatcttatgtattagacaactcgatggagagaacctgcatgagtactaggagagaattatcaaactatgtgccagttgtctccaccatcatattgtagagcgacttctccccaaaatgatatgaagacactgattctggg

SEQ ID NO: 279339 - DNA, 150 bp, Glycine max
actaatccaccaacttgttcatcaggctcctcaaaccgagacttattcggggtcgtatggaatgatcacccagagtccaagatatatactgtctaagggttctcatgagacaccattaaagcctcggctgactcataaccatcttcagct

SEQ ID NO: 279340 - DNA, 347 bp, Glycine max
  unsure (1)..(347): unsure at all n locations
agggcatttgatctttgaacccctgatctgaatcgcancaangagaatagagggggatgttattgaagtaagctttacaagcgctcttccggaaactccaggtaatacccccaaagacctgctaaaaattggaataatatccacttcttctgcaaataagattgatgctccatttttttatgtacaaatatgcctagtggaatgaatctggacaccttggaccattctgacctttatctttcccactgtggagatcaaaacttatttcaattggatgcgggactcttaccgagttgcaccctatacatgtttgagggaatttatggtgaacctaagagcatttcttg

SEQ ID NO: 279341 - DNA, 345 bp, Glycine max
  unsure (1)..(345): unsure at all n locations
ccttgcccggagttttgttgacctgtccaataaccttgaattccctctactaaatattatggaggacctccctgctttcttcttacgacacctccttttaaccatccttttcttccggaagccctttcgccgaatatctttattgaagcgtgggggcttcaccatcttgttcctcacacttttctttcccttgacgttcgcggttgactgtangtcngagtgcaacacacacgctacggtacacactcatccgtgaattgtacttaccgacacactgactcgtggctctcttcttcctcgagtgatattcatggatggtgctatttgatggaagacatgttactc

SEQ ID NO: 279342 - DNA, 494 bp, Glycine max
  unsure (1)..(494): unsure at all n locations
nggcctcgataactgatngctgcgtanagcgcatgaatcnttcgaactcatcagaccggacacctcaccacctgaccttgacaggtnttgtgactctttctggccttaaccatgtggaatggattaccagggtgaagttggggaacctctggtcacttccaaggtctttggttggttgtcttgccaggaattggtttgtggaacctgtggtcgcttgcaaggtttgggttggggaaagtcgggtcactgctangtctgtttggggtgctcacattgcaatctggttggggtgctcaatcctgctcgcaggtctcattttgagtaaggtgattcaattgctaagtgtccctttgatgcctaatggatangtagctaggtgtctattgtaatacgtataacaccatggcacatgtacaatgttctggnttttctttattgtgtgtgtntgagcttgaggagcacttgctacacgatttntaaacaagttatagaan

SEQ ID NO: 279343 - DNA, 344 bp, Glycine max
  unsure (1)..(344): unsure at all n locations
tggtaagttgaggtctaagtggattggtccttttgttgttactaatgcttttccttatggtacagttgagatcaaaagcgattccacacacaagagcttcaaggtcaatggacaccgactcaagccattcctcacaaacccttctttagtggacgtagtggtggaagagacttccttactccaccctactcttcctccaccatgacttanggagttttccttttcctatctccttctttacttttattacatttgtccgattctatttgatgggttaattgcttttaatcttttaattgtgctacattgaagacaatgtgttgtttaaatatggngggggggga

SEQ ID NO: 279344 - DNA, 428 bp, Glycine max
  unsure (1)..(428): unsure at all n locations
cactatataatactatttctatccatatgagctctgtcataattaacttaagcagtaagtaatgatatgcaactaaaagagtgtaataacanatttgtatttacaagtggcaaaaattggattactttaatntaaatagtaatgacacatgtacctatagacatggattggtaagattgataaggaacttcatatcaactatgttgcaagcaatagaagtagcgttcattcattgataaaatatttagcctcggcttctttaaagtcatatcttgtataatatttaaaaagttaacgacattacatgatgaatacatgacaaccatatttgtttcttcttgtatacatgcggaactggataccagattntggctgatacatataataaatngacttaaattaaataaactcaggatattaagctcgat

SEQ ID NO: 279345 - DNA, 352 bp, Glycine max
tagcttctacttatgtggcagggcgggcttccttcaccttcttgtctccaacgcgaactttgaccattgttcttccttcccgcgatgcttcttttcatgtccgcctgagtgggcttatagcctaaaccatacttcccacgatttccttgggtatttatcaggctagttatgccgccgttgttttttcctaaacccatcccgggttcataaccgttccccaacataactcgggccatcattaccgctgcatcggacagacaaagctgcccaaagagggagtccacggaggaaatgctgaccacctcaaaagactggaaagcagtttctaacgattcttctgcggcttccacat

SEQ ID NO: 279346 - DNA, 424 bp, Glycine max
  unsure (1)..(424): unsure at all n locations
cacccagctcgcccaggcgagctaggttgcttcctcanaattaccagcctgctgaaggaaatctctgaagggccaaagtggccttgttggtaattggcaccccaattttaattaatacaacccccctggccttttttggtgattctttttttcgaaaagtaccggaacctacagatttcgcaacgatacttgtttcttttccgtatggtacgggacccttgcagattacataatcatcccctttttttacttacggaatgttacgaaacctcactaattgtgcacgatgctttctttgatttncgtgtgtacggaccttacngattggcatcaaactntctttcggtttcggcacatcacggaactcacaaattgcctatgatggtgccaagcacctanaatgacaaatacagttgatgcccca

SEQ ID NO: 279347 - DNA, 366 bp, Glycine max
agctttgagtttcttcattttcctttgcagatgcctctttgctagcataataaatatatacaattatgttcatccttttctcttagtagcttataatttatttggcgtaattttatcatctgctataagtcattttgcacaattaaatagaagacctattgtaaattaatgaagattcacgattttcttaatgatgtcagtatattaaaacgaatgttagcatttagtaaatgttatgtttggcttcattctacaatatattttttattctatcaactgttaaataaaggttctcacatcgaccatgagattcaacacatgtccatgtgggatataagcccaattcttaccacatggactaacatt

SEQ ID NO: 279348 - DNA, 308 bp, Glycine max
  unsure (1)..(308): unsure at all n locations
actgttgaaacaatggaacgtgaaatcattgaaaactttaaatcatttgctactggtaatcgattacaacaatctggtgatcaattactagagagntaaaactctttggtaaacatgttttgagaaanatccatgtgctactcagttnttgcanaaccttntcatacttatcttgattcttgaatcttgagtcttgaatcgtgctcttgattattcttgattcttgattcttgaaaacttgaaacttgaaacttctcttgaatctttctcttgattcttgaattctttggcatcatcaaaataacctt

SEQ ID NO: 279349 - DNA, 323 bp, Glycine max
tctttcttgaagactaactggatgcgtcggtcaacttggtaacccagctggccttgaatcacaaatctgtacctgtcgcaagggtttgtggtttgtgctcctctgctgaccaccatacagacctttgcccttccatgcagcaacctggagcaattgagcagactgaagcttatgctgcaaatatttacaatagacctcctcaacctcagcagcaaaatcaaccacagtagagcaattatgacctttccagcaacagatacaaccctggatggaggaatcaccctaacctcagatggtccagccctcagcaacaacaacagcag

SEQ ID NO: 279350 - DNA, 529 bp, Glycine max
  unsure (1)..(529): unsure at all n locations
agaggtgggnnnactggatanccnttcgtaggagcgnctttgtntccttcgcataacctgccactatanaatactcaagcctcatgatgatgaatcaagtntatttctgttgttctgataatgactatgatgatgcgaanatcccggagaatgattgcgagactgagtcaacctgttcaagatcaagtttagtttctagtgtcaagattagaaatcatgaagattctagaatctagagaggtttgatttcgagattcaagagaagatgaattcgagtttctagagaagatatcatgacgacttctcaagggaggtcttgaaaagattcttttccaacaacatacatagcgcaattctgtttttcaaaagagcttttctcgcaattatctaaggtaccaaagttgtactctctggtaatcgattaccagtttcctgtgattgatgaccagtggcatagtttgattgtcaaagctttcaactatatttgcgacgttgcaattgatttcaaaatggtggtatcgattacacg

SEQ ID NO: 279351 - DNA, 217 bp, Glycine max
ctcactgccggcttccatcttgaacctgtcgagcatcttgattcatgatctgccaacgcgacttcttgcgccgagggccaaccaccaatgtatgggtaaacactaatcccggaatgtgttcctagccataacatctgcatgcgggctcttttcctatggtcgaagtgatattcaatgaactgcgcgctattcggttagaaagaactggttactgtag

SEQ ID NO: 279352 - DNA, 397 bp, Glycine max
  unsure (1)..(397): unsure at all n locations
ttatattcccctataatgagtcgnagaacaagggaatggccggctgattacaacggattgactgggaaaagcctggcgttgcccaacttagtcggcttgcagctcatccgcctttaatcagctggcgtaatatcgaagaggcacgcacgcgattgccgttgccaacaattgcgcatcctgaatggcgaatggcgcctgatggcagggtctcatcttacgcatctgtgcggaatatcacaccgcatatggtgcagtctcattaatatgttgtctgatgccggatagataaggcatccccgacacgcgacagcacacgctgacgcgaatttcttgagaagggtgggaattatactttgagagaacatgtctgctttaactttacaacaagtatacattg

SEQ ID NO: 279353 - DNA, 325 bp, Glycine max
  unsure (1)..(325): unsure at all n locations
agctntccgctaagagatctangagggacgtcgcggctaaagggaccagtgccactcccgagtttgatagccaccgtttcaggagtgctgattagcagcgttntgaggccatcaaaggatggtcgttccacagagagagacgcgtccagctcanggatgatgagtacancaaatttcaagaagagatagctcgccgacatttgacgtcgttggtcactcccattgcttaagtttgacccagatatagtcgtgggagtttatgnnncatgcttgcccacagaagaaggagtgcgggacatgcgatcatgggtgaggggtcagtgga

SEQ ID NO: 279354 - DNA, 446 bp, Glycine max
  unsure (1)..(446): unsure at all n locations
tcaagaaattatttgatgatgcctaggaatttcaaagatcattctagatgaatttcaaggatgaagaaagcaagatgtcaagcaaagcanagatctcaagataagaattaagatagactcttagaaaagtttttgaaaagcacaaatgattggccaagtgagtttctatcttaacaaaaacttttccacgcattntattctctggtaatcgattaccaaaggttgtaatcgattaccagtggccacaaagctttctagaaatgttttcaaagttttcaaagctgtattcgattaccaaaactacgtaatcgattaccaatgctttaaaatggttaaaaatgattntgtaagtgtgtaatcgattacacatcatatgtaatcgattaccagagcttttgaacgttggacatttgaattttgaataaaaataactgtgtaatcgatta

SEQ ID NO: 279355 - DNA, 420 bp, Glycine max
  unsure (1)..(420): unsure at all n locations
agctttgtattgtagaaagtgtaagacacccttatgttggttagagctcggagaagacctcaccttacgacctgaagcggtacaacaaaccaccgagaaggtaaagttgatccaagaaaggatgaggactgcttagagtaggtagaaaagttatcaagataagaggaggaaacacctggaattcgaggttggtgatcatgtattcttgagagtcactccgtggactcgggttggtcgagcattgaaatctcgaaaactcacacctcattntataggtcttttcctggaattcaaaatgacatctccttttagtagaatctgaaacacccctcagccctttatgttttgacaaggggtattgactccgaatgttgtcattaaccttatttctganaatctatactaaatatcctttaattt

SEQ ID NO: 279356 - DNA, 404 bp, Glycine max
  unsure (1)..(404): unsure at all n locations
gtaatcgattacaataactctgtaatcnaggttatatatagagntttttggggtaaagaaactnttcttcacccacactgtgatgatgcataatgaaaaacatatatcaaatgtactaagatgcaacacccaagataacaaccaatacaaatgtcactcaagggagttgagcatacaaaagccaaaacttcttcaaaaaatcttcaagcttttccttaagcttcaagatttagccttaggttgttcactatgtttctcatgttgctccccttatctctaacacatggaactaagggcgacctctagccttagtttcatattcagactgaaactgacgagaacctctccatgaatntgtggagtgactcatcttcgtcctgctgaatgtttgtgagtgcaactat

SEQ ID NO: 279357 - DNA, 356 bp, Glycine max
  unsure (1)..(356): unsure at all n locations
agcttgtaccttagtcatccataaacctatttggaacatgtgacattgtcataccctaattacatccggtgattattatttgatgatatacaacctttgattggccgcttcaagatacttggcaccctgtgttgcacaatatgtgaagtcccgagatgtgccgaaaatcaataagaagcacgcttacgcgatccgtgaanattccgtaatgtgacagaaatcgaaaggaagtgtctttcgcaatccgagagtgttcgtaacttcttcgaaagctaaaaaagagtaaatacataatccgtaatgattcgtaaccttgcggaaggaaaataagtatcggtacgaaattcgtaaagttt

SEQ ID NO: 279358 - DNA, 401 bp, Glycine max
  unsure (1)..(401): unsure at all n locations
ggtagaatggctagacatgatacatgtcagggtttggttnggttttatgataaaagggatgccccacattattggcatgacacaaatgcaaaaatgatgatttggaaactttatgcaaaactggtcatgcatgcgcttatgcggacgctcaagtgtcaaatttttatggtcaagtgatgctacggttcaagattcatttcctctattttaaatcaacccaatgtgtccaaaatatgttcttttatcaatttgtgcattcctccaagtccatttcgggcgtgcggagaaatttttacagcattcacccttcacgtgtagacacgtcntttcttcaaaaatcggatatgatcaatgaataatttttcaaagaaaagttggaaatcatctcttttcaaaagcat

SEQ ID NO: 279359 - DNA, 375 bp, Glycine max
agcttagagcatacacattcacttgctaatcatgaacaactcgctaagccacacttcaactctagaacttcagtagattaatcggcttagcaagccaccataggctaagcgagtaccaattactcgctaagcgcatcatgcacgcttaatggatcttgtaggacaaaataacctataaatcatgctaagccgggtcaacttgcgctcttcccaaaactctcttaagtttgcacttacccaaattgggcttagtgcacatttacgggctaagcgcgagttaaaaatattaaaataaaaataatgatgagggagtcaagaatgcgagaataccaaaggtcaccaccaatgcacactaagtgggaaaagcacctacta

SEQ ID NO: 279360 - DNA, 538 bp, Glycine max
  unsure (1)..(538): unsure at all n locations
gcgtacttnnnnnnnaaaaggggntttcagtcnatntccncacggtcnccctcnntacnctgncatccgtngnncnnnnnnnncnnnnngnnnnnnnnnnnntttnnnnnnnnnntnnnttttcccnnnnnnnnnntnnnnnnnnnggttnttgtttaaaanntntggggggcccncccccncnccncncccncnctnnnntnntccctcnngnnnnncctctctcccctgttcctccttgcccccccccccnnttccccctntccctntgtctctcnntggnnttgtgcctccccttgccccttcttcttctnnnttcttcctgcctttccttttgctctcggnttttcgcttgggttgttccctgtgttgctcctgtgggctcccttntctcttccccctgggcctgtgggccgcctctctccttcgtttcttcttcccgctgggcctgccgnggccctctccctgggttgtggggtgcctcctcctccccctgctggctgctgggggggccccttncgcccggggggtgcctccc

SEQ ID NO: 279361 - DNA, 274 bp, Glycine max
agcaaagaagtttttatgctgttgataagaacgatattcgtgccaacaataattttgccgttttaggaagtgattgataactttctttttataatgtaaagtactctataacttttttcttataaaaagaaaccgaggaggtcagattatttacggggggagatatattaatgtgtcaaagtgctctctaacataatagacttatcatctatactaatttctatcaatctttgcgagtaatccctgaatgtcaggaattctcgatgcttatgtc

SEQ ID NO: 279362 - DNA, 458 bp, Glycine max
  unsure (1)..(458): unsure at all n locations
gcatggactgaacgacgttcgatcnntgactgnngaaaacgccccngnannnaagnncttatatattataanggtttttagttggagattaanatattatattgggggaggttataatataaagggggtttgaaataattattaattgttgtatttaatattaattgagnttgttcattttataaaagatatgatagattgtaatgtatgtttttaaagtaatataattatatatgaaatgaattttatggaaaagatggtttgagcattatgaagaatatttctttcactaaaaatgtattttatttattaatgaataaatgaataaaatgttattatggtttggtatttagatggtgaagaaatattattatatattattgaataaattaaaaatagatgggacgataagaaaaatatattaaaactaatttaatattatttgataataattgaag

SEQ ID NO: 279363 - DNA, 518 bp, Glycine max
  unsure (1)..(518): unsure at all n locations
aggcgacgcgccccngttgaccgtttacttcgatgcnatagcaccaccncgcgagatccagcacagtacccgctgatagcgtgcaggctagcagtatttatgcaaccttcnanaataanttttcataacgatttatgaacataggagactgcttgccctaaggcacaatctggaaataaaaagaacgaacacgctccataagttgcttttataatgactcttaggactgtttgattgctgggaatggaaatatgagcattcatgaatagaatccagatacatacttaccacatatgtgaacaatgcattatgtcacagacttggagtaagaatatcatatcgcttcactgagcttagtaacctatatgacaagccttcctcaattaggaaatccagacgtcaggaccttatactttccgcgagcataactatgataggtacaaaatacgtatacatccgtactctactggaaaagaattacaaaagggtcatgggcgtatttttgcaaatgtcgtccg

SEQ ID NO: 279364 - DNA, 261 bp, Glycine max
ggggattgactgagcctgtctgtgactgagccccgagggaggctactttatgaacagttctactttccaaagggggcagtttcacacatacttggtggattaacccccctattttacctgtaccactgtgaaataggggagacagtccttattatagactaacgtaaactgaatacggagattagcgtcgtttttcattcctagagacgttccaaagctcgaagattttaaagggagtccttcccagagttagcatttttc

SEQ ID NO: 279365 - DNA, 346 bp, Glycine max
  unsure (1)..(346): unsure at all n locations
agcaggaggttctattaatctttctcaaggtntacgatctgtgaatctcaactctggaagttcttctaaaatggtatcaaagcctatccttgatccattcaaagagttacccaccatgttattcatgcaccaagcgcaaaagtgttggacttcatggggtgtattggataaaacccaagttccacattggctagagatacggccaagatagagtatataagtgatgtgaaaccatcatcctatgagcctaactttgacgtcgaagtaattcaatgctgcgcagtgcatctagtgtatatggaatgaaagtcaatttataccataataaataaaagaatctttcatg

SEQ ID NO: 279366 - DNA, 469 bp, Glycine max
  unsure (1)..(469): unsure at all n locations
aggggatttgagctgagtcattaacttgaaaccccattaccaagccccagatgtacaggcttaacgggaagaacaaagcttcatttatgctgagcgaccgcaacacgagggagagactattgcctctaacaaaatgcctccctcaaacaccctaagcaatcgatgtcttcataggcagcataaataaagatctaactgccggagacccagaataatcacgatccatatgactgcactctaacagaaagaatggagtgaaagtttaatgcgcccacaagtgaagaactcacagcacactagagagttggcgatgacaaccggtactcatttcagaacatacacaacacgcccaactagagaagtatagatcacccaatgataccgtaagttagagtaatattcctacggagcaatgaaaaactgcctgcccggcattatagtgatttaaggttatacatgctaacctccn

SEQ ID NO: 279367 - DNA, 398 bp, Glycine max
  unsure (1)..(398): unsure at all n locations
agcttggctctgtgccatcanaaccttctcattcttaagttcctcaacctttaaacagacatttcggtcaagtaagtgtttttctgaatcaaacagatcaaacttgatcttctgatcatctatgcccgtttccagtttaccctttctcatatccaccacacaatcggcggttaacatgaagggatggcccanaatcaagggaattttancgtcctcttcaatatccattacaacaaaatctacagggaaagtaaaatgttgcaccttaaccacaacatcttcaattatgccataaggccttgtaatagaccgatctacaagttgtagtgtcattctagttggcataatctccaactcttcaattctcctgcacatggagagaagcatcaaatgtatat

SEQ ID NO: 279368 - DNA, 338 bp, Glycine max
taaagctatacatacataaccatgtaagagaattaccaagtatgccatacaattatgatttactttgtgtggcatgtccaaagggaaaacaaatcaaaaactccttttcaagtaaaaacattatttccacctcaacacatctaaacttgttacatcttgatatgtgaggtctatctagaacaacatccataagtggaaagaagtatgatcttgtcatagtggacgactactctacatgttgaattagagtgcatgaagatttgaagactagtcttaggatcttttgattttaataattttgcattgccaaacatatttctaaagatatggaatattta

SEQ ID NO: 279369 - DNA, 518 bp, Glycine max
  unsure (1)..(518): unsure at all n locations
agcnncagcgagcgncgttagtncgatagatantgatagcacactacaggcgaccncgagcatcgtatccagagatcctgtagagagtgagctgcaggcagtgataacttctccgttttganatatgaccaacgcagcaaccctgagctcacattctagaacttcaataaatcactcggcttcgcaagccggctatgctcagcgagtaccaatcactcactaaacgcatcgtgcacactgagtggatctatgagagacaagttgatcttattgatctgctaaaccgagtcaacataggctctgtcccaatctctattaagctagcacctaccgaactaagtcttactgcacattgcccgctaaccgcgaacgaaaactagttaactttactagagatgaaggaactgatacgcttgaaaggccaatgacacatccatggccttctaagggacaacacctactaaagggactgtggtactagccaacggcttacaaaacattaggtagccaattggggg

SEQ ID NO: 279370 - DNA, 523 bp, Glycine max
  unsure (1)..(523): unsure at all n locations
nggggnanncnnnnnnccgacacgttttnccccntnctcacgccncccccccncatcnntcaacagnncgaaaanntgcgnnnncnnnnnnnnnnnnngnnnnnnnnnnnnnttnnnnnnnnnnnnntnngttgtgngnnnnngggggnntnnnnnnnnnngnnnnntgtnttnnntnnnnngtnggggnnngnnnnnnnnnnnnnnnnnnnnnnntnnnnnnnnnntnnnnnnnnnnnntngtnnnnntntnttntnnnttnttnttggtntnnttgttttttttttttttgtttttgtttttntggtttgttttttgtgtntggttggttgtggntttgttgttngttttttttttggtgtgtgtttttttgtttgtgtgtggttttttttggtgtggtggtttttttggttgggtttttttgtgttgggttttttttgtttttttttttgggtgggttgtgtttgtgtttgtgtgttgggggtttttgttttngtggttttttttttttgtggtgtngtt

SEQ ID NO: 279371 - DNA, 413 bp, Glycine max
tcttcttcagcatcttttcttggctagaaacatgctctctggcaagtttcccttggagttactcaactgctcctcaatccaacagttggacctttctgataacagctttgaaggagaacttccttccagcttggacaaactgcagaacctcacagatcttgtgctcaacaacaacagttttgttggatctttaccttctgaaattggcaacattagtagcttggaaagtcttttcctatttggtaacttcttcaaaggtaatattccgttggagattggaaggctgcacagattgagctccctttacctctatgacgaccagaattctggacccataccaatggagttaccaactgccaagcttagaagaagtgacttctttgaaatcactcacatggctcattccaaaacta

SEQ ID NO: 279372 - DNA, 370 bp, Glycine max
  unsure (1)..(370): unsure at all n locations
tctctaaatcaatgcattggtgtatcagttcactcacttgtattaacggctctnntgttctatttcaactactattttagtacgtgaatngcacccatcaaatctagtatataaattctattattaaaactaattattataaaaaaaatcttataagcattaattaaagtaaataaatattatcaaatgacctagctagataaagtttanataaatataacaattatcaatataatcggacaacataattaaaatttgaaaatgattatcagtcttaatatatttcgaggcttaatcaatgcagtcaagattccaaatatatanactaaaataaatacatatttactacagtattatatctttaaatttc

SEQ ID NO: 279373 - DNA, 297 bp, Glycine max
  unsure (1)..(297): unsure at all n locations
tttcttgtatgtgtttacatttcaagtgcatatatagctntagcccaacacttgttttgatccagtgacattattacaacaacaatagtcctacatactacatgcccttagagtttagaagatttgtcaactggatccaaaaccatagcagaaaagaatgtaaataacatgtgaataaaaacctgaccaaccaaattgcanatatgaatttgctggggaagaaaagggtagtcagtataagtgtataaccaacaaccggatcagaaatgtagaatgtctccctgtgatactgttgag

SEQ ID NO: 279374 - DNA, 403 bp, Glycine max
  unsure (1)..(403): unsure at all n locations
tgctgttgaacgttacatcaagacatattttcctgatgctgattttgatgncctttttgcttccttctcctggaagattcccgctctacgatccaatggtcctttctcctctctcttttcagatgttgactttttcttctctttttagtttaacaccaggacatgtcgccattntcattttcttttgtgggtgaggttttctcatttcttgctttaaaatgcgtgagtttcgttttttcacgatgttgatttcatggtaataagctccctgctgagttcaattgccctgtcgttttttctgaactgangttatatgtgtaattctaattgtgatcacgcagtcatgaatgcatacnagatataatttatttaattaggagctgatatctgactacaaaacact

SEQ ID NO: 279375 - DNA, 200 bp, Glycine max
ttgcttccatctttttccttatgcttgcagaaatccgagaagtaatttgtatccttgaattcgtgcttgttgtgttgaaatatggagttgtagaagatggcttgatgcctaagtagcgtcctgaagtaatggggcgcgcctcattgctccattgtctttatattcatgactacaagatctcccacgaagggctcattgaa

SEQ ID NO: 279376 - DNA, 488 bp, Glycine max
  unsure (1)..(488): unsure at all n locations
aggggtaatttgagacatanagancagttgatcctgttgaccgctgatnacacacnctttaaagaaagcagcagcgttgtgtgtggaaccacncgttttaatgggttttaccaaaccccggtgaagccgatgtgttcagaaatgctgcctgacatgctatattgcattcttattttcacgatgagcctataattgctcttgctacttgttcacatactcagctatagcctgcgcatccttatgcttgaacatagcactgttatgcatatgcaacaaatcaagaggagtccaagggattaatccctacgttatcttagatggtgaacaactatttgtgctatggacagcccgattataatcgaactcaacatgaggcaaacaggcttcccaagatttaagatttttcttgtagacaatcctaagcagtgtgcctaaagtcctattgactacctcagatggaccattaggtggtgggtgacaagtactcg

SEQ ID NO: 279377 - DNA, 243 bp, Glycine max
  unsure (1)..(243): unsure at all n locations
tatgcttgagattatgatttgtantncagtgaaacttcctgctgttattcgttgaccacaaagtggtacctggagatatgtcgcgggggtcaggagaccttggggacgtcatgtggggtgctattgcccaaaaccaagctagaccaatcccgacccaacccgcgcatagtcggtcagtgagaacctgtgatntacctaaacaagcgagctcctggcagtcaacagatggaaggaacaaagacc

SEQ ID NO: 279378 - DNA, 418 bp, Glycine max
  unsure (1)..(418): unsure at all n locations
aatcttanggaacccctatatacgccgctatcgctacctgctacacacgttatcccacttagaggtaaaggatggatttatcgcaattggggttataatgaacatgtgtagggatccttagaggatcaaattgaaatttattttgggatgtttattgtattgaaattctgcctttatgattataatcatgagattgttatgtttgatgggccaattgatgcccttatgtgaatcggttcaaaaagttgagtgctttcggtgttttcgtgtttttgaacctatgattttgattcctttgattatgatatgattatgtgaaatcgcttgacgggtctaatcatatcaacataacatattaatattatcactatgtgacatgtatatgatgcatgaagcgtgataacatgttgccttagga

SEQ ID NO: 279379 - DNA, 311 bp, Glycine max
agtaatgtaagcttgaattttaatcataaccagctatgagttatcgctgtgttggatacactcgatatagtgtatggcctgcttgctacctagattgatcaaatctttgcagcatcaaggtcgatattatggttagagaataccgatggtgttttacatactactatggtattgttccgtaataactaataaccctatatgagttgacatccttcaggaataattatcaaaagttacataacatattatcttgtgaacatattatatgagatgtaaatgtgcatattacaaacgtgagctgtatttatatt

SEQ ID NO: 279380 - DNA, 525 bp, Glycine max
  unsure (1)..(525): unsure at all n locations
aggacgtcnganccttgtatgaccnctttgnagtanccagcgttgagtccgcttgtttgataccgtttagcananacccacacnatttggttatnatttctcncanantttaataaaacgagaggaagggtatcttanagagtttgttagtccgagaccccacgcaataatggggctggtgtaataacatccgttcactcgacctgagatagtatgtaatacactaaattgttctgatgaaatatgggctggcctacatatacaggctttcatagtatataagaacccacaccgtgctcattgaacaggccaggatggaccttcttcatgaagtattcagcagtgtaattaggatcatgtcccatattcaatctatgatgtattgcatgacacgtgtgacagaatgacatgagcggttacacgatgtatgtgagagcatgaacgggacctgaagtgtatggccatataccgggactacgccatgagaaggacttgctcgaaaaaagtacccggaattgtcctacn

SEQ ID NO: 279381 - DNA, 377 bp, Glycine max
  unsure (1)..(377): unsure at all n locations
agcttcatggtgaatcaaaagtgattcgaagatgttttgatgataacaaaagatgatgacaaaggtgatgacaaaaagctcaaatgtcaatcaaaggatgagttcaagatattcaagaagaaatcaagagcaaattcaagactcaagaggaaaagttgaagaacacttcaagattcaagaagaaggatgaattcaagaatcaagattcaaggatcaagcttcaagaatcaagatcaagattcaagattcaagattcaagaatcaagagaagacttaatcaagataagtatgaaaaggattnttcanaaactaagtagcacatggattnttcacaaaaacatgtntaccanagagttnttactctctgtaattgatta

SEQ ID NO: 279382 - DNA, 435 bp, Glycine max
  unsure (1)..(435): unsure at all n locations
cggacttcctgtgttctgagaacctctcctttctcaagtgtactttaacccaatcacctggttcaagcacgactgtctttctgcttttgttggcttgccttgcatagctcgcatttttcttttcaagttgagccttcacttgctcttgcaacttcttcacatactcagctttagcctgtgcatccttatgcttaaacatagcaatgttaggcatagccaacaaatcaagaggagtcaaaggattaaatccatacattatcttaaatggtgaacaattagttgtgctatggacagcccgattataagcaaactcaacatgaggcaaacaggcttcccaagatttaagattnttctttaaaacaatcctaagcagtgtgcctaaagtcctattgactacctcagtttgaccattagtntgtgggtgacaagtagtag

SEQ ID NO: 279383 - DNA, 413 bp, Glycine max
  unsure (1)..(413): unsure at all n locations
ctcgccggacttaagcaccgcgctcagctgtcatttaatcataaaagggattgtaagttattatctcagttttccttaccaaataaatgggtcatttttaagggcccacgccttaaaatgatcacctttcaaggaaaaagaatcgcttgattcacccttaaggaaaaactacgtagggctgaattcctctttgatggagggtacgtaagagcaagaccccgcttttgtcgacctcaaaaataaaaagaattaaaagttaagataacacaatttcacaactcttaaaaataggttgttggtgtcctttgagacanaagtgagagggtgctaataccttctcaaacgtaaatacaactcccngaacttagaattttattttgaccgtgatatgccatcattttcttctattttct

SEQ ID NO: 279384 - DNA, 503 bp, Glycine max
  unsure (1)..(503): unsure at all n locations
agggtggaaactgatagcttgtatnaccacttaancnttgatagccctatccangctcatcttggtgtgaagctcttccttcatgtgttattcctagtggatgctgccgcctctaacctcttctccttggccttccgctgcatcttcattggtgggaaaataccattaaaaggaccctctttgaagcttcaaagatcccacccttcatagaggctccacaagcaaagcttccatcaagtggtaatcagaagcataaagcttcaagtaggtgctccttaaacctncattaattttttttctttaccttctcttccattgttgttcttcattttctccatgtatctcctcacatgtcttgttctaaatgtngttaacatgattctttagagtttccaacgattaaacttgctatagaaactagatttgattttctatgggtcaaatttcttgttcttgttcttgacaatgaatgtgttgagntaggttcctttgagtttgtcttg

SEQ ID NO: 279385 - DNA, 281 bp, Glycine max
gtttgatcagcgaactcataatggtgtacctgtcgagtaagactccttcttatctgcacaaccaaattattcaagcacagtcgataatatagaagatggaactatcacaattagtattccttcaaagaatgggaaagggcgtccatcctttaacttcaacaaagtctttggaccatctgcatcccacagttggtttggttctcagtttcagctatctccaacatcactataatttagtaaatattgaacaaatttcttctcttgtgttcaacggacgtctt

SEQ ID NO: 279386 - DNA, 423 bp, Glycine max
  unsure (1)..(423): unsure at all n locations
agagattgaaactgatgcctttgnanagccatctgatccttgtacaccncaattgaagaatatgcgagaagtaataaaaaaggtttttgatatgttctccatagtactccgtganagttaatcaacaggacctatgtaaccaccggcaagcaagaaacattgaattttacaacttctcacatacaacagaatgcagctactagacaaggttaccattgaaaactttacgagactcaccagttgcatacatagaagttggcttcactatccgaaccctgtcaaaaccccccctttgggagggaaatttttccccccccccaattttaccctaaaccaaaatttgagggggaaaccctgtctttttatctaaaagaaaacccacttcttttttgttacaaagcggtaacctcgactgaagatatg

SEQ ID NO: 279387 - DNA, 414 bp, Glycine max
ctttgtgattgcaaaagcggctcgatatgatcagatgattcatgattatcatgctcccgctttgacatgatgaccaccagcctgtcggttgaggacttcaacatattacaaatctatctgcatctagttcactactcctgaggattactatgagagctcttatgatacaagaagaaagatgatatcttgaatatatattcaaggagtctgcttcaagaatcataatcaagatcctagattcatgattctagactcacgagaagactttgtcaacatcgtatgcaaaggatgtatcgagaagtaatagcacatggatctgtccaaaagcatgttaaccaaaaagtcttactcgtctgtaatcgattccacattgctgtactcgcttaccaagagcataattgacttgaatcagtg

SEQ ID NO: 279388 - DNA, 339 bp, Glycine max
  unsure (1)..(339): unsure at all n locations
aggtganattgatccttgaagcgctgatcttaatcctcaataccangtgggaaggaagaaatgtacgcctaggctttttttttattgctgaaaatgcccagaaaaatcacccaggccccgatgtgcgtccttcggagaaccgggagttaaacgtctcaccctatgagcttacgccttcatgcaaggaaaactcaccaccttcggagatcaagaccgggagccctagactgggttataccatgtactactgaacacacttaagcgagcctaataaaagttgaattaatgtaaaaaatagcacgacgcgattgtttgcgcactccttaatatgcgccgtcg

SEQ ID NO: 279389 - DNA, 345 bp, Glycine max
  unsure (1)..(345): unsure at all n locations
acctttcatgtgttttttggtttccaaaccttatcctttcacagaaaccaaaagggggctatatcttttaattctcttctcccttggccaaaaaaaattcaacaaggactaatcgccctgaatctttttgtgtctctctttctccttttccaaaaaaacaaaggactaaccgccttgattcttttgtgtctcccttttcaaagaattcaaaaggacacagtctgagaatcttttgatcttctctttccttnaacaaagatttcnaggactcaccgctgagaatcttttgtttcccttcacaagtttcaaggactaaccgcctgagaactttgtcttaacacattg

SEQ ID NO: 279390 - DNA, 82 bp, Glycine max
ctcgacgacaaattcgtaccctacatcttattcactgtcgactccgatggtcaatgctttgctcgcttacgattacatgcac

SEQ ID NO: 279391 - DNA, 347 bp, Glycine max
  unsure (1)..(347): unsure at all n locations
agcttgcttgataagcttctattgtagctggatctttgagcttcaatgaggtccttcaatggtgatttttcactatggagatgcagcggaagataaaggagaagaggtgagaggagacgccatccactacggaataagccatggaagaaggagtttcgccaccaagaatgtgtcttggataagaagcttggagagaatgcttcaatggaggaagagaaagacagagagaaagagagaggggcgagcacgacattgaaggaggaaaaggtggagagaagttgaactttgagtagtgtttcacaagactctcattcatcanagttaccacaagtgttacacatgcttct

SEQ ID NO: 279392 - DNA, 289 bp, Glycine max
gtctactatcattgatatcatctctttctccatcatcgggggcaccacttgagctgccaaatccctccaccttttggcgtatcctgtgaaagatttgtgctctcttttacacatgttctgtagctacattctattcagagccatatcagaattgtaatgatactacctaacgaatgcaaccattaggtccttccaagaatggactcgggaagattccagattagtgtaccatgtgacggctgccccagtaagactttcctggaagaaatgcatcaacaattattcatct

SEQ ID NO: 279393 - DNA, 333 bp, Glycine max
ttatctttcttattataacttcgcggagaagctgcgttgagagaacttccttgagatgctagagcttatctacacgcacccatctaaaaactagagctcacctccttgagaaacttccttgagaagctagagcttagctacacacacccctctaataactaagctcacctgcttaggacgagaagctagagcttagctactcacccctattatagctaagctcaccctcatgacgtaatacatgacaatacgacaaatatcctactacagagactgctgaccatgccctgaaatgcgagactagcaccctatactgctagaatggccgacata

SEQ ID NO: 279394 - DNA, 342 bp, Glycine max
ctgaagatgtacgtgctaaagttgttgaatcataatagaataatttgttacaacgaataagtgttataatgctgggcgctctattggacaaaggagacttaaccaaattgagtgatatttaactttgctaagatagcgagtttcattgtatttgaccatatagtgtaaacactacttgagtgattagaacatattctctatcaaacatatattatttgtaaaagccataagtgacttagagacgaagaatacttgtgtcttaatctcaaagggagattaactgcaccgctaggagtgacctagagagctcttgatatagccataagtgacagagaatactat

SEQ ID NO: 279395 - DNA, 399 bp, Glycine max
tgcttctcgtttattatgcgcccgaatcggacatccatttgaatagtttagaccatttgaatttctcgagagcttccgttgttcaatttcgagcgtctcaacatattatgcgcccgaatcggacatccgtctaaaaagttatgccatttgaatttctcgagagcttccgttattatatttttagcatctcgatatgtgatgcactctaaaaagttatgccatttgaatttctcgaaagcttccgttgttcaatttttagcgcctagatatgtgatgcactctaaaaagttatgccatttgaatttgtcgagagcttccgtggttcaatttttagcatctggatatgtgatgcgtgtgaatcggacattcgactgagaagttatgaccatttgaatttct

SEQ ID NO: 279396 - DNA, 498 bp, Glycine max
  unsure (1)..(498): unsure at all n locations
aagagaaaatttgaagcccttgngagnggcctaatgatacctccgctgntaccncactctatannacactcaagctccctctaccgtannnaaaatattatcggccagtgtttttaaaattatttgcgcaatgtcggcagaaaaatatcaaggcgtggctatataacgaccgatgtcaagtattttttgttcaattcaacccctgaataattttggatattggccataagaaatggtccaatcggcgtatcaagtgaatgctgcgttttattttataactggtggaacgggcatttttctttgcgacattcactattatatttttatttagggcgggaaaatgttttttggcgacgaggcggagattttttatcgcagaaaagagacacacccgagtgtgcggacacaacctcgttgtgtccgccacaaaactcctccccctctttgttgttttgttttggaacccacacacaaaacctcttctaagaaaaaaatttc

SEQ ID NO: 279397 - DNA, 424 bp, Glycine max
  unsure (1)..(424): unsure at all n locations
ttagcttgatatttacaacacttatatgacagagaataagaatgaattttatttctagcttttggttctagaagcaataagcagcaggcatattctacacacacacaagaaaaagaatatggtagggtcataataactntgtttaatttatcatatactaatttcatgcgacgtctcggatgctgcatgacccattctattcttttgcataactaaacggaatcaacccttgcattatttttcactcanatatgaatgatggaaattaaagaatgttgattctgtaaactgggggcgtgtaactaacatctctgatagatgtgatagaccagcccagccaatatagaattacaagctggttgaatntgatgagaagttctaacattaattttttacaatggagtgtgctgatgcatcacaatga

SEQ ID NO: 279398 - DNA, 372 bp, Glycine max
  unsure (1)..(372): unsure at all n locations
cgcttgaatttgatccttgtaacccttgatacttganaccancnannaaaaggccgggggttgacnatttttttttgaagcacatttttggagggacggcgaaccaggggggagggcactcaaccaccaccaccctggccacgggtatttaattttaaacatctatgatatttactcccccttgttcgtcgtttgtacacaacttttttaaagaacctccttttgttgagtgcggccagatgtgatggtggtaaaaacgttgatccgaatgatgtgggtcctagatatgattctgcttgtagtcgacgctgagattcagttggtttcaggatcacaccgctatcttcctgatgtcgtaacatgtcttccccg

SEQ ID NO: 279399 - DNA, 377 bp, Glycine max
  unsure (1)..(377): unsure at all n locations
tttctntactgttttggtcttcaccgacgaaaggatcaaagtgggtatggaaaaaggcaaatctgatcatcctgcattgatgaatacgaaaattgnggcaaatgaaaaggatgagaatgagggagaaacctttgctatgactgccattcctacacggtcaaatttcctgtcagcccaacaatgtcattactcagccaataacagttcctctcacccaataatccacaaaggccatccccaatcatccacaaagcctgcccgctgcacatccagtgccaaaacaccaaccaaaatagaattntgtagcacaaagcctgtaggattcaccccaaattctagtgtcatatgccaacttgctcttatatctacttgataat

SEQ ID NO: 279400 - DNA, 381 bp, Glycine max
  unsure (1)..(381): unsure at all n locations
gaggaaatttgatacctgtaagcccttgatcccgtggtacgttctaaccccagctgagtgggacggnattttaacgccgatgatttttaagggttgtgcccaaaaaggtcggtccaaaattatggaacccgaggggtatggcaaatatcttgggcgccgaacgccccaggaaaaaaaggtcgaccttatggaactgtgaaaacctccgacatatatataaaggatggtgcccaaccaggaggttgggggggtgccccacgattattgaaaaatagtgggctacgtatatgccaaagggggttcccttcagctatataaccccaacgataaggcgtacaataccccaaggttagtggtggctctgaaccagggtaagaaacg

SEQ ID NO: 279401 - DNA, 520 bp, Glycine max
  unsure (1)..(520): unsure at all n locations
agcagcggcggccgactgagcttttgcanncactgatgctattgcaagaccnggcgaantcagctcggaccccgggatactctagagtcgagcgtgttgcatgcaagctttcttattatgacncctagagaagctagagctgagctgcacataccgctgtcatagctaatctcaccgtcttgagatgagaagctagagcttagctacacaccccatatagtagctatgctcacccctatgacaaaatacttgataatacttgaaggatgagtactacattgacttctttacaacgccagcattacataggctaaaccctctactactagaatggccattttcaatggccgtatgaaagaaanactggtctatctgtggacgaaaaacgggcgagtgcgtagccatgggctcgaaagtacccttatggcatgggaaccgtaaagactggcattcgactctgaaccaggtaattgagtatatatccaacgactgctgggtggattgctcctacggctcttgn

SEQ ID NO: 279402 - DNA, 229 bp, Glycine max
atatggagtttcatacaaactctaataaagactacatatactcactcaacttacctcacgctgataataataactacggctggaagacacaaaagatcaaactcatcctcacttactcatcaatgggtcacaagaactatgataccaggacgacaccctcctcttacctcaatgctgcgatattcaaaactacaaatggaagacacacatatcttactcgcgctcacct

SEQ ID NO: 279403 - DNA, 333 bp, Glycine max
  unsure (1)..(333): unsure at all n locations
agcttctagatgatttatgtctgcgaatccgacatgctgtgagaagttatgaccatttgaatatatcgagcgctgccgaagttcaatcacaagcagcatagatatgcgcatgtactcagattagacattagagcgaaatgccatgaccatntctaatagagctgagagctatccgatttttaatcatctagcgtctgagatgagttatgacacacgaatcgacacatctagagtgaacaagagctgaccattgcgaatttgtcgagagctacatatgtgaatctctcaacgtagagatgacttatgaatccgaatagaacatccgtgtgaaaa

SEQ ID NO: 279404 - DNA, 435 bp, Glycine max
  unsure (1)..(435): unsure at all n locations
tctatataagtctgaaccattgtatcaataaactcaagtngagttttattcagaaaattagagtttatctcttttatcttagtgagagtgattctcctaaattcttgagtgattcaagaacaccctggctgtatcaaaggactttcacaacctttgtgtgttgccctcgctggaaagagtgattctttccttcctatcatctccacccttgttctttcaaaccacaattccataatatccacctctgcccaaaattatctcgtgaccataactcccatttcacacactcaaattaagtgattcttgagcctaaattgaatttcaaaacgagacctttcacctcgttttggaatcacctcatttggagccctgtagcttccgttattgccatttctatatntctgtccagccaccacttaacctacgtgttaccat

SEQ ID NO: 279405 - DNA, 398 bp, Glycine max
  unsure (1)..(398): unsure at all n locations
agctnttatgttttagattgttatatcttgcccaactgattaaagcttctaatttgataaattcagtcttgaggatggagcaagatgttgagagtttgtctttcatgggcacacacacagactgcatgcgcaatatatattcatttatttttgttccttgtagctatctatcttttctttagagacactcctatgtgagacactttcagacactaaggatagcttccctactccacatagtgagagacttgataatcctttcttgttgaagaaagaagtgtgaaagcaatgacttccaagattattttgatgatgccaaagaatcaagagttaagcagaatctaaagattcaagagtcaagtgtcaagaacaatcaagatcaagattcaagactcaag

SEQ ID NO: 279406 - DNA, 526 bp, Glycine max
  unsure (1)..(526): unsure at all n locations
agagagaaaaattttgatccccttcgaananccgatttgagtccactgctgatccanctgtaanancgncnnngnntacagctgacatgtggaaagtactaccatagnccatgacctgttggtaatgcggatacattttcagcagatatatgcatatgctgaggcctttcatgcctgagcgggaaagaataaatcttatatggtctcgccttgactgtggatcaaccctgaattctctcttaatatctacacccgttcttcttggacagaaactgaaagagccatntgactgctaccactggctaccaatgatgccgatcatctactaaccaaaaattacatgatcgaaaaaaatattatatatatatatatatatcngccacggttacgaatgtatttagcatcgagcacgagcctccaagatattctaaatccacataaaagtatcgtaaaaggtgtaaagttgaaattaacattgatcggggaaatcttgaatgacttttatcttatctatcaatgataagcn

SEQ ID NO: 279407 - DNA, 448 bp, Glycine max
  unsure (1)..(448): unsure at all n locations
atctctaagtcacctgcagcatgcaagctgtcctttttgacanatactccttaccaaatagaatccatcttggccctttttccacaactctcgtanatgggagagaaaatgtcatctaaagcataccaagtcctaatattatcaaatnctaaaaattgagctccttaggagaaaaacaatgtgtgtctcctagagacggcatcagctaccacatttgtttttccatttttgtatttgataacatatggaaatntctctangtactctacccattntgcatgccttttgtttaactntctttgccctctaatgtacttaagtgattgatgatcactatgaatgacaaattcctcggaaacaaggtaatgttcccaagtntggagggctcttattaaagcatanagctctttatcatagatgggtagttgagagtgttcccaagtaatgt

SEQ ID NO: 279408 - DNA, 476 bp, Glycine max
  unsure (1)..(476): unsure at all n locations
agagtggccccttgatcctcttgaanancgacttataacatgatgctcgcatttgcatcatcatgtgcagcttctcgcgagatggcatagaaacatatttttcatggctctttcgagaggtgggaggaacctccttgtgaacctgganggcctggattctctttatttaatgaatcccttgccttcttgaaaataatgggagggggatgggagaaggaaaaagatgattgaagtcgccacttgaaggagatgatgagtcaaaagaaccctcccaccatangaagtcatggataaaaccttgacgtangaataaataatggaggataggagaaacaaagtgtatcggtgaaaacgactactattgtgataaaactcgtataattgtctcaaactcgtccattcatggtattaccgtatgacatagtattttctgttagtattaggagtagaacttaccttttcattctggtgctaaa

SEQ ID NO: 279409 - DNA, 385 bp, Glycine max
  unsure (1)..(385): unsure at all n locations
agcttgaatgttgtccttnaattgtgattttccaccatggagatgcagcggaagacaaaggagaagaggtaagaggcggcgccatggaagaaggagcttcaccaccaagatgagccttggaaacgaagcttggaaggatgcttcatggaggaaaagaagagggagagaaagagagagggggagcacgagatgaacgaagaaaaaggagagaagtgaacttgagtttgtctacaaactctcattctcaaagtacacaagtgtaacatgctttattatgactaagtacttcttgaaagcttttttaaaaacttcttgagaacttcttgaaaaactacttgagagctagacttactaccacaccctctcatactaactcacctcttga

SEQ ID NO: 279410 - DNA, 502 bp, Glycine max
  unsure (1)..(502): unsure at all n locations
agagatcgtaactgatactctcgnanagcacttgatcccttcgatctcgcatcttgtgtcttgaagaantctaagcaattcttgcatttgccagtgcctnatactttattactgngatatgtctcaagcttccagccacaaaatcaagcccaggctgcacacactggtgcatcaggcttctacaatagaagcatatggaatgttcctcatttggtccatttcaagctcatttataagacattgattcanattgaatccatcacctttcacaatatgtaccatgttgggtgaacaatccttcatccgacatatttctagaactntattaatataagccttttgagacaagctgaaaatcccttgagattgattctatggatctctatgccaatgaaatatgtttgatcacccaccatccttcattgtcaaaatctttaaaaaggaaatattttacttcatgtaccatcccaaaatcattgggtgcacgaagaatatcatcacn

SEQ ID NO: 279411 - DNA, 325 bp, Glycine max
atattccactaacgaccgacagaggatggatatgcttaattaatgtacctctaaaaggatgatgatctctccattgcgtaggctatagcgagacaacgcttaccatgcagcaaccgctcttaatttttaatacatatactagaatgttcccttattataataatcaaactgacttctattaacatataaataatatccgttagtgtgaccatccatactaacctaagaaactcattacacatactcattaaaatacaaaagcgcaaggatataatatgctgaatatatttgtatccacactcaaattgccatatcacgggtgaat

SEQ ID NO: 279412 - DNA, 412 bp, Glycine max
tatgcatgtgttttatgaagcatctccaagactcagaccaaggctatagtgcaagcaatcaatgaggcataacacaccagatgattatgatgatggatggctcatattctcacataggtaaactcatcactttcaaattgagctttcataactatcatgacatgtagaggagaatcaaagatttcaagtcacacaatgtctagaactattattttcaaaacaattaaccatttcttgcacatatactatgattcaaagaaaaacatgcagagctgtacatgcacacaaaactgaccctaaatattatacgtaaaatccgacaaaactaacaacattaacaaattatcacagcttacagattaacaaaaccaacattactatctaaacctatgaacactcccccccatactta

SEQ ID NO: 279413 - DNA, 112 bp, Glycine max
  unsure (1)..(112): unsure at all n locations
agcttccattgttcaattccgagtgntacgatatataatgcccctgaatcggacctccgagtgaaaagttatgaccatttgaattgctcaagagcttccattgttcaatttc

SEQ ID NO: 279414 - DNA, 400 bp, Glycine max
  unsure (1)..(400): unsure at all n locations
agaagtaattgagccttgaagtccatcgtaacttgataccaccaanaanaaagccaaagaagaagggctgtgtttcaagacaaagtttttaccgtatcatagaaaccagggatttgcgactaaattggcaaaccaccaatatttgtgttgggggcttaaatactagggagagctaaatcccattgggattttaaaatatcactgagagaaattttgatttcttccatcatgttataagtttattttaaaaatttgcatttttgactatccttttcataaaaacatgcgatcttctaaaatatataagcgcaaaatttctggcaccaccatctatttatcattaatctcccctttctaaaaaaaaaaacaaatttccaaccataaacccccccatctaaca

SEQ ID NO: 279415 - DNA, 524 bp, Glycine max
  unsure (1)..(524): unsure at all n locations
agcggcagcnnccgaagagccatagcacacactgatgcnatacacggccncgggatcgtctcagtcgatctgcaggcatgcaacgcgtggcatgtattcattaacctttgtatatcgccctcnacagacccaagacagatatacgattatgttcatcacatcctcttaatagcctataattcatatgacataattctatcatcggatttaaggcatcattcacaatttaatagatcacctcattgaaatcacttaagactcacgattctcttantctgctcactctattaaaacgaatgatatcgttgagcacacgtcatgaacggttacattctataactgatttggcatactatcagctcttatatagaggttctcacatcgacaacgagattcatacacatgtncatgtgggatgttagaccacttcataccatatggacgaacatttgttcgctcatctactaccacctatatcaaatacaatggcttcgccccaacacaatagttaataggcacaaccg

SEQ ID NO: 279416 - DNA, 512 bp, Glycine max
  unsure (1)..(512): unsure at all n locations
agcgaggantaatagaatnccnttcgaagangcgacttgatgacattgtagtcgcatanttnnatacanngccacattgggagagacgtccttgtgtcgagggccatggtaattgttagcaaagttattgtattagaaacaggatgttcgaaagcaattggaacgacgtacattcactagaaaactttctcaaatccactatgctactggaaatggattacgccaatatggggatgaaggactagagagaaaaaactatatgggaagcatgtttggagaaagatgcatgtgctacgaaacatatgcagaagcttcgcgtacttatcttgaggggtgagtgatgtgtctcgaatctggaggatgaatatacttgaatattgatacttgaatacttgtatacagggacattcacacgattattctctgtgatgatgaaatcgttgcgctcataaaataccgttggaaagcattgttcacacttatcttgagcgagccttctctggatactagan

SEQ ID NO: 279417 - DNA, 404 bp, Glycine max
  unsure (1)..(404): unsure at all n locations
ttatcttgctagttcaaagaagaaaggcaagcataggatggtcaactaagaaacattcctagaaccaagcctagacaaagtggtagccagtgtaactcccatcgaccgagaatggactgagattcgagacatcctanagaaaggctcactcccagaaatccaacaacgaccagaaagctcacaaggaatgccaactattatgtgataaagggaggagacctatacaacagaggctttatacacctttgttggaatgtttaacaaagtaccagtctgaatatgtaataaatgaaatgcatagagggatatgtggaatgcattcatgatccccatcgatgaacatctgagttcttagagccaactacacatggttgacactgagaagagactacacaccatatgtt

SEQ ID NO: 279418 - DNA, 223 bp, Glycine max
gtgatgactgagcatgactgatcgattactaccttatcaggttgatagactttgggttaatattacaaaagtatactttgtaactgctagaaagagatgaataatacgtttgacacataataaccctttatgatctaccatatctactagtataatagtcttcctgcttaacacatgggctagttatagattagctcttgatgatgcaattgtaaaccattga

SEQ ID NO: 279419 - DNA, 531 bp, Glycine max
  unsure (1)..(531): unsure at all n locations
tatagcttgagaaatanngatattgttgaaggggtnngaaacttccttgctggtgtattgtgtgaacacacagaagtgagtaccctcgcagcattcatgtcagcggggcgttccaggagaaccttgtgtgaccgtcagagtgaaagtggctattttgcccaataacccaagcttttgacgcaatcccgaacccacacccgggcattagtcgagtcatgtgaagaaccttgtgatagtactctatagcagagccgagcctctctggcacgtcatacatgattaaataggagaaacatagactcaccaatagccaagtgagagcttctgttggtggcttggacacgcttgttgaattnatgtcgtaatattgtaggatttggtggccctcnntggtaatccgattactcnagtggtgaggtctatcggattacaagaggcttaaaatttgaaagacagagagggctatggatcggtctcttggtcaatcgattaacccacaggggtgtaatctgaatactcacgctttgacag

SEQ ID NO: 279420 - DNA, 372 bp, Glycine max
  unsure (1)..(372): unsure at all n locations
aatgagaacttgngagtaatattctaaccttactggactcatttcantagctgtatctgcatactgatattgttctcagcatagatctttgtgtgtgtgtgtgtgtgtgtgtggttttgtctggacaaagtccttttgcttttttgatgaaactgtgtgtgtctctccgtggtactaaacaatttaccatatattctgaagttagggattgcgtctgctaaagttgaatttgaatggaatcagcaataatgcttcgaatcgaatcccctcataactagcaggtatgtggtttcatatggatgtaattatgcagtatatggtatgctgaatttttacgcaggatattcaaagagtttgtaactatgacccttc

SEQ ID NO: 279421 - DNA, 337 bp, Glycine max
  unsure (1)..(337): unsure at all n locations
tttcttcagacctanatctcacanaatctaggtatccaaaacccctcaatttaatggattttcaacgtttgagaagtgaaattgagaatggtgtaaatttggagaaaactctcacctcacacaagtctataacatcaattaaaacttgctcaaactggatttacacctaaaattccaccgaatcaaaatttgactcctcaacacccaattttaccctacaaatggctctttgttcactttggtcatttgttcttctctcttgcacagcccaagctttctcataagtcctaaatgaccattcaaactacgattaactcactttaacctccaaatacca

SEQ ID NO: 279422 - DNA, 249 bp, Glycine max
tcaatcatctgatcattgggatgcttgagaagatgtctggagtgtgctagacgcctcttaatgaagcttctagagaaaactacatgaaactgcctcggtagatacgctgcccagccttcgttaaccgttggatcttctcagaaattggtttgcaacttcacaagacactttaccatgatttaaccgttggtatctttgagaaaatatctggagtgtgctagaagcttccgttcccgacagcatctctta

SEQ ID NO: 279423 - DNA, 391 bp, Glycine max
  unsure (1)..(391): unsure at all n locations
agcttcacacttgatatttggagacacatgnaacagcgcctgggcaatgacactcatggtgctccgaacaaaggtggagtatggaggatttccttgagggtccgcgcttaagcaatcatgaaacccagctccaaactcgaaagtggaggacacatgaacaaccctaagcaataacattcatgtggctccggaacaggatgagaatggaggattgccttgagggtcctctcttatgcaatcatggaacacagctcccagctcaaaaatggaggacacatgaacagccctaagcaataacattcatgtggcttcagaaaaagacgacaatggacgattgccttgacggtcctctcttaagcaatcatggaacacagcctcaaggctcaaaatg

SEQ ID NO: 279424 - DNA, 519 bp, Glycine max
  unsure (1)..(519): unsure at all n locations
gagagacnantttgaagacctttgagagntacaanatgatgtcccngtcngatccttcgtaanacncaannnccnnaagatggaacanggngnatttttttggcaaaganagcatgagatttttttacgcatcttatctataggataacgccaagaggtatgtgagcatgcttctcatttggtatatcacacccaatgatctgttgttgattggtgtaatacgaaacgggtataacactttaaacattgctggataaaccatcgtgagacgttgagaagaaatactgatatctatttacagagtgttagaacttttatattctaacaattacccatttcttgaagctatactattattcaaagaaaaacatgcatagttctgcgtgctcaataaattgaaccaggatagtttatctgaaactcgacgaaacttacataagttattattttatcccgctgaataatggtgagaccatctaatcttgtatgagtgagtaaagtcaccctcattgttaaaan

SEQ ID NO: 279425 - DNA, 202 bp, Glycine max
  unsure (1)..(202): unsure at all n locations
tttgttgcaagcttatcgttatggnaggaaaactngaataaaatcctagttattccatctttcaataggaaagacgacttaatggttaacagaagagaagaagagagattgccggttcaaatttcttccatacaaagaagagaagaaggctaaattattaccaggtctttccatttctggaacgttagaaatgaaggacatg

SEQ ID NO: 279426 - DNA, 478 bp, Glycine max
  unsure (1)..(478): unsure at all n locations
cttgtttgtttataagnannnnnaaatgttattnnanagggttttttntgaagaannaaaaggggggataaggagggaagatatttaagaatangataagaagatttaatttgttgtaataaggttggatgtatattaatatgaaatggtaagagtagataagtatagtattaatgatatagaatatatagggtatggagtttaaggtttgaatatagatgatagaagaggattgataatggaatagatgttgagtgaatataatgngatgtatngtttgatatatagaggatgagaagtgatgaatataatattataatagggatagtgtgatgcgtatgatagaagataaaatgggataagaatgtattgtagtaatgagatgatagaaataaatgatttgataggaggtatgtatatgttgtataagtgagaacgattgatcgcaactgtaactagcatgttgatagtaatgtag

SEQ ID NO: 279427 - DNA, 428 bp, Glycine max
atgttgcaagcttatcttttgataatacagggcatccttgccttatataggcagaggacaaaacagacaaaataactgaataaacttccatatggatttaggtcacagcccaacagttactaatcagctaatttctcatccaatattgaaaccatgcaaatacatctaaaggaagtgcaattcagtgtcacattcataatgctcgaacgtaccccgaccaacctaataaatatttggaaagagtcaaccgtcagtccactgtaattgtgaagacaaagagaaagatagtggaacaagaaatatattacagatatagatcggtttatttagttacaagttagttattaatgtaattaattacaagctagatattcttgtaatcaattatgtaatacatcgctagcattagttatataaaagtcaatgta

SEQ ID NO: 279428 - DNA, 368 bp, Glycine max
  unsure (1)..(368): unsure at all n locations
cataaacaattatgatggcatgctttanaattcataaanatgtgtttcttatattaaatntctgtataaaataaaatatttgttttagaatctggtacgtaaaactagaattcttatcttttaggattttgcttttagtaggtcaatttggtttgatagacgttgattatgtctgtttgcttttttttctacatgtcggttttcaacattgcttttacccgttggttttttaacaccaatgctcttgctacacacgattaaaaccaactggatgcgtatcttaagagagaaacggaatcagatcagattttcctaccagtgcagtgggggcattttgtctctaaggataacgttcgcatgcttcaacc

SEQ ID NO: 279429 - DNA, 328 bp, Glycine max
  unsure (1)..(328): unsure at all n locations
agcttttgcattctggaatcattnatcctatcttcgatagcgaatgggtgagtcccgtccaggtagttccaaagaaaaccggtctcaccgtgataaagaatgagaaggatgagctgattcctactcgggtgtagaacagctggagagtatgcatcgactaaaggaggttgaactaggttacgcaaaatgacccatatccactgccattcattgaccacatgcttgaacgcctagcaggtaaatcttactactgcttccttgatggtctttcatgtcacatgcaaatcactattgctcctaaggaacacgagaagatcacattcacctg

SEQ ID NO: 279430 - DNA, 404 bp, Glycine max
  unsure (1)..(404): unsure at all n locations
tgaagcatgtgtcgttctgagagcttcagattagtttgtgagtgtttgtgagatcctacaggtgaaggagacatcctccccacttgtatatgtgcaatctttcatcttgttcttctctttgttgttaagaacgattcctggttatagaaagctaaatcctctattggatcttccctgtaggtacctgatgtaaatatactgttatctatttaatggtgttttgtgcattctctatgctatatgctattcactccagtatgctnttaccttgatcacgtagatgcatgctttgttagggtcattcaatagtggaaactggtctgattctaaagtacttgatagtatacggctaagttatcgtattatcacgaggaatcatggcgcgataatctagttgtgtatgt

SEQ ID NO: 279431 - DNA, 347 bp, Glycine max
  unsure (1)..(347): unsure at all n locations
agctagcatgcttatcgttcgcgtgtattatatccactccacaaggtttgaagtagaggagagcttcaaccctataacgcaacatggcggacaaaagtgggcagtaaactttgaatggttgtcattgtcaatgcgataggtattctgcgcttcactatccatgttcacacattattgcagcttgtggttacgtgagcatgaactactaccaatatatagatgttgcttatacanacgagcacatcttnagagcttactccgcacaatggtggcctcttgagaatgaagcggctattccttcttctgatgacacatggacacttatccctgacccaactacaattcgt

SEQ ID NO: 279432 - DNA, 534 bp, Glycine max
  unsure (1)..(534): unsure at all n locations
agggaattnnnnnaggccgaganccctttttnngcattgnantangctgcctgtatacaatagtagcacncgctgctcaaggcagttntctcaaagaagctnctcanagaaagtttctcaaganagcctcctcattggagccacctgttgtctattaatagaagcctgtgttacaactggttgtacctttgtgaattgagagtcctgtgatacacaactcaaaagttaacttgctcttcctcttttattcccttcattattgagctggcccccttctctctttctttttcttcattaaaacatcctcttcaagcttcttatccaaggcacattcttggtggtgaagctccttcttccatggcttattcccttgtggatggtgcctcctctatactcttctcctttgcttncactgcatctccatggtggtgaagctcaaagatccagcctncatagaaaggctcacangcaagcttcatcaagtggtatcagaagcacaaagcttcaagaggtgctcttaaaccgtcattattn

SEQ ID NO: 279433 - DNA, 314 bp, Glycine max
  unsure (1)..(314): unsure at all n locations
attcctaaatgaaatcttgccaattcaattcnatctagatatgaattttttcccataatcacatccctaaagctggttgatcactctacatgcatctaacaaagattgaaatagatcactactaaggattgatagaaaataaaatacatcttaatctactttttcactcacaatcaaattaattcattgatcatatggccaataaactcaaagataatacattcagaagaagagagatttggatttattttgtaatacaaaataactaagctttttacatgatgtcaactctattgagactaatacttattttt

SEQ ID NO: 279434 - DNA, 493 bp, Glycine max
  unsure (1)..(493): unsure at all n locations
aggcganaanactgaagccttcgnanaacgacctgataccttgatctcgtctaattacatngtgtctgttatattgaggaggttgtttgccatttagannaagttatcatncggtggtaaactaactttccaagatgttgccttcgcaggaatggccccgatgaaacttgcctcanagatgtccatgaaagacaatgcggccgacnggactagttccgctcccgagtatgacagtcaccgctttaggagcgctgtacaccagcaacgcttcgaggccatcaagggatgggcgtttctctgggagcgacgcgtccaactcagggacgacgagtatactgatttcaggaggatataaggtgcccgagtggacatcactggttacttccatggccaagttcgatcaaaatatgtcttgagtattatgccaatgcttgccaacanaagaaggcgtgcgtgacatgagatcctggtatgggtcactggatccgtttat

SEQ ID NO: 279435 - DNA, 397 bp, Glycine max
  unsure (1)..(397): unsure at all n locations
attcttaagtcacctgcagctgcagctagatgattggtctaacttacattggatancagtgggctgaangaggcaagttgatctcttgcttcataaatgccaaaaaaacaaaaagctggggaaataaagaggggaggatgaaggacaacccgtgctgtgactgccattcctttacaccaagtttccgaccacccacagtgtcttactcaccaataaccaccttctcttaccaccgccattatccacaaagggatccctaaacaacccaaagtgtactaccgcacttcaatgacaacatacctttacatgaccagacaccaccaaaaatgatttgagcgaaaacctgtaaattaccccatccatgtctatgctactgtccatatctactgaaattaat

SEQ ID NO: 279436 - DNA, 488 bp, Glycine max
  unsure (1)..(488): unsure at all n locations
ggataattttgatccttcgaaagcacttgatacttgtttatgccttgcatccaagatcaagaagcttcctagagatgtctgtccattagcgcttttctattaggtgtttctgcaaatcaaaatctgaaagcccatccgatttaaagaggtccctttggggtacataaaccacattgggttgtgcccttatcgtacttaattgatctctttaaactcctgtaaagtgagactccttaggctagctngataccttgcacacaagcaaacactagacataatatctgctcggcttatagctatgtaaagaagtgagccaatcatacctctatnacttgattcatccactgaattacctctttcatctaagtcaagattagtggatgttgcgactggtgttgatgcttcttttgcaatttcatactaaatttcttaaatagttttgtacaatattttgttgacataagaaggctccatcgtccatttgcttn

SEQ ID NO: 279437 - DNA, 301 bp, Glycine max
gggatatggggcctacaatcaatattcggtatatggacagcctagatattttattgagttgcgaatatttcttatggctcatatttctatcggggagtgtccagatatcacatcaatatgttggaatcaatagtaagaaatgaagatcgggcttataaataaatacttaaaacagttctatttcttctttgtatctaaactttatgtatctactattatttataattcgaacttcatatcattcatagtcggtgcatataagcaaattatatgtagtttgtttacaaaactaatcaactta

SEQ ID NO: 279438 - DNA, 516 bp, Glycine max
  unsure (1)..(516): unsure at all n locations
agagagagatttttgaatgccnttacgaanagcgactttgataccatagcagctccnccactatatgaaagatgagtcgcaccaagctgggcaccacactgnatattgcgagggagccagttttgtccaaggagttatatgtgcatctgagaaccaatgatgacgaccagattcaacccatcgtagaaacatgtaccttccatcttggcattaaagaagaacaagtcactcaagttaaccacccactttcaatggaagataagaacaacttacgacaagttatccgagagcatgctaacctatgtgcatgggccgcgaccgacgttgccagcatataaccaaccttcccattgttgggaatatacatatgcagagacaccaaactcatagatcagaagaagagatagatgggtgaagaaaggtgttatgtagtgcggaaagaggtcgcaatcttatggcgaccgatttatcagacggttgctacccacatggcttatatatagtacgggaaaaaaa

SEQ ID NO: 279439 - DNA, 387 bp, Glycine max
  unsure (1)..(387): unsure at all n locations
agcttccttatgaagattcctaaagaagctagagcttagctacacatacctctctaatagctaagctcacctccttgagatgagaagctagagcttagctacacaccccatatagtagctaagctcacccctatgacaaaatacatgagaatacaaaaaaaatccctactacaaagactactcaaaatgcctcgaaatacaaggctaaaaccctatactactagaatggccaaaatacaaggcccaaatgaaggaaaaacctattctaatatttacaaagataagcgggctcatacttagcccatgggctcgaaatctaccctaaagctcatgagaaccctangggccttccttggatctctgacccaatctacttggagtcttcta

SEQ ID NO: 279440 - DNA, 321 bp, Glycine max
gcacgttctctccttcagaggactacacgttctcaccttcagattactacacgtgctcgccttcagaggactacacgtcctccccttcataggactaaaagtcctccctttcagaggactacacgtccacgccttcagagttctacacatcttcgcgttcagagggctgcacgccctcatcttcagaggactacacgtcctggccttcagtgggctacacgtcctctccttcagaggactgcacgccctcacctttagaggactacacgtcctagcgttcagagggttaaacgccctcacctttaaaggactaaacgtcct

SEQ ID NO: 279441 - DNA, 397 bp, Glycine max
  unsure (1)..(397): unsure at all n locations
ttagcttatcgcttatcttcagagtgaatnnacgaaaattcctaatttttgtttatttgtgtaatgagcttgagcttgatgtacataagtcttattataagcttaattatcttcttgtctagttttataaatactcagaaactcttaattgtgcttagtgagaaattaaacttgtgcttagagagagcttagcctcttctttggtttttgattganaacaaaattgattcttatcaaagaagctagtcctttgtggtgaatcctccttcggcttatcgattcttcgtgaattgtggcatcattctgtttatcttcttcatcttatccattatttttgtttttctcttcttgagttcttggaaagtcaaaaatggtggttcttgaatttgcaactgga

SEQ ID NO: 279442 - DNA, 426 bp, Glycine max
  unsure (1)..(426): unsure at all n locations
ntggcacaatttgagccttactttgtatatgccactgatgggctttacattggtggcatacctcaaccaaacactgtggcgggccctcagtatcgcccactacctcaactacaacccttacaatttttggtgggaggactacctcctgccatggtggtgtcgcaacctacccttttgtgggcgagcgaggcaaggctcacgggtgcgtcttccatgggaggaanatgcgcggagttgccaccaacgtttattgaaaggaaaatgttagaaaaaaccaaaggagaccggtcataaagaatattccagattcgggagttatgtttatgcttgaggaaggtattagcacctctcacgtttgtcccaaaggacaacagccttagattagagttgtgtgaaatcatgtatccctaaatttttgtctctttt

SEQ ID NO: 279443 - DNA, 353 bp, Glycine max
  unsure (1)..(353): unsure at all n locations
tttcttgnnaattatcttataanaaatcaagaagaagcttgttcgcacatggatcgcgtgtatgatatccactccacaaggattgaagtacatgagaccttcaatcctattacgcagcgtggcagacaatagtgtgcaattaacttgaatggccattatatgggatgccaacaggattttgcactccattatccatgttcacacattattgcagcttgaggatacgtgagcatgaactactaccattatatagagaggggtacacaaaagaacacatcttaacagctgactctgcacaatggaggcctgatgggaatgaagcgactatgcctccttctaatgacgcatggaca

SEQ ID NO: 279444 - DNA, 276 bp, Glycine max
  unsure (1)..(276): unsure at all n locations
tcgtataacattattagcttgacacatacttctttcatgggtcctataagggataatggtgtatagcctatcaatgcttgcaccatggtacgactttaatctctgaccattaactacccatgatctgtctagagtcgatgaatgaggatcaaacaattccacaaccncatatggcctgacctctatgatagtaaatagtcctgaccatctacatttgagcttgcccagaaataattccagtctggagttaacatcaatacttgatggctcggtctg

SEQ ID NO: 279445 - DNA, 375 bp, Glycine max
  unsure (1)..(375): unsure at all n locations
ttatcttancactttcggatgctctggataaaagcttgaaggtaggagaaaatgagtagagggagagggaaagaacggaatgaaattttgagagagaaaagagggagaatgaggtctgaactttgaagtctaatttctcaaacataagagttgcaaaatacacatacaaagtctctatttatagcataagtgtcatacaaaattagaacgaaatntgaatttctattcaaattcacttgaattgaatgtgaatttatggagccaaatttggagccaacatttcactaattatgattagagaatttcatctatgggtcaacccacttattccagatcaaatccaagattctccactaactgtgcttacgtgtcatg

SEQ ID NO: 279446 - DNA, 522 bp, Glycine max
  unsure (1)..(522): unsure at all n locations
gagtcanttttgagccttagaanagccacctgatacattgtatctacccactctatagaaccactaagcttgtcaacaggatacgcataatctgagtatcggtactaacctattatatctactgtgcttatagcagaaaccaaggtccggagttccattacaatatattcacgattctcttaatcatcaactcaagtcataattctcggtggttgtttttttgaaacctagcacacatgcatacacttaacatgatattatgtctagactcaatgagatatatgaggaacactatcatatctctatattgggcaccttctttgatctctcatccattccaagatatgtggttggggattatctatatgcacacgaccctcacccctttaccatcaaaataataaaaagccgtggagaaacgtgctcgtacactcgataaacgtctccatatcaaagcgacccattctattctacccagtatactacccgacatggcgatagaaataagcgactgtacataag

SEQ ID NO: 279447 - DNA, 329 bp, Glycine max
  unsure (1)..(329): unsure at all n locations
tttcnngccattatatattctgtgaggangcccatatggcttaagctggatgattcttttcttccaagttcatggccttgccgtgaaacccgcaccacatttgaaagaattcacattgtctgtccaccatgaacccccagatgtccaaaggacacattttctgaggcttttctcttctttaagggagtgcaaacgactgctgattaccttgcccaagtccatccgactgggatgacttaaagatatcttaaaatttttcctgttcagacccacctcagaagatattagtttaacactcatgaaaagctgatgatctggagaattaaaac

SEQ ID NO: 279448 - DNA, 290 bp, Glycine max
tataatatctaagttcaccctcatgtccatatacgtgaaactatagaacaagtccctactaccaagactactcgaaatgccctgaaatacaaggctgagaccctatactactagaatggccaatatacaaggcccagaataaggaaaaacctattctaatatttacaaagataagcgggctcatacttagcccatgggctcgaaatctaccctaaagcttatgagaaccctatggcctttccttggatctatagcacaatctacttggagtcttatatccaacgctcttt

SEQ ID NO: 279449 - DNA, 235 bp, Glycine max
  unsure (1)..(235): unsure at all n locations
agctttanatgtggatagnatgcagagactttgctcatctttggaacctcttctcangaaaattgtgagctacttttgctttccttgtattaaatcctgcataatagtagactgtagaccctctgtttgagcaattcttcgcanaagcagtggcatganagtattatgtaatgacatttagttacagtctgtagtttaaaatttttattacaaaaagaaaggaaaagaatacgtg

SEQ ID NO: 279450 - DNA, 368 bp, Glycine max
  unsure (1)..(368): unsure at all n locations
ggtaggattatggagtacccatcacctgtggtactangtggcgttctggcgatggtgcacaacaagttttccacatccacaaacaacattcaaacagcacaagctatcacagccaagcaaaacagggcaaaggcagaatactctgctcaaacaccaaccaanatcatatctttntctcacttagagaccccagtaacaattccttcgatccaatatcgtaaccgttggatcgactccaaaattttactggaagtctatagtacataagcctacattttgaccggtgggatctactagaaaacatccagaactcattctgcactagactttccacaggcaaccacacacaagcaattttctgcacaaag

SEQ ID NO: 279451 - DNA, 239 bp, Glycine max
  unsure (1)..(239): unsure at all n locations
agcttgtgcgtatcaaatcactcccgcattttatctctagcatgcattctttctctctttacccactcctcacgtttggttttttagggaaaaacaccataactaaacgcgccacaaagcatccctatcgcaccagatccaaatccagaacgatgggtgatcaagatgagacacacgaacagatganagtcgacatgtcggctctgaaagaacagatggcttccatgatggaagccatg

SEQ ID NO: 279452 - DNA, 359 bp, Glycine max
  unsure (1)..(359): unsure at all n locations
ctcaagctngaagtgatatcgaattactcgacttaagttctcaacacanagtatattttacactagaataaaaaggtatggtcaaaagagtattctatataaaatatatctcgatacgagtcctcgaactatagagtatcaacattgctaagaacaagaaatcacgaacaaccatactatctatgcnattaaggcaaaacaccatactactaacatacccanaattattaagttcttataataagtatacaacgtacatataagaaataagaatttaatagttaataaggatgtattaaagaatcacaaacttcaactactacattcacgactacacacaanataaagtgagttaagta

SEQ ID NO: 279453 - DNA, 522 bp, Glycine max
  unsure (1)..(522): unsure at all n locations
aggtgcaattttgaagcccttagaagagacagattgagtcctttcctgatcacgcttgtannaccacacannnntnagaaatgaagcnngnnagtgtatctgagaaggaagacagagttatgcngagcagtttcacncccacacgcaagagagacacaacagcggagagcaagcacacgacgcaagcacancgcaanccggcggcccgaaacccaggaagacaacgaagcacaaggcgcaacgaccagaacagccaacgaagcacaagcaagcacaggcggaccaacgaaaacccacacgggccgaaagcccaggcccaacgagaggagcanacaacgccaccaggacacacgaacaacgggaccccacggaggacaaagaccccaaacgaacgacaaagcacaacaaaacacaaaggcaacnnccagcacgcgagacgaccnacacgggggacaagaaagcaagccggggagggcacgaacagaacccncagacccgaccgaaaagagaccagccagnacg

SEQ ID NO: 279454 - DNA, 467 bp, Glycine max
  unsure (1)..(467): unsure at all n locations
nntttttttctttttcttntatcnanattcattctnnatcaggncnnannnngngnnnnntntaaaccccntttaatattctncccnccannnnnnaaagantttttaaanttnagaaaacccccaccacncnccnnnccnnannnncannncnaaaaccaaaacaaaaaaaaaacaacaacccaaaacaccancataaatccacacacaacaccaactaaacaaaaataaaaaatataaatacctatttttccaattattatacaaactttatataattaattttttatctatcatatacaatcctctatattctttttctatatttaaataaatactcaactatataaatcattataatcatactactttcttatacaactattttatcaatatactatataaaaataaattatttcttaattatcaaaatattatatcatttctctaatacataatcctacatt

SEQ ID NO: 279455 - DNA, 338 bp, Glycine max
acaaaaacacttccaggcccaattattggtaaattcattgccaagttgggaatgattaacatctattcgccaacttgatggggtatcacgattaagcagatggagttagttacaagaagttatttgagtagactagtggttatggcaggtagatggttactacaagatatttgagtaattagttggttatgacagatagttagatactagacattatttgagtaaactagattggtactcaaggtagttattttctgtcttctgataaataaaccaactctgtaatactatgatgaatgaatactcaaatagttttcatctatctttcatttctgata

SEQ ID NO: 279456 - DNA, 566 bp, Glycine max
  unsure (1)..(566): unsure at all n locations
ntcntttcaagttcgttttccgaatntcccacnctctngnnnatnngccagnccgcnnacatgnccttgcacggcagcttccattacgtgtttatcacttccacncgaccnngangncagaagggagntgcttaatcatgtagtgactccatgcacctccactattaaaaaaatatgttttgtaacattcgtcaaatttaacatttgatttttatgaaaaatctatgataagtacaaagtatgggtgatattttttgaaaaataaaatgacttttgttaacattcgattntataanaatcgatgtttgtgtatatttctctttaacactagtttnttattataaaaaaaaaaaaaaaaatcaatggttatttttttacttcgttaacagttggtgtttgtaaaaatcgatatttgtgcattatctctctaacaattgnngttttgaataaaaacttgatgttatattttttggctcgttagccgatcaattntaattcagataaccgattgttaaagagattattacacaaaacatcggtgtatttannataagtcgatagttgtg

SEQ ID NO: 279457 - DNA, 274 bp, Glycine max
aaaatttattattataaacgagtaagtataaataattttagaaaaataaaattttaagatataagaggtgatattacactattaagaataggcaatttctttttttgaggatcaatatgaggggggttatggatatatctaccaagaatttgaatatttaaaaatggaggagaaaatttttgctgaaaattaaaagatataaataggaaaataaatctaaaaagataaaaatatcaatctattttaaaaactgagatatttatttatttattta

SEQ ID NO: 279458 - DNA, 531 bp, Glycine max
  unsure (1)..(531): unsure at all n locations
cgtatcccncnnnnnaaggggnnnnnnnnnnnggggatagtcattatccttanatttgacancntngagacnacagcnnaanacagactncagagcttggatccttggaaagatcccacctttctgttgtctaatattttgggcactggacacgaggccactatattgcaaagagagagagagagagtggggaactanaaacactttctacaccataatcttaagagaagtcaaatttgttagtgttgcctagtgcttcaaagtgacttttcgcgtacaaatcaaaaaaaacattacaacataagataaaaggaattaagaagatcaaaacaaaacaatttaaatcttcccttttgtgtggctatgacacgagtttctttattgagcctatggacttactttcttgtgattgtttcaatacttgaggatcgagtaactgttccattgctttcatatagcgagccaagtgctaaagcacttatcttttcatgactggaggctgaagtagcatcatccaatgattgatatttn

SEQ ID NO: 279459 - DNA, 429 bp, Glycine max
  unsure (1)..(429): unsure at all n locations
agcttgttgtttttaagattacatctatacaaaggaatttttgatggggcagcctccaagactccattaagattccttgggtgaggtgggacatagtctgcctacctaagagtaaaggtgggttagggatcaaagatttgattaaattcaacgaggctttgcttgctaaatgggggtgggagttggcaaataatcagaatcagttgtgggccacaattctattgtgtagatatggtggttggagggatttgatttctcatangaactgcagtttagactctccttggtggaaagacctcaaggttatcttcaagcagcagcaaagcaacacaatttgtaaaaatagctctattttgcccatangtaaggacggtccatggaatacaaaccaagtacttattggcttgcaacaaaaaaacactcattgga

SEQ ID NO: 279460 - DNA, 380 bp, Glycine max
  unsure (1)..(380): unsure at all n locations
gagtatcnggaatgaccttaagcaaactacnaancnngtttagtatttcgctatganngncacctacgccttcaattaaagatttagtttttctaagttccctattttttcgtttgcccttatcactaactttgaaaggtttgaataaaggtttttcaatggggacactcngcgaagctttctcaattgatttttgtttaagaactnaccttagtttaatggtttctcctaaaacttgtaagtattttgtggtataatttgcctgttccattaagcttttaatgtctctagaggttacttcctcgttgacatcttttgtcttgaatggaattgccatgacaagtttgtgttactgtctttatatttggtagttgatattg

SEQ ID NO: 279461 - DNA, 506 bp, Glycine max
  unsure (1)..(506): unsure at all n locations
agggatgtcctttgcatcgacantcggcaattattctggaaccctgcgagcctctanagaggccctccggcgcgcgcgcncgcgnatactatgcgagtacggaagacgaatctcaggggttctttgtagtcgattaccaacgatcgaccactatgcatatggtgcggactatgtgccatattaggctagctgatgcaccatcagatgtgcatgtatccttaaaagatggagctccccacgggggtaccagcaatgaaattgaagcgaggataagatgccactgctgtagcctatagagttgcaggagcagaaagatgtgaggtggtgatgctgctgatgagtgtactcanagtggtattgaagatctggatgttgagtgtgccaagagtgtgcttgatgaagatactgaaattgttacaactgctgaccttatgcactaactgcgtacgtgaaaacgatctgacactcattctttgagatacactgaaataatccggtgagatggn

SEQ ID NO: 279462 - DNA, 495 bp, Glycine max
  unsure (1)..(495): unsure at all n locations
aacccgaattagccagtcgntcnttcgatnncntngtananacacacnaatcnagaatnggccgccataaagaagacagagggctagtcaggcctttatcaacatttttctnccgacgccggcgagagggagaggggaccaacgcagtcatcgcaatgatgggacaacacgtgtaaaccttattacacattctgagaggatcgatgccatagggacatacccacgttcttctctatcataagccatcgaacatgactccttggaaatgcgatcaatccatgtggctatagcaagacttaaatgacgggagaataataaataatgataaacaatgtggaagcaacgagatgaccctgcaatataatcgagtacatcccatctttatcggtccatctaacgtaaatagacgtgaccctgataaaagaaatgtagccaataactctagcagtccttgtaggagcgcataatagaggttctaatgacgctgatagaacn

SEQ ID NO: 279463 - DNA, 334 bp, Glycine max
ccacgatcaacaaactactttccgcacctactatatgttgacttgaccaacgctgttattgtaatgctgcgacaatctttcaacaccttattgacacattctgataggttggttgtcatgtgaccatatctatctccacatgtatcacacaccatgctccatttttccttttaaatgcgatcaatccatcttgctatggctggactcatctgaccaaatatttctaaatcttcatcaaacacatgctctcaatgagtgtacactgcatcaaatatgttatcatcaaaagttgtacgtagacatcacactcacattaaattaatgtataaaatca

SEQ ID NO: 279464 - DNA, 499 bp, Glycine max
  unsure (1)..(499): unsure at all n locations
nccttaattcnccctcagccctcctccntcacgttctnngtcgnnnncnnaannnnngnnnnnantattananacatntttttaacctttaatncacaaaannanncnaaagangnnntcctaacttnnagagcaccaccaccaccaaatnntnnnataccaaacactcaaaccccttacaccaaaaatccatctataactacacanatactaaatcccaccaaacaatcccaccatatatacaaatgatgaagacggcttgcaatttacataattntatacccaaattatgttacaagagaacgtctttgaagaaataagtaagtcttctacaaaaaggaagcctcaagttgcctttgcaattgaagaaaaacaaacctcattaatttaaggcttaacatctaaaccgatccaattgttggtgttggtcaagcaaaaaaagcgctttggttgagagtcacgaaaaaatatatacaaatntcgaggtgaaactctgaag

SEQ ID NO: 279465 - DNA, 249 bp, Glycine max
attcctattttgactgctacaccatagaaagagacatctttctccctatctcttctattgcttcgcattaaatagcaagaggtgtccatatattgagcctaattttttatactcgctcatgcatgttgaatattttgacaacattaagttttttataatttatgaatgagccttattgaaggactgctgactgttaaaggtcatatataaatcactatcccagtattataatttataatactaatttga

SEQ ID NO: 279466 - DNA, 408 bp, Glycine max
  unsure (1)..(408): unsure at all n locations
agcatgacttacgcctattaatctttgttcggttttgaatgcaagagggcatgaatattatgacatgtttgagaggttttttattacaatttaaattggctgcctcatgaggaataccttgcacctatgtagcatggaaaatacctttcaatggtatgtatatatgtgaatatatatagcatggaaatgccttgcaaagtgtgtgaatatatggcatatatataccttgcaaagtgtgaatgtatagcaaataatgaatttcaaaaatctgtatatgtaagataggtagcgtaaaaaatgcctttcaaaatatgtatatttgtgggtaggtagcataaggagcctttcaaacaaaatgtacccatggcaaanatggcacgagaatgcttcccaaatgaatatatgatg

SEQ ID NO: 279467 - DNA, 398 bp, Glycine max
  unsure (1)..(398): unsure at all n locations
agctnttattaattgaattaanacgttcagaaactgctggtaatcgattaccatatatgtgtaatcgattacatagtgcnacatttgaattcaaattttaatagctgttgtaaattacttttggccactagtaatcgattacatcctctggtaatcgattaccagagagtaaatttgtttgagaaagactttttaacttaaatntcttggccaaaccttttgctacttcaattggaattcccttcctatttaatataccctttctaagactctagagactgtcttgatcatccatcttgaatatctttaatatctttgtcttgaataaagctatgagacgcatgtgaacctatggcatcatcataacattcagcttgatcctttgtctacaattactt

SEQ ID NO: 279468 - DNA, 444 bp, Glycine max
  unsure (1)..(444): unsure at all n locations
agaagcatgggancctgaggcatcaacataacttttcagcttgatccttagtctacaaatngaggcgtctggaaagaattattagtataagtgacccttcttataaaaaattccgagaaaaaaataagcatcctagttggacattttttttttcaaaaaacaatgtgccaccaaaactacacatagtgaatagttgggcatcactctctataccaatatttgatgttgtggtagcggtgtgcatgggaggttagctagttgcccgttataggtggttccttgaaaatctagagagagaaagagatagatcattaatcctatttaagtgcctcttaatctagcttatcttctaggataaaatattatgctagacanagaagatagggataagagatganataacatctttacatcctattgaccaactaacaataaattacgatc

SEQ ID NO: 279469 - DNA, 389 bp, Glycine max
  unsure (1)..(389): unsure at all n locations
agcttattgtttattatggangttatntacctatgcttgatgaagataggctcaagaaaacttggtaaagcttggaagaagagtggaaatggtgtctcctttcgtcttgaccagttgatgaagaagaggaagaatgagcgtgaatggtgagttttagagtttaaatgaacttatagaagaagcttaaagcatggtctattggattatggagttgatctatcctaatcactcaatnttgactcatgaatgacccttgctcagccatggagaacatgtacatcactatcgaatgtggtgtgcttcactcttgaaactcttacttatanaaagctaaagtagacttttgccacaaatgggtattctttgcctttatcaaaactagtaaattc

SEQ ID NO: 279470 - DNA, 218 bp, Glycine max
  unsure (1)..(218): unsure at all n locations
gtgactggagtcatcaagagattataaagatgtgattatgacttgagtntcaaatatcatccttagagaatcgggcatcaatcatctttgaatcatctatctttcaatcttttcaacatcatctctcaacatcttgcaatcaatcttgcaactctgtgtacagagatttctgattcatttctcttcatctttctaaaaggatgtgatcaacactgtct

SEQ ID NO: 279471 - DNA, 418 bp, Glycine max
  unsure (1)..(418): unsure at all n locations
agcttgtttgnggngcttctacggaggctggatctttgagcttcaatgaggtcctttaatggtgattttccatcatggagatgcagcggaagacaaaggaaaagaggtgagaggaggcgccatccactatggaataagccatgaaagaaggagctttcaccaccaagatgagccttggataagaagcttggagaggatgcttcaatggaggaaaagaaagagggagagaaagagagagggggtagcacaaagttgaaggaagaaaaagggagagaagttgaactntgagttgtgtctcacaagactctcattcatcanagttacaacaagtgttacacatgcttccatttatagactangtagcttccttgagaagctntcttgaganaaacttctcgagaagattctttgagaaaac

SEQ ID NO: 279472 - DNA, 206 bp, Glycine max
cctgcagaggactgtctaggatccgcggaaacgctgcttctacttcttgcctatcgatgtacaccaataacgggttgagatggccgactgatttacttcaggagtgactgctataaccgggcaccatgcgatataaatgatcacgcatctcttcacaattgatgcagatagggacatatccactatgatcgatcacattgaccatc

SEQ ID NO: 279473 - DNA, 407 bp, Glycine max
  unsure (1)..(407): unsure at all n locations
agcnngtaagtatttgtgactcatgagatccatggaaagtaagcatttcttcatttaaattgcgaacttataatttttccttttttgcttcttgtaacaaattaggtcagaggaaaaacttggtttcaaataataacaggacctaacatgggtgggaaatcaacatttatccgacaggtgcttatcttctgttccattttattgtaaaaattaatcatcatttgattgtcttataaattttattgtcagatctcatccttctacttttgttctggtgttaattatgaccatcaattntgggtgcccgaatattctttctgaagacattttagtcctcacaattcacatacttgcattcttgccacctgaggttggagatttggttaacagtttttattcctatatgt

SEQ ID NO: 279474 - DNA, 451 bp, Glycine max
  unsure (1)..(451): unsure at all n locations
cgatactcagctctatcggaagaatcgggaggttatgttttacccccactanaaagcctgatgaaaaaccacccgtgtgagtgatcgtaaaaagaatgctacaaagtgtgtatagattctacttcaactaaaatagcagccttatttgatcacgtgtgagattccagaggtaaaacaggtcaatcaagcggaaagtcacgaataagaacaaattcgtcgtataagccagcgcagatctgaaaacatcgcaaaccgaaaaaaaaatgcagaaacaaaggcaagaccgaaaacatccccanaattaaaaataaaaacaaggcaaagaaaaaacggagaggaggaaagcaaacaatgcaatctgtaacgaanatcagaaccccattgcctcgaaattcacaacgaacagacgcatccagctctcattattatgttatgctttaaaataataata

SEQ ID NO: 279475 - DNA, 228 bp, Glycine max
  unsure (1)..(228): unsure at all n locations
agcttgagatgangaagtgttgaagggtgaaacttcctgcttttattgttgaccacagagtggtacctggagatacgtcgcggnggtcaggagaccttgnggacgtcangtggggtgctattgcccaaaaccaagcttgaccaatcccgacccaacccgggcatagtcggtcagtgagaacctgcgatgtacctaagcaggcgagctcctggcagtcaacagataaaa

SEQ ID NO: 279476 - DNA, 194 bp, Glycine max
  unsure (1)..(194): unsure at all n locations
aactcaagctntnntcatcacctaaaatagccatttttaagtgttcaatgcctttaaatggncttttccgctggtattggttaaatgtagatttctaaaggcctaaaatcaatatgtaactttattacctatttcaaaaataaagagatcattaatgggccaatgccttaatgtttttctctcttttcaaaaaa

SEQ ID NO: 279477 - DNA, 313 bp, Glycine max
  unsure (1)..(313): unsure at all n locations
cataaacttaggttatgtatganagagactatgtttggtaaaaatagcttataagttagctaaaagcttataagctaattaatttaattgcaagtatttggtaagactaactgatatgttgacagataaatgtcaaaagacatagaacaagatagtcaattgtgcataggtttagtttacaaaaagtgaaatattttattttatgaattgaatcgataatataaaaatcatgcacggaaacaaattagaaattatgtcacatatatttagaaaaaacatagaatggttcatcaaataattgtanagttgatat

SEQ ID NO: 279478 - DNA, 483 bp, Glycine max
  unsure (1)..(483): unsure at all n locations
nggggnccggatangctttgctntttgannnctagacnancnnagacacataccattgattgatttcttatgaaaagttgtgntttttctctattcctcacaacgtaactctttagtgattgcttttatatagaatagcaaaatttgtaacttttgccaaactgcacaaatgatgtcgatgtcaaatttgcatagatcactagaaggggttcagagtactcattattgtaggggtcttttggggacttaagcatgttatggccataccatattgacatcttggacagcgctaatataactgatatatatttaccccttacgattttatggctggagaattgtgtgttcgtgagtatgtgttgttatctagaggtagagaatgcgtgcatgttatgatcttgaatcgatataactaaatcccctgatcaatcctgtggtgatgtggaacactttttctgacatatgttgtcattgctgcaaagg

SEQ ID NO: 279479 - DNA, 499 bp, Glycine max
  unsure (1)..(499): unsure at all n locations
aaaannaaggttggactgggatttgnanancttaaactangcacanaacaggcgtctccganacttattaagaggctncgatttcactctaaacatgttctcaaaaatcccaacggtcagatcatgtaaacttgtcttgtgaagttgcaaaccaaaattcccgaagatccaacggttaatgaagcttgggaagcgtttttaccgaggcagcttcatgtagctntttctagaagcttcattaagaagcgttctccagaagcttcctcgtggcgttcttgagaagctntctcaagaggcttctttgagaaactagatccttatctatccacacccctctattaaaataaataactttcttaanaataattacggatgaaaatatgcgcaaaataatcaaacatcanacataattactaataatatatagatatatatatcagggtgttacagttntcgggtatagatccctttaactatccctcatatgatgtttgaccan

SEQ ID NO: 279480 - DNA, 401 bp, Glycine max
  unsure (1)..(401): unsure at all n locations
agagatgantgaagggagaggaagagaagagtttgaaattttgtgctctaaaaaagctctgaaatctgaggtttattattcaaaggatcaaagtggaaaaaaggccacaccatgaccttttttatagcctaagtgtcacccaaaattggagggaaattgaaatttcaattcaaatttcactttgaatttgaaattgattttgtggaaccaaacttggagccaaaattcactaatatgattagtgaattttagtatgattcagcccactaatccaagattctccactaagtgtgcttaggtgtcatgagacatgtaaagcatgaaggacatgcacaaagtgtgactatatgatgtggcaatggngtgtagtaagcaaatggctcacctcccctctaaaattt

SEQ ID NO: 279481 - DNA, 396 bp, Glycine max
  unsure (1)..(396): unsure at all n locations
tatgcttcacagncgtgctatgcttgtgaatatgtttcttctcaataacaacacttaaaagctattactatagccttatacttctttgaaaatgctttgaaagatcttagagagatgtcaatcgaaaagaagccacattccatctcacaaggcatgccaaactagaagaaacaaacattagggcatgaatgtgataaaaaaatcatatatcataacatcttgggtgctgacgaaggtggggactgatcatcgatgcaaaagtgatgggggcacaaactaggaacgacttatagcacgcttctaatgggagagatacatgaatgaatcaaattcactcatgaatgagatagatctaaagactgtgtacgtatgagactatatgattgaagatgatct

SEQ ID NO: 279482 - DNA, 408 bp, Glycine max
  unsure (1)..(408): unsure at all n locations
aagttcggaacgggaagaaattaaggttgcctctttcacacaactaatactncatcgctcagggctataaagatgtgaacaaaagattagaacatangagaccaatgaacatccttagatgaaagaattactctaatacaatgtctntggacaaaacataaaacaatatatgtgcacaaaataggtaatcctttgttctaacaagtcatttgcaatttgtgctaaacttttatatccctacacttcgagtagatttcttgaaatctttctaaacaatcattgcttgtgaatgtcagaagtgacttgactgtcaagaagacttggattaanggttctgttgtggcacaagtgagataacaatacttgatgtacttagaagtgacatcaataatgtttattttgatattt

SEQ ID NO: 279483 - DNA, 465 bp, Glycine max
  unsure (1)..(465): unsure at all n locations
ccccagccccgttcangactntggcaatnaganagaccgcgagccctnaagcaacctgaggcggcaacnnctatattttgttncaacctatctttgcaggaaattcgcaaaacaaaagggcataactttcaatcctctccttgcaaaagaatcaacaggctaatcgctgaatctttttgtgtctctcttctcccttttccaaagtatagagggaccaccgcctgaatctttgggtctcctttctccctttccaagagattcaaaggactaatcgcttgagaattctttngattcttcccttttccttaaacaaaagaattcaaaggactaaccgcttgagatatctnttgcttccccttacanagattaaatagactaaccgcctgagaattctttgtcttaacacattggagggtacattctttgtggtacaagtagaaggtacatctactttgattgttgaan

SEQ ID NO: 279484 - DNA, 323 bp, Glycine max
  unsure (1)..(323): unsure at all n locations
agagaatagtctacgcttagcgcaacagccgccttattgctcttccaagagttcaaaaaccggaagagattggcgcttagcgcctcctggccagctaagcctagcttanaagctcaagttacaaaatggatctggggcttagcgtaggatagcgcgcttagtgctgatataatgaaatgtttacatagtaaaagtcgcgcttagcgcatcattcacgctaagcccacaggttaaagttcaattaccgcaaagatatatggctcaacacagtgatgtgcacttagttgaactattcaaccaaccaatcangggtctgagcgctt

SEQ ID NO: 279485 - DNA, 230 bp, Glycine max
tatgtccgggggcacgagaccttgggacgcatgtgtgggctattgccaaaccaacttgccaatcccgacccacccggcatattcggaagtgagaacctgtgattacctaacaggcgagctcctggcagctacagatacaggaaccagacccaaagcaggacgcttgggggctgccactgagaattctggtgaatagggtcgggccttggaatcataccaagggggaatca

SEQ ID NO: 279486 - DNA, 401 bp, Glycine max
  unsure (1)..(401): unsure at all n locations
gcatgctgaatcttaaggatcccctatagacgccgctttcgttactgtactacacacgtgagcccacttagaggtgaaggatggatntatcgcaattggggttagaatgaacatgtgtagggatccttagaggatcaaattgaaatttattttgggatgtttattggattgtaattctgcctttatgattataatcatgagattgttatgttagatgggccaattgatgcccttatgtgaattggttcaaaaagttgagtgctattggtgttctcgtgtatttgaacctatgattttgattcctttgattctgatatgattatgtgaaatagtttgaggcgtttaatcatatgaacataacatattaatattattactatgtgacatgtatatgatgcatg

SEQ ID NO: 279487 - DNA, 158 bp, Glycine max
cgaacgggcgataccatactgagtttgcaggatagagcgaaacactgcctaagcctctcatttcaatgagcaggcacaccgcccgcgaaaatgcacccatccttgctataacaaaaaacagcgccctcccgtccagggtccgtaaaactcctcaggcg

SEQ ID NO: 279488 - DNA, 55 bp, Glycine max
  unsure (1)..(55): unsure at all n locations
ttccgagttctaatncctcttatagagacggggacgagggataactggacggtcc

SEQ ID NO: 279489 - DNA, 334 bp, Glycine max
  unsure (1)..(334): unsure at all n locations
agcttgnctccagtcatccataaacctatttggaacatgtgacattgtgcataccctatttcgtccggggattattatttgatgaatatacaaccttgattggccgcttcaagatacttggcaccctttgttgcacaatatgtgaagtcccgagatgtgccgaaaatcaaaaggaagcatgcttacgcgatccgtgaaaattccgtaatgtgacagacatcganaggaagtggttttcgcaatccgtgagttttcgtaacttcttcgaaagctaaaaaagagtaaatacataatccgtaaggattcgtaaccttgcggaaggaaaataagtatc

SEQ ID NO: 279490 - DNA, 190 bp, Glycine max
  unsure (1)..(190): unsure at all n locations
aggacgccccgcggnaggcggtgacacaaatgcaaaaatgatgacccggaaaccccatgcgaaactggttatgcatgcacttatgcggacgctcaagtgtggagattttatggtcatgtgatgcttgggtgcaagatgcaattcctctagtgtaacaaaacccggtgtgctcaggataagctcttatatc

SEQ ID NO: 279491 - DNA, 145 bp, Glycine max
agaagagtaagaccctcttagaacccgggagaccccccaagactgataactgaagactatgagaaaaagaaaaagaggaccaatgagaaaagaaaatgcttatggttacaatttttaataccggtcctcttatatctagctctaa

SEQ ID NO: 279492 - DNA, 307 bp, Glycine max
  unsure (1)..(307): unsure at all n locations
aaaaggtttgactttttcaatgggtttaagttttctaaaagtatactcttctgaaggtcttcttgaccagacataaagagctataaagcaggctttgtttgcattttgaacaatcatttcaatcttgatacttntcaatcattcaaacatccttacaagccttgatcttttaacttttcttgtaccaaacttttgagttactggttttcaaccttgaaactgtctatcatccttcattctcttctctttgccaaagattcccaagactaccgctgatattttgatctctctctctctttcaaaaaag

SEQ ID NO: 279493 - DNA, 431 bp, Glycine max
  unsure (1)..(431): unsure at all n locations
agcttanttagtatctgcgaattggnngaaattgnnggagggtgaacccgtacagtaattttctagttntgcctctgctgacaatcacaacatatcaacaacgccatattcagtagcaactaaaggatgtctccctgtattactactgttatttcgccaatagaaaatataatgaaagaagaaatatgattaaactccgagtttaatgctataattttgtaatcagatgccagtgtaaaattactttggtgcataacctaatttctcttaaactattttcataagctatgcaaaaccaaagtaagcttgaaataatttatggagatatgataaactcttttcataagaagtgcttaatcccaatttatccatttaattcctaggtaaaaagctatggacaagagtatggaccatatatatatacttgaact

SEQ ID NO: 279494 - DNA, 659 bp, Glycine max
  unsure (1)..(659): unsure at all n locations
aaccccttacnggtggggggggggcttttngnnacnnnttcgnaccanancgatgacgtancattagnagccanctnagagccctatgtagcatgatagacgtgacagcatgtacactgacgagcaagcacccctactttactatgtctcttataacanactactctncnntatncncccagtgagagatcagtagagcgtcatgtcatgtcacatctacgttcatgcataagtcgagagacagtgagctatgcatcgtagctcgcatgcacatacaactcttggcgtgcatcaactatgagtgacttctctcctcaatatgtggttngaccccacgccatcagagatgtgtctcaatgacatatacataccctcgtcagtgtctagtacagacaagacatacacactctcacgagaagatcgttccactcccaccgcagcactaattgcgcacttcactcgatgagtgagcacttgcatctcctcaacttaggagtgatctccacaagaatcaggagtcctccaaagggatagggcgtccatcgttcaaccagcatatagcaagcactggtcaatagcgaggatattaaactcaatgtacttgagacaaagacatgctcactggactctccgtcattctgatcaatagacatagcaan

SEQ ID NO: 279495 - DNA, 425 bp, Glycine max
  unsure (1)..(425): unsure at all n locations
agctttttggatttaaacatgggaccaactcattgtatttcagaaaaaaaggaagtcgtatctagtcaaggtctgagagaccatacaagtttcctaacgatttctaattatgtgggccattaagtctatcatatgctgacaatagccgagaagcccatgaatctcttcgggggtggagtaggtgtctgccattgccttggccttggctaacaagcggngaagttcttgactcccgttcaaggtaagagcgaaccggtccatccacatggttgcctcttggtgtaaagagtcgatcacccttcctctagcctctttttccgcgtatacttgggcatactcatccgcgattctatgctcgtgggccgtggctagacctaactcttcttggtacttggcgatgatagctaacatgttggtcttcgtct

SEQ ID NO: 279496 - DNA, 449 bp, Glycine max
  unsure (1)..(449): unsure at all n locations
actcaagctataagacaaaattgctcaatctttttcattatgcatgttatttangaagcatgaacaagaatcaagccaaggctattgtgcaagcaatcaatggggcaaaacacaccaaatgattatgatgatggatggctcanattctcacaaaggtaaactcatcacttccaaattgagctttcaaaactatcatgacatgtagaggagaatcaaggatttcaagtcacanaatgtcaaaaactcttattttcaaaacaattacccatttcttgaacatatcctataattcacagaaaaacatgcatagtcgtacatgcacacaaaattgacccaaaatattaaactaaaaatccgacgaaactaacaacattaacaaattaacacaactaacaacttaacataaccaacaaaacttgcagaaccaaagaacactcccncgctatact

SEQ ID NO: 279497 - DNA, 413 bp, Glycine max
  unsure (1)..(413): unsure at all n locations
agctttaattttcaattacgagcgtctcgatatataacgggactcaatcagacatccgagtaaaaagtaattgtcgtttgaatttgctaagagctgcggtattcaatttcgagtgtctcgatatattacgggactctatcagacatccgagtaaaaatttattgtcgtttgaatttgctctgagcttcaacattcaatttcgagcatcccgatatattacgggactctatcacacatccgagtaaaaagttagtgtcatttgaatatgctctgagcgtcaacattcaatatcgagcgtcttgatatattacgggactcaatcagacatccgagtaanaagttatggtcgcttgaatttgtccagagatacaacattcaatttcgagcgtctcgatatattacgggactcaatc

SEQ ID NO: 279498 - DNA, 334 bp, Glycine max
  unsure (1)..(334): unsure at all n locations
aataacnntttttactttcggatggtcgngaaattgagtcacagtaataatgtcaaagacgcctcgaaatatgnnnataccgaagctctgagcnaaattcataacgaacaatacctatttgactcggatgtcggattgagtcacgtaatatctcgagacgctcgaaattgaataccgaagctctgagcgaattcatacgacaataactttttactcggatgtgcgattgagtcccgtaatatgacgagacactcggaattgaataccgaagctatgagcaaattcaatcgacaataacattttactcggatgtcggattgagtcacgtaatatg

SEQ ID NO: 279499 - DNA, 294 bp, Glycine max
  unsure (1)..(294): unsure at all n locations
tatggangctggatctttggcggcgatgaggtcctttaatggcgatcctccaccatggagatgcagcggaagacaaatgagaagagaagagaggaggcgccatccactatggaataagccatggaagaaggagcttcaccaccaagatgagccttggataagaagcttggagaggatgcttcaatggaggaaaagaaagacggagagaaacagagaggggggagcacgagatcgaccgaagaaaaatggagagaagttgcactctgagttgagtgtcacaagactctcattcat

SEQ ID NO: 279500 - DNA, 488 bp, Glycine max
  unsure (1)..(488): unsure at all n locations
ggggnnngggtgagctangacattgaatcttagactaagccncttagaagattctagagagctagagcttactacacatttctctctataccaaacttaacctcctgagaagagaggctgaacctaacttcacaccccctatgtaactaagcgtaaccccatgattaaaaacatggatattccaaanaagtgcctactaccaagaacaactcaaatggcccggaataccagggttaaaccctatactactagaatgggcacaaatccagggccagaccatggaaaaacctatatctatatttacaaaggataagcggctcatacttaagccattggctcgaaatctacccttaggctcatgagaaccctaagggccttcccttggatctctanctcaatctacttggaggcttctacccaatgcccctgctgggtnngatgcatcattccctcaccttggaaggatttgactcccatcccaagtcttt

SEQ ID NO: 279501 - DNA, 283 bp, Glycine max
ctctccagcaaaccagtatatatcatcaaatccaataatataaacagtataaagctcaccatgggtttatcaatagttgatcaatttttagatgatcgataaccagtgatcagctaccacagtccccgttaatatatttgtaatgagttcattcgttcaagcaccattaaagcaacttgtaacatctgtctagcttttctatcaggagtgcatctatcattctccatttccttgtaaataatgggaacctgaccataatattatcaatttatcagcatgaaat

SEQ ID NO: 279502 - DNA, 447 bp, Glycine max
  unsure (1)..(447): unsure at all n locations
tactataagtcaagtacaatataagtctcattttataatgttaatncagtaatataaacatgagaatgttaaacaaaatatattattaatatttttaataccgggtacattatgcagtttttttttttttttattgatactcagtcatattttggctcaagtgatccagagcacatgcaatttttgtcttactttctatcttatattattcccatttctttgcaacttgaggtgcatggctaaacctttttcattacgtagactaattctcgcataaattggactcctacatgtcaatccttgttcaaagtaattccgtaaggatattctagcgtatcattttaactcttttttaatatttcttcttaaaaaaaaagctcttttttatatgctaatatactaagaataaaatattacctcagcagacaccaaaatgggtaaatagtg

SEQ ID NO: 279503 - DNA, 490 bp, Glycine max
  unsure (1)..(490): unsure at all n locations
aaaaattagctgnncatcgatntcgncaatnataagnancngcganncttnagncgactgcggcatgcagccnnatagtcnatttagccggaaccccaagggagggggggttaacacacttcctttgaggctatagttaacccacctccccaagagttaccccccccccccccccaaggctatataggcttggaacatggtaagaggcccaaccacgaatctaggatagattttgggatcattgaattagggcttaaggtctatctcaattccacaaagctgactttaaaaattcatgttgtaaggtgacgattatccatgccttataagaactacattgtgttatatctcaagttgatgaggggtcttaatgcgcccatgacccacaaacaaccccttatgtgtaggantaaccgtttatggtggtacaaacgcaggtcacccaaaatggatttaggttatctcttcaccatttaaatttaagttacgg

SEQ ID NO: 279504 - DNA, 263 bp, Glycine max
  unsure (1)..(263): unsure at all n locations
nccatgccaatgcgaactgaatccaacgcaaacccataaccaanttctattaaattcaaaacgggacgtagttcaaagcttaaatcagcgttacctttcaaccaataagctaatccctgacttaatatgggaactcctctttaaaccttttaattatgctatttcagttatcatcagttaatgcaaaacttaaggactaaataaccaacaactgaacacaatgtgcaaacataataatctacacgttctcaaattaataaacc

SEQ ID NO: 279505 - DNA, 183 bp, Glycine max
atgatattgcgcccattccgataacttgagaacaggttcttgagcgggttgatggcatactatttttggaaagaccaaatagaaggacacaaaagttaaacttccatatggaagaagaggtcgatattatttgatcttctatattggaccgctctatatgtcagacattgtattgatcttatg

SEQ ID NO: 279506 - DNA, 500 bp, Glycine max
  unsure (1)..(500): unsure at all n locations
ccactcnagctgggcagggggttgnacanctgtaannatagagccagcagctnggacatngaggaactgaggagagcagaaccnacttttgttacttttataccnanangcgaganngaggacgatgtgatattttcttagtccacaacccctccccatagagcaatgagccgtcatatcatgacctgggtaatcgagtgaagaaatggggatccacctacgataaacggcgtgcatttgaaagatgacactagattgctcactcatgcggatgagaatgttgagcatatcatgaaagctgtaccgagccattcagcaccagcacagagaccaatagatgatgattcctgcacccgcagattccaatggtcgccgaaggatccaaggttgcactctctcgaataaggaaggactcgttcctttcacaacatacaactgtgaaacatgctatgcacgttagctatggacattctcggagagacagatattgaaaagatgct

SEQ ID NO: 279507 - DNA, 190 bp, Glycine max
gcaaagaaagaacagttcacttgctctcaagtgacaaacagagtggccaatcaaaagaaaatggtgcttggctcatcaaggatatcaaccatatgaactaaatatcatggaatgcttaaatcaatcacttctaacaagcatgcagcttttcacagataagatcacaagtgttagagtcataactgaaata

SEQ ID NO: 279508 - DNA, 326 bp, Glycine max
  unsure (1)..(326): unsure at all n locations
agctatcatacgcatgtccgatacangcgcatagcgtgtggagactctaganatctaacaaacgaagctctcgagagattcacatggtcataacttttcactcgcatgtccgatacaggcgcataacatatcgagacgcttgatattgaacaactgattttctcgagaaattcaaatggtcataacttttaactcgcatgtccgattcaagcgcataacatatcgagacgctcgacattgaacaacggatgttctcgagaaattcaaatggtcataactcttcactctcatgtgcgagtcaagcgaataacttatctagacactcg

SEQ ID NO: 279509 - DNA, 448 bp, Glycine max
  unsure (1)..(448): unsure at all n locations
cactatagaacctcaagcttcaccttctggtcctcctcatagttgttgcatgagttatacattctctattttcatctcccactccaagtaggcctccggatcattctttcctttacatggaggaatgttgagtttaataccatcaattcggttttgtctaggaacaccatcattccctcttctcctcctttcttcttcattatgatctctattctccatttgatccaacctctcatggagcgcatcatctcgttgtttcattaacctctccaaatgttgcatcaaagcttgcatttggaattgcgaaagccccactccatcattangattagtacctgacatctcaaacaaacaaatcaaacgtaacaagacaattatagtngctgtttgaatacctcacccactcaagtgtatcacacaattatggcttttctcttatgaaacactc

SEQ ID NO: 279510 - DNA, 204 bp, Glycine max
aatctcaaaattaatattaatgcctaccatgagtcaatgcaacacatctctacaatgtgctatgttgaattaccacaaaaatagatggaacattactatctcttactaacgctattatcactgtaacatattcagcacagaaaacatacttaatagtgcccctgcacatactagtgacctatcgacactgggtattatacgaaa

SEQ ID NO: 279511 - DNA, 478 bp, Glycine max
  unsure (1)..(478): unsure at all n locations
nggcaaggttttagcctagnannncntcgnantancnacnnantctgtagangtaccncctggnagaacaacgaagcgcattaacagtttcagcccatttatccggcagcgaggacagtggaancagagcggncacctaatccccacaccgaggccgcacagaaaccaatngggcaagaatagagtnacactcattaatatgatcagttacggagataccttcttccatcttgaggctgaacaaccggcgcatcaagtatactttgttgggtgatgacagagggctcggcatatacgataatgccatcattaagcctgcacggagattctcgctcccgaagtgaacgcgacgttttggctaatgccaagggatcacgccagagcctgtgatctatcagtccatcttcttgaaatgtctctggctaaccccgaatatgctgaacagcttcttctgaaaaacaaacaaggttagcatggc

SEQ ID NO: 279512 - DNA, 404 bp, Glycine max
  unsure (1)..(404): unsure at all n locations
agcttgtaattttattntccttgctagagatcaatcaagagccctcctacataaagggaaggctctcccaaaataattggaatntcctaatcctcctttatgtccatgatcacaaaatcagcttgaaaaatgaatttaccaactatgataagcaaattctccactattcctttcagataagtaatagttntatctacaagcacaagagaaatgttaatgggttgnggttcttgtaactcgaacttcttataaacaaaataaagcatcaaatcaatgcttgcaccaagatcacataaggctctatcgantttcagctcccatagtacanggaatgaaattccatgattgtgacttagaggcatttctttaaactatataagcattctcattgagccactgggaaa

SEQ ID NO: 279513 - DNA, 386 bp, Glycine max
  unsure (1)..(386): unsure at all n locations
tggacatcaccgcttggaggaaccctcaatcaacttgatcacttgtttacttatgtngatnntgagggccacatcacctttgattccttcggtcttacacttaagataatccatgacttatgtggctatcaaatcattgttgagtgtcataccctaatttcgtccgggaacctttgctcgatgacatgcgaccattctttggtccttgtgaggtgcttggcacccatcattaggcaatttatgaaattccaggacatgccgaaaaaccaaaaaaatattgatgcacaatccgtaagtttccgtgacacaccggagatcaaaaggaagcatcgttgcataattaagtgaggttccgtaacattccgtaagtcaaaaggggatggtta

SEQ ID NO: 279514 - DNA, 277 bp, Glycine max
  unsure (1)..(277): unsure at all n locations
gagcttgtgttatgatgccaactaaagngggcattcggtgagcaaatcggagcaccgttcaaccacttggagttttggaagatctacttgtcaaagttaatggtttcgttntccttgaagatttttacattttggatatggaagatgattcatctagatatggttctatattgatcctaaggagaccattcctcatgacagcccanaccanaattgatgtgcatatagggacacnttccatgtagtttggtgatgatgttgtgcagttcaacatctt

SEQ ID NO: 279515 - DNA, 310 bp, Glycine max
catggagatgcagcggaagacaaaggagaaaaggcgagaggaggcgccatccactaaggaataagccatggaagaaggagcttctccaccaagatgagccttggataagaagcttggagaggatgcttcaatggaggaaaagaatgagggagagaaagagagaggggggagcacgaaattgaatgaagaaaaacggagagaagttgaactttgaattgtgtctcacaagactctcattcattaaagttacaacaagtgttacacatgcttctatttatagactacgtagctttcttgagaagctttcttg

SEQ ID NO: 279516 - DNA, 385 bp, Glycine max
  unsure (1)..(385): unsure at all n locations
agcntgtttgaattagcacaggaancacagggggagggggactcttacataaaaagaaagcccggatcaaacgggatacaatgtgtcttccaaaagacaaggagggcatangcatcaagacatttaacatagcattgcttggtaaatggagatgggatcttattcggcatcatggggaattatgggcaaggattctggagtctaaatatggtgactggagatgcctggctgaaggaacaagaagcagcaaggatttctattggtggcaggacctaatggcaactcttaatcaatcacaacanggcactgcttttcaaaatgtaacatgttggagtgtacgatgtggtgattaagccacattctgggacgattgttggactgctga

SEQ ID NO: 279517 - DNA, 504 bp, Glycine max
  unsure (1)..(504): unsure at all n locations
aacccagggagctggcctcgacngtaactancttgcacatacaccaccaagctctaggattgtggngtacagagaccatgnagcactttgtggcttgtccaccatgttgcacaacaagggtcccgcggccacgaagcgaacatacactcaccatcctctgatgaccacctggaaccgagctcacgaactcggacgtcgcccataacctgatttctctcaacagcaggtccccagaagtactgccaagcttccacaacatccatacaaaacaacattcaaacagctatagctatcacggtcaaaccatcagagcaaaggcagaaaactcttgccaaaaacaacacaaccatatcacagctattctcacttaaagatcccacacgcaataaccctcgttccagggcattaaccgtccgatcgactctaacaatttactggacagccttaaaacataagcctacattgtgaccgttggcgacgacttacaaacatgcgcgacatatg

SEQ ID NO: 279518 - DNA, 275 bp, Glycine max
gttcattttatgctactaccccactatcacgtatgcccagagcctgacttattgtgcgaaattctctggatactctactcctcaagctgataagtgaaagaagtggcagtgaactcgatatagacaagaaagccaccacaagtatgctagcctttccacaaaaccagaatacgatggactgtaataagagattcccaacgttgctgactcggaattatactttcaatgtatcgaatatatctgacatttcatactatgaacataatatgtggcgc

SEQ ID NO: 279519 - DNA, 146 bp, Glycine max
  unsure (1)..(146): unsure at all n locations
gagatgtacatantaaggtgttatgtgaaaaagcactcgcagcaaaaatcaaaattgtgagaaaatcgcaacgttgtcattactgctcttagttgactcattgaaattacattggaatacacatgctcaccattgctaacttcaat

SEQ ID NO: 279520 - DNA, 411 bp, Glycine max
  unsure (1)..(411): unsure at all n locations
agcttgtataattcaccccaattccagtgtcctatgctgacttgctcccatatctacttgataattcaatggtagccataaccctagccaaggttcatcaacctccatttctccgagaatacgactcgaacgcaacgtgtgcttgtcacggagaagccccggngcgttccattgagcatggtagggctctgaagcgtaaggtgcaaggtctaattgatgcgggctggctgaaatntgaggagaattgcgtgtaaatcctgacattgacaagagatgccacacatggngcaattntgaaagctgttgttatgtgtccctaatgactcatcanggtttccngtttatgccattattgtaaaccacagctacaatggtaaatgaaatggataagntgatatctttgccctcatc

SEQ ID NO: 279521 - DNA, 414 bp, Glycine max
  unsure (1)..(414): unsure at all n locations
tggacttcctgtgttctgggaacctctcctttctcangtgtatccaaacccaancacctagttcaagcacgactttctttctgcttttgttggcttgccttgcatagctcacatttttcttttcaatttgagccttcacttgctcatgtagtttcttcacatactcagctttagcctgtgtgtccttatgcttaaacatagcaatgttaggcataggaaacaaatcaagaggagtcaaaggattaaatccatacactatctcanatggtgaacaattagttgtgctatggacaacccaattataggcaaactcagcatgaggcanacatgcttcccaagaattaagacttttctttaaaacagtcctaagcagtgtgcctaaagtcctattgactacctcagtttgaccattag

SEQ ID NO: 279522 - DNA, 334 bp, Glycine max
  unsure (1)..(334): unsure at all n locations
agttatccctaatatgatgcttttaaccatacacaaacttttgttagctgaacgttgacatggaaaacatgattgcctttcgagcttctgaatagctcttcttttggtagtccccattttgattgtgaaatctatatcatggaaagttttcattgtagatctatgcttcacacctatgttntgcttctgaatatgatgtcttaataaagaacactcacagcaaccatttatagctaagttcaatcacttatgaggggactctgtcgtcaaaaatataacttaacaatccaacttggacacattaactaggtccatcttggatatatcattggag

SEQ ID NO: 279523 - DNA, 382 bp, Glycine max
  unsure (1)..(382): unsure at all n locations
nnnnngggagatcagactcgancnctgaccacctgnatttgaaattcgcctgcgggggaaagaggttccattggccaatgaaaattggggttcttgacaactactctttattcataaacatcgcccaaaactggaaagaaaaaagcaaatggaaaccacctggtgcaaccttattagccgagatcctagcctacgaatgttttatgaaaatattcctataccagcctatttgccagaatcctccttagccgcttgaacacaaagccttcggatggggaagacctccaaatgacggatagaggcctttggtggtcaacctctgtccaccaactttgtctttctccataaatgagatatcatttcttgtatggaagaaggctgt

SEQ ID NO: 279524 - DNA, 286 bp, Glycine max
acatgtacttacaacgtgtatttgttatatacatcacacacgtctccttggctaaatttacatacatgcatactcaaagcactttggggtaccaaaaattgcacatgtgcacatcttggtatttctaatacctatacatacacaaacttcatgatgaatcttgactatctacacaataaggcgctacgtttcatgctcttttcaagttttttgctacctaaagtcgtatgcaaattccagtatatatttctttgctgactaaaattgtattaaaaggtatatattc

SEQ ID NO: 279525 - DNA, 480 bp, Glycine max
  unsure (1)..(480): unsure at all n locations
nnnnnnnngggatttctcngagtagnatcacttcacctatgagcactaccccttggacctatgagtaggaggacatgtgaatggattttatgtttacccctcctgganactcgagaaacacttgagattagtgaagaacactgtttccacgaagatgatccggaccgaggcgctcctgtcacgtttccgtgggtgatttcgcgaagattctccaccgttcttctgcggtcttcgaacgttcttcgtcgtgcttgggtcttcgaccgatacattcacgaaatcaacttccaattcattctatgacccttagtgtgctcgtttgcttcacgtgcttttatgtgatttatttacttttcgacacccttttgacgtgcttagtgattacttaagcattttctcgccaatcaagaatagataaatgtccccgatcatttagttgtatatccgccatntctgttaaatgagaccgaccgttcggct

SEQ ID NO: 279526 - DNA, 180 bp, Glycine max
  unsure (1)..(180): unsure at all n locations
taatcctcatctaattgatattcaactggttcattagcagacttcaactattcaacaatntatacgaagtcttcgaagaactaagactatctgtctcataaagaagaagcgaactgagtccattgtcgacatggacgatgaagttcagtatgaaacacctccatctgcaagactatctac

SEQ ID NO: 279527 - DNA, 339 bp, Glycine max
ctgcaaacatttatcgtagaccccctcagcagcgaaactttcaattgtcttaaaattatgacctcacaagacacagatataatccaggttggatgaatcatccaaatctgagatgggcaagtcctccacaacaacaacagtttagccctcctttccagaatgctgctggtccaagcaagccatatgttcctcctgcaatacagcatcagcaacaacagagacaacaagcaactgagacccctcctcaaccttccttagaagagatagtgaggcagatgaccatccacaatatgcaatctcagcaagagacaatagcctccattcatagtctgacaaatc

SEQ ID NO: 279528 - DNA, 491 bp, Glycine max
  unsure (1)..(491): unsure at all n locations
aanaagctgactagcttgtancntcnactattnngnaancacccggnganccataaagacggctgcagcggaangctccttaactaacacacaccaaaancngcgagggggagtttcgtactacaaaattcacacgaatgagtagcgatattttccatgttgatagagacgaaaaatatattagcctacgtaaaacactaacaatcaaagatgccaactagatagtttaaattgttattaaacactaagcggccattatcatcctaaaagatatatgatcatacaatttagtcgtagaaagattgacagacaaaaagggcctagtatagattccttcattggacaagtgaggccttctaacgactataacgctagtgatagacaaccttggaggactagttcagatacaagcatcgtaacttacggattggaaaacgttcatgatgtattgtgcgaagcaatctgggcctaaactgaagagaggatggaga

SEQ ID NO: 279529 - DNA, 360 bp, Glycine max
actaagcctggaacgtctctaataaagttcttgtgaaaagaaagaaagtaattgttgtgataagaatactcagattatgtcgaaagtgtgcatagaagacgtgaatgctggatataaacctcacaaccacttcactaagcttggttgggcaaatattgtagaatagttcaattagacaacacatttgagatatgaatataaacaatctagaaataggtgggattctttgaaaaaggaatggaaattatgggctaagcttattgggaaggacacaagtcttggctgggatgggggagaagaaaaccattactgctagtgatgaatggtgggaagtcaacattcacgtatgtattattcaac

SEQ ID NO: 279530 - DNA, 117 bp, Glycine max
ggcacttcttggtgaagctgagctttcatatgagtcactagtttttgctagatatggccaatgatgaacatgatcatggctttatgattctctaatactggcatgagaaatacgtat

SEQ ID NO: 279531 - DNA, 395 bp, Glycine max
  unsure (1)..(395): unsure at all n locations
ctaaagttccgcttcttcactcagctgttgtgtgttaattattaacttgttctttcctcttttttatctactccggtacagatgtattcgtggagctaaattaaatcctgaagatttagattgcatggtcttaagttctatctattctgaggtgatgatgatgaacaaacaagtttactgctataacatccagtcaggcagtgagcatgaggtactacaagagatattaagcactgttggatggccataaaagcaaaggcttttatctttttttttcttttcttggtntataattattctgcaacacaatatgtacatatatgtgttgtagatgctctggaaatgaccttctttgctctgaaaggtcctcttaaactatcgatttacactgatag

SEQ ID NO: 279532 - DNA, 386 bp, Glycine max
  unsure (1)..(386): unsure at all n locations
agctnccactatatcncatcaaaacaacattcaaacagcgcaagctatcacagccaaacaaaacacggcataggcagagaactctgccanaacaccaaccaaatcacagcttttctcacttaaagaccccagtaacaattctttcgatccaattcgttaaccgttggatcgactccaaaattctactggaggtctatagtacattatcctacattgtgaccgttgggatctactagcaaacatccagaacgcattttacattactctttccacaaccagcaaatacatggatttttctgcacttgtgcaaaattctgctgcacaatattacagcataatctgcacaaagagcatatttcgaaaaccacactttccctcaatctatc

SEQ ID NO: 279533 - DNA, 279 bp, Glycine max
  unsure (1)..(279): unsure at all n locations
atgaggtacaagtcctaaagtttatcttttattacctgagtagncgaagagaagctcgtgtccatagccatcaaactctgaaaagagtatgatgaactaacggatgtcaatatggccaccgatgaagccttggaatgagaaaccaagaaggcccgaaaggaagaacacgaccaaatcaaatctttgaggggctttatagggcagcaatagtgagctcaaactccgaagaggtgaaaggaatcatcacgggtcacaggcatgatctggaaggacgagcta

SEQ ID NO: 279534 - DNA, 259 bp, Glycine max
  unsure (1)..(259): unsure at all n locations
agcttctaatacntatgtccaaggctgngacttgcataagggcccatatggaggaggacaaaatggcgctactttgtctcagttttagagtgtatagttattctaaataatggtcgaatccatgtaaagttggctgaccaaatatatgntttgggttaatcaactaaaggggctttagcttggtttacctcaagttgtaataaaggccctgtcgcaacatgcccttttgcgggcgagcgaacgcgacgctcactggtgc

SEQ ID NO: 279535 - DNA, 313 bp, Glycine max
  unsure (1)..(313): unsure at all n locations
ntaagttgcttggatagcaacttgtttcgggcgcatttaagcttttctgtgatgaattctccatcagacttcttttggttgggatgtgtgctctaacacacaagattgcatggtcactagcagccatattctcaattaatttcatggcttcttaaggggtcttcaattntatttttcccctgcagaagcatctaaaagctgcttggattgtggccttaacccgtcaatgaaaatattgagctagattggttctaaaaatccatgagtaggcgtcattcttaaaaacccacgaaatctctcaaaacctcactct

SEQ ID NO: 279536 - DNA, 410 bp, Glycine max
  unsure (1)..(410): unsure at all n locations
agctttcatatgtggtatcagagcacaagagcttcaagtangtgctctttanacatccaattaatttcagctttaccttctcctccattgttgtttcttcatttttctccatgtatctcctcacatgtctagtgttgaatgttgttaacatgaaattttagaatttccaccgattaaacttgctatagaagctagatttgattttctatgattcanatttcttgttcttgttcttgaatcatgaattgtgttgagtttagattcctttgagttttgtattgttatttgttctggctgaaacctataccatataattcttacagaaacattaaagtataagaaaacctcacaaatctagagtgacatgttcatctattatagttttgtcgtagaagtcatgtctagtcatg

SEQ ID NO: 279537 - DNA, 388 bp, Glycine max
  unsure (1)..(388): unsure at all n locations
gcttaatttctttgcaagacaaaatgtgcatcggctactttttatgtgtatgcatgttaaatataaaaagaccattgatggacatccacctaatagcttaagcttttaggagagttgggctttgacataatattagtctctatgatcaagtggtactgagtgcgatatctgctacccccaattctgtccatgcatcaagcacaaatagttcttatgaggggacatgtgagatataaaaccattcattttccaaatggcataagattntacgagagatggcccttgatagaatacaacagaattatatgctttgttaatctttgaatatttcagcatcagcatatgttcaatgctataagacaccggatacatgtcttatcttggttgg

SEQ ID NO: 279538 - DNA, 280 bp, Glycine max
  unsure (1)..(280): unsure at all n locations
gatccttaagtcacctgcggcatgcaacttatattatttacatagnaaggataaagcaaatatgatttcagaattacctttacataaaaggagtccttgcctcgaatcaagtccctactcctattcttcctaatctcctatatcttggctgactgccatgctttatctcacttaccatcaccacaatccctccctcaacactctacctccctctaaggtaaaccttctgactgctaaccacctacattgtttcatgaccaacttgccttcttcccactct

SEQ ID NO: 279539 - DNA, 452 bp, Glycine max
  unsure (1)..(452): unsure at all n locations
atacacacnaagcttntatgagctcctatgggtgctttatgagaaattttaagattgtacccaatgtaggaagaagatgtgcttatcgttccatgggtcaaccaaataaaaattgtagtacggaggacgaaaagttcccctttgatcaccaataccaaacctcaaacttctatgatatggatctctattggagaacaagaagacaatagatagagagctccttgcaaatgaaatatgaattgagagggtgtacagaatgattaatggcctcacaattcccttttctactcctaggatatctctaagcacacccaccccttagcatacagcaaggtccatttgcttaggtctatactcaccaaaactcactaaacacacacaaacataagttatacatcatcacctacataattgatcttatgctttaacttaaattgatagatccatgatca

SEQ ID NO: 279540 - DNA, 433 bp, Glycine max
  unsure (1)..(433): unsure at all n locations
tcagatcacttcctacatctcatcttctacgcatcctatttcttttcttttacccacttccttcacgtttggttttttagggaaaacacccattaactaaacgcgcccgcagggaatccctatcgcaccaaaatccaaatctagaacgatgggtgatcaagaggagacacaggaacagatgaaagccgacatgtcggctctgaaaaaacaaatggcctccatgatggaggccatgttangtatgaagcagctcatggagaagaacgcggccactgccgccactgtcagttcngctgccgaagcagacccgactctcttggcaactacgcaccatccttccccanacatagtangacngggaannggacgcactgngcacgatggcagccctcacctgngatacaaccgagccgcttacccttatggattgccg

SEQ ID NO: 279541 - DNA, 358 bp, Glycine max
  unsure (1)..(358): unsure at all n locations
taagcttcattggagccggtgctgtgtatggaagataaggtgttgttgtgaaagggattgttttagttcatgggaaaactgcaattggaaggattgatgatgattctgtttgtgcaactctggattggtggcctcctcagaaatgtgactatggaaaatgcagttggggtcatgcttctctgctcaacctggtatttttcctttctttttgtcttctggttcctgaatccgtcaaaaagtttttttttcttttcagaataattagatgggttttgcttcttccttttattntttaatttataaatagcattctctgcatgatgacgcttttttttgcctctttagaatgatgctcgga

SEQ ID NO: 279542 - DNA, 414 bp, Glycine max
agcttatataacataattgcctcaatcatttccaaatatgcatgtgaattaggacgcatcaacactaatcaagccaaggctattgtgcaagcagtaaatggggcaaaacacaccaaatgattatgatgatggatggctcatattgtcacaaaggtaaactcatcactttcaaattgagctttcaaaactatcatgacatgtagagaagaatcaacgatttctagtcacaacatgtcaagaacttttattttcaaaacaattacccatttcttgaacatatgctataattcaaagaacaacatgtaaagtcgtacatgcacacaaaattgacccaaaatattaaactataaatctgacgaaactaacaacattaacaaattaacacaactaacaaattaacaaaaccaacaacac

SEQ ID NO: 279543 - DNA, 422 bp, Glycine max
  unsure (1)..(422): unsure at all n locations
tgggacctttcatttttatcagattgtgtatctagtcaaagtctgagagaccatacaagtttcctagcgatttctaattatgtgggccattaagtctatcatatgctgacaatagccgagaagcccatgaatttcttcgagggcggagtaggtgtctgccattgccttggccttggctaacaatcaaggaagttcttgactcccgttcacggtaagagcaaaccgatccatccacatggttgcctcttggtgtaaagagtcgatcacccttcctctagcctctttttccgcgtatacttgggcatactcgtccgcgaccctttgctcgtgggccgtggctagacctaactcttcttggtattnggcaatgatagctagcatgttggtctccgtctcgcataaacgctgagacaagctccttt

SEQ ID NO: 279544 - DNA, 402 bp, Glycine max
  unsure (1)..(402): unsure at all n locations
agcttccttattnatgattcctaaagaagctagagcttagctacacatacctctctaatagctaagctcacctccttatgatgagaagctagagcttagctacacaccccctataataactaagctcacccccatggcaaaatacctganaatacaaaanaaaatccctactacaaagactactcanaatacctcgaaatacaaggctaaaaccctatactactagaatggccaaaatacaaggcccaaacaaaggaatacctattctaatatttacaaagataagcgggctcatacttagcccatgggctcaaaatctaccctaaggctcatgagaaccctanggccttcccttggatctctgacccaatctacttggagtcttctatccaatgcccttgc

SEQ ID NO: 279545 - DNA, 345 bp, Glycine max
actcagcttatgatgaatcttgactatctactcaataatgtgctacattctatgctcttttcaagtttttgctacctaaagccgcatgccaattcaagtatattttcctttgctgactaaaattgtattcaaattaaagggtatacatttttttgtaatgtattttctttacataacatgcaacatatttatgtatatttttttgcgagacattgtgactaccaaaaattatatgcacatacatccaagtattttgctatcatacccaaagtgtaaattgccaaaggtattttgctacctattctaaacctacacattcatgacgagcaaaattcctaaacatct

SEQ ID NO: 279546 - DNA, 260 bp, Glycine max
actcttttttccactcataacaccatattctcactttctaaccctatgttaactctacccttcatccctagcagttttccataagcaatttcagcacataaacatcacaagcatcatcataaaaaccctaaacagaatgggtaagcttaactcatccaaacatggcaagttcaacatgctttcaacaatttcttcacaaataactatcatgaagcagaaacctagcaaaactacccatcatatctcccaaagccccatac

SEQ ID NO: 279547 - DNA, 301 bp, Glycine max
  unsure (1)..(301): unsure at all n locations
atcctgacnaccatataccttgacccagagtgtgaatgtttatccttaccctcggaagcaaaaaagaatagaaaggaaatttccaatcaaagataaagagaaggaaaatttccaatgaaagcaaaaaagaaaagaaggataattccccaatcaaagagtgggagaaagcaaaaagaaaagaaaggaaattcccaatcaaagaatgtgagaaagtaaaaaagggaaggaaagaaagttcttgaaggaaaaacagaaggaatatgcagagaggtctttggaccggacaatatctgaacaatac

SEQ ID NO: 279548 - DNA, 136 bp, Glycine max
aaagatcgcagcatgggattattatgcttgaacagctccacctgatgtctctacagtattacgtgccatagagatatgagatatcttgctccactcaatctttctggaatgagggagtgctcctgctatacacaaa

SEQ ID NO: 279549 - DNA, 265 bp, Glycine max
  unsure (1)..(265): unsure at all n locations
ctaaatagtaanttgaatgcatatttgaataataaagacaatatatatttaggtaataaaagttacgtaaagtattcatctacatattatatcatgtaggaaaaaatgtgttgatttttgaatttattaaatattttgaatagacatgttataataaaaaataattaactactaactaatcataatgattatattntgttattatggaaaggaaatatgaattggcgtacactagtgctaatatcttgggataaaatcgtttatg

SEQ ID NO: 279550 - DNA, 136 bp, Glycine max
caaactcaggttgacaactaatatcaaattctgccttcaacgctatatcactaatcagcgtacaaccagcgtaaaggaccaaacctgctaaaaaatacccccgcctccctcttgaaatctgggaataataagctcg

SEQ ID NO: 279551 - DNA, 259 bp, Glycine max
gggaagccgttactgctaaactgaaccggcaacgcccaagggagggtattttctattgacagggacgaggtttctacagcaaggaattctgagcacgaaatgaaccctcaaatgaaaccgaaaaggattcatcacatgagaatgcaggagaaatctgagactagatgaaagcttccgcaattacaacaagcccagcacagagacggccactaaacttctgtcccaatcgccacactttttcccccacaacagaaagcac

SEQ ID NO: 279552 - DNA, 330 bp, Glycine max
  unsure (1)..(330): unsure at all n locations
agcntangtgctatactnctttacgaacgnacactggcgcgagacattcttataactaagacaaatgcacccatatacaatcaaggcaccttcgatacctagattatttgtatgtacttacaaggtgtatttgttacctacatcacacgcatctcctttgctaaatctacatacatgcatactcaaagcactctggctatcaaaaattgcatacgtgcacattctggtatttctaatacctgtacatacacaaacttcatgatgaatcttgactatctacacaataaggtgctacatttcatgctctattcaagcgtatatgctacctaa

SEQ ID NO: 279553 - DNA, 314 bp, Glycine max
aacgaccacgacttaatccaacaacatagatgctttatatctttgcgaaccttatcttacattcgacgttgtggaacattggacaactacacgcttgacacagtgcttgtacagagctcatctccacccgcagcacaaaacaaattagttggaaaaatgaagataaactgtgttaagctagacctataaacgtacaagaagatactgtcagtttgtttcactaactaaatcaaataacatgtttttgtagcttatatatatcattaagaaaccagtacgacagtacctgaaggaagggaattgtcttttaatcg

SEQ ID NO: 279554 - DNA, 351 bp, Glycine max
agcttttatattagttcaacttctcttcctattctgctgtaatttccacgccactctccattctctctctctctcattctcttctcgagcaagcttgtttgatctactcaaaagcctcttgacattctatctcccatttgaatgtatcagaatctttcagcttcaacaatggagaaaaagctttcaactttcctattgaattagctataaacctttgcgtgaaattgatcttcccaatccgactttgaagctccttcctattctgaggtggccttgcttccaacaatgctttaactttattttatctacctcaaatcctctttgatggacaagaacccaaaattttctact

SEQ ID NO: 279555 - DNA, 202 bp, Glycine max
  unsure (1)..(202): unsure at all n locations
gtatagagcacaagagcccaagtgtgtgcttcttaacctctattaaanacggctctagctactttccaacgacttccttcattgttctacatgtatatcctcacatgtattggtctaaatgtagataacacgattctctagaggcgccaccgattaaacgcgctatacaagctagatttgatactctatggcacacatatcg

SEQ ID NO: 279556 - DNA, 377 bp, Glycine max
  unsure (1)..(377): unsure at all n locations
agctngtnaatgcttaaatatttggcatgcctcatnaggccggcgccgatcggaataatttatttggaaacaaaagtattcaagttaacaatagtgtcaactttaagatcaaatcaacgttttataatatccacaataaaactaattgatgggatccatttaaagaaccaatttatatttcaccccctactaatttattagaaatgtcaaccgtgagtgtagcccanagctagcaactgttcacaaaagatctacatcccacttaggaaaaaaattcatctgagataggataaaaaaagacagaacaaatgacaagttatcttgcattgttgcctttgacaacaccgcatctactgttgatccacatgcatttgata

SEQ ID NO: 279557 - DNA, 497 bp, Glycine max
  unsure (1)..(497): unsure at all n locations
aggcgcggatggaacgttcttttcgttgacacctgnatanacctagaatatacaacacanaagcccctcgagtatnncatannnangagaggagtgcatagagagtctatgttgctttcgngccattttagtacgcggaggcttatgaacttttgtagcttaattatacttaatcctcgtactattgtgtacacgtaaatgtagtcttatataattgtggcttctaaaataggagtcttctataaaccgatgtctatttgactccatatagtctcggaaaatgtgtgatcagagccggatctttgctaaattgcacaacatttttaacttatcggccttgctctttgcctccgacctcataaatcaggcgagctttgtaagctgacaattatggagcaaatatctgatcgacattacctcatttttccgtctgaccgaacccgagctatggtggatatctgtgtacaaacgcatcctcgactacaggttgataggcg

SEQ ID NO: 279558 - DNA, 359 bp, Glycine max
  unsure (1)..(359): unsure at all n locations
agcttgtttcttatganaagctngaagaagttntgaagatgtgttggcttttacatgcctcaactccttgagtggcatttgtattggttgttatcttggttgtttcatcttagtacattntgatatttgtattgcatcatgcatcatcggggtttatgtgaagaatagcttctaagttagaacgtttattcagaggaaataactctctattataatcggttacatcctcatcgcaatccattacaacaagttgtctaaagcttaaagagttgagtctcatattaagttaatcgattatagtagtcttttaatcgaatacactgttgtntgagatagtgactgatatattcangagtctc

SEQ ID NO: 279559 - DNA, 260 bp, Glycine max
  unsure (1)..(260): unsure at all n locations
agcttgtagacaacacggaaagaaaactctaccttatgtgtctattgtttattcngattgttaaggcncgggatgcttcaaagcatgtttgatttttgtgggttggtggaatctggtgttgggtttcctttaaagtccttgcccctcgtatgcttttgatttgggaattcttgatgaaatcttgtatatgtttaattgatggttgatccatgtctttttggacttgtgttgagcattgggatggttttgaatcatttgtg

SEQ ID NO: 279560 - DNA, 421 bp, Glycine max
  unsure (1)..(421): unsure at all n locations
agctttgttttcctttgcttggatgttngaaatcctccagattagtgacttanaaaatgttcatacggngggttttggaggttcacgtgatataccctcttcttattcccaaatgagaggaggccttacttaaaaccttcccagcttcccttccattgctatctcatccatccaaacatatctagctcaatgagaagggatccaggctttcattaactatctagctgttatacaattgttatatgtttcaatgttttttgtgtatttctttccattatcttgcccccaactccacatgtttctcacttttaaatgaatgannacattttgttgagaatcacaatangatcaatntcatattttgtctttactatcatatcagaaatataagaactatatctgctataattgattgtattaa

SEQ ID NO: 279561 - DNA, 365 bp, Glycine max
  unsure (1)..(365): unsure at all n locations
ntgaagcactcacatagngttgaattcttggatgaagagttgttgtctattgagagaaacaagacatggagtctcacaaagctaccaatagtaaagaaagccatagcagtaaaatgggtctacaaaactaagttgaatcctagaggataagtaacagagttcaaagccagactgagtgcaaagggatttctgcagaagcaaggtctggattatgatgaagtatttgctcctattgctaggttggaaacagttagacttgtaatagcaatggctagctataattgctgggaagtacaccaaatggatgtaaaatctgcatctcttaatggctcactataagaagaaagttttgtcactcaaccact

SEQ ID NO: 279562 - DNA, 396 bp, Glycine max
  unsure (1)..(396): unsure at all n locations
agcttctatatatagctacatgcagctgcctcggtggagatgctgcccagccttgattaaccgttggatcttctcgaaaatttggccttaaacttcacaagacacttttccatgatctaaccgttgggatctttgagaagatgtctggagtgtgctagaagtctcttaataaagcttctggaggaagcctcttaatgaagcttctagagaaaactacatgaagctgcctcggtaaaaatgatgcccagccttcgttaaccgttggatcatctcgaaattntgtttgcaactttaaaagacactttttcatgatctgaccgttgggatctttgagactattgtctggagtgtgctagaagcttccgttcccgagagcatctcttatttaagcatttc

SEQ ID NO: 279563 - DNA, 468 bp, Glycine max
  unsure (1)..(468): unsure at all n locations
aggaaaaaacggttagtgtctagacatgatactgcaaacggccttcatactacctttaaggagcctaggattttttcaacttcctgaacaatattacctgggcttcccaattagggctattatgactaaaccttgtgctttttaaaacctaaaccaagtagaaatatcttggaaaatatgcctaaggggttttagaaaaacacaattatcatttttggctcacataaggggcacaggataaattattaatcaacgttggctttttggctaatgactganaattaaaagaaacacggccttgatcatttccacctcatttaaataaagcgtactaacttataatgatgccaaatttcgaaactgagaacagaacgtatttcaccaagtttacacaactcaacgggacaagacaaagctggcttgataaggtctcaaaatgatcaccatagcaacatggtttaaaaggtt

SEQ ID NO: 279564 - DNA, 270 bp, Glycine max
tctgtgggtcgttccttgtatgtacatgatgtaaatacttgtatatctatttaatgatgttttatgtgttctctgtgctatcagtacttcatttcagcatgcttttgccttgatcacgtagatgcatgctttgttaggatcattcaatagtggaaactggtcagattcttagaacttcataggacagggttagtttatcgtattatcaggaatcgtggtacggtaacctagttgtgtatatcgtttttttaatgcggttctcgtcaagtt

SEQ ID NO: 279565 - DNA, 514 bp, Glycine max
  unsure (1)..(514): unsure at all n locations
ngaaccggagggctagtccttgtacnatcgacacctttganacnaccgctncntccccaattntctatcaataggggggagaaagtgaagnagaattatggttcatncccctnatgtgcacttcctttctcgtctcgaaataactggaaggaaaaataacttcccgtgaaagaaaaatcccaacccganggcgccttgtgttaaccgtttcccgtaacgtttcttgngaagtgatttccgcgaaaagttttttgaccggttcttcgacngtcttcaattcattcttcatcggtcttcaagcttcacccggtaagtacctcanaccagctgttaattcattctatgtacccgtggtggtcccatattggttcatgtattttattctcgatttcattacttttataaccccattgacgtgctaagccaattatttaagcttttctcgcttatctagaataaaataaatttcccgatcgttgaattgatcatgcgtaattttggttaaatgaattcg

SEQ ID NO: 279566 - DNA, 241 bp, Glycine max
  unsure (1)..(241): unsure at all n locations
aattttcttcccatcagaccttggatgcaactgtgattgtatacccatattagctagatcttgacgggtattcaagccatccttcgtcttgccttgaatgttaaggagtgtcccaatcacactgtcacaaacatttttctccacatgcataacatcaatacaatgtctaacgtcaagatctcaccagtacggaagatcaaagaanatggacctcttcttccatatgcaactctgactttta

SEQ ID NO: 279567 - DNA, 368 bp, Glycine max
  unsure (1)..(368): unsure at all n locations
nncccgaggatggatggatcgacnctagattagccaagacttggtaggttttgagaaatggatttancttctgcaggacctatgctctaaggtgttgaagtgtgaaaaaaggttggtgctatggctaagccctttgggatggaaaaagcctaggacttagttcagggaaggatgctatgatctctaaggcagcagtctaagtggctcccactcatatcacactgaagttgtaggctactgttctatgaggttatcaagattgcaagctgctgccctgacagattacttaaaaaacatcagtgacaccaagcaaacacattgtcaatgagaagctgatcactcaggtactttctatttcactgcctatn

SEQ ID NO: 279568 - DNA, 140 bp, Glycine max
aggactcctgaaacttctgaaaaacttctgaagccttgaaactcctgaactgactactccccccttatactactactctgaactccttgacaactactcccccattactaccacccttctaaaactaatcaaagtctctc

SEQ ID NO: 279569 - DNA, 452 bp, Glycine max
  unsure (1)..(452): unsure at all n locations
tgttacaaccaacattctgtcctaccaagccattgttggttctatcctaatgttangaagattcgataaattctatttagatagggaaactcagatgatagaaagggaagagagatattgcacanaaattgttgtaaataacagaatntacaatgaaggggttcaaaacaatctcaagctctctaaacctagaatatagagctccttataaaggagacaactattatctgtctaaccaaaaatagttacaacttataacaaaaaacaattatagttacaatacaacctatgttaatgaaccaccagactggatgctcccctttatatgactagatgctctaccagattacaggagattagatgaccaaaacaaaagacaagagtgttagactagacaaccaacactgttatccacctatctctatcgtccatcatccaacaatcaacaatct

SEQ ID NO: 279570 - DNA, 506 bp, Glycine max
  unsure (1)..(506): unsure at all n locations
aaaaatccgttagggcttgcatntctncantatngaaaancccngggctctnagncgacctgcatgcatgcgaggcagagctttataatctgctcacagaacaaagcgcaccgggcggggacgtagccgtaacaagagtcctaaagaagcccgagctcaactacacatacacttctatcccgaagcataccgtgttgagatgagagtgttgaacgttagatacacacccccattaatagcgtagctcacaccgatgactaatcacatgggaatgcagtcgagccgtccttactactgagactactcacactgacccgatagacgggcttggaccctatactactataatgggctaatacatagcccatatgaaggagcatcctattcttatatttacaaagagtaggaggctcatacatagctcatgggctccaactctactctattgctcatgagaacgctagggccgtcactcggattctagcccaatctacttggaggcttcg

SEQ ID NO: 279571 - DNA, 512 bp, Glycine max
  unsure (1)..(512): unsure at all n locations
aaaanccatgcttttnagctggaaaactgggggattgntatcnactgtcgacactttcgagccactnagagctgatgggtacacgatggatacgtaccacatgtggtcgcgctttttattgtttgtcctgagcaaacaggcgaactnctgagctacaggagggcgtctctgtagcacgggcatgtatgcaaacactcctagccgtaccttgattatgttatgatgggcgtaccttcgagtggccataacagagatactctatgaggcgaccaatccctgatactgatgcgtactacacactcaaggatgcgcctagaacgatgaaccgttgtccttcgcccaacatctgaagagagggatggacgaatcatatccacatatgttggcgtgaaggcgtcccaaaactcctacagggttggacatgattagaaggagagatggtccctcttgggggcgtaccggaagacaaaaagtggaccacgccaaatacgttatggcgggcgacaaggggg

SEQ ID NO: 279572 - DNA, 292 bp, Glycine max
agtaaaattacacaacgtgattattcatgcatccctgaattatcattggtgccttggcaaattatcacatcagaatgtataaaataaataattaacagttgtttcggcgatgtacgtcaaagttgtatacatagatatccaaatacacaagacacactttatcggttaaacttttactcatcatacatggtgaaagaaagtgaaatatttatttttacaaaaacttggatacaatgaaaaagagaccaaaatgtattatcacaatattctaacgagaaacgggagaactatc

SEQ ID NO: 279573 - DNA, 276 bp, Glycine max
  unsure (1)..(276): unsure at all n locations
cctgacgacacctagagaagctcctctgattgttttttcagctcctatatccacagagaacagagtgctcttagatccgtgcaacatcctctgaggaagctctactatgtctgcacccaaaagctttacctttgagactctcttccccagagcgcgcttgctaatcttcgacaggtttctgacatcaattatagccagcttgccgtcacttgatgcgganacaaggcatggaaactcaaacgcacgataattcacctcagctgagtgaggaacaga

SEQ ID NO: 279574 - DNA, 320 bp, Glycine max
  unsure (1)..(320): unsure at all n locations
naagctcattttttgttttctcaaaaccacaagtgccccggctaatcccgccaccaaaaacaccatttgttcccagagatatgggtctttagggatgacaacaggttgaggggtctctgatcatgcacaagttacaagagacaagcccaaaccagtgagggtatcgaagatggaaccagcatagcaacaagacattgctacttgagcaccctctggtccaccatttaaagccatcgttaagtttgtcatcaaatccccaagtgagttcccccaagccaggaactgttagctcaagattgaaggacttattccacatatgt

SEQ ID NO: 279575 - DNA, 184 bp, Glycine max
  unsure (1)..(184): unsure at all n locations
ctgaggcacaagagaatcgacagaatatccatgtcttatcngtccatatcagctccacccgnatgtgtataagccaccagaagatgaaacagaaattgtatgccgccaaccacaagcaaccatgaccatcttgtcacactgcaacattaaacaagcaagaattaggcaaggggaggagggagag

SEQ ID NO: 279576 - DNA, 358 bp, Glycine max
  unsure (1)..(358): unsure at all n locations
agcnngaaattgtaatcaaangagangcgctncataaggggagtttctctggataaacaagctcttagcagttcccatttccccactccatatctnttggttgtcaaagcagccggatggctcttagatttgtcaaattcagtagcaagttcttcaccaaggcttcttccaacatgaaatgatctatgtgcctctgagaactctctggatgtgacaaatctataaggctgatctttgtctgcccagaactgctcctgatccttccatgatgttacctataacataattaatggtccaaatacaatatataactctcttttaccagtgcagacagataaaattattgagatcaatcact

SEQ ID NO: 279577 - DNA, 601 bp, Glycine max
  unsure (1)..(601): unsure at all n locations
acacacgactggttggcctttgattagnatcatcntcganatangcancaangncnanngggannncgggccacagagcagagaggaggaatatantcattttcctggccnctttttattncaagcacggcgaagaggtaagattatgaaggatgcttatatagaacaacgtatgcagcattgctaattatgagcataaaagcatcttggtggcagtgattaggagcatgtaacataccttgacagagcgcaattatattggtgcgagagtggtaattcgccaagtgatagctaacgctctntgttcgtcgcaaaatcngaagagttggtcgtacatcccactgctgctacacaacgctactgcgacataagtgtggacaacgtcctcnnacntaggttacacatatgtagcgttacagtgcacagcgtataggctacacactccgcttgcacccacacgtcatgactttgacttaaggagatgcaatgcatccaagaaggtcacgcttattgcgatgctcaacactatgttagngcgctaaaaagtcatgacttctggttgtgtgctaactcgtgctaattcctatctgcttctaatttn

SEQ ID NO: 279578 - DNA, 419 bp, Glycine max
  unsure (1)..(419): unsure at all n locations
agctnttcttgcatgttcacaccatatttactatactgtgatcaactgatgcaatctatttgattgaaaagataatttatattactcttctaatgtagtcgacaactaaaaaaatataacagaaagtaatgcttaagccaatcaaatcaagtcattttgaatctcatcattactatcatgcatctcanagagaaggagaatcangcatcgtaatgcatagcacaacanaacattaaaagaaaacatgccttctaaagccaaccaaggtaaaaatgtatttatatttgtgaactttntcaaaattataacacatatataaaaacatggtggaacaatctgaccacatgcacaacacattccacacattatttctgaaaatgagtggtaagggaatataataaagcattgttattaaaact

SEQ ID NO: 279579 - DNA, 300 bp, Glycine max
  unsure (1)..(300): unsure at all n locations
actcaagcttatcttacctatctatctcccagatgtctgtgctatgattgtttttataaaaaacatgaagttctaattcaagatgttttctttgttgcatgggcataatgcaatcactctatgtctagcattgattntattaagatgtccctacctttgagttctactaaaaattatcctctctcaagcgactaatccctaaaactgatgcatataaaaccttcaatgtatttctactaaggattaccctttttcaagcgccaaacccctgaagatgatgcaaggatgaagcatataata

SEQ ID NO: 279580 - DNA, 308 bp, Glycine max
  unsure (1)..(308): unsure at all n locations
agctttggtcataatggataaggatagaagtccatgattggataatggaaaagttaagaggtggttaatattaacctcggcttctgattcaaaattggatccttttgatgcagggtctgccatcaaacagaggttgactttcttcatttgatgatgtctcccacgtgctcattaatactttcttgtcctttggttcgaagtacttcttcttataggctgatatatcanaaattggacattttgacttgaaatgtcctgggttcttgcactcatangatacgaatggagctttctctggctttctctat

SEQ ID NO: 279581 - DNA, 459 bp, Glycine max
  unsure (1)..(459): unsure at all n locations
cactattacaactactcaagccttagtgtcatacctnntttgacatttagtactaatcagacctattgttgcnctttatcattcaaaatagaatggctggacaccgcagtagaagctcattcctcattcaaaatttcaaagacaacacatgtgaatggtcannttgtggcattttaatcaaatggttggtgggcgcccatgttaaaacatgaaaaaatatagggatataagagcnaacatgatatgcaacatttacaaccagaatcaaaggatatggcctagaagccatccattgcaagcccttaacccaagcatttagacaatggattttcacataatttatctcacaaatattgccaagataacaacaaataaagcaccaaataccacaaggaagaagtagaaatagatagagatggcacttacttgagtgggatgaatggaaagcaataataattg

SEQ ID NO: 279582 - DNA, 415 bp, Glycine max
tgatgatatggccttcacgcgatgaaaggatcacattgagtcttttaagaggcatatttgatcatcatactttgataaatgccaaaaaaactagggcaagtgaagaggatgagaaggagggagaaacctatgctgtgactgccattcctatacagccaagtttcccaccaacccaacaatgtcattacttatccaataacaaaccttctccttacccaccacacagttatccacaaaggccatccctaaaatcaaccacaaagcctacctaccgcacttccaatgacaaacaccacctttagcgtaaaccataacaccaaccaagaaatgaattttgcaacaagaaagcctgtagaattcaccccaattccagtgtcctatgctgacttgctcccatatctacttgataattcaa

SEQ ID NO: 279583 - DNA, 361 bp, Glycine max
  unsure (1)..(361): unsure at all n locations
agcttgaattgatcaacggaagctctcgagaaaatcgagtggtcataaattntcacacagatgtccgattcggggaaataatatatcgagacgcacgaaattgaacaacggaagctctcgagaaatttgaatggtcataacatttcactcggatgttcgatccggggacataatttatcgagacgctcgaaattgaacaaccgaagctctcgacaaattagaatggtcgtaacttttcacgcgaatggtcgattcggggacataactcatctagacgctcganattgaacaacggaagctctcgagaaattngaaatggtcatacgtttcacaccgatgtccgattcgggaacataatata

SEQ ID NO: 279584 - DNA, 422 bp, Glycine max
  unsure (1)..(422): unsure at all n locations
aagctgaaccatntattttaaacacaagngagttttattcagaaattagagtttatctctttatcttagtgagagtgattctcctaaattcttgagtgattcaagaacaccctggctgtatcaaaggactttcacaacctttgtgtgttgtcctcgctgganagagtgattctttccttccaatcatctccacccttgttctttcaaaccacaattccagaaaatccacctctgcccaaaattatctcgtgaccataactcccattttacacactcacattaagtgattcttgagcctaaattgaatttcaaaacgagacctttcacctcgttgtggaatcacctcatttggagccctgtagcttccgttattgccatttctatatttctgtccagccaccacttaacctacgttttaccat

SEQ ID NO: 279585 - DNA, 439 bp, Glycine max
  unsure (1)..(439): unsure at all n locations
agcgatgcannagcttctactttttcaattnntgagcccgtctcgatatgatgacgaagacnntcaatcagacanntccgagtaaaaagttatttgtcgtgtttaatttggctcagaaggttcaaccattcaatgttcgagccgtcgtcgctataaattacgggacgtcatatctaacatccgagtaaaaagttattggcgtttgaattggctcatggcttcaacattcaatttcgagcgtctcgatatatgacgagactcaatcagacatccgcgtaaaaagttattgtcgtttgaattgtctcagaggttcaacattcaatttcgagcgtctcgttatgttacgggactcaatcacacgtccgagtaaaaagctattgtcgtttgaatttgctcagagattcacattcaatatcgagcgtctcgatatattatggga

SEQ ID NO: 279586 - DNA, 320 bp, Glycine max
  unsure (1)..(320): unsure at all n locations
tcaacatcagaccacttccagggtgttggatctacttcacatgtatatgatggggcctatgcaagttgaaagccttggatgaaagacgtatgcctatgttgttgtggatgatttctccagatatacctgggttaactttatcatagagaaatcagaaacctttgaagtattcaaagagttgagtctaagacttcacagagagaaagactgtgtgatcaagagaatcaagagtgaccatggcagagaatntgaanacagcaggttcactgaattctgcacatctgaaggcatcactcatgagttctctgcaggcattacac

SEQ ID NO: 279587 - DNA, 309 bp, Glycine max
  unsure (1)..(309): unsure at all n locations
acacaaatttcagcatgcggagagagccttgaattatcatgaacgtcatacatccatattaggaaatgaaaaaagttagagtatccacacataatcttcaatctactagagactacattntgatagtataatctccgactacaaaccattaaaatttcagaagaatgacatttatcanaaagtgtgtagtatagctttgatattacttcattagctatttagagaattggtattataattgtcaaaatgaaaaactactatatgttagagatagggggagcaacatgagataagcaacatgagcgacat

SEQ ID NO: 279588 - DNA, 482 bp, Glycine max
  unsure (1)..(482): unsure at all n locations
nggcccagagggataactacganatcgaancntggnacnacgcttgcntagcgttatgcgagacggagaccaacatgctagctanctttcgcctattcccaaattaagtanggctaacccacggccacgaacctaaaatcgccgatgagtatgcccaaatattccccgaaaaaaaaggttaaagaagggtgaacgactcttttcacccaaaaggcacccatgtgatggatcgggttggccttaccttggacaggaagtaagaactttccccgattgtaacccaggccaaggcgatggcagacacctactccgccccgaagagattatgggcttctcggctattgcagcatatgatagacttaatgcccacatattagaaatcgtaggaaactgatggtctctcagacttgactaatatgaactccttttgnaataaatgagttgtcccatgttctactccaaaagcttgtcaaatcaaatan

SEQ ID NO: 279589 - DNA, 471 bp, Glycine max
  unsure (1)..(471): unsure at all n locations
nnttcacgagtcagatctgcaataaacacccggacctaagcccccagagtgactcaattaataagaaaagaaggaagagttacaaaaatgaaatcccttataaggcttcaaangaggaatctcaagaaggccaccactgggcaaggatattggcatgggtcttcattanggaattatccaagacattgtatagttacaccactatgcctctttggaggatctcactcatcaagctatcaaggtggagcaacaattaacgaggaagcagatatacaagaagcccccctatgactcttcaacttggaaggataaggagacattcaagaacgagggaggatcttcattcaaatctcatgaacaatgtggtgccctcggtaaaaataattctaaccttgcacccacttcttcaaaaatgagatctattaaatgccttaagtgtctgggaaaaggtcatattgtcttccaatgtct

SEQ ID NO: 279590 - DNA, 452 bp, Glycine max
  unsure (1)..(452): unsure at all n locations
ngccccggatagatgggatgnnattagtacnncttcanattaagcnaggaccgctgcatnctactaatatatggaattgcccactgttttgcctttnaataacatttgctggaccacaccancgctggaggtggcaaggaacaatgtcttttcaaataacctggctgacattaacaaacattatatcttgcgctgacccggccaatgaacccaccgaatcattgcataaatgtatactactatatcaatgtcccgaacaaatgatttcaacacgtgacgacactatgatgctgggctagaaaatcaagtgtcgttgactctaaaaggaaaatagctgcttgttgcggacaacatcatgatatgtttaccggaacaatactatccatgtcgtttatcatcacttgttacatacctgatgaccaacatacactgtagtatttaacattgtttag

SEQ ID NO: 279591 - DNA, 171 bp, Glycine max
  unsure (1)..(171): unsure at all n locations
ataaaaattcttttactatggcaacatcaatgctgccttcctcaatgttggtcaattcttcatcccatcttcttctctctaattcttccttaaattcatcaaattcagtgtggtagattaccacatttctctctgacaacagcttcctangaacaataatgtcagtgtacc

SEQ ID NO: 279592 - DNA, 347 bp, Glycine max
  unsure (1)..(347): unsure at all n locations
cgactcatcttctccttcaagaggcgcctctggacatctttcttctatcnccattctgctnccatggatcttcaagaagcaaaggactcctttgatgaagaagatccaaggcctacgagctccacataggagctacatcagattcatgtgaattgttaatatagattcaaatgtcctccaattgtgtgtgacacttaagctataaatagaagccatgtgtgtgcatcttttcaaatgtgatcatttgagaattacaattcaaagttcagacctcatttgatgcatacaattgcatgcgtctttactacctcttcctcaacttatcttcctctaccttcaagctttta

SEQ ID NO: 279593 - DNA, 289 bp, Glycine max
ccacatgcccggcgctgtgagtggtattcgtattgactgtcgagatcttagtctttatctttccatatgtacatcatgcatcatcatgtagaggtaggaagactgcatctaaagttagaaactgatggaagcttgcttgagaagctcctatggacgctggatctttgaacttcaataaggtccttcaatgatgatattcagccatggagttgcatcgaaagatcaacgacatgaggtgagaggacgcgtcttctactacagaatcaccatggcacgagagcttcactac

SEQ ID NO: 279594 - DNA, 368 bp, Glycine max
  unsure (1)..(368): unsure at all n locations
tttctcaagcaaatactttatgttgtcatttaaagcccatgattaccatgtccccgtgtgtgatgatgacaaccacctgtacgttaggagcacaacaaagaacatatctatgtgcatatagattactcccgcttggtctacattgattgcttatatgagacaattgaagatttcatatntttcatatataanaagttgtctcatacaacaatacataattgttgttactattgtatcttctatctctctctctccctctttggcaacatcaaaaacaaatcctgaatagagaagagaaagatgttaccacttgttgcactgtatgagaatcaagtgataccaaaatgcattaaagcaatcattcaata

SEQ ID NO: 279595 - DNA, 514 bp, Glycine max
  unsure (1)..(514): unsure at all n locations
nnccacaagagtgacccttttcttgnacnnttttgannnccttgcacantacaccactcaagctctgatgatgtggcctgagcgcgatgaaaggaccactttgagtcttttacgacgcctatacgctcatgcgaccatgaggccagcacagagatctcacgcagaatgtatagatgagccagtggacgcatgacttgctgtgcgtgacacaacatacacagaccctgtcctatcgcacttctatgggatgtacttaaccccttactagcttccctacattaccacaaactttcctttcccttggatatgcgtaactccatctctaactctacataacagacttgccatgaccatgacatccttagatgcaacacatttcttcagctctgaaacatgatgtgcttcagtaaagcgtgttaaatgacccccatgccattgggacttgctgcactgctacaatatgacctcttattgatagagtgttacgcatcgcttaccaatgtcagtaaacttn

SEQ ID NO: 279596 - DNA, 387 bp, Glycine max
  unsure (1)..(387): unsure at all n locations
agctttcataatatgattgctanagaagctagagctgagctacacatacctctctaatagctaagctcacctccttatgatgagaagctagagcttagctacacaccccctataataactaagctcacccccatggcaaaatacctgaaaatacaaaaaaaaatccctactacaaagactactcaaaatacctcgaaatacaaggctaaaaccctatactactagaatggccaaaatacaaggcccaaacaaaggaatacctattctaatatttacaaagataagcgggctcatacttagcccatgggctcaaaatctaccctaaggctcatgagaaccctatggccttcccttggatctctgacccaatctacttggagtcttcta

SEQ ID NO: 279597 - DNA, 439 bp, Glycine max
  unsure (1)..(439): unsure at all n locations
tcatgatgaatcttgactatctacacaataaggtgttacattttatgctcttttcaagtnnnngctacctaaagccgcatgccaattcaagtatattttcctttgctgactaanattgtattcaaattaaagggtatacatttttttgtaatgtattttctttacataacatgcaacatatttatgtatanttttttgtgagacattntgactanccaaaattatatgcacatacatccaagtattttgctatcatacccaaagtgtaaattgccaaaggtattntgctacctattctaaacctacacattcatgacgagcaaaattcctaaacatctangcgtanggaaattattgtagcgtggcccatagctgattgctggccaaaaaaggtaactntacccaatatgcacctccttttgtgttctttttgcataaa

SEQ ID NO: 279598 - DNA, 387 bp, Glycine max
  unsure (1)..(387): unsure at all n locations
agcntanataaatatgtgtatnnacatataaaatcagggagctaatgagtaaaatntcaatgaaatcaacaaacagaaccatcacagtcaaattatgtcaacctgtttagaactgatcacaagaatgcaaaattattttttagaagaaaaagtaggtgctgggcagttaactagttaaccctttttaacatatccctatgcctgtcctttcaatagcaagtggcagaatgatgtaatcacatgatatattttacccaacaaaatggtgactgaattcattactacatattcaactgatcaagatataatagttaagttattcacattcatagaccacaagagatgtgaaaagataagtcataaagaagttcatgaaggactactagt

SEQ ID NO: 279599 - DNA, 359 bp, Glycine max
atagatattgaaaagagcaggcttacaggaattaacatctatagaagtgcccggacgcctcaacatcttgagaccttgtattgaaatttccaaagggtttttttatggttttcaatgatcaagttaagtttatgttcttttctaccatgcttttgttaagagctcttgtaaataccagtgaaattcaatctagaaatgttcaactcaatgtaaatacctttgatacgtgtgaaataagagacttgctttgatagagagtcaaatcatccgctgaaggtggttcagtaaagcaatttttggcaatggttccacaagcttctacatagcaccaatcagggatatcggttggtccaatcatc

SEQ ID NO: 279600 - DNA, 82 bp, Glycine max
cttaagtctatcatatgctgacaatagccgagaagcccatgaatttcttcaggggcggagtatgtgtccagcatcgccttgg

SEQ ID NO: 279601 - DNA, 375 bp, Glycine max
agctttaatactaattgagcccgtacccgaatcaaatgagcattaaaaatgcagtatctaggaagtgatcttacgttgtctcccaacaagcaatggtcaaccaaacattcataacagatagtaataaaacagtaacgaatggggggggggggggtacctctctaatacctaaactcacctccttgagatgaaaagctagagcttagctacaccccccctataatagctaagctcacccccatgacaaaaaacatgaaaataacaaaaataagtccttattacaaagacaactcaaaatgccccgaaatacaatgcttaaaccattactactagattggccaaatacaatgcctgtacgaagaataacctattcta

SEQ ID NO: 279602 - DNA, 389 bp, Glycine max
  unsure (1)..(389): unsure at all n locations
acttctgtccaacaaaccataattacctgaatatatcctctataagncttctatttaaccaagtgccacagctcttatccatccaagatcataaccctagcccttgacatcatagtttccatactatcctattctaataaaccatgtaacggactcatgtgagatgtgtttaaagattcatataaacaaataccagtaaatgcatatgtgtgagcttatgagcatcttgttgaaaagttgaacaagcataagacatcataatataaatcaaacaagtagcatcataaatacgggcacacacatagaagagatcacataactgacctctgtcagtgagttaataaagctccactttacactatgttcaccttcacagggaagtaatatat

SEQ ID NO: 279603 - DNA, 294 bp, Glycine max
  unsure (1)..(294): unsure at all n locations
agctttgattggttagaaaagagcaacacacagtcatgggggaatcataaaanaaactatacctctcaaataaagtagatgtaccctagtggatgtaccctccactagaactgatccaaaagagatgtaccctctcttgttctcagtcaaacccaagtagatgtaccctctacttgtaccacaaaggatgtaccctccaatgtgttaagacaaagatctcaggcgattaaacctttgaaactttgtgaatggggatacaaaagaattctcacgcggctactcctttgaatcttt

SEQ ID NO: 279604 - DNA, 235 bp, Glycine max
  unsure (1)..(235): unsure at all n locations
ggaaaactgcaattggaaggattgatgatgattctgttngtgcaactctggattgagggcctcctcagaaatgcgactatggaaaatgcacttggggtcatgcttctctgctcaacctgagatttgtcctttgttttcgtcttctggttcctgaatccgtcgaacaggctttttttcttttcacaataattacacgggtatcgcttcctcctttcatttcttaatttataaatac

SEQ ID NO: 279605 - DNA, 356 bp, Glycine max
  unsure (1)..(356): unsure at all n locations
agctttattaaatataataatccaaaaatgtcanggaggggggtgttgaaaaagcataaaagactatttgtgattggtttaaagatacaatctttgcaaatgaaaatgcttcacaaacattaagaaagctagcagatgggcctaaaagaaatgttataacttggcaaggatacaacttanacaagtattcattttacacataagcacacgacgacaaaagtacaatgcagaacagtgaggtcaccctaagggctgaatctcaacacttcgcatgtgtgcatgacgccaatccctgtgtagcttgcatcccttactatgggttcattgatgagatatgggagcttaactatgtgaaa

SEQ ID NO: 279606 - DNA, 508 bp, Glycine max
  unsure (1)..(508): unsure at all n locations
aaacctactggtagtcctctannctaggnncanagcanantccanacatagaaacacaaccngcaggattatggggtacgcatcttatgtggtattangcggctttcggtcganggngcacaacaagggtcggagccactaagcgcgcataaacccaccatcccctgttgcccacctccaactgagctcacatactcccacgtagcccatatactggtttctcttaacaccgagtacccatcgatcctcccaaacgttcccaacatcagaagcaaacaacattccaacagcacaagctatcacaagccaagcaaaacatagcatatgcagaagactctgccaaaacacccaaccaattcacagctattcttactttaaagaccgcaagaaaaaattctctcgttccggtgcattaacccgtgggatcaacgtcaaaatattactgggaaggattaagtacatgaagtctcagtttggaccggtgaggatctctagcaaacatccgaag

SEQ ID NO: 279607 - DNA, 417 bp, Glycine max
  unsure (1)..(417): unsure at all n locations
agctttcattgttataacttcattgagaagcttctttgagagaacttccttgagaagctagagcttagctacacacacccctctcataactaagctcacctccttgagaagcttccttaagaagattccttaagaagctagagcttagctacacatacctctctaatagctaagctcacctccttgagatgagaagctagagcttagctacaccccccctataatagctaagctcacccccatgacaaanaacatgaaaataacaaaaaaaagtccttattacaaagacaactcanaatgccccgaaatacaaggctaanaccctatactactagaatggccaaaatacaaggcctggacgaaggaataacctattctaatatttacaaagataagcgggctcatacttagcccatg

SEQ ID NO: 279608 - DNA, 275 bp, Glycine max
aacgggctttgaatgatctgaaacgccataactcgctagtgtagccaatttgataagcatttgagggacggaactaaataacttcacagcaatttacagcactatacagtacagctcgttcctagcttatcataaaaaattgggcccttgactttagcaagctatttgcctgaggcttgaaccttttataatcacctaaggtataccagctacctgccacataacctcatggatctataaatgaagaggtcaatggggagagtgcctttgatttg

SEQ ID NO: 279609 - DNA, 332 bp, Glycine max
  unsure (1)..(332): unsure at all n locations
gtcgaagaacggtcgataccttcgcgaaattccttcacggaaaacgttatggaaacgtttcggaagcgcctcggcttagattttcttcacggaaacaatttttctaagaaaattcgaaagagagagaagtgcctaaggggctgaaccctnttccttctcacttcctcccctatttatagcaaaataggggagatggttgccgcccagctcgcccacgcgagccaggttgcttcctccagaagcaacagccttctggaggaatcttctggcccaagtgggcctggttgctatttgcaccctcatctntactaagtacaccccctgcctttttt

SEQ ID NO: 279610 - DNA, 499 bp, Glycine max
  unsure (1)..(499): unsure at all n locations
gggccggagagtgtactggacnttgatatcntcgnannaaacccagaggannatggngtacccatcacatgtggtactaaggggtgtttcaggctatggngcacttcaagnnncncacagncaccatgcgctcagtaacccaacaatcccttttggccaacctcctttgggctcacgtacttccaccgtagccatattcttgtttctctcaacacccggttcccatcaatcttccaaagctttccaacattcaaagcaaaacacattcaaacagcacaagctatcacagcccaacaatacagggcaaaggcgaatactctgctcaacacaccgaccaaaatcatagctcttctcacttaaagaccccagtaacaaattcctcgatccatatccgtaaccggtggatcgactctnaaattntactgcaagtctatgatacataagactacattgtgaccggtgggatctactaacagacatccagaactcattttgcatg

SEQ ID NO: 279611 - DNA, 482 bp, Glycine max
  unsure (1)..(482): unsure at all n locations
aaaaacaccgctagtngcttgatanntcngncnatttgagccagnaccccgggagaccctataagaggaccgcgagggtgcgcagccttaccatantaccccattaaacttacctatccatgggccgggtctgatccattcttcctactacactttttgctttcctttactgccccatccaaataatggcccacatgatctctaaagcatggttattagtgtcatgttcgtaacaatcaggacatcaggagaacagcgaaggtcatanaatttcacaatgttgtggccatgataaaggtacagaaccctcaatctgataagagggatgaccaacttcctaccagagcctttgaaagtcctttgagatgctgagtagtacttgctacccttggagatgggtattctaactttggagatgcacactagtacttgctctacanaaacttttacactcttatctgggaaggggtttattgctcaan

SEQ ID NO: 279612 - DNA, 238 bp, Glycine max
  unsure (1)..(238): unsure at all n locations
nccgtatgtgatgacctaatgcancantngcgacgccagggtttcttttgacccgaacgatctgcaacaacttacctggctcccctgtgtaccttggggcttgtctagatctccctcctgagaccctgcggcatggtaacatgcgatctagtcggctatgctagctgtatttgcggcgcttgagttctggggacggctactcctgaattaccccccattcattttttactgaaggtca

SEQ ID NO: 279613 - DNA, 325 bp, Glycine max
  unsure (1)..(325): unsure at all n locations
gataaaataaaattaaattggttgaaataaaatctggataaaataagattggataaaataaaatggctgctctcttcagtccaagcccaatttcggattcaagtccaattgcttataattntcctgagattaaattaagaacacataattagtcaagtaggcccaaatgataaaactacataattaatttgacaattaaggctaatcagtaattaaaatggtgacaaagagggttaagaaatacgagaccataatgacacatcaaatccccccacacttagccttttgcactccttgtgcaaatcaaaaagcagagcaatgaaca

SEQ ID NO: 279614 - DNA, 305 bp, Glycine max
tgacagggtaacaaatttagtgttttgatcaaaaacaatgttcatatttatgcacagcagagtcaaaagcaagaagaaagacgagtgcacataggcttttgtaatggttcaccccaaccttaagctacgtctagtcctcacccttaaagatgagatttcactaacacactcagttcacaactagaccagcaaccgttaggtttcaaaaacctgctagcttcccactcgacaattctagcctcgactagaccagctacactactgggtttcaccttagcgacccactgtttgactttagagacaaa

SEQ ID NO: 279615 - DNA, 305 bp, Glycine max
  unsure (1)..(305): unsure at all n locations
agatncctaaagaagctagagcttangctacacacttctctctttatactaaactcaccttcctgagatgaaaagctagaacttaactacaccccccctataatagctaagcttaccccatgaaaaaatacatgaaaatacaaaaaattccctaatacaaagactactcaaaatgcctcgaaatacaaggctaaaaccctatactactagaatggcaaaaaatacaaggcccaaacgaaggaaaaacctattctaatatttacaaaagatagcgggctcatacttaacccatgggctcgaaatct

SEQ ID NO: 279616 - DNA, 172 bp, Glycine max
ccacaccaggccctctaacaagacaaccacgtagggcagaacatactcgagcgacacaaccactataaggatggctatccaaccagatttcacgaacaactagggcacgcgggagcgcccccagacgcaaaccacaatgcgcatagacatacacaacaatatgccgagaata

SEQ ID NO: 279617 - DNA, 111 bp, Glycine max
ggtcattacataacagaaagtttagttgagcagtgacgaaaaacgcgcccaggacagaggagccacccaccgccacctacagccagcaaaaaacccgatgtcaataccgac

SEQ ID NO: 279618 - DNA, 259 bp, Glycine max
acttggatggatcaaccgcggtcaatgaagcgaatgttttcataccaagtgacaaaattgtatatgttaccattggattcaatgttcacaagtgtcattcatataagcctaagcaaaactgccaattcatgatcaatgcgatgatggcagccgaaaagacaaacgtgagttttgaatggtactagaacaaaccgtcttaaatgtggcagcatggtgcaagtctatctgcgagacatttattcgagagatgctttttggt

SEQ ID NO: 279619 - DNA, 441 bp, Glycine max
  unsure (1)..(441): unsure at all n locations
ctggcaaatgagaaaagagctatggatagnnnttatcatttctctaccactgtatcangaaaagaaacagatatatataagatatcacatgcaaaagaagaaaataatacacctttaaacgactgaaacaatntatataagaaaaataaatgggcaaaaaaacttcaaggaacttgattntagaaaaactagtgaattctaaagccatatgtttttacttaattctatttatctatcctccaatccagattgaagtacttgcacttcaagttctcttggtgtgttttcttgcaagttctttgtttaagtttctaacctattctcttaatcattanatgtatacttgataaatccatttggaagtccaaaacaccctctaaagtcttttttttctttttgangagagatatatagtcagattaattacaattgttgagagtt

SEQ ID NO: 279620 - DNA, 385 bp, Glycine max
  unsure (1)..(385): unsure at all n locations
agctntcactagatcatataagataaacgcattcaggcgggcgtgcagatatatcctcccaaacgtcaaattctccgcctatatattcaacctttccatcactggcacgtggagtgaatcttcctccatggtgcaatactaaagttatattgtcattcattctacacaatcagaaaccacaaacattgtcatatattaggaaataaaaaacctacctcanactcaaacataggcacatcacacaacaacatgcaatgtcatatataaaaacagagcatcatanacaaaaataatacagggtcataaacctccctacgaagcgcgaagacaatgcacatgagaccccttgaacatataaaaccccaaatcaaaccaccaaaacaat

SEQ ID NO: 279621 - DNA, 287 bp, Glycine max
  unsure (1)..(287): unsure at all n locations
tcaagcttccgttctcgagagcatngctaatttaagcatngctttctttgttttcgngtatcttaagaaaaacgtcattgcgtctcctttctttcttccaaagtcatttctaacgttccaaacactttctccatcacccacagccaccattagccaccacaaaccgccgttgttctccgttgcaaccccatactgagaggaacccttcgaccgaagcggaatcttccaacttgactcgcaggttcggtagagaacaaaaccctaatctgacctttcatttcctttga

SEQ ID NO: 279622 - DNA, 173 bp, Glycine max
  unsure (1)..(173): unsure at all n locations
gcatgcatcgaacgaccagcgngaagaggaatgttcaagacaggggggaaagaccgccaggaagaaggcccacgaaaacacacgcacggggcgcgcagagcgagcgggactcgggggccacaacgcagcgcggaagccccggcaagggggaagccagagaggggcacgcgacc

SEQ ID NO: 279623 - DNA, 222 bp, Glycine max
  unsure (1)..(222): unsure at all n locations
tatgtacccactatggtggctgganatgcaacaatagaaaaacctagagaagagtggactgaagatgaaagaagattagtgcagtacaatntaaaggctaaaaacatcattacttttgccctangaatagatgaatattttanggtttcanattgtaggaatgctaaggatatgtgggacactctacaagttacacatgaaggcacaactgatgttaacaat

SEQ ID NO: 279624 - DNA, 261 bp, Glycine max
  unsure (1)..(261): unsure at all n locations
gcaagctcctgagcttgaaattcgtagccaactgtttggcgttttgaacatgttctccatcttcagcgnaggagttggagcgtagctgatgattatgctcaaagggaaggtcatagaagtgtgacaacgtgggtaaacaacgtttcttcttcttgttcttacaagtcactttcattcttcaccgccacgtttatcttccaacgctactgattgtctgagattgttatggctactctattgtcttctaccaaataatctctt

SEQ ID NO: 279625 - DNA, 500 bp, Glycine max
  unsure (1)..(500): unsure at all n locations
caagctttgtttttcattgtttattgccggcnnacccaacaccgtgtgcgcgtcagctctcaaccattcgcanaccacanacccanatangnntcttgtcncnnacggaagtgaaccgtcncnnccggcaacctggaagaaaaaggagggaaagccctcgatcnnttccttgnnaggaaagaaattgagggccccgtggaagtgaaatttggggaactatcncnngttcgcagacattgaaacggatctnnntgcttagtacccgatgnnttgttattccnnccccaagttcaaagtggccggacccttcgacaagtataaagtggacgaacttgtcccaaaaacccatctcaagatgtactgccgtaagatgggcgcccactctaaggatgagaagctattaatacacttctttcaagatagcttggccggagccgcggtagtgtggtacactaatttggaagcttccatatccgtacttggaaggatctgattactgc

SEQ ID NO: 279626 - DNA, 349 bp, Glycine max
  unsure (1)..(349): unsure at all n locations
atagatactcagctgtaggaggctagctacaaattatattggtttttctattattaaaggttgtagatcctaagagagaacagatcctatacttatccaagtgatctttttaatacaattagcttgctcactagctcttcactttcattgcttttgaccttattacatcagcacacctttcctattattgttgtttgtatatacaacttatgtgttgcatgtgatgatgctntatctctttctttgcatcccaattagttgcactcccccaaatttggagtaaatattccttgaaccatatgctctcctagaatctaaacaaggtattcggagagaattatttgagttc

SEQ ID NO: 279627 - DNA, 317 bp, Glycine max
agcttagctgatttggtcttcgctggcgaaaggatcagggtgggtatggaaagaggcaaatatgattatcctgctttgatgaatgcgaaaactgtggcaaatgaaaagggtgagaatgaatgagaaacccatgctgcgactgccgttcctacatggaaactcccccgccagctcaacaacatcattactcatccaatatcagcccttctcattacccaccacccagtcatccataaaggccatccctaaatcaaccacaaagcctgtctaccacactttcacagacgaacaccacctctagcacataccctaagcac

SEQ ID NO: 279628 - DNA, 502 bp, Glycine max
  unsure (1)..(502): unsure at all n locations
ggggcccncnnnaaggggnnnnanaccgggtagctagtgctacgcntactaaccatagnannacgcccanatagaaactcngcnnagagaggagctnnaaggaggtatttatgttatagagggtttggtgggcacgaggnngaaggagaaaaggagagagagaagntgaactttgaagggtgcctnacaaatttcacattcatcanagttttgacaagcgttacacatgcttctatgtataccctaggtactaaatacatgaaagcttccttgagaggtatagcttatcttcacacacccctcttttaggtaactcacctccttaatttaagaccttagaggctagctccgcacacccctctataagctagctcacccctatgcccaaatgcttgaaatccaaacaggcgctgtacccagactctcgaatgcgccacaggagaaaacccattccaatatttctataccaggggccaaccttgcccttggctatagatttccc

SEQ ID NO: 279629 - DNA, 422 bp, Glycine max
  unsure (1)..(422): unsure at all n locations
agctttatttgtgcgggttcgggagacaaaggtcaagcgttcgcgatatgcgaggatgatattccgagtactttggatttggtacgaccatgctctcctgatttccagctggganattggcgagtggaggaacgccccggcatttacgcaacaagcataatgtaaacctttacggttttttaaagctctatagttgggcctaggctntagagttttcattntgttaaggctntgtgtcctttgtgtttgaatntataatacgaggatctttcttcatctgttcctggtctctacccattctcattcatttgcatgtntacttctttntctaaaacggcagattcgatgacgagtccnccgaaggtactaatacctgggacccgtctatcaacttcgagcaagaaatgaatcaaacggaagat

SEQ ID NO: 279630 - DNA, 430 bp, Glycine max
  unsure (1)..(430): unsure at all n locations
tcatcctcaaatccctctagttggtctcggcttaatacanactctcctcctatgttgagactaacttaaacaaagcttcatcctcagatccctcttgttggactagacttagcttaaatagcttacaaaattttagcctaacttagcctaatctttgtcctcagatctctcttgttggactagacttacaccaaacagcattattataacagcatacttataaccaaaacttaatccacagattcctcttgtaagactaagtttcaattcttcgtcattcaagttctaatgcaacaatacatttcccaatgttaaaatcacctaactaggcacatanatggttgatcagaccaagagcatacaaaatttaagcactgaagaagcatttgacacaagaaacangaatcattagatatgaagatattacatc

SEQ ID NO: 279631 - DNA, 531 bp, Glycine max
  unsure (1)..(531): unsure at all n locations
aggaaacgctctacnactgaacgaaataacaaaagccntaaatacaaattcanacaatnacanaggggagggagcgggntatgcatcaatanccannccaatacaacacatctccccggcagacgatagagngagactagcaagcaagcaacgcccatattctatgtacaataataaagctactagatgagaaagtggccctcagaanatcttaaaagctccgataccactcgttgggacagcggcctcagaaatactaagaaagaggaggctgaataagatttacaaacaatcctgaataaaactccagatagatcttaaccccggcctaagatccttttaaatgaattctaataataattcaatagacttactgaaagaaaaataagcagcaaaaaaaaagagttgaggaaagaaagccaaccagcttaaccggttggcaaaccaatgctacgccaaccccaaaaaccgctggaacacaaaccgacaaatcctacaaaaccgaaccaacaagacacctccctgggccaa

SEQ ID NO: 279632 - DNA, 256 bp, Glycine max
tccacatccacaaatcgggcataaacccaccatccactgttgcccacctccaactgagctcacgtacttccacgtagcccatatcctcgtttctctcaacaccgggtccccatcaattctgccaagcttcctcaacatccaagtaatacaacattcaaacagcacaaactatcacagcctagcaaaacagggcaaaggcagaaaatttcggccaaaacaccaacccaaatcacagcttttcacataccaatacccc

SEQ ID NO: 279633 - DNA, 212 bp, Glycine max
agcttaacttttattttgaactctaatatatcagatagagaagcgccaaaacactttatataacacctacaccatcggcatcatcccatcttggagttaaggcacaagtctaagatgcttcctataaccgacggaagaagctaatggtgaaaaacaaatcatttgcttagtcattgatgaattattatatagctcctcataagggtaaaaaa

SEQ ID NO: 279634 - DNA, 174 bp, Glycine max
tctctgcctatgtcttatctgattgtgatcgcttgtctaatggtggtctttattcgatgcgcttcggcattcagtgtgattaactttcttcttcacatacgttgtagtcctaaatgatagattgatggcatcaagccaatcgtgcttggaccaacgttgaaagatttcaaactt

SEQ ID NO: 279635 - DNA, 211 bp, Glycine max
agcttgcattagttgttttttttcggagagacagccactatactttgtgaacaggattgagaacagaacgactaacaaggtgtttagcattcgacagtctggattcggtgaagatgtgtggattcatttgcaaccactgtcgaccgccaacttttcttgggaagatccatatgggaataagtttttacatgcttaacttaccgatgatgat

SEQ ID NO: 279636 - DNA, 359 bp, Glycine max
  unsure (1)..(359): unsure at all n locations
accaatcctacattaaattaaatggacttttctgtagagagggcaaggggtcataaaatacaagaatttaaatcagacaagttacgcttggctctgtgcttactaatggtaggcaagtcctttgcattctcaagaaatttgaaacctccaaagctacagcttgtactcacctacagttcagatagatgcacaaggttacaacaattcacatcatcaaggataaattactaacatcttttntttttatctgcaaattactaacattgttaaagagatcaactataagtacatagtgagacaaaaagtgccaacatattattaaaaaaaaatgcataatgtgaaaaaagtttcacttatta

SEQ ID NO: 279637 - DNA, 350 bp, Glycine max
agctactgttcatatggaatcttctattaagatcaagaagacttatgttaactactagtataatgtaccacatgatcaaataattaattagcggcatatatatttgatatgcacgctgctgccttcatcaatttaacagcacaacattatttagaggtgaccggtgtggcagtttcttaataaagcgtgtatatacaacatgcgaatcaaacatgtataatctcaatggacgtggcattcataatgcagtagaatccattcaagaaaggtacaatagcagataagtgaaatagctttatatctttacatccaaatacaagaatgtgatatctgtactcgggtcatgtgta

SEQ ID NO: 279638 - DNA, 413 bp, Glycine max
  unsure (1)..(413): unsure at all n locations
cccagatgtatccatgatattcggccatagntactcccctancnctcccttatacacactttgcctttcctcattttctaattggggcgagatgaatccagacactttctttgtctgagagaattatgttcaagggacagcgagccatatagttgcttttcttattgtatgctgcacttgcatgaatgcactccttataaactgtgtgtacatttgcaatagtcatcataatctaccatggactaaaaatgagaactatctggcaatcactgcctgttagcccttttattttcttctcttttcttcagttattccatccaatttactaattggtaatgttttaaactccaggtctccctgtggagacacctcttgacttttggagaaataacctccaacacctagatgcttcc

SEQ ID NO: 279639 - DNA, 279 bp, Glycine max
  unsure (1)..(279): unsure at all n locations
agcngcattcaattcaattacactccactcactctgctggcgatcgctctctctgtatattgagacatacgatatccatattaaagcctctcaccctcatctaatgaacataactttgctctccgatatacgactgcgcgcattctccatcttgaggctgcacgccctcaccttcagacggctagccaccccttccatttaacggctactctgctgtcctattgtgggctgcacattctcaccatacgagaatttaatgtcctctgcccttaatgctta

SEQ ID NO: 279640 - DNA, 253 bp, Glycine max
  unsure (1)..(253): unsure at all n locations
aattagttacctgattaaaataatcactctctctctttgngtatcactcttttcctcgggtgtatcactcttctttntcatattcctttgtggagcctcactattttctttctcttgttctctcttttctctcattctgatttggtcatcacacacttctctaggggatagaggtttaagagtaaacgaggaagaattgactattcgtctgtagggctcttctttgttacggttcaacaaacgttgcatttgt

SEQ ID NO: 279641 - DNA, 316 bp, Glycine max
agcgcatcttctttttttcagatgatgtaaacgagtttggggctgcctcatgcacttctctaatgactatagcatcatttctggcgctaaactgttgggagttggaagccatcttctcaattaaatttctagctgtagcaggaatcatgtctccaagggcttcaccactggcagcatctatcatacttctctccatgttactgagtccttcataaaaatattggagaacaagctgctccgaaatctggtggtgagggcaactggcacatagtctattaaatctctcccagtattcgtgtaggctctctccactgag

SEQ ID NO: 279642 - DNA, 139 bp, Glycine max
atcttgctttatggttaatgctgtctctagaacatctccattggatctaatgatgaaatatgtgcattctcgggtgaaaaagaggctaagttttgaattgcaaaatgtagcacttgggctaagctcaacagttgggcta

SEQ ID NO: 279643 - DNA, 334 bp, Glycine max
agcttatatctcaccttcagctgtccctccgatctcagcgtcatcataaactcatgaagcgatacttctgcccatttgccattctggaacgcattggcagcgttgcttaccgtttgcaactacctgaagggtctcgtatccaccccgtcttccattgttccttactacgccctcatcacagacctcttgacctcccaacctcttcccttccggcggatacttcctccccacaccctatacttgagccactagccatccttgactctcgaatggacttctctgtggaccccccaactcgtttcgttcttgcacaatgggttggtcttactacgga

SEQ ID NO: 279644 - DNA, 383 bp, Glycine max
  unsure (1)..(383): unsure at all n locations
acttgatgttttttgctaataattaaacatagttttatttgtatagacgaacctgtataactttatgtctataatctgaatttgttgttaggcttgtgcttaatgtgttagtttttttattttctgattgtgtttttcgtaaaatttgatatgtgttttacacaatatcttcttcacacaacaatgtttgtttgattgcaaaaatgtttgttagaaattactaanatcataatccaacctcccttccttgtgatatttgcctttacaacatgacatgcaattaccactaaagagaagaaagtaaggaatccanataatgattaaattggtgcattttatatatgaaaaggtgggcaccttttgtttcatctgtggacttatgg

SEQ ID NO: 279645 - DNA, 402 bp, Glycine max
agcttgtgtgatgttgcgcgtactgatgggtaccatgaggtgtttgctggggtttgacccatgcgggtgttgaagagatggcatgggcatctccttccttcctttttgcccctgttgccccgattcttttggcgtttacgtttgtggaggaaacgtaatcaaactttcctctcttcaatccaacctcgattctttccctgtcaaacaccagatccgcaaagctggacggcatgtaacccactagcttctcatagtagaacactggcagagtgtctaccatcatggtgatcatctctctctcaaccatgggaggagctacttgtgccgccaaatccctccatcgctgcgcatattctttaaaggttcaccctctttcttgaacatattctgcagttgagtacg

SEQ ID NO: 279646 - DNA, 488 bp, Glycine max
cgccaggtatccatgacatcagcgacttgagaaactcagctttgatttcatacaagaaagcgtaaaaatgagggcattatgataggaatttccctttaggccagcggctgatttttggggctgcaccatggtttggcacaataccttgagcatgcatatatgaattcttttcaatatatatatatatatatatatatatatatatatatatatatatatatatatatgtgtgatagccatcgtttcaggagcactgagcaccagcaacgtttcgagaccatcaaaagatggtcgttccacacagaaagacgcgtccagctcatggacaatgagtacacagaattttaagaagacataactcgccgacattggacatcactggtcactccgatggctaagtttgacccagatatagatctggagttatatgctaatgcttgccccatagaagagggagtgcgggacatgcggtcatgggtaaagggcac

SEQ ID NO: 279647 - DNA, 417 bp, Glycine max
agcttggttaggatgcttcaatggaggaaaagaaagagggagagaaagagagaggggggagcacaaaattgaaggaagaaaaagggagagaagttgaactttgagttgtgtctcacaagactctcattcatcaaagttacaataagtgttacacatgtttctatttatagactaggtagtttccttgagaagctttcttgagaaaacttccttgagaagcttctttgagaaaacttccttgataaggtagagcttatctacacatacccttctcataactaagctcacctccttaagaagcttccttaagaagattcttagagaagctagagcttagctacacacacacctctctaatagctaaagtcacctccttgagatgagaagttagaagctagctacacacccgctataata

SEQ ID NO: 279648 - DNA, 350 bp, Glycine max
tatccaggctcatcttggtggtgaagctccttctttctggcttattccctagtggatggcgcctcctctcacctcttctcctttgtcttccgctgcatctccatggtggaaaatcaccattaaaggacctcattgaagctcatagatccagcctccatagaagccccacaagcaagcttccatcagcagggttcctccccttttgcatgccctacttctgaacagtttggggctgaagtccatggcctagagactggcccgatgcccatgcaggggaagagcctgcatgatcccccggtgaggcagatgagtcccatatggatgaatagatgactgacctgctcggtttc

SEQ ID NO: 279649 - DNA, 178 bp, Glycine max
cagccacatttgatttcgattctcaataacatgctactctcctgtgcgattgtctcactctgtattggaaacgttcaccatgcagatgcgacactctacacaggatctgatgacaaaggctgcgcactccgatatgcgattgtgtccatagtatatcgcgacgctcgaaatatcaacc

SEQ ID NO: 279650 - DNA, 307 bp, Glycine max
cagaaaattagagtgcatgtgttttatcttagtgagagtgattctcctaaattcttgagtgattcaagaacaccttggctgtatcaaaagactttcacaacctctgtgtgttgccctcgctggagagagagatactttccttcctttcatcatcacccttgttctttcaaaccacaattccagaaaatccacctctgcccagaattatctcgtggccataactcccattttgcgcactcaagttaagtgattcttcagcctaatttgaatatcaaaacgagacctttcacctcgttctggaatcacc

SEQ ID NO: 279651 - DNA, 367 bp, Glycine max
  unsure (1)..(367): unsure at all n locations
tcaatctncttctntntgtnnnacaaattttaatgcataaactaaagtagtaactcttggtcttgttttaaggtttatttaactttttaacaatttcaagttaaatttttaatgaaaaatattttacagagaaattgagcatatatacgagttacaagatacataaggaaatattatgattaccttaaggtaaaaatatttatatcatcggtatcttttggttaccatgatggaatcaattaatattacaagactatatatataaatattgctatacacgtataagtaaatgttcttacttactacagtagactctatttgaaacagtaattcgatagcattaattgatatcgagagtgttcttaca

SEQ ID NO: 279652 - DNA, 421 bp, Glycine max
  unsure (1)..(421): unsure at all n locations
ctcaagctttgcatgtaaacatctctatcttgaataaatattcattaatttgttgaagaattngaaatctaccagtaccgaaaaagaaacatgaatgattcttatcatcatagttacattgatattattactaaatgctgttgcctaaataatntgtttctcaaagtctctagattntggtatctgatattataataggcttcttattaactgaaatggtatatctttcgttgaatttaatcagtatttgtgggctgtttatgatcttattattcgttggctggttattgtggtactaaagcacttcgtacttttgtgtctaggaatagtccattgtatccactgcaacatatctgtcatctgcggatgttttttttcatgtttgtgatgtgctggagatgataatgtatatgttctactt

SEQ ID NO: 279653 - DNA, 395 bp, Glycine max
  unsure (1)..(395): unsure at all n locations
tcaagcttgtgtatgaaacagatgtgattaatctaaaattacatctctactgagaagaactttcctttcagatggtgaccagatcctatagcctttcaccccatcactataacccatgaacagaccctttcttgatctaggtaccaactttccttcattgacatgataataagcattgcagccaaatactcttaggtttgagtagttctctgttntgccattccagatttcaataggggttttaagtcctatagcagtagagggtgttctattgatcagaaaacaggctgtattgatagctcttccccanaaacttctgttgagaccagcattagacaataggcatcttgttctttccaggagtgttctgttcattctttcaggaactccatctt

SEQ ID NO: 279654 - DNA, 207 bp, Glycine max
  unsure (1)..(207): unsure at all n locations
ctaaactagaagtcttaataattagttactggtactcttaccaatcattatgcatgcaaggttggaaaacatcttttatgatattttacttttcaccttaattcaccaaactgaaagtgaaaccaanagcatgaagcaaaagcttgctttgttgcagaacatcaaagtctaaaaaagataacanacttttttacctctcccctggat

SEQ ID NO: 279655 - DNA, 355 bp, Glycine max
  unsure (1)..(355): unsure at all n locations
agcttcattcaatatcccactngccataaaccttgaaccagggtgagaatatcaatccttgctctcgggagaaaacacanaaagaaggaaaatccccaatgaaagaaagggagaaagcaaaaaaggaaagaaaattcccaattaanaaagggagaganaagcgaaaaaaagagaggaagaagaaaggaaatctccgatcaaagatcgcatganaacataagaaatatacagaagtgtctttggaccaaaaaatatatgaacaatacagaattgtcaccaagataacattgccaaccaaaaaaccctgtgcgtcagtggcttgttcgcctcgcgccaaacaaaaacagaaaagaaa

SEQ ID NO: 279656 - DNA, 308 bp, Glycine max
  unsure (1)..(308): unsure at all n locations
ccggggtgaggtgtgcctgtctcaaatgtcaaaacagaatctcaaactattatgctcannatcaccaataacaaaatgctcgggatactcaaaaggtactaaatgatgtctaactaatctatganatgtactatctatctcangatcaaagggttgcaagtcagatggattgcctctagtcatacactaaattcagcatgcacaattagttgccttcttatgcaagtaacagtgtaggtttgaactacagctaccattaaatgatatccaaatgacttgaaattntgtgagcaacattataaaatgat

SEQ ID NO: 279657 - DNA, 403 bp, Glycine max
  unsure (1)..(403): unsure at all n locations
ccccattttattggnaccacancacaagagccccgaggcggggcgcgaaaaacanacaccaacncncagccaaaccgacnacaccaagggagaaccggcagacaaacacaggaaaaggcccacaggacgagagccgaacagggccaacacgaaggaacagaaccaccaccgagagaaccgccgaagagaccacacccgagancccaggaaacacaaaacgggaccccgaacgagaaccaagagagaggcagaggncagaacccgangagnnccgaaaggcaanacgcacgggcagaaacccaacccaaaacaccgaacccaaccccaaaggaagaaaaaccgaaaaagccaagggacccgccacaaccacgcccagaaaagaccaaggaaagaaggaaaccgg

SEQ ID NO: 279658 - DNA, 539 bp, Glycine max
  unsure (1)..(539): unsure at all n locations
ngccataggctaagnngctttaacnnntgctgnncaatangnnancnaangncnnagnngcncnngcangacaanagtntgcatatggctacnnactttttgtttngctntgttannaatataaaaaaacggagtggatggatcatccaacntaataagactcaagcttcttaagatgagtngggccttagacattattagttagtctccaatgatccaagtggtaactgagatttgatattttgctactcctcaattctgtccatgcatcaagcacaaatagtgcttatgaagggacatgtgagaaataacacctattcttttccagatgagcctagattgtaggagacgttggcctttgatgactagaacagaattatgtggcttgttagtctgtagatatttcaacatccacatattttcaaagctagaagacaccggatacatgatttattttggtttgcgtgtgtatagagggatctagaattctgagagctgggacaaatatttgagtattatcctcaaagggaccatggagt

SEQ ID NO: 279659 - DNA, 384 bp, Glycine max
  unsure (1)..(384): unsure at all n locations
agcagagtttacttttttatctactatnngngnnagggggatgatacaattcagttcatgacagctggaccttgtgccgctctttgaaccacaagataggacgcttgtcaggagctgctctgaatgacaaactatntgttgtcggtggtggcaatggagttgacagcttatcagatgttgagatgcttgagttacatattgggccggggatccctacgcactcaatgctagacaaggttaaatgggacaatcgaatgatcaatatttcaggtcttgactgagattagaaaggatgattatgggttaatgcccaatgacacagtacattatgtgatttttacgcttagctgctaagatgtcacttggattaatatttacaacatt

SEQ ID NO: 279660 - DNA, 329 bp, Glycine max
  unsure (1)..(329): unsure at all n locations
gggatggcctcaaatatggggggcaattttggttggtttccttgctggatggggttggattgagggtttgtatgagatggccctaagcctgtaatgcatttntggagcactggggcatgccacattgccccattctctttgctataatgcctaaacgtgcgcccaccaagtgttcngtgaaatgcctcaatggcatttgcgcatgattttgatagggaaacaacctatgggacgatttggtgtgcgcgtgtttgctgtctttggagcatgtattcagtntcgtaatggctagaaagattgcccacatacaccctaagcctatgaaccga

SEQ ID NO: 279661 - DNA, 425 bp, Glycine max
  unsure (1)..(425): unsure at all n locations
agccagtgtgtatatcgactatcaaggacaaaaaggaatcttcgagtgacgtgacgaggaatccgcggggtagctcactatatgtaatgggagtttattataaaatttaccattttaacaccatagttaggattaaggaacctagctatgaggatatctgcctgtccttgtgcatgctgatttttcttcaaagaaaattacgttttaactaatgggatgcgatatatatattgcgatgaatgatattgttttggctgttngaaggctgtgcgtgatgaaatgatattgttgagtntgtttgaatatgcgttgatgttgctattgaagattataattgatatgtgatgataatgatgattatgatgatattgatttgaaatgacatnggtaataaagaccatgtcaacatgaattgttattattga

SEQ ID NO: 279662 - DNA, 273 bp, Glycine max
  unsure (1)..(273): unsure at all n locations
cattttaaactggctcaaactgaattaacccctaattttccaccgaatcaaattttgactcctcaaacacccaatttgccctagaaatggctctnggttcactttggtcattngtttttctctctagctcagcctaacctttctcacatgtcctanatgacatttcaagctagtattaactcactttaacctccatttaccacagaaatcagacttagtcttcaactctcaaggtctcacttcttttccactcataacatcacattctcactt

SEQ ID NO: 279663 - DNA, 191 bp, Glycine max
  unsure (1)..(191): unsure at all n locations
agccacgatttctttattctcaccngncanaaaccncgagccagggggagaagagcaaacaccgctctcgggagaaaacacacaaagaaggaaaatccccaacgaaagaaagggaaaaagcaacaaacgaaagagaacccccacacaaaaaacggagagaacgcgaaagacaacagacgaagaagaaagga

SEQ ID NO: 279664 - DNA, 156 bp, Glycine max
tttctctcctgaaccgaaggctttacttgtaggctggtaaaacccttgaaaatcagtattagctggtcacagtttaacagcaaaagttaacacagaatcttctacggacctcaaataatgttcctagcaaccataaatatatacaagaaataatta

SEQ ID NO: 279665 - DNA, 392 bp, Glycine max
  unsure (1)..(392): unsure at all n locations
agcttttatatattgaaaaanaaagctccaagagcttggtattaaaggctaagctcattcttagttcataatggattcaccagaggaataatggacaccacactatttagaaaggctaagataggaaatctgttgattgctcaaatctatgtagatgacataatctttggtgcaaccacagaaaggatgtgcaaggagtttcctgagctaatgaaaggtgaatttgagatgagtatgatgggtgagctaaaattcttcctangtcttcaaaacattcaaaaagatgatgggatattcatccatcaagagaacacanaaaacctatttaaaaggtttagaatggatgaagctagacctatggctacccctatgcacccttccacaatcattga

SEQ ID NO: 279666 - DNA, 381 bp, Glycine max
  unsure (1)..(381): unsure at all n locations
gtccatctatggattgaaacaagcctcccgccagtggtatttataaattcatgaggtcatttcttcattcagctttgaagagaatgtcatggatcactgtatataccagaaggtcagtgngagtaagacttgtttccttgtattatacgtagatgatattctacttgcgactaatgataaggttatgctatatgaggtgaaaaaatttctctcacagaactttcatataaaggatatgggagaggcatcttatgtcatacgcataaagatccatagagaaagatctctatacattttaggcttgtctcaagaaatctatatcaacaaagttntagagagatttaatatganagattgtcaccaagtgtagcttcctttgtg

SEQ ID NO: 279667 - DNA, 409 bp, Glycine max
agcttaatactctctaactgaaagtattggtgtgggcccttgtcaaacacaaagatatatccagatgtgtatccaagtagattccactcatatctctagattgtctcaaagaaaattgcaagacacggctataatacaacacatgatggctatatacaactcaagctattttagatatggctttgatacggatagagccactttctgaattcttatattgtataacaatgtatgatgtaactatacggtttttaaaataaataaaaaagttccaaacaaaaacaaaatgcaactaatttcctcttctcagaacatagacaaaaacatgacacacccttcttctctgaccatgacaacttcttttcacagttttggatgttcttttagtgagggtgtctatttttctagt

SEQ ID NO: 279668 - DNA, 167 bp, Glycine max
  unsure (1)..(167): unsure at all n locations
tactcctattattntgttctaattataaaatacttgatgatccagtgtgcttgtccgtaacatacgcgaccccacttctatatttcgaagagaccaagatagatcaactgaactgtgagtggcgcgaacaagtatttttggcaccgtagcagacgaacttagatcat

SEQ ID NO: 279669 - DNA, 392 bp, Glycine max
agctttgattcaacatatctccccctttcggttttgataatgccaaatccgtatgatatgtgctgatgtttttcttctcatagtacatgtttcacaaacacgtgtcgcaacgtgcccttttgcgggcgagctaacgcgaggttcaccggtgcgctttccaaaggatgaaagatgcgcggagtcttcaccaacgtttatctgtggaaaacgtcggataaaccgaacgaaaccagtcaaaatgaaaattctaagttcgggagttgtatttacgcttgaggaaggtattaacacctctcacgtttgtctcaaaggacaacagcctattttttagaattgtggaaattgtgttaccttaactctatttctttctatatttttgaggtcgacaaaag

SEQ ID NO: 279670 - DNA, 458 bp, Glycine max
  unsure (1)..(458): unsure at all n locations
tactcaagcttgtccctctgttccctataaatagggggaggagggattattaaaatcgttcaaccctcctggtatctgacgatcacttgaaattagtaagacaaatcgtttccatgaagaaaatctaagccgaagcgccttccgtactcgtccgagacgtttccatcggtgatttcgtgaagattttccaccatcgttcgttcgttctttgttgttcttcggtctttaactggtgagttcccgaaatcgaacttttcaattcattctatgtaccattggcagtctccatttgtttcacgtacttttattttcatttcatgtacatttcgtacccccttttgacgtgctttagtcatttatttaagtcattcttctcgcctaatcaaaanataaaataaatttctaccgatcatttgaattgtaacatctggtaatttctgttaaaatgaaatctgact

SEQ ID NO: 279671 - DNA, 409 bp, Glycine max
atcttggattggttgtgttggcgaatgcagttattgcgactatcccttcatataacatgcaagcaatgttgtttcctcagtatatctgtgactatattgataaaactgactgtagttttatttggaagggtttctacgggaaagggattcatatggtgggttggaagaagattacgaggtataggaagaaaagacgtttgggggttagaaaaacgtgtttctaagtcggatattttgcactttttaagacggttttgagtcatcataaattgcggaaggctctacgacaacggttccataaccgtcttagtatgtataggattctaagacggttatgtcaacaaccgtcttagaatgtatagcatactaagacagtactctaggtataaccgacttaatatgtatagga

SEQ ID NO: 279672 - DNA, 447 bp, Glycine max
  unsure (1)..(447): unsure at all n locations
ccacccaaatcatagggagcatagacattgttattcatcatcctctgattattactaatacatgtcccttcaagcattaaaaaacttctacctttctccctcctatccacctcanaaatggagttattccacaaacataataggccaccagcagcctgcacagaaagaacataatcccaatgggcagtcgagtccccccaaatggcctagcaaatacttttattaaatttctcccttttggtttcttggatacagacaaggtccactntgtgctttacaatgagccttctaacagcagcccacttgattcccctccccagacctctagagttataggagagaatgatcataattgntgaaatttaattcccttatnctgtgccatcatattatccttattctccatatccagcaacagccccttaaccttgttatcatcttccccat

SEQ ID NO: 279673 - DNA, 413 bp, Glycine max
tcaagcttggttactgcttaagaagtgaacagatttatcaatataatcttagaatgatagcataattttcaaaggtatgcttagaaaactagatggtgcacaggtatgcttggaaatacagcttggaaaattagatggtgcaaaggtatgctcatgtaatatgtctacaacgagatattgtttaatttgtgaaagttgttaacttgggtatctaattttcttcatttctcttcatcagtttgatttgtcattttatatcataaataatatacctcctttttccatgcagagtattgcaatagaattgcagagcgagcaacagttgggataattagctatgtctattggaaattaaaggtgtcctctatgtgatgtgaatcttcagctgtatttatttaacctatactatgttc

SEQ ID NO: 279674 - DNA, 120 bp, Glycine max
cacctattttgaatctcttatgatgtacctacatataagaaacagtcccactctcccaattttacacaatcatattcatacatcatttgggcaatttcaccgagcacttggtgagcacat

SEQ ID NO: 279675 - DNA, 404 bp, Glycine max
  unsure (1)..(404): unsure at all n locations
gctgcacgcattctattcttgcttgtttctcggccgagagcaggataacgcggatctggataactgagaacatctatatctctctcctcacaacacggtagcaaattccattgcagaacatacactaatatgggcgtgcaaacgcgatgttcaactgggcggagaatgattggacagacaaacgtggcgggaacaggaacgcttatgtgcgatgaccaggtgctgaaactggagacacacgcgaggagacagtggatggatgagaaattggtggtagccattcngaaggtggtacagctatgcgctgacgtcgaccaccgccgcatacaagggacagcgtacgggggacttgacggaggcgtatatattctacgacacacaccgagtctgcgctctcacctccg

SEQ ID NO: 279676 - DNA, 95 bp, Glycine max
tcacataaaactatatgctcaatacagcttggaaggtggtcacttggcaaaaaaagtgccatatacttcaatatatataaacacatataaacata

SEQ ID NO: 279677 - DNA, 337 bp, Glycine max
  unsure (1)..(337): unsure at all n locations
agcttattatctgttatagatgacatattgattaacattaccaattntgactcccaaatttaattcctattttgactgctagaccaaagaaagatacatttttctccctatctcttctattgcttcgtattaaattgcaagatgtttccatatattggtcctaattttttatactcgctcatgcatgttgaatattttgacaacattaggttttttataatttatgaatgatccttattgaaggactgctgtctgttaaaggtcatatataaatcactatcccagttttataatttataatactaatttgagaacaaacctttntctacttaaaaat

SEQ ID NO: 279678 - DNA, 486 bp, Glycine max
  unsure (1)..(486): unsure at all n locations
ncctttgtcagtttagtactctcgacctctaaatctagctttatccatcacagactgattacccttgaatttatgttttgttttgaatgtgaaaaagcgtgaatattatgaccttgttgaaaaggtttttatttaaatttaaattggcttgcttcatgaggattacttggcccctagtagcatggaaataccttttcatggtatgtatatatgtgaatatatatagcatggaaatgccttgcaaagtgtgtgaatatatggcataaatataccttgcaaagtgtgaatgtatagcaaataatgaatttcaaaaatctgtatatgtaagataggtagncgtaaaaatgcctttcanaatatgtatatttgtgggtaggtagcataaggagcctttcanacaaaatgtacccatggcanaaatggcacgagaatggcttccnnaatgatatatgatgtggaattcgctctcaagtgtagatagatgcn

SEQ ID NO: 279679 - DNA, 405 bp, Glycine max
  unsure (1)..(405): unsure at all n locations
agcttccctgcatgnggtcttgtacacgtaggtttctatgagttcctgtgcttcgaaagccacgtctcggatttccgacacccacatgcgaacgcggtcgttgccttcttgttttgcatctgcgtccctcagaaagctctgcatccaccccaattcgttcttcaaattctccacttgctctcttacccctgccagctgtgaaacagacaccgccgccactgctgcttgttccaccagcagccccgtcagcttggtaacgaccgttgacacagcaacctcggccatcctatgttgacttcttctcttctctgcttctcccaacaagactagagactagatcctctgcagatgggggggtttctgttccactatatcgtgtgtggtgatgagaagcttcctttaatc

SEQ ID NO: 279680 - DNA, 329 bp, Glycine max
  unsure (1)..(329): unsure at all n locations
cacacccttatacctcattgcctcgctcacgccctctcaatctcatcatcgcctgcagaaccttctctccttgcaatactctccaccttcacttcattcctcaagctacactcactgcttccgaagctcataccccgagagtattcgttgcaattgcaaacaccccacgcctctctattttcacgagctnntattactacaggatgtctgctacanaaatagtttttgctttgcggcatttgcgatcacttcagttcaatgaattaatccagagacaccttttgtttgttttttttactttgcattttcatattaccgtaggccttttg

SEQ ID NO: 279681 - DNA, 546 bp, Glycine max
  unsure (1)..(546): unsure at all n locations
agaccgtcagcttcgtatgnacttgcannaancananaananatacgnngccgagagcaatnagaggggaacgggcacgcggagacaagaccaaanctanactttacatcgtgtcacgacacggaacacaancacaggagcggagggaggggacagatgctaaaaaccacaacatgcacggaaaacccgcctcacgacgacgcgcgaaggagagacgctgggacgtcgagaaagtcgacgacagcgaaacgcgcacagaaactgaaggaaccggccccaaggacgtaactgcaacgcactgacaccgggaagcggcaggaacccggcccaacggcgaagcaggagaccggccgacaatgcgagaaacgggcacgcacaaccccagtagcacgcgaacacgcggacacaaagtgagggaggtcatgacatggagacacaggagcgcagcgccggccgcggcaccanagaagaccaaacaccagcaagggggggggacgcgacgccaaacgcggagggggaggagaaacgacgggcaaccacccagcg

SEQ ID NO: 279682 - DNA, 565 bp, Glycine max
  unsure (1)..(565): unsure at all n locations
accgaatcggcgcgtgcagcaaccgagcggnacaacactcgcgacaacnanncccaccacaaacccccccccccaggccagccagnactagacaatccaannccncnanannnnnngnnnggngggnnnngnggggnggnnnnggaggaggngagagagattttttanttatggagagnggggnaaangngagagggggggagagagtatngnnaaaaaaaaaaaannaaanggggggggaggaaagtagatggagggtatggggagaatagggggagaaaaaggggaggaanaagaagtagagagaaagaaaagtgaaggtgaagggaggtaaagggaagagaggaggatgaggaaagaggggatnntaggataaaagagagaaaataggaagggggaggggtgaggtaaggggaaggaaaatgagggagaaggaggtatataaggaggatgaaggagaaaggaggaaaaatgaaagagaaatgggaagagaggaggagaaaaaagaatattaatggggaggaaaatggagaaaaaggggagaaagaagagagagngagaagag

SEQ ID NO: 279683 - DNA, 431 bp, Glycine max
  unsure (1)..(431): unsure at all n locations
naaaagcgtaggacgttatncactcaancnaatnnaagcaccgagcggagggatacagtggacctgaacggaagcgagcaaatttcgcttacagagcaaccnccacagggcaggacgaggcgaaaggacactcaaccaaccaccccagggcaaaagcgacaaacgaacgacaaaagagtcgaaccgacgccggtgagcaagcgccaaacaagacacgaaccgcacgcgggaaggagaagccaggaaagaagccggaacggagaaccacgaggacgggaagaaaaagcgcaagaagggggacaaagggcaccgaagcagaaacacaaaacgacactgggcaacagaggaaccccaaacggaagcgcgaacacagaaaggggaggagaggcacaaacgaaaaggagggaagaaacaacgaaaaagcgagccac

SEQ ID NO: 279684 - DNA, 394 bp, Glycine max
  unsure (1)..(394): unsure at all n locations
ccgccacgcggaaaacccggaacgcgcccatacacacccccncncncaaaaggacatctacgacccccnnnaaannnnnggnannngggagggngaaaagagggttttaggggaaaaaaanaagaaagggaggagagaaaaaaaanannaaggnnggnnaaaaagaaagaaaaaaaaaagaaggnnaagnnagnagagnaaaataggaaganagnggagaaaaaaagaaaaggaagggaggaccaaagaaaggaaaaaaggaaaaagaaggagaggaaggagaagagaaaagaaaagagagaagagggaagggggaaaaaaaagaaaaagagaagaagnggatgagggtggaagaagaaagggnggggaagaaggaacagaagagagaaaagcg

SEQ ID NO: 279685 - DNA, 498 bp, Glycine max
  unsure (1)..(498): unsure at all n locations
ttttaaaaagggcttannganngcatgncaatnnnaatnggacgagnggatanagtagagctgaccgcgcagccagccaagcatttatcntttttctagggcaggctnnctagagcgaatgagctgaactgtnagcaaaaactacaactctgtctacctccgacgaacaatttattgacacacgaatgggcgttataggctgaaccatacataacactaccttctgatggagggtatcatgctccttcttgcttatgagaatccgacggaacgcccaacggttctctgacgggctcagactatctggagccatcagtacatggtgcgacatacactgcataggctcgacaanaatgagagcactgtcgaagatgattaacaactcaaaagacaggtaagcacaaccagatactcctaagatgcaatacataggggataagaaatgctgcacaccaacaaatattctgaactgaacgactagcatatacccgtacccag

SEQ ID NO: 279686 - DNA, 463 bp, Glycine max
  unsure (1)..(463): unsure at all n locations
ggcgtgcatgaaacgtgncgangctgagacactataganacncagctccaactaatgagaggcattaccaaacttcgaattataacttgtccttatataacaggcagcggctggtcggcacacctaacaaacaatcttttcaacactaatggaccttgaattgacccaaggctgtaacgggattgtagggacaaaccttcataacctggggggacatacagagacgccggctgcatgtggcatatggacgtgcttctctatcaaagccatggccattgttctttgaatgcgatcatccatgtagtatggctggctcagccacgacattgtctaaatttgataaaaatgtgcttgaaggagcgttgctgcatacatatttatgaaaacgtggatagtgatatgaaagtanataaccgaccatcatatgacatctaccattcttaacattcttttggttgctttg

SEQ ID NO: 279687 - DNA, 102 bp, Glycine max
agcttcttttatacctgacggcccaggatgagatgccgggcccttcctgaaaaaatgagctggagattgcccgctgtacttctattgctgcgctgtgattct

SEQ ID NO: 279688 - DNA, 501 bp, Glycine max
  unsure (1)..(501): unsure at all n locations
nccttatgaaggttgcaagnttntctgcgacacnaanaatacgccgccctgaacttcatcaggactagagatcaatcttgcaatttgttgttttgtggcaatcgggaaatcgcatgaatgtcagaacgaggcagctaagtaccttaattgaagtatgatggctatgccattgcttatatgggtatccccattgtagctaacccgatacctatcgaggtatgggatcctatgaatatataattcgagagaaaagcctcccgatggaagcaatacacatattcttctgcggaagagtgactgttattaatgcagtcctaacaattattcctatttactatgtctctatatgtacggtacccatagcaataatagataaactggttaccatttagcaaaaatatgtatcgggcggacgagctgtacacatgaagatcatgtggcgtcaatggtatacagtggagtctaccaaatagaaatgccgccctagcgtaaatgaactcg

SEQ ID NO: 279689 - DNA, 412 bp, Glycine max
  unsure (1)..(412): unsure at all n locations
agcttcagtcgtactcctatcngcangangtgtnngggatgatgtatcctcacttcactactataatcataacattgcggattgtttttaatagaagctacgaacaacagtttccatatcgcactattatatctgatatgatatgtctattcacgaaaattgattgagagctcaaaaactagtaacatcgaataataataggtcacttaatattctttattacaacatgtgatatgtttattctaaaatataaaaaaaacactaatacttttaaattattatattatttaaatttgaacatttctttaaaataatgctagcatatcggatgagtataaaatataaattatcaactagcatgtcggaagagtataaaatataaataataatgatagtatgtatcatgagtagt

SEQ ID NO: 279690 - DNA, 418 bp, Glycine max
  unsure (1)..(418): unsure at all n locations
tctctatattattaaaactaaagatcatttgatttccagatgtagcacattgtattgtatgcattataatcaaagttntgtgatggcagacggtaaactgcaatgatgtgattattangaatgataagaatcaattttacacctgttgcactatagtttcataaaatntagtaaactgtaccaattattntcgtggaaaacatgaaatttcttganataattaacatatttttatgacatatataattgaaaataaataaatatatctaacgaatctagctagcagtgtatagtagagaattgaacctgatagctacgctgatgtgcatgtggctctatccgagttgaaaatactatcatgataaacttgtacaaaagccacaagttatccataacgggacaaacttacctcgtctat

SEQ ID NO: 279691 - DNA, 394 bp, Glycine max
  unsure (1)..(394): unsure at all n locations
agctttcttgcatggtggtcttgtacacgtaggtttctatgagttcctctgcttcgaaagccacgtctcggatttccgacacccacatgcgaacgcggtcgttgccttcttgttttgcatctgcgtccctcagaaagctctgcatccaccccaattcgttcttcatattctccacttgctctcttacccctgccagctgtgaaacagacaccgccgccactgctgcttgttccaccagcagccccgtcagcttggtaacgaccgttgacacagcaacctcggccatcctatggttgcttcttctcttctctgcttctcccaacaagactagagactagatcctctgcaaatggnggggtttctgttccaccttttcgtgtgtggtgatgagaag

SEQ ID NO: 279692 - DNA, 446 bp, Glycine max
  unsure (1)..(446): unsure at all n locations
tcaccgtccatcctctcttaccactgtacaatcttctattatatacacaaacaccaacaccgacacaatgcttcgtttccacacccttatacctcattgcctcgctcacgcnctctcaatctcatcatcgcctccagaaccttctctccttccaatactctccaccttcacttcattcctcaagctacactcactgcttccgaagctcaaccccggtgagttttcgttgcaattgcaaacaccccacgcctctctattttcacgagctttaattactacaggatgtctgctacaaaaattagtttttgctttgtgggcatttgcgattcacttcagtttcaatgaatntaatcaaaagaccacctttnntttttttttttttacttttgcattnttcaatattactgctagtcacttttgggagaccggatatgagaatggtaatg

SEQ ID NO: 279693 - DNA, 403 bp, Glycine max
  unsure (1)..(403): unsure at all n locations
agcttgnttttaatccaacctctcatggtagaagcagacacatagaaacaaggtttcactatcttagggatcaagtgaacaaagagaaactaaaagtggagtactgctgcacatttgatcaacttgctaatattttaaccaaacccctcataggggagaagtttaaaatgttaagggatagaattggcttgatgaacttaggagatcagaattaagggagggtgtganagcttaattctgtttttgagtggtgtagatttaattgtacattggatataagagagtaacagaattttaaaattctgttataagtgcctagcctaagtgtgaagggttgtactctgtttgcttgataaaaggacatacatgcatctaataatgaggatatcattcatcatttctc

SEQ ID NO: 279694 - DNA, 447 bp, Glycine max
ctgcattgtgcagagtttataaaaagcttggctgcattgcacattaattaaagttagtcttaaaagctactaatgaaaaatacaagtccatggttgatgaagcatgacatgagacagcttcatggcaaagtgaaagctaagtgtgctgtttgttgtccaaacagacagcttcatgacatgagacagcttcaagaaaaaataactagtctacttcccactcagttctactactagtcaacacttactttgtttgctgtccaaattcttaggtgattaaaataataattaccatcttgtagaatgttatgttaataataaatactaattggactgcaatattagagttggacaaatacctcaatgaactttcgaaaaccatggcctagaggagattcatgatacaaatcatgaatgcacccgatagaaagcatcaatattcggaaaatg

SEQ ID NO: 279695 - DNA, 414 bp, Glycine max
agcttcttttatgtggtagggcgggcttccttcaccttcttgtctcaactgcgagctttgactaccgctcttccttcccgcgatgcttctttttatatctgcctgagtggggttatagcctaacccatacttcccacgatttcctttggcatttatcaggctagttatgtcgccattgtctttgcctaaacccattccgggttcgtaaccgttccccaacataacttgggccatcattactgctgcatcggacaggcaaggctgcccagagaaggagtccacggaggaaatgcttaccacctcaaaagactggaaagcggtttctaatgactcctctgcggcctccacataaggcatagaggatgggcagctcaccaagatgtcttcctcgcctgatacaatgaccagatgccc

SEQ ID NO: 279696 - DNA, 403 bp, Glycine max
ctcctttcccttattatttgatatttttagtccaaaaaagagcaaacaatctaatcaaagagcaaacaatctaatcactttgctctcacttgaattgatgctacatttaaccttcttacaaactgatgaaaattattatcaaggttgagatagaaattccccgatccttattatatgatggtgtaagtgagccaagtctcacataggtgtcgaactgtcgatgaatcctaacttacccatttaatattatacatactctctcaccacactcaatgcatatattcttatctacatctttagacagtaaacactctaagaacctaccatattaaaaaaaaaacaatagtaattgcacagtttaatcaaaacaataaatatactcacaataaacaacagttgacat

SEQ ID NO: 279697 - DNA, 400 bp, Glycine max
  unsure (1)..(400): unsure at all n locations
atcttcgttatatattacgggactcaatcggacatccgaagtaaaagttattgccgttggacttttcttagagcttccgttntcaattttgaccgtctcgatatcctacgggacacaattggacatccgagtgaaatgttattgtcattagaatatgctgagagcttcaattttcaattacgagcatcttcatatattacgggactcaatcggacatccgagttaaaagttattgtcgttagacttttcttacagcttccgctttcaattttcgagcgtctcgatatattacagggctcaataagacatccgagttaaaagttatagtcgatagacttttcttagagcttccgttttcaattacgagcgtctcgatatattacagggctcgatcagacat

SEQ ID NO: 279698 - DNA, 241 bp, Glycine max
  unsure (1)..(241): unsure at all n locations
cctaaatactgagcggaatgacccccantttgctactacttttttagcctgtttagagctataaggacttaaaagcacaatcttactcatgtatgctgaatataacttatgacaacttaaaacacactcttactgatgcaggccttattaactgatgacgacctaaagacaatcttatcatgcatggcgtgataactataacgactaaacacactctgctagcaggcgagataactgtgaa

SEQ ID NO: 279699 - DNA, 414 bp, Glycine max
  unsure (1)..(414): unsure at all n locations
atcttacttggagcatgcatagcgaacacttgctggttcaccctttctcatgacttctcagggatacaaggactgagacaatgcacgcngtctgctatcgtatggccccatctgctatcgctcatcactaatgctgctatccctatgacatactctgcccgattgtgtaccattccattcggaaggcgaatgacgatgatgtggagaacgccaaggcatataaagtccttgcggaaatagacattgcgagccatcttgaccatcgcgccgatgactacgagcctgatagttcgctgtgtcggctagtgtatccaataacacaggtggcctacacggcaagaccgagtatatgatccacacgcaagtagtttcacctaaactatgcatattgacgtatgaaacactgatgaaccg

SEQ ID NO: 279700 - DNA, 437 bp, Glycine max
  unsure (1)..(437): unsure at all n locations
ctcgtgaaggtctagtaaggacacggcgtgctaaggttctgattcacccccgacatacgacagatagcggtttatgagcatatactacactctctcattctaagccatacatgggatggtcgaaagattgtgaatcgactcatgcatctgacgtactattagtataaccgacttcatgatgatacatggcaccggctcggggcaccgctggatgctctgctgtccactaaccatacacaggtacctctcgatttatatgcgtatgcttgcgcatcataggatggcgtgcgtgacatgagactctgngtgatgggcgcctggattctgttacacgcatacgctatgcaccaactactgtgatatctgacggcttaggaatacgggaactactgcgaataggccatatgacgaccgactgatgggaacatatgatgctn

SEQ ID NO: 279701 - DNA, 312 bp, Glycine max
atgagctggagattgctcaacgttgattctcttactgcgctgtgatctcacccatatggaaaaaattgcactgttggcgggcacatggctctctattttggctaaatacgagcgtgggttcaactaaatcaaatgatgagtggcggccgactatttggcggaaaaagaatgcaaacatctctaatcaagaacattttgatggaacgagtaggattgatgatctattatcttcacggagtggacatggctcactcaacatgattcctcgttcacgttctcttatgtgcactggtccagcaacattagcgcatg

SEQ ID NO: 279702 - DNA, 454 bp, Glycine max
  unsure (1)..(454): unsure at all n locations
cgcgagcatggacgtagacnatcgcanancncngaanattngncaanngacctgcctccnggannaangaccagtttgccaaaagtttgtttngttgcaatcggaaattcggatcattggcggaggaggcactaatacttattgtatatgtngctatgccatcctattggtatcccattgcgctaaccgaacgtaggagtttggatcctataatagaaattgagaaaaattaccagaggaacaaaaacctatcctcggggaaattctcttttatgctcctaacatattctatttactttctctttttcagggtacccatgaaaataattgataaactgggaaccatgtagcgaagatttctatggggccggnggagcggaccaaaggaagatcgcatgggtcaaatggaaacagtgtgctaccaaagataatggtggctcgcataatgactccn

SEQ ID NO: 279703 - DNA, 417 bp, Glycine max
  unsure (1)..(417): unsure at all n locations
agctnctatcattatatctcgganagcaatcaagatgtgaggcatgtcagtgttggaaaccccaatagaacggaagaactcgagtttatgcaaaagggtatactctgcatcctcaagaagcaccaaaggtcgtttcttcgcaagttttgcaacctgcattatgtcaaacccatagctgctgagcatatcaataacagcgtctgggccatctgggtttgtaaaaatgaccctgtcggagacgaccttggcttttcatggcggcaccccacatgagttgatgaggtatgacacagtataggtgtcacctttgtggcggcttccatctgattcagaatcagaagagctggctgaagtgaatgaatagaagaaaacacttgaagcagtgtgtttgagttgcgacagagaacccaatgtgat

SEQ ID NO: 279704 - DNA, 275 bp, Glycine max
tctgctttgctggtctatcaattactactttttgaagtctgcctctagtgtcaacccttcccacttgcaaggaattctttcctttcttcattcaatgctttgaattacagctcctgcacttataaaagaatagatctcttcaacaataagtctctttaatgacagtactcttagcaaaacacaactttaccaactgaccctctatcatagtgcatcaaatttcaagttagaatcattattactaaccaatgttccactgatctatctcatgcttt

SEQ ID NO: 279705 - DNA, 316 bp, Glycine max
agcttgagttgttgaagtgttgaagggtgaaacttcctgctcttattgttgaccacagagtggtacctggagatatgtcgcgggggtcaggagaccttggggacgtcatgtggggtgctattgccacaaaaccaagcttgaccaatcccgacccaacccgggcatagtcggtcagtgagaacatgtgacgtacctaagcacgcgagctcctggcagtcgacagataaaaggaaaacaagaccacatagcaatgaggcttgtggtggctggccagctgtgaatcttgtgtaatatgtggattgaggcctctggtaat

SEQ ID NO: 279706 - DNA, 358 bp, Glycine max
tggtcctgccttccggcaagcctcctttccatgtccgcctgagtggcctaataccctaaaccatacttcccacaatttccttgggtatttatcaagctagttatgccgccgttagtttttcctaaacccatcccgggttcataaccgttccccaacataactcgggccatcattaccgctgcatcggacagacaaggctgcccaaagagggagtccacggaggaaatgcttgaccacctcaaagactggaaagcagtttctgacgattcttctgcggcttccacataaggcatggaggatgggcagcttaccaagatatcttcctcgcctgacacgatgaccaagtgcccctccacta

SEQ ID NO: 279707 - DNA, 398 bp, Glycine max
  unsure (1)..(398): unsure at all n locations
agctntcatcatgttggatacttggttcacagacgaaagcaataaggttgacttcaagatggtttatgctatgaagaatgtgagaattatgaagtgtctgacttggaatggttctcacaatagggattcaaatttcccaacttgctagaagcacagggtctgtcaaagtttgtgtagatgacgggaaccttttgcccataatttgtaaaagttttctacacatgtgctaaagcagatatggaaggagacttgtactctactgtcaatggtgtacagatggtcattgatgctgaagtttggagagcagtagcaagaatagacatatgtggagtccgcaagtttgaggaatttgcagatggctacaacaaaatgtagacatatagaggtatgctccttga

SEQ ID NO: 279708 - DNA, 181 bp, Glycine max
  unsure (1)..(181): unsure at all n locations
taaatttttggcttcagcaggggtcatgtctccaaaggctctgatcgaggtcgtacgcgaatcaaataaacattaaaatgtagtaactangaagtgatcctaggtcatttcccaacgagcagtgataaaccaaaagttcataacagatagtaggaaatagtaacaaattgggggggggggg

SEQ ID NO: 279709 - DNA, 419 bp, Glycine max
  unsure (1)..(419): unsure at all n locations
agctagtataattcaccctttttccagtgtcctatgctgacttgctcccatatctacttgataattcaatggtagccataaccctagccaaggttcatcaacctccatttctccgagaatacgactcgaacgcaacgtgtgcttgtcacggagaagccccggcgcgttccattgagcatggtagggctctgaagcgtaaggtgcaaggtctaattgatgcgggctggctgaaatttgaggagaattgcgtgtaaatcctgacattgacaagagatgccacacatggggcaattttgaaagctgttgttaggtgtccctaatgactcatcanggttatccaagttatgccattattgtaaaccacagctacaatgttaaatgaaatggataaagttgatatctttgtccctcatcctctc

SEQ ID NO: 279710 - DNA, 514 bp, Glycine max
  unsure (1)..(514): unsure at all n locations
agagagggntgancnttgnanccctgtanantctcgatactanacaaaggcatccttgtgctcagaaacttatacttctcaagagtttcccaactctaacacccagnnccaacaccgaattctttttgcgtttgaatggcttgacactaacttacccacacattttactttccaattgaacgcctccactgcttcatgtaagttccttcacaatactcaacatttaccctggtgggtccttaatgctttaaacattagcaatgttagggcatanggaaacaaatcaagaagagtcaaaggattaattccatacactatctcaaatggtgaacaattagttgtgctatggacaacccaattataggcaaactcagcatgaggcaaacatgcttcccagaattaagacttttcttaaaacaggtctaagcagtgtgcctaaagtcctattgactaccctcaattgaccattagttgtgggtggcaagtagtagaaaacaaccatttagtaccaatg

SEQ ID NO: 279711 - DNA, 128 bp, Glycine max
ttaatacgactaactgttgtgctaaaaagtattgtaaatatgatgcgactgcttgcattaacagtacttattatagcattgtaagaacttgtggtcaattaaagcaataagtgcttactagcccacat

SEQ ID NO: 279712 - DNA, 379 bp, Glycine max
  unsure (1)..(379): unsure at all n locations
gaagatggactcaagttggtcaaactgaagggtgttgttatgcaggtaancaatatctggtacctggtctagtttcttgtctcacttcaacttatcttgcgaaataacttctgttctttatccaggatgccgccaatgctgctataagtgctatggttagtgtgataagactggactcagagaaagtccaacaatagtgtgatgcagccaatcacgaagttcctgaagctgagaaggttcaaattgccaattacctgtgcccagtaaggttcttgtgaatctaccatttataagcttaagcaaaatctgtttctagattatatataaccagtagcttgtttggaatgcttgtcttttgatagggaaactatgctgtctc

SEQ ID NO: 279713 - DNA, 51 bp, Glycine max
tgccttaaaaaaattacgcccagccctgccactcatcgcagtagctgttgg

SEQ ID NO: 279714 - DNA, 405 bp, Glycine max
gcttcttataagctgaaccattttatcaataaacacaagttgagttttattcagaaaattagagtttatctcttttatcttagtgagagtgattctcctaaattcttgagtgattcaagaacaccctggctgtatcaaaggactttcacaacctttgtgtgttgccctcgctggaaagagtgattctttccttcctttcatcttcacccttgttctttcaaaccacaattccagaaaatccacctctgcccagaattatctcgtggccataactcccgttttacgcactcaaattaagtgattcttgagcctaaattgaatgtcaaaacgagaactttgacctcgttttggaatcacctcatttggagccctgtagcttcagttattgccatttctatatttctg

SEQ ID NO: 279715 - DNA, 434 bp, Glycine max
  unsure (1)..(434): unsure at all n locations
ntacagcagattntagtaatgacccactaacttagaattattttaacttaatgccattaacctanggaattaaaacaaacttaatggctgagtgtaactgaaattgtggcaaccaaaagtcacccccaacagccaacaagtcagccaccaattggtctcccaaaaggctgatgcctaggttgccaattgggcccttattacaacttgaactaaacctaactaaagcccttttagttgattaacccanaacatatttgtggtcagccaactttacaaggattgggccattatttagacaaactaaacactctaaaattgagacaaagtggtgtcatttagtcctcctccatttgggccatgatacaactcacaaccttggacttttctccttgaaacttgggcttgtattcaaatagtatggacagcacttgttg

SEQ ID NO: 279716 - DNA, 413 bp, Glycine max
  unsure (1)..(413): unsure at all n locations
agcttgtatgatttgcaagatcatcgtccttgacaactccttgaaaattattgccatcaatccaaagagatgacaatttagagagtgatccaagactttcanatggatttccactgaatttattaatagagagatagagatattntaaatctatctcccttgagttgcggagatttcccagaaaagtcggaattattccgtcaagttgattatatgacaaatcaagttcaacgagagaagtcaaatttcccagggcatcagaaatagtcccatgcaagttgttgtcccctatgttgaggagcttgagacgatgaagaccgtataagcaatcaggtatagaagatgagaatgaatttccagacaagtcaagatcttgaagaagtgtgatgtttcgaataccaccaggaatggga

SEQ ID NO: 279717 - DNA, 448 bp, Glycine max
  unsure (1)..(448): unsure at all n locations
tcctaggctcattggagagtctgagatacttggaccttatcttaagtgggttcatgggattaatccctcatcaactaagaaacctctcanacctgcagcaccttaatcttggatacaattatgctcttcagatagataaccttaattggatatcaaggctatcttccttggagtaccttgatttgagtggttcagaccttcataaacaaggtaactggcttcaagtactgagtgaacttccatctctttcagaactacactnggagagctgtcaaattgataacttaggaccaccaaaaggaaaaatcaacttcacacatctccaagtccttgatctttcaattaacaatctcaatcagcaaatcccttcatggctatttaatctcagcacagctcttgtccaacttgatttacacagtaaccttttacagggagaaaatccacaaat

SEQ ID NO: 279718 - DNA, 420 bp, Glycine max
  unsure (1)..(420): unsure at all n locations
agcttgattgtgtgtatcccaccattttttcatagtagaacactggtaatgtgtctactatcattgttatcatttctttctccatcattgagggaaccacttgggctgccagatccctccatctttgagcgtattctttgaaagattcgtgccctctcttgcatatgctctgtagttgcatcctatccggagccatatcagaattgtaccgatactgcctaacgaaggcaaccattangtccttccaagaatggactcgggaaggttccaaattagtataccatgtgacagctgccccaataagactntcttagaagaaatgtatcagcagtttctcatcttttgcatatgcccncatcttccgacaatacatctttagatggttcttggggcaagtagtccccctgtacttgtcaaagt

SEQ ID NO: 279719 - DNA, 382 bp, Glycine max
  unsure (1)..(382): unsure at all n locations
tatctttgggtttgttagccacgctcaacaaagtactttcgacacctaatgtacgttgatttcaccaatgctgttatgggaatgttgcgacaatcctttaaaaccttattgatacattctgagaggttcgttgtcatgtggccatatcgacgtccttctctatcgtaagtcatcgtccatttttcctttgaaatgcgatcaatccatgttgctatggctggactcagttcacgaaatttttctaaattttgatcaaaaatgtgtttgcaaggagtgtaggctgcataaaattagttatgaataacaattntaagtataaatgaaagttaaataaacgtgaccatcaaatatgaaatcttacccaatttcttcaacatttctt

SEQ ID NO: 279720 - DNA, 414 bp, Glycine max
taattcttcattcaagccctattagcaaagcagtggtgaatgattcttcaacatccaaaatctctcttgttaaaagtactgaagaaaaattatgtccctaccagtgttgttaaaaagtggttatggtgacaccatggcagtatggcattgcgggttttcgaataaatgccatcaaatagcggtagtgttgtgggtttcgtatggaggccgccatagccatagaggtcgttgtcaaatggaggttatggcggaagagtgcttttttgttttttttttttaaccttcgcaacacgtcgtgttaggctgacctgacccaaccctacccaaatttcgcatgcaaaaggagacgaggagcgcaagcacaaagccacgaatagcaacaggcttactccagcgacagcaaagcttcagtgc

SEQ ID NO: 279721 - DNA, 215 bp, Glycine max
cacttatattcccaaacttattctaataacaatttccatctttattatgacattacttcttaaacttcttaaaactttcttaaacttttgagaaaactccttaaactaaccttactccaccccttatactactattcttaactcttgaatttaaaaccactactccatattttatactactactcttaataaactaactactcccccttatacta

SEQ ID NO: 279722 - DNA, 271 bp, Glycine max
  unsure (1)..(271): unsure at all n locations
agcttngtctaagcgagtntgtcacgctaagcccaaggcaatttagttttcatatttttgttgcaatttcttctctggtttagaatagggcttagcaagcctgtctcgctaagccattaatgttacagtggtcaatcctggtaagctcttactgggcgttagcttagttagtgtgtcgtgctaagcgagccatgctcgctaagcgcaattagctctctattggagaataaggcttagcgagccatgctcgcttagccattgtggtatttca

SEQ ID NO: 279723 - DNA, 316 bp, Glycine max
  unsure (1)..(316): unsure at all n locations
ggctttttcaaaaattttgtcctctggatgggcctaagggttccaacccaataaaaaatatccttgtgggtttatggaaattgctatttctctaaaataatttcaccacctttattgtggaaatccttgagagatgaggtaattttgaggcccactttgacatacaagccaattgctttgttttgcaggtttggtgttgcaatgcgtgattttcttatttnttgggcttttgtgttgtcactttgaatggttttaccattatttaaatnnaagagagagagagagagagagagaatccttctgttatttataaaat

SEQ ID NO: 279724 - DNA, 404 bp, Glycine max
agcttgtattattattttgagcaactacaaatgatcttgatgagatttcggtgtcgcaaattccgcattacttcacattctacactaaagctccttgatcccaattcaaggtccaaattaaataatttgactgcaacaaccatcctatttggaagtatacctttgaacacagagccaaaactacccttaccaagcaaattactctcatcacatccattggttgcccgtgaaagttcattgcatgaaattgtactagatgctaatacagtagatgaactgacttcagcaggatcaccaccaccatgcctttttcttcgactacttttcagaaggaacacacataaaacaaccaatatggttgacaacattacaggcaatatgcattcgatgaaaacatatgtgca

SEQ ID NO: 279725 - DNA, 178 bp, Glycine max
cacccaaaaaaaaaacaaaaaacactaaaaccctacaaaaaactccatctaccaactccccacccaaaaaaaaccatcctaaaacacctaaaaaacaaaaacaaactacaccaaccctataaaactccctataaaaaccaaactaccccacccttaactaccaccccctaaaaaaaaa

SEQ ID NO: 279726 - DNA, 381 bp, Glycine max
  unsure (1)..(381): unsure at all n locations
agcttaatatgtttgttcacaccatatnnactatactgtgatcaactgatgcaatctatttgattgaaaagataatttatattactcttctaatgtagtcgacaactaaaaaaaatataacagaaagtaatgcttaagccaatcaaatcaagtcatttcgaatctcatcattactatcatgcatctcacagagaaggagaatcacgcatcgtaatgcatagcacaacaaaacattaaaagaaaacatgccttgtaaagccaaccaacgtgagaatgtatctatatttgtgaactttntcaaaatcatcacacatatataaaaacatgggggaacaatctgaccacatgcgcaacacattccacacattatttctgaaaatg

SEQ ID NO: 279727 - DNA, 69 bp, Glycine max
tttctaccacatcttactgtgcctctatttatcaacttttccctactaccctcacttaattataattac

SEQ ID NO: 279728 - DNA, 402 bp, Glycine max
  unsure (1)..(402): unsure at all n locations
gaanccgngccaggtggcgctcacggcaacatatgctaatatcttctagagatgctatgttttcctctgcataacaccatggctgtagaggaattgtctggactggaactattgtgatcaatatcatgtcccctaacaaaacatacagtcctcatatctaaattcacctgcatgactacctattccagctttgataagagcgtttatgatacgtaaggacaatgtcgatgtgaacgtattgcatagttatctacaatcactaaagcataataataacctgctatgctcatgcctggccaatgacgcattgagtctagctgcacgcgctctgtactccttaggtgggcaccatgcttttaactctaaagagacgccaatttctttacgacttcgagcgtggcg

SEQ ID NO: 279729 - DNA, 199 bp, Glycine max
  unsure (1)..(199): unsure at all n locations
agatgtccaaatcttgatgccatattctgacttcatcttctntggaagatagacatgtggaggagtaactgggtcttgaggtgccatagcagcaggtgtctttgactgctgccttattaaacttactctttcatttgtaccaacatgctgacttggaagtgacattgaaccttctcacaacactgactgagctgatcag

SEQ ID NO: 279730 - DNA, 422 bp, Glycine max
  unsure (1)..(422): unsure at all n locations
agcttgtgtacttgttgattaacccaactgaaaccacttggcaaaggcatgtccaccatatgcttcacaatttttcctttgctcaaaagtagtaattgacatcaaatgctggaaattntgaatatatgaaaatcttaagttttaccacatcaaactctcgggcaatcaatgatgttcatgcaaattatggtttccgcaaccacacactccaatattccaaatggacacaaccatgtcacgcaatggtttccttgagaaacaccaattggtgttttgattatgacttcattgactatgtacgaaatttcttttggccagccattattggccttcaaaaataggtcttatntgatttattacaacacatcaaggttgacatatggttttagcccccctcccacttaatatagaagttaaatact

SEQ ID NO: 279731 - DNA, 320 bp, Glycine max
  unsure (1)..(320): unsure at all n locations
catttggaacaagtcgtgcccacttccaccaaaatattcttatncttattattattattaaaagaaaatttcacactcttccttcataagccaccactcccatttatatacatctatcctaaagccatatacaattttcctcaatacatatatatacactcgttcatatataattctctctgatcttattatttcctttcaagtctcttaatttctctatatttcaaaaactcaaacccttaaatgaacgacttgttctccggctccttctcccgcaccaatgaccaagtctcgccggaccaccaccatgtgatcgagat

SEQ ID NO: 279732 - DNA, 403 bp, Glycine max
aggcgagtgaacatctttcatatgattttgactgacaattatcgttctcatgttcttatgaataatggcttaacgaagcctagtctcagctaagccaataattgcacagtggtcaatcctggtaagctattactgccgtcaagcgcgtatactgtgtcgtgctaagcgagccatgctcgctaaacactattagctctctattgtagaataaggcttaacgagccacgctcacttaagcactgtggaatgtcagataatacaatgtgacgtcattagccacacactatgactttcgtagacaagctaaatacatactgtattatttttaaagcacgcacaccaatgccgcattacttccagccaaagtccttgtggcaatatgtctcctgtactagccaacaaa

SEQ ID NO: 279733 - DNA, 481 bp, Glycine max
  unsure (1)..(481): unsure at all n locations
gcttagggaacttgangctgcccttaaatacgcccgngacgaacnggggccttataaggagaagcttngttaagtatatccgctcaccgaagggcgctgggacgcctaaagccnataaaaaacaccactgctggggttggaatgaaactacacccctttaacaccatatatgatcatcctcgacggttctgtggcatttcgccataaggatgtcatttctatgcccagctctgcacacttaccccttgacatgcgatgcaaacatggtgcggtggcgcgacgtagtctcccaaaattgtgcttactgggatcccactggaattggcaggacaattgcttcatataaatagagagagaaagagagagagagatatcagtcatgtatattatagagattcacggattatcttcatattctaaatgcccaagccaagcgtagtggctgtatgatagacattttgagaaggctagcgaacttctg

SEQ ID NO: 279734 - DNA, 321 bp, Glycine max
  unsure (1)..(321): unsure at all n locations
agcttgaattcatgtaatccactatcttctcatagtagaactttcgcaacttatcctttgacgggagggtgaggcgaaataaaaaggagcgtcttccaaaaaggaaaatgcgtgggagtcgccaccaatgtttatccaacgaaaacgttaaaaacaccaaaaacgggtttgcggatttcgaacataacggttcaggagcngtttacacatggggaaggtattagcaccctgcgtgcccatcacatgggactacaacctataatggagtgtgcaaagacatgacttctatattatccattatgcctttatatttactatttt

SEQ ID NO: 279735 - DNA, 464 bp, Glycine max
  unsure (1)..(464): unsure at all n locations
cccaattcgtgtaaagccccntntctcgaacgtnatcgnnanaacccacnanacaagccanattnccttttagnttcactggngaaccaancatgcagtctctcataatgatcattgataatcaccccccaaatcttaaaatacatttaaaagaccccanaacaaggactactttatnaaaacaaanngaacactcaaatanttngattttttgatgcaaattgngcaggatcacccattgataagcgttccacttcaagatattgtgtgtcttttggaggaaatcttttctcacggaagagtaagaaacaaaatgttgtttcaaggtctattgcacaagctgaatatanagctatagttgtaaccacatgtgagctcattttgataaacatcttcacaattaagtttgaaatctcaacaattaactatgttgtatatcangnccctactatactctaattatg

SEQ ID NO: 279736 - DNA, 411 bp, Glycine max
agctttcttggggctatttcctgcgaaaacaaacatttggaagttagttttacaagatgatgcttattttaccacaaaaatgacatgctaatccctttggtttagaacaaactcatgtaatctatttatgcacacgcgcatgtgtagaaaatatcctactatttatgtcaacatacaaggacacccaacacattctaattgccatacatctatgtgcatctagaaaagagcacacattctcatgctcaatgcgttgcgtcaaactttacacctaattatatcctaaatatttgctatttacaaactacttacacatatttgaaatatatatcatacaaattgtattgtttcactcacatttatttatatgcatattggaatgtgtcataccctaatttcgtccggggacct

SEQ ID NO: 279737 - DNA, 322 bp, Glycine max
  unsure (1)..(322): unsure at all n locations
tatccacaaaaattgcttgaatccgttcaaaggtccatctccttaatggtctctntcacttttggcggttaaaatgaacatttgagaagtctaactgtgtaatcgattactagaaacctgtaatcgattaccagtgaaaaatttcagaaaaagatttttgaaaagacacatctcttcaaatcattttgaanaggaacgaagggcctatatatatgtgtntgttttcanaatgcaagagagagatattccaagagaaattcattgtcaaatgctctctcaacaactcttgggcaaacacttgcaaatctattgagagttcatc

SEQ ID NO: 279738 - DNA, 324 bp, Glycine max
agtttctttcacatgataataataccattccagagttgctatgtgcccactaatttaattacattgaattagagctagacttacacactaatattacttcaatcagtacaacatccattaaccaaggcccaattttgtaggtgtataacaatgccaattatgtacagaagtcaagtaattaaattccctgtacataacggcattcatgagtgacatgaggctcgtttgtgtgatattgtctttgaaaattattatatcttttgttcatctgttttccattatatatgattgctccatttttggctgcctagctggctagctttt

SEQ ID NO: 279739 - DNA, 369 bp, Glycine max
cctgtccgatgcagcaataatgatggcccgagttaagttggggaacggctacgaacccggaatggggttatgcaaagacaacggcggcataactagcctgataaatgccaaaggagatcatgggaagtatggtttaggctataagcccactcaagcggatatgaatagaagcaccgcgggaaggaaaagcagcggccaaagctcgcagttgagacaagaaagtgaaggaagcccaccctgccacataagcagaagctctataagcacatgattgggagacgaatgtcaagtggtcgcgatatacgaagatgatgttccgagtacataggattaggcacgaccatgcccccctgatctccagctgggaaa

SEQ ID NO: 279740 - DNA, 400 bp, Glycine max
  unsure (1)..(400): unsure at all n locations
agtcttatttgtgttttgtaatacaaanggnaccgctgggattgagctctataaagaataaagttaggaccaatcgaaaatatgcatgactgagatcacattgcatataatatacatgtagcttatgcatatcgacctatgtcattcagattctgttgcgtctgtttgatcaatcattatggattcaggtattcctaacactctacttgataatctaacgtagtcgcgtccctgtagggcattggattccataaagatctcctgagattctaacataaagacgttatagcctctctataaattaaatatttgctcaaccaaatgattgaatgaaccttcgtaattaaaaccacattacaatacgcttcagcacaccaggcgagatagcttgctttgatgg

SEQ ID NO: 279741 - DNA, 94 bp, Glycine max
tgaaccccccataattatccggcctctattttttgaatactgccagtctaccgtctcctaccttgtgaactacatatatataaatatataattc

SEQ ID NO: 279742 - DNA, 408 bp, Glycine max
atctatattatgctcgagtcattcatccctatgagatgttgttgaagtattggcgatcagaattgccattccttggattataaggttgaaccaagctcatgcttttacaaaaaggttcatcaagtcaagttgaaatatggaagtaaccatcttgcaaaattggggcaaaagatgaatcgagtcacatcactgcttcgtctactgccaaacatatttaggattgttgatgtccttgttacttctagtttcaccttgacaaagatgtcatggaccatgttgaaaatctaaattgattcaaccccatatcctgcgtaaaaattcgcaatacttcaactgtacatcattcgcatgcatccatgcttttctttggttgcattgctcattgcattctttccttgaaaataaaat

SEQ ID NO: 279743 - DNA, 500 bp, Glycine max
  unsure (1)..(500): unsure at all n locations
nggcttaggacccgtttgcancnancnncttangnataaccacccacgcgagaaagagggacattatgaaccggaccattttattanattgtgacangacacacacaacgtgggagatgtgtagatgtaaattccacactccaccaccnntttngtacacaaaccgactaatagctggaagggcttatgtactatctacggcccacaagatacacgtgtcatgctacgtggcacattcagacacacgtcaaccctccatgtcatacctaccacaagagcacgaacgtctaacccttaatagctgagctctcaatcgacaggatatatctaaaatgccattattcgaaaatatagtcgttcctttaactcctggcaggtatcgaattatcctaaagttacacatgattactcatgcacaatcatatggaacaatattagtaaactaggtcctatgacctgtacaatatatagaaacttttttatctactgcctatctcttg

SEQ ID NO: 279744 - DNA, 294 bp, Glycine max
tagtttgattcacgcagagactaatttcgtcttctgcgaccttcgtcaatcgcggccgacaagcccgttgacacatggagatttacgtcatcttccgcgctcacaagatctgtcatactgacttttgagtcacgctgacgggcgtaaatacctgagtggtgattcgtataaactttttgctgtctgtaagacgaaaagcctgataacacgcagagactaacgtcgtcttctgcgaccttcgtcagatcgcggccgacaagccggtgacacatggagatttacggtgtctttcgg

SEQ ID NO: 279745 - DNA, 292 bp, Glycine max
  unsure (1)..(292): unsure at all n locations
cttacgtcttacttaatgcanaaagnttatactgttaacctttcgggtatttccgctcgtcagcgtgactcagaagtcagtatgacacatcttgtgagcgcggaagatgacgtacatctccacgtgtcaacgggcttgtctgccgcgattgacgaatgtcgcacaagacgacgttagtctctgcgtgttatcacgcttgtcctcttacagaatgcaaaaagtctatacggataaccactcgggtatttccgcccgtcatcgtgactcgcaagttagtatgacagatcttttg

SEQ ID NO: 279746 - DNA, 393 bp, Glycine max
  unsure (1)..(393): unsure at all n locations
agctntcttctctgccagttaacaaggtatgagctctaccttagtttgttgctcttcttattaagttcttaatcagtgcggtggcattgtccgaaggttcttatcanattattgggtcattttgtccacttggctaaccatataaaagtatcaataagaattgtaaagtggggtttcattttgttgtggcagttgattgtgctttacgtggttttcaagcttgacgagagttacacgccgagcaaagtttccatccttgccggtgatggttttcacaacttgaaggtaaatttttattttattggtttgggtttgattgggatgattatgcttgccggtgatgcttaattattttattggtttgggtttgattgggatgattatttgggaaca

SEQ ID NO: 279747 - DNA, 440 bp, Glycine max
  unsure (1)..(440): unsure at all n locations
atatatattgtgctttgattaccgtgccaacatgtttgtttggtttaaactaatgtgccagcattatgtttgataggtaccctaaacccaattcattngatgtttctttnttatatgtatgttctctgacgacaaggtgacaatgtgcctttatanttttgttaaaaaatttattggtccagggtgttcttctgtgggatatggagcaacacaagaccttgacccatttttagcggacactgatggcaggggccttanattcaataacttttcctggaacaaaggtatgaaacgtgagatctangaccacaaacatatgtacatactaaaatntgttggcacagtcacctaattactactttctagtttctactttccatgttaacaatattataaaattatgttcaaccacacacactagttcttcgttatttgtccta

SEQ ID NO: 279748 - DNA, 362 bp, Glycine max
agcttgatttgttgaagtgttgaagggtgaaacttcctgcttttattgttgaccacagagtggtacctggagatatgtcgcgggggtcaggagaccttggggacgtcaggtggggtgctattgcccaaaaccaagcttgaccaatcccgacccaacccgggcatagtcggtcagtgagaacctgtgatgtacctaagcaggcgagctcctggcagtcaacagataaaaggaacaaagaccacaaagcaaggaggcttgtggtggctggccagctgtgaaacttgattgatatgtgagatatggtctctggtaatcgattaccaagggtgggtaatcgattacaaggcttaaaagtgaagaca

SEQ ID NO: 279749 - DNA, 366 bp, Glycine max
  unsure (1)..(366): unsure at all n locations
ttccccttccttttgcctagtcgatcactcacttaatcctccattttctccccctttgtttttgagtttaagcttcacttgaaattaagttatttaattatacgagttcttgatntaatccctatnntctctccccttttggcatcaacaaaaagccaaagtgtgtaagaaatataaaaccatatataaatgactaatcatacaagagaatagaaaacaatcaaacaagataacttaaccattcatcanactagaaagataatacttcatagaatgtcatataatccagaaagtcatccataataaccaaatanaactacttatgcagaaagggaaaaatactagtagtgtttttttaacaacata

SEQ ID NO: 279750 - DNA, 236 bp, Glycine max
agctaccgtctgttcatttgctccaagcttgcgcatggaagggcaaatgtctgtatggaggtcagcacacgagcacataccacagacccttgcaacaggtacagattactggctcaaggccagctgggttaccaaattaaccaatacatccaatgcgcctatcaaactctttagtgtcagatgatgtagctgactctggatctacctcatgcactcctgtaatgactatagcatca

SEQ ID NO: 279751 - DNA, 532 bp, Glycine max
  unsure (1)..(532): unsure at all n locations
agccgatccctatccgtangcanntctancccanttagactaaccctcggngcaccacccctaaggggtatgcttcttcaaaccttctagtttatttgaaagtncgacacaatgcttatgacgggagtatcttgttaattcaacattctggcaaagaactatttgntaagcattcatttgtaggtggtggagctcttggcattcttgtaactacaatcaacgggagtattctattaaattgaaaatctgctgataattgacaagttctgaaacggatacttcactggtcaaatatctggccaccccttagagtggccccctccaacatggaccaaattaatctgttaattcgaaatactggctttcttcaatggtgggtagtagggtgtgttgctgcctttatgatagaggcgtctattactacgtcactattacccttggccgcttcctccagggaagggagcggtagcgtcacccttggttgttatcatcacacatcctaatgcttcaagagaactaatccctgtactcc

SEQ ID NO: 279752 - DNA, 309 bp, Glycine max
  unsure (1)..(309): unsure at all n locations
agcanacttanttattgtttgctggcgaacgggacggaacgggcatgattcacattctcccccattcttatgatgacgatcattatcaagtgaattcgttcctacgtcatcaaaacctacatgtgtcacattctgcccctgcttgatgatggcaaccatctgtaagtcaggagtaaagaaaatatctatctgatgagctcattgcccctggacttcgggatgattgcttatgtgagacagtggaagatagcatatatttcatatataagacggagggcataaaccctcacaaggaaatctgtgactatc

SEQ ID NO: 279753 - DNA, 266 bp, Glycine max
  unsure (1)..(266): unsure at all n locations
aaattaaaacctatttttcaagcaaaaattttgtttccatctcaagaccatttgaactattacatattgatntgtttgcttcaactagaacaacctttatcactagaaggacataacgtctagtagttgtggacaactactcaagatggacataggttatggtccttgctcaaagaatgagtcctttgaagtcttctttaaattctgtaaaaaggattctatatgaaaaaggagtatgcattacttcaatcagaagtgatcatagt

SEQ ID NO: 279754 - DNA, 403 bp, Glycine max
  unsure (1)..(403): unsure at all n locations
agctagattccgtgtgtcttctccactattctaatgacaatgaaagatggccaaattgagcataaggatgcacaagctaaagttgagtatgtgaaaagattgcatgagcaagtgaaggctcacattgcagagaacaatgatagctatgccaagcaagccaacaagaacaagaagaaagtggtacttgaaccaagtgattgggtttgggtacacatgaagaaggagacgttctctaaacaaaggaagtccaaacttcaacctacaagagatggacttttccaagtactagtgaggatcaatgacaatgcttacaagaacgatattcaaggtgagtatggaggtgatttcttcaattaatgttgctgacttgagtccattctntgcaggtggtgattctgaagat

SEQ ID NO: 279755 - DNA, 346 bp, Glycine max
  unsure (1)..(346): unsure at all n locations
aaaggatggaaaacgaagaaaagtgaagttgaggcactgccgaatcgcacctgaggatcattccctacatcacttctcttgctagccttgtaccctatgcaacaaccagttagttcttcttcctttcttttctttcttaatagtcgaatgtaatccatgtacccttatgggtcctctctgatattatgtatgtattcaccttctcccctttatcgttggtaatttcattttatttgtaaggtttaattctagccgaccaccagtgtcgtgaaatcgtttcttttcttttggagactagaactagtaacaaanaaaatgaatcaattcatacctaactctcttatca

SEQ ID NO: 279756 - DNA, 333 bp, Glycine max
  unsure (1)..(333): unsure at all n locations
agctntgtttcatttatggagaggttaatgaaacaacgagatgatgcgctccatgagaggttggatcaaatggagaatagagatcataatgaagacaaaaggaggacaagagggaatgatggtgttcctagacaaaaccgaattgatggtattaaactcaacattcctccatttaaaggaaagaatgatccggaggcctacttggagtgggagatgaaaatagagcatgttttctcatgccacatctatgatgaggaccacaaggtgaagcttgccgccacggagttttccgactatgctcttgtgtggtggaacaagctacaaaatgagaga

SEQ ID NO: 279757 - DNA, 382 bp, Glycine max
  unsure (1)..(382): unsure at all n locations
ggagtagcattgcagatgtcgaaattgaacaacacggagaaacaagggacttttgaatccaagttttttaccgctcacaatcaaacggggatttgacacggaactcctccaatcaaacggcttacgttgatcaatgttgatcagccatgatttcgaacctcaaattgacaaagatctctcgaaatcaatggtatacttttctcgatgttgattagtgcatatatattagacctggaattgacatgaacttcacaaatcaaacgcatactttactcaatgttgacacccatattatcgaaccacaaatgataagaagcttcagaatctatgcataatttactcaatgcgatacgtcaaataatgaacctgaatgaccgaactn

SEQ ID NO: 279758 - DNA, 476 bp, Glycine max
  unsure (1)..(476): unsure at all n locations
agaatttatttcttttgcacttgcaaatcaatcaagctccggcgatgcgatctatgatcgcctgctgcatgcagcttgatggttaagacagagcgaaccacgtgcgcgtgtcgcaaccgcagaccgggccctatgaaacagcccgccgaccaagacacgngaacgacaacacgccggggcgcctnccaccatgccaaacgtgacaaatccattgacctacccatgcatagatcgagttggaaaatgatgtcgcagtaatactgcgccaatcagacatgtatcttccgactgaatgatctgacatcacgattcactggagcgcgcatgtggtcacacaaatcaaaagttgaggtacttgcgatatacggaggatgtacccggcttaccgatgggtgaaaatcttatcacggcttacaagtaactatgtgcgcagaaacatctctggaacaggtccttggagagaatcataactactt

SEQ ID NO: 279759 - DNA, 281 bp, Glycine max
cttgagaagctagagctaagctacacaccccccttatgatctaagcttacttccttgagaagctggcttgagaaacatcctagagaagctttcttgagaagcttcttgagaagattcttagagaagctacaacttatctacacacccctctaatagctaatctcacctccttgagatgagaaactagaacttagctacacacaccccctgatataggtaggttcacccccatgccaaagtacatgaatatacaaaaaataagttcttactgcacagactac

SEQ ID NO: 279760 - DNA, 310 bp, Glycine max
agctttgtttgatttttctaagctcccattgtgcaggttaatgtacttcctacaggtaactgcactcccccttaattctttggctctccattgatgtgttttaatgccttaggtgttcaatttttgccaatttcatgagacaatgtatgcttgaatttatgcttgattgtctgaatatgaaggttgcgcgggatggccttaagcctaatgtgggttctgaaatggttgggcacatcacattacccccatcacctttatttcctcatacctaatgtgcgcccaccaagtgctcggagaaatgcctcaatgg

SEQ ID NO: 279761 - DNA, 389 bp, Glycine max
  unsure (1)..(389): unsure at all n locations
cgctatgctgcanacatttacaatagacctcctcaacctcagttgcaatatcaatcacagcagaacaatnatgacctctccagcaacagataccaatcccgatggaggaatcaccctaatctcagatggtctagcnctcaacaacaacaacaacagcctgctccttccttccaaaatgctgctggcccaagcagaccatacattcgttcaccaatccaacaacagcaacagccccagaaacaacannacagtaaagctcctccgtaaccttccctcgaagaacttttgangcaaatgactatgcanaacatgcagtntcaaaaagagaccagagcctccattcagagcttnaactaatagatgggggacattgctacacagttaaatca

SEQ ID NO: 279762 - DNA, 418 bp, Glycine max
atcttgttattggttgagaaatgagcggaacactactgggaaggtaacgagcatctattatacttggatgagtgtacatgtcatcatgttaatgttcataagattgttaaaacaagtatttcttatacaggcaactgcaagtattcaaccacaactatggcaaccttctagtggaatactgatgactaatgatataagtgatactaacccagaagatgctgtgtcatgtgttgcactgtcaaagaatgattcatatgttatgtctgcttcagggggaaaaatctctctattcaatatgatgacatttaaggtatgtggctttcattctggatgttcttatattctaataatgtaagacattattacgtaggtcatgtagctaattctttatatagaaagaatctatgtactggttatt

SEQ ID NO: 279763 - DNA, 440 bp, Glycine max
  unsure (1)..(440): unsure at all n locations
ttagcactcttcttttgttagtcaaactttattgtttnaatctctcctcatctaaatcaaccaactcatctgacatcattttccaataatggtcgattggaatgtccatttgtttttgtaccctggctgattgcaaatgtatttcgaccggaagtacagcatcatgcccataagtcagtcgaaatggggtagtattagttgattccttangagaatttctacatgcccatagaacttgatctaacgtnttattccaatttcttggcttttgggcaatgtgttctttaatcaagttaattacaatcttattggctgcttcaacttgaccatttgcttgcgcgtaatatggtgttgaggttaataatcgaaagccaatattttgggcaaattcttgcatttttcgtccaataaaaactgaaccttgatcagtggtaattgtt

SEQ ID NO: 279764 - DNA, 419 bp, Glycine max
  unsure (1)..(419): unsure at all n locations
agcttgatatgatgttaagcttgtttccttggcgggtaatgtgtctgctgaaattccagatgatgacattctggaatctcttaagactttgtctgttgaggagcagaggaagagtcctgaacaggccaccatgatggagatagatggtaagccaatgcctaaagtagttgtgcttgaatttttactacctcactctacaattgaggtaaaaagagttgagcttgatgaacttaaaaggatatagtctacaacagagcatggacctacacttatgtctctgtatgttgctaaaagataagtagagtttcaaactggcattgttactgaagatatggagcttgaggatattccaagttatgaagaggctatgctntaatttgacattgaagcatctctcaatgttcacggcgatgatatgg

SEQ ID NO: 279765 - DNA, 430 bp, Glycine max
aatgaatataagacacatcttcttcaatcttggtgattcttgactccatctaatggaagtgcatgtccacttgtaattccaaagtgtcaaacctttcaccaacaaaggtttgaagaccatcacacctgtccaaaatctttgaaagaagagatgaatcttctccatcatgtccttcttcaccaatatgtcgagcaccctttttcaaccaagagccatcatgctctttttgataaccaaaggatgcaatgactgaagcgcctataaggaaagatctcttgagtggaacatatggttcagaatcaagagggatgttaaagtgttgaaggaaaagagtgactagatgaggatatggcaaaggagcattcaatcgcaatgccttatgcctgcgatatctaacaagaagtgcccaatcaatttgtagacctttatg

SEQ ID NO: 279766 - DNA, 465 bp, Glycine max
  unsure (1)..(465): unsure at all n locations
ngggggtgagccatgatatcttggcaatncatccagcccgggcgtgggatcagtagagtgaccggtgcgctgcaagttatttctcttttctgtcgagggccggactcgcgtggcactgcagaacgcgatcaccacgaatgtagatgaaagacaaagacatttctctctggaacatgacattgcatggaccacagataagagaatactagtagcactattgacttgtaccgatcgagttagcactcacattattaatcctggaggacattcggcatgaattatcaatcaccactgcaaattcctcgtacacttctgataagagtgtctacataggaataacgagcgagtgcgtgcatatatagattgagattaaattaaagctgaaaaaaaaacatattctattaaaacaattcatatctatgtgcatagtaatacttcttctcaattagatagatatctataaca

SEQ ID NO: 279767 - DNA, 341 bp, Glycine max
  unsure (1)..(341): unsure at all n locations
gagacagtagaggagattttagtattcgtgtttcatagtggtatactataatcgcacatatatctataagattgatgatgggtagcacttcatcaagtgacacctctattcttacacacgaggaagttcacagtccaagtaaccatttggtattcccaatgagaataagttgaaaatatcagcatccaatgtagagagctcatctgaagaactccggaaatcttccatgggtgcaagagctacaagatctgcaagagtatgaagttcactaggtgctttcagagacaatggttaaattanggattntaacttctgtatttcaattntggtttctatatcac

SEQ ID NO: 279768 - DNA, 160 bp, Glycine max
  unsure (1)..(160): unsure at all n locations
ttgcttggccatacaataagtctcacgttcgactgctcataatcatatcattgccattcatgcgcttatatattgtaattctagcgtagcagactaactcttaaatgtacacaacaccaacataaaagatatctcccaacaatgacgtccattgcttacn

SEQ ID NO: 279769 - DNA, 417 bp, Glycine max
  unsure (1)..(417): unsure at all n locations
ttattctnctttaacatanggaancnncgatnaagtncaagaagacttatgttaactactagtataatgtagcacatgatcaaataattaattagcggcatatataattaatatgcacgctgctgccttcatcaatttaacagcaaaacattatttagaggttaccggtgtggcagtttcttaataaagtgtatatttacaacatgcaaatcaaacatgtatattttcaatgtacgtggcatttaaaatgcaatagaatccattcaagaaaggtacaatagcagagaagtgaaatagctatatatctttagatccaaattcaagaatgtgatatctgtactcgggtcatgtgtaagagaaaaatccagaagcgactccagtcagattcccaagaacaccacgtggtgcctccatatt

SEQ ID NO: 279770 - DNA, 440 bp, Glycine max
  unsure (1)..(440): unsure at all n locations
tatcactccccctcattacacaacttttccctttccttcttaagctnatttnggttgctgatgaagtacaaaacacgtttcattgatctgagaagaagtaatgttcaaagggaacagcagagccaatagagtttgcttttcttcattgttatgctgcaacttgcaatgtaatgcactccttagtaaaactagtgtgttaacatttgtcaatagttcatcataatcataacaatggagctaaaaaatgagaagctagtctggtaaattcactgccatgtatagtccctttatatttttcttcatctttttcattcagtttattccgatcacaattttactcagatntggaaatggttntgaaaactcacaggttctccaatgatgganaacacactcttgaacctctttgggagaagatagacgctcacaaacaccatgag

SEQ ID NO: 279771 - DNA, 417 bp, Glycine max
  unsure (1)..(417): unsure at all n locations
agcttagcttcattagatcttattaatgtctcgtcttgagataactgagaaacaaaatgatgtgtattgctagggactaccttgaacctgatagccagcctttttcctaatacatgatcaagagttntaggtatatctgttggatcaaagactccttcctatgtaattgcgaatatgacaccattaacatagcactacaattatgtgtaccacaggaatattctcacattatggcaaatataatatgcttcacctcatcaataattctctatttaatatcaattgcagtctcatctatcaaagcataacattcccaatcccaaagtataaaaatggcagattcacgtggctgagtcactctgacatctacacganacctatgacaaaatntcttttattaacaactatacacaatga

SEQ ID NO: 279772 - DNA, 255 bp, Glycine max
  unsure (1)..(255): unsure at all n locations
ttttgacctaacttctttggtcttttgttcaaaagataaaggcaaaatatgaacatttctacanacacactantggacactaattaatgtcaaaatattttgtttgatgctgcttaattacaatgtnttgcaactnttcacgtgcccctgctgagatggaagagatacccattggttgcagcaatgtgcatggtttctacatgggcatttgcattgccaatttcattttttcatcacatgcangttctattctat

SEQ ID NO: 279773 - DNA, 406 bp, Glycine max
agctttcttgaaattcaaatggtctaaacttttaacacggaggtccgattcgggcgcataatttatcgagacactcgaaattgaacaatgcaagctctcgagaaattcaaatggtcataacttttcaatcggaagtccgattcaggcgcataatatatcgagacactcgaaattgaacaacggaagctctcgagaatttcaaatggtcataacttttcactcggaggtccgattcaggcgcataatatatcgagacgctcgaaattgaacaactcaagctctcgagaaattcaaatggtcataacttttcacacggaggtcagattcaagcgcataatatatcgagacactcgaaattgaacaatgcgagctctcgagagattcacatggtcataacgtttcaatc

SEQ ID NO: 279774 - DNA, 448 bp, Glycine max
  unsure (1)..(448): unsure at all n locations
gcctgtttagtcttattntctggacacaaganacncaccgggtccaagtgactggaagataagactncaacttggttgcttttattgccatcctaaccggcggcgggttctattaatttctggggaagtctgtcattgcatgcacattctggtttcgcaggactgaacatttggcttcttcctcctaatgaagagcattatgctatcagccattggacgattctgcgcgctgccgctgggttcctgtcaatgagcatgcttggagatgcatctctgcttgccacctctttgcttgtgtgagatcttggcttcgtttttgagatacagcgcacttgtttttcttggtcatttttgatagctccgatgtggcgtctaagctgaggtgatatgaaatgacatctgctcttgagttgaaatgtggttttgtcttatgccggaatatcatgcg

SEQ ID NO: 279775 - DNA, 131 bp, Glycine max
  unsure (1)..(131): unsure at all n locations
agaaaaaaaaaaggaaaaaaagaaaagaagggaaggaaagaaaaaaagaaagagaaaaaggaaaagggaaaaaagaaaagagagaagaagagaagaaaagganagaaagaagggagaaaagaaaaaagaaa

SEQ ID NO: 279776 - DNA, 369 bp, Glycine max
agcttgccttgttatgagtccacggacgaaatgcttaccacctcaaaagactggaaagcggtttctaatgactcctctgcggcctccacataaggcatagaggatgggcagctcaccaagatgtcttcctcgcctgatacgatgaccagatgcccttccactatgaatttcaacttttggtggagtgtagagggaacaactcccattgagtggatccatggccgccccaacagacagctgtaggggggggttaatatccattatttggaaggtaacttgacaggtgtgagggcctatctgtaccaggagatcgatctgccccctaacctctcggcgggtgccgtctaacgcacgaaccaccattgaact

SEQ ID NO: 279777 - DNA, 249 bp, Glycine max
  unsure (1)..(249): unsure at all n locations
aaccaaagggaattatcttcaaatggatctaaaggagcttattgaacttcttaatcatcagaaagaagaaaaatatgatctttggagagatccgttcaaagcacacanagattatgaagacctcaatatgagtaaacataatctttgtggaaggtgaagaacataagaaatatgtgagtttcttgaataatgagcttctgaagtatcaagaacttaagggtcaacctcaagatgttgtanaacttcatg

SEQ ID NO: 279778 - DNA, 330 bp, Glycine max
  unsure (1)..(330): unsure at all n locations
tgggtcgagggctggagaacaccgcctatattgatcttttcacccncatttggagttgttttctcattaccttccgaaatgtcacaagactttacagatcgcgcgacaataggctactagtagctctacatgtctgggccaaatgcgcatgccgacacacaattatccctggatgacatacggcatgatagttgcccctctctacgcatcttttattggagataaaagggaagtaaagatacgacactaatttcgtttgagccgaatttccacccgaccgaccattagctcaatcagcgaaacctgttaaaagaaagagcatcaatgaca

SEQ ID NO: 279779 - DNA, 303 bp, Glycine max
cctgcctcccctaatcttctcacagccaagtggagcccttcttcaagcacaactttgtagacaatgccctatttcactctttccaagaacataagctgaagccttaagaagctcatccaaatcgaaggccacttgagcatctaatgggacaagatcatattgttcatcatgatcggatagggtctcagattcatccttcctgaagcataagcactccttcctcaatctccttcccttgtcaaaacccctttccttctgatcctgagtaaaacccgcaacccttgagtagcagtaagagaacag

SEQ ID NO: 279780 - DNA, 152 bp, Glycine max
  unsure (1)..(152): unsure at all n locations
aacaatgcatatccaataatcaagcctgacagctcatcaactaaagcatagcgttcacacgcccgtatataaaaatagggcaaaaccgaccggataatgcacgctaccgacataaaaacggaactcgtcataccaccaaacacgagagaacn

SEQ ID NO: 279781 - DNA, 369 bp, Glycine max
  unsure (1)..(369): unsure at all n locations
atcttgctctaanattacattgatgnttgatttatggggagggaggtatatgccattttttgctttaagagtaatgtcccactaaaactaacttttcaaatgtttgccttcgcaggaatgcaccgangaagctngcctcaaagaggtccangaaggacaaggcgggccgaagaactagttccgccccggagtacgacagtcaccgctttaggagcgttgtacaccagcagcgtttcgaagccatcaagggatggtcgtttctccgggagcgacgcgtncagctcanggacgacgagtatactgatttccaggaggaaatanggcgccggcggtgggcaccactggttactcccatggccaagtttgatc

SEQ ID NO: 279782 - DNA, 373 bp, Glycine max
  unsure (1)..(373): unsure at all n locations
tncttcacgttttcctctatacctaaaacttcaaaccttctattctcactcaattcttcaccanatcacgtncccgtaagcccaatctttcttcttttcactcctctttcactttcaaccgatcaaaatccagaaaacttcatcanatggcagaccctcaaagaagagaaaggatcantctcaccgctaccgctgctgcccatcgccgtcacggcccattccgagcacccacagcacctattcctccttctttgtcatctccaagatcatcaacactgttttcatccgatgatcaacgtctacggtacctttctcagttttcttctagaataatcttagaccctaaatacctagacgtagagtctttaatgat

SEQ ID NO: 279783 - DNA, 381 bp, Glycine max
  unsure (1)..(381): unsure at all n locations
agcttgatcctgactcgttnacgtataggactgcgagtctgtgccttgttgaccttgcggaaattaaagaggcatgtgcatgtcataatangatcattgagatgtcttgcattccttcagttgcagcttatagtagcctcactaaagggctttgccaaattggagagattgacgaagccatgttgcttgttcgcgattgcttgggcaatgttagtgatggaccattggagtttaagtatagtcttaccatcattcatgcatgtaaatcaaatgttgctgagaaggtgattgatgtattaaatgagatgatagaacaaggttgctctctagataatgtcacttattggtcaatcatctctggcatgtgtaagcatggaacaa

SEQ ID NO: 279784 - DNA, 430 bp, Glycine max
  unsure (1)..(430): unsure at all n locations
gctctctttgatctcagcggactaagtcaatctttttctatccactaaccatcattaaacagagacatgtcttctacatattatgattcattgtatctgttcacctacccgtgagagggcagcaaggttggtaacaaatttattaatttgatgttgtatttgcacttatattatttgtttaagctcactgaattacgtgtgcttatattgaaattgaaccaagactcctcgtttatttatgtgaaagatgtcacactgggaagaattgtgcatgtggaatcaattatgaaggaactcacgaagctnttatggttactgctctatcacaataaacaatgttagctatcttatggcgtgctagattgcttgcttatcatttgattatgacctgtccagtttggtccggatcaatagcccaagtgtactgtgc

SEQ ID NO: 279785 - DNA, 412 bp, Glycine max
agctttgttaaatgttttgtatacaaaagttagtcgtatgaagcgactaacacacctcatgcattatagcctcagaaccaacgacatgcagtgtaaacaatggagaatcttcctaagatatctagacaaagtgatgttgtgaaactcagagctgacaataataggcaatgcatgtcttttaaggtttaggaaggctatgtaaacgagggagactatgcccaaattttcctacaatttttagacaaatgtatgttgtgaaactagaagtagaacataataggtaatgcatgtcttttaattctagtgagagcatatgctatcgcctctagtgttttggaaaatctaaccatcttattcttgtgaaacttgtcttaaattgaatttgacacaaaatgacacacctttgacgttg

SEQ ID NO: 279786 - DNA, 260 bp, Glycine max
tgccacccactcgcaggcgagcaggtgcttcttttaactacacctctggagaattttggaggccaatggacctgttgtattgcccccatttactaatacaccctgctttttgtgatctttttcgaagtacgaacttacattcgaacatactgttctttcgaatgttaggacctgcaatacataatctcatttttgactacgaatgacggacctcctatatgcacgatgcttcattgattccggtgtacgaccttacgatg

SEQ ID NO: 279787 - DNA, 64 bp, Glycine max
gcaagtatcatcagatgactaggctacattagatgattataacttattcaagcttatcaacatg

SEQ ID NO: 279788 - DNA, 393 bp, Glycine max
  unsure (1)..(393): unsure at all n locations
agcagcgttanatttatattaaaagctccaagagcttggtattaaaggctaagctcattcttacttcataatggatgcaccacaggaataatggacaccacactatttataaaggcttacataggaaatctgttgattgctcaagatctatgtagatgacataatgtctggtgcgaccacagaactgatgtgcaccgagatntctgcactaatcaaaggtgaatctgagatgagtatgatgggtgagctaaaattcttgctaggtcttccaaacattcaaaaagatgatgggatattcctccatcaatagaacacataaaacctatataanaggcttagaatggatgaagctagacctatggctacccctatgcaccacttcacaatcattga

SEQ ID NO: 279789 - DNA, 450 bp, Glycine max
  unsure (1)..(450): unsure at all n locations
ntgcggatttggtcttcgccgggtaaaggatcatatcggttttgaaaagaggcaaatttatcattctgcttagacgaaaatgacaaaactgggggcataaggatgaagggtgaggaatgataggagaanaccccattgccctgcgactttgtcgtgtccttanataggannnatccctaccagctcaacaaaacatcatttacttcagccaatagtcgaaacctttctcatttccccaccacccaaattatccataaaggccatccctatatcaaccacanagcctgtctaccacacaaccaatgctanacaccacctttagcacgaaccanaacaccaaccataaaggaatttgcagcaaaagcctgtatattcccccanatccggtgtatatgctaactgctctatattattcatattcatggagcctaaccctgctagttctaactn

SEQ ID NO: 279790 - DNA, 401 bp, Glycine max
tcatgtctttattttcaattacgagcgtctcgatatattacgggactcaatcggacaaccgagtaaaaagttattgtcgtttgaatttgcttactgctgctgaattcaattacgagcgtctcgatatactacgggacacaatcggacacccgagtaagaagctattgccgtttgaatatgctcagagctgctattttaaattacgagcgtctcgatatattacgggactcaatcggacatccgagtaataagctattgtcgtttgaatctgctcagtgcttctgtgctcaatttcgagcgtctagacatactactggacacaatcggacacccgagtcaaaagttattgtcgtttgaatacgctcagagcttctattttcaattacgagcgtctcgatata

SEQ ID NO: 279791 - DNA, 430 bp, Glycine max
  unsure (1)..(430): unsure at all n locations
gtgagaaanatcaaacgacaataaatatttactcggatgttcgattgagtcccgtaatatatggagacgctcgtaattgaaaacaaaagctctgagcaaattcaaacgacaataacttttgactcgggtgtccgattgtgtctcgtagtatatcgacacgctcgtaattgaaaagggaagctctaagaaaaatcaaacgacaataacttttaactcgggtgtccgattgtgtctcgtagtatatcgagacgctcgaaattgaaaattgaagctctgagaaaaatcaaacgacaataactttttactcgaatgtccgattgagtcccataatatatcgagacgctcgtaattgaaacagaagctctgagcaaattcaaacgacaataactntntactcgggtgtccgattgagtctcttagtatatcgaga

SEQ ID NO: 279792 - DNA, 418 bp, Glycine max
  unsure (1)..(418): unsure at all n locations
agctntgtttagtttgaatataaaagctccaagagcttggtattaaaggctaagctcattcttagttcataatggattcaccagaggaataatggacaccacactatttagaaaggctaagataggaaatctgttgattgctcaaatctatgtagatgacataatctttggtgcaaccacagaaaggatgtgcaaggagtttcctgagctaatgaaaggtgaatttgagatgagtatgatgggtgagctaaaattcttcctaggtcttcaaaacattcaaaaagatgatgggatattcatccatcaagagaacacaaaanacctatttaaaaggtttagaatggatgaagctagacctatggctacccctatgcacccttccacaatcattgataaggattagaaaggtaataaactc

SEQ ID NO: 279793 - DNA, 133 bp, Glycine max
cactatgataggtatgctttgagtgaaaaattctctcaagaactttctataaggatatggagagcatttatgtctagcataagatcctagaaaagatctcaacatttagcttgctcagaatctatatcacaag

SEQ ID NO: 279794 - DNA, 418 bp, Glycine max
  unsure (1)..(418): unsure at all n locations
agnctatgtttatttatatatttctctaatcaatcatgctcttgtgttctatgttgtaacctaaattactaaacctcgatccctcgtcagaccgaatcaatccaagctttgtccttagatccctcttgttggactaagcccaattgagatccctcttaggtatagacaaactttaactgagtttcatctgcagatccctcttgtaagactagactcagctcaagcagcttacgaaagtttagcctaatttaccctaagcttcattcgcagatccctcttgtaagactagacctagactaaacaacattattgtgacaacataattaataccaaaacttaatccgcagatccttcttgtaagattaagtttcgatcctgcttcaatcaagttctaatgcaacagtacatttcccaatgc

SEQ ID NO: 279795 - DNA, 434 bp, Glycine max
  unsure (1)..(434): unsure at all n locations
ccctatgtatcctaagaactacacaataactcacccaccacaattagtagaccattaaccaaaatttattaattatgccatcacccagggaatgaaaaaaaacttattgctaagtgaacttgaattgggcaacccaagggcacccccaacaacccacaagtcagccaccatntggtctcccaaaagctgatgcctaagttgccaattggcccttattcaacttgaactaacctactaagctctttagttgataacccaaacatattctggtcgccaacttttaaggattgngccttatttaacagctaancactcaaaattggacaaagtggtgccattttcctcctccatttggccatgtacaactcacaacttggacttttccatgaacttggcttgatcaatatatgacagacttgtgaaactcctggttt

SEQ ID NO: 279796 - DNA, 264 bp, Glycine max
gcaagattagtgttcatgtttcagccacaaaagtggccaagagtggtgcacagctttctctatagcacatatagccgccatgacttctgcaacaatagcattgtgtaaacttgaaatcacagatcaacaaagaagccaccataaccagcaagaccagggtttcgcttacgatagaactgacaaatcatcatatgctaatgaaaagtatttaataaaatcatgagtggaaacagctaaagaatatataattacatacataaacat

SEQ ID NO: 279797 - DNA, 400 bp, Glycine max
  unsure (1)..(400): unsure at all n locations
taaatcccggataagggggtccaaccaaacacctggccaacccctcattgcacctgcaccatactcaccttcacatgttgataaacccactatggattgcttcttagaactccacgatattggtgttgcaccatacatgaatatgtaacctatagtactctntatgtcanttttgtctcatccccaatccgcatcagtatatcccactaattcttctaagttactgttgtctatatttggaaatagatatccagtattgatggtcctttttatgaaccttagaatcctcttagcagctaggagatgaggaattctgggtcttttcgtatatctacttaccagtccaatagcaanatccaaatcaggtcttgaatgacacaagtacctgagagaaccaaca

SEQ ID NO: 279798 - DNA, 377 bp, Glycine max
agcttgttttggttataattgagcaacacacagtcatctaataagcataaaaaaaactataagtataaaataaagtagatgtaccctagtggatgtaccctccactagaactgatccaaaagagatgtaccctctcttgttctcagtcaaacccaagtagatgtaccctctacttgtaccacaaaggatgtaccctccaatgtgttaagacaaagatctcaggcgattaaacctttgaaactttgtgaatggggatacaaaagaattctcaggcggttactcctttgaaatcttttgtataatggaaagggaagaatcaaaagaattctcagactgtgtagctgtgaattcttcgacaagggagaacggagacacaa

SEQ ID NO: 279799 - DNA, 285 bp, Glycine max
  unsure (1)..(285): unsure at all n locations
aagtcagtagccagattgaatgctcgacatgatnttgtttcgaacaaaccagaattgtacataattgatgtgtatgaagatgtgtaaaaggcatacatttgcttttccttgtaagtcatggcacaagctatgagactatgtgcacgtatgccacttgtatctgttcataagctctgttcgttggttatttctactctgacctttagtgacatgttcaaactntcatcggattgtgcggttacaaattttgttgctagtagtagtcgatatggcacccctgaggac

SEQ ID NO: 279800 - DNA, 415 bp, Glycine max
  unsure (1)..(415): unsure at all n locations
taaccttctttataaacgggacattggtgcacaatacacaatgtccggtacaccacaaccaaatggtgtatcacaaaggcacaatagaactttaatggatatgattaggagtatgttaatcaattagactgtatccgtatctttgtggatgtatgccttgaaaactgtcatgtatttgttgaatagggttcctagtaaggcagttccaaagacatcttttgaactgtggacaaataggacacctagtataaggcacttgcatgtttggggttgtcaggcacaaataaagatttataatccgcaagaaagaaaattggatgcaagaacaatcagtggatatttcattggttatcaagaaaagtcaaaggagtatatngtttattgtcctaaccatagtatgagaatcgtcaaaact

SEQ ID NO: 279801 - DNA, 351 bp, Glycine max
  unsure (1)..(351): unsure at all n locations
cagtcccttaggcacttctctctctttcgaatttgcttacaaaaattgtttccgtgaagaaaatccaagccgaggcgcttccaaaactttttcgtaacgtttccgtgaggaatttcgcgaatgtttcgaccgttcttcgacgttcttcattcgttcttcatcgttcttcgatcttcaacgggtaagtacctcgaaccaagcttttcgattcattctatgtacctttggtggtccacattgtgtgttcgagatatttattctcgtttcagttactctttatacccccttttgacgtgcttaagtcatttctcgcttaacctanaaataaaataaatttccaccgatcgttga

SEQ ID NO: 279802 - DNA, 384 bp, Glycine max
cgaggcatgtgttgcccaaacatgacggaatcatgcttgagacccttgtatgaaggctacaactctgagcttgaatagagaccatcaatggtgagctgaacccatggactatcgtcgttacataaactataagacgtgctaagaggcagcttccacatgagtattctccactgaaggagagagcataccacctaaagagggcctgggatctaaaacttagacaggattctctcatcgctgaagaagatgatgagatataccttccgactttgatgacactacggagatataaccggctctgatggaggaatccaagcttttcgatcaccctatgcatcctgcgtgattcacatgtttggattataaacgttcttacgtgacacg

SEQ ID NO: 279803 - DNA, 343 bp, Glycine max
  unsure (1)..(343): unsure at all n locations
gtgaattcattctatgcacccttaggggtccatncttgttttgaatgttnncttctncatctcgcgtacgtttcggtatgcttttacttcatcttaaaatgagtttttgacccgattgtgtaaacccgaaacctcacttgaatgaatgataaaatgaactccaactgatcatttgtgttgtaatgttcttgaatcattgttaaaataaaatccaaccgatcattcacgttgtaacctcgatgaatcaaaaataagtaagttccaaccggaaatttactctgaaagttctcttttagatgagttgagaaataactaagtgaaactaaagctaacatcaactcac

SEQ ID NO: 279804 - DNA, 237 bp, Glycine max
  unsure (1)..(237): unsure at all n locations
agcttatattatatatttgtccattaaaaaacgcattggatattaaaaagtgtaacaaatattctttcttcgacaaataaaaatatacccgttaaaaataataacatatcttatcttacacatgttcacttattcttaacagagacatcatttctgttatcatccaagtttgattaattntttatcactacattacgaagttaaaaatataatttataaacatatttcgaatacata

SEQ ID NO: 279805 - DNA, 326 bp, Glycine max
  unsure (1)..(326): unsure at all n locations
tttatcaagtgacaatatgaaaggttttatttaattttactcaaatgataacgaggagatgtgtatgtatgtatatagtcaaatgccaattaatgcccgcaaatttaaactgtgtaagcccgtccatctaaggaagaaagagacatcatntgtattcatggagacaactcaacggattctctaacctccaagcctcttcgagaaagaaaaactgttttcttatagctctatatataaggacgaagagatgttgaaactcattgctagacaggaaattacgatataaatgatatagatcaagaaactgtattgcacatatatatctt

SEQ ID NO: 279806 - DNA, 422 bp, Glycine max
agctttttttaaaaaaatatcaatttacgaagggtgtcacctaagggctttgaaatcacgttgtgcttagaaaatcagttctcaaaacttggatatagtagcatagaagtgatttatagaaaacaactagttatataaaagcaataaagaaaacacaaaggctttgtactgattcatcccaacccttgggctatgtctagttcttcttcaaaccttgaagggttccactaatcaattctttaattacaaccaagtatttatgtgccacttctgactacaactagtactctctaggtcattcttgacactacacttaatctctcccagagattaagaccctagtattatttgtcactaagccattcttggctttcacaaacaatatatgcttgatagacaatatattgtaatcactcaaagag

SEQ ID NO: 279807 - DNA, 431 bp, Glycine max
  unsure (1)..(431): unsure at all n locations
atatagccaagcctctcttatcttgcttggacctgtatgttntgggtgggcttaattcgcgagtccaaatctatttctaacttttatagttaggggaatctagaaaaaaatttagaacctgatgttatgtttaccacttaagactctcatttcccaagcaaactattaagacttgagaggaattctcatccactctcttcctattttccaggtgaccatctttgaagtgggagaaaattttgccttatcaagagttagggaatctattttccatgtgaccatagttgaagtaggggacacttttcccttataaaggattacaagatggcagttatcatcttctaagcaatttccaatatctctccttctacttactctttaattgattggccttttatttgggatattggtgtatctgtggaaaagtgaat

SEQ ID NO: 279808 - DNA, 423 bp, Glycine max
  unsure (1)..(423): unsure at all n locations
agcttgntttaaattgttcatcacgtcaagttgaaatatggaagtaaccatcctgcaaaattggggcaaaagatgaatcgagtcacatcactgcttcgtctactgccaaacatatttaggattatcgatgtccttgttacttccagtttcaccttgacaaagatgtcatggaccatgttgagaatctaaattgattcaaccccatatcctgcgtaaaaatacgcaatacttcgactgtacatcattcgcatgcatacatgcttttcattggttgcattgctcattgcattctttccttgaaaaataaaataacataaaatgaacttatctgagagaataggaaacgctctacagcgcccttaccgaactcgtgctggagctagagtaatgggtgaagttcacgagatacaagagaagatgaag

SEQ ID NO: 279809 - DNA, 429 bp, Glycine max
  unsure (1)..(429): unsure at all n locations
gcatatgatntatatgctccagcttgagggggagtgttggatatccttggatataatctatatgaggtagctttgttagtaagcttgttcagaagggcagcagtgacttgtcactgtcactgcccttctctctccatcttgtactctatatatatggcttttttgaaatgaataaaagtgtgagagacaggacggaatttctccttcagtttcaagtaattctaatatgcgctccaatgacggctttcacgggagagttgatccttgacaggcactatattctactgggaaagcaaattaaattataaaaatatatgtatttctcatcagtatatggaacactgcaatgtgtgaaaaatttgaacaaattctacactgcagtgggtgaaaattttgaacacaatctatcatctctggctatatactctc

SEQ ID NO: 279810 - DNA, 399 bp, Glycine max
  unsure (1)..(399): unsure at all n locations
agcttgttatctcattagtngaggaacatggagcgcttccttgttcttccttgacaccaaccaaacttaagttccttatctgcttcagctntcccaaatctcttattaactctattccatcgtcaactnttattataaattgtaagcctaaactgtaatgtttagaactttgcgtccttaatatattatagaacatgaattttcagggttcactatgaaccatttaatttgttgctaggaagaagatcaaccaatttgcttatgtgaaatgaagtgcatgccatgtagtgggtatatattatttaattgttttgaaaaatacccttttcattccaaaatgattgatgttttaaagaaattcatattgaccaatggttttttcaatgagatattaaaaac

SEQ ID NO: 279811 - DNA, 451 bp, Glycine max
  unsure (1)..(451): unsure at all n locations
tgacagacctacaattctcacaccggtcgaggttattacctcctgacatgagacaatctccctcgacatgagacaatctccttcgacactagacaacctctttcgcccacaagccgactcagagcttgaggggcttatgtactatctagggtccacaagatacacgtgtcatgctacgtggcactccaagacacacgtcaaccctccatgtcagccctagcacaagagcacgaacgtctagcccttagtagctgagctctcagtcgacagggtatctctaatatcctattatttgaatatattggcatccctttatctcttggcaggtattcaattatctaaaagttacacattatcagtaaggcacaatcatctacgaacaattatctctaagctggtacatgttatctgtaacattatctagaagctatctntatctactgactattat

SEQ ID NO: 279812 - DNA, 108 bp, Glycine max
  unsure (1)..(108): unsure at all n locations
agtcttgtttcacctacatagcatacgttttttatggttgatcaacctangttgtggttgcaaatttgagaatctctcccatacccaaatatgaaccaagtagtaaaa

SEQ ID NO: 279813 - DNA, 498 bp, Glycine max
  unsure (1)..(498): unsure at all n locations
cgccgctgcatgaacgatntgcttagcannncggcgacacttnagaatactcacgctggtgatattntaactatatatgtgtgtgtcttcgttaatttctacctgttaaaaaatgtgataatcccttcctcatgtgtggttaatgttggaatcattgaaggaacttaaccctggggttggtgaaaccaattgcttaggtgaatacttttaaaaacccttgtgatggaagaactcgagacacatattttgataggatgtacattggaacaagagttttattttatttgcatgacgtatcaaacatgtcattttactttattttgataacttgaacagtctttgtttaaagtcataaatatttctaaaaaattntattttgtaacagtgaagcgaatgtgagcattacccacgtcgactgatntacgattnntattgaataaattgatttaattagattcccgcattatatatgtntntttgttcatttatatgtatgtg

SEQ ID NO: 279814 - DNA, 408 bp, Glycine max
  unsure (1)..(408): unsure at all n locations
atcttccttttacacgccctcgcctttgtagggctacacgccctcacctttagaagactacaagtcctcgccttatgaangctacgcaccctcgccttcagaagactacacgtactcaccttcaaaggactgcacgtcctcacctttatagggcggcacgccctcaccttcggagggctgcacaccccttcgcttttagagggctacgcgtcctcactttcagtgggctccacatccgcaccataagagaatttaaggtcctctgcccttaatgcttaatcgagacttgtgctctcggttaatgggccagtcgtttcctgttatcagttcctgngccaccctctgatattggagggcgccaactatgcgagcacagccagagagggaggctatcacgcagctactatg

SEQ ID NO: 279815 - DNA, 428 bp, Glycine max
  unsure (1)..(428): unsure at all n locations
tgctctanattacattgatgtctgtatttatgggaggatgttgtatgtcatttttgttttaagaatagtatcccactggtaaaactaattttccaaatgttggccttcgcaggaaatggccccgaggaaacttgcctcaaagaggtccaggaaggacaaggcancagaaagaactagttccgctccggagtatgatagtcaccgctttangagcgcngtacaccagcagcgcttcgaaccatcaaggagtggtcgtttctccgggagcgacgcgtncagctcanggacgacgagtatactgatttccaggaggaaatannggcgccgcggtgggcaccactggttactcccatggccaagtttgatccagaaatagtccttgagttntatgccaatgcttgccaacagaggaaggcgtgcgtgacatg

SEQ ID NO: 279816 - DNA, 559 bp, Glycine max
  unsure (1)..(559): unsure at all n locations
ccacgcgcactcagaggcaccgaaacagaggaaacgggacacaacaaccacaaactcacatccccacacacaggcgggggngtgagccntgcancccacccgaancaactcggacccggggagcctctagaacaacctgcatgcatgcaagctacatttgatgaancaagccgcaccaagacagggggagaatgacagagacgcagacaaaaagcccaaagaacgatggtaagatcaaacccagaacagaaccaagaaccgagagaagctcgacaccaagacgcaagaaaagacgaactcaacgcccaagagaagaaagcaagaagaccccacaagggaagcaccgaaaagaatggacaaaaaacaaacacagcacaacactgagggtcaagagaaggagcacaaaacaggcaaagagaccagagggcatactctctgggaaacgacaaccaagaacacaaagcgacgccagaaaaccaccgactgaaattacaacggtccaatcgaaaccaatagagtggaaccgaacacaagaacaaaggaagcgacgaccagcgcn

SEQ ID NO: 279817 - DNA, 496 bp, Glycine max
  unsure (1)..(496): unsure at all n locations
acatgctttgnttgannctttgtaggacgtacacatagaatactaaccttctaagcgcggtctgggannnaaaaagccacgcggaaccgagttantatgtttatcacgcacacagacccanacacctgggggtggtgttataacaattacaaactctgcacctcacaaatgagaaagttgatgagaggaggaacgccccggcatttacgcaacgagcataatgtaaacctttaccgatgtaaaagctctataattgggcctaagctctacagtattaccttttgttaacgcagtaccaactcaggtacatcaacgatgctacaatgctgtttgttaagtaagatgcaacagataacacacgctaaatcgaatgagtgtaccccacttattaaaatggagatccattgacagacctccgaaggactaaaacctggaacacgcatactcgtagactaattcgagaatccaccgtaataaaggaacacagtgtgagccg

SEQ ID NO: 279818 - DNA, 371 bp, Glycine max
  unsure (1)..(371): unsure at all n locations
cacgcgacaagcagaggaagggaaacgcacaaaccgacaataaccaaccaggggggtgagctggaccccaaanaanngcggggcccaaacccgcgcaacaccctttaaccccaccacacaaggggcgggaacagaccacaagacggaccgaacaacacaaaaaagcgacccaaaaaaccgagagaacagagacccaccagggctaaaaaccaaaacaccgacgggacgcaaggaaacaaggacaacaccgaccgccacggaggaaaaaacaaagaccgcaaaaaacgagggccacgcacaacaacaaagagggacacccgccggcaaaaaaacagaacgaaacaagaaacagaagaccacagcaggaaccg

SEQ ID NO: 279819 - DNA, 381 bp, Glycine max
  unsure (1)..(381): unsure at all n locations
ctcagctctaacttatacagaataagctctgataccacttgtttataagtggcctcagatatcttaagaaggcggggttgaattaagatattgcaacttcatttcccaattaaaatttctatttaactttctattcaagttataaattcccttaataatgaatttcttaaatgttgattcaaatagaacaatttgaatatgaatatngaccactaatatataaaggagtttaagggaagagacaatgcatactcagaattatactggttcggccacacccttgtgcctacgtacagtccgcaagcaactatcttgtaaattccttttacaagttctaaacacacaaagacaaccctctctttgtgttagaatttttcacag

SEQ ID NO: 279820 - DNA, 395 bp, Glycine max
  unsure (1)..(395): unsure at all n locations
agctntgtttcttgaagaagttgtctttttacatgcccaactctttgagtggcatttgtattgattgttgcatcttagtctctatcttttcatttgtacatcatgcatcatcatgtataggcagaaagattgtttctagttagaaacttcttcaatgcataaaactctttgttttaatcgattgcaaagttgatagtaatcaattgcacaagtgtttgtagcttgcagagagattctagtttcagtttaatcaattactagttaaccataatcgattagatagttcagtttagactgtgtctggtttttcatgagtctctgctttaatcgattactaggtgatcataatcgattactttgttcttaaaggtgttcctagaagtgatcaataacac

SEQ ID NO: 279821 - DNA, 196 bp, Glycine max
cccccaaccaaaaaaaaaaaaaaaaaacagaccggctacccccccaaagggaaaacaaaatattacaaaaggggaaaaacaacaaaaacaccacccaccaacacaaacccacaaaacaaaaacaaaccaaaaaaaaacaaacacaaaccacaaccaacacaacaaaaaaacacaaacacaacacacccacaaccac

SEQ ID NO: 279822 - DNA, 607 bp, Glycine max
  unsure (1)..(607): unsure at all n locations
actgcacacactcgcanagtcacagcatacctacgcacagagagccgaatatgagagccgatatcacacggccgtcgcacaacaacaaacacatcaactcacaacccacacgaganagggagtgantttgaagcctttgcacatccacggcgaanacnagcncagnacccggagcaccncnagagacgacccgcaggcangcaagccccattgtttgccacgnccncaagacaacgccccagagagatgagcggccnactgagagccaactcctgcagcggatacaagaccatcaaccgccccctaaataaaccacgcagcataaggataacagtatgagaatgtaggacaaccggctccatggctgctgctgcaggagccgggccggacgacgaacggacgccaacgagacatgcccttgttccagacgccatcagcacgatagggacccgaacaactgccaacagcaagctgacagacagaaaacaaccgctcaccgagacagagaccacccaccagacgctgaccacaataccaccgccgaccacaaggaacaggctcagctccatataagccgcgcatagcggcaataaacacaaccgaaccg

SEQ ID NO: 279823 - DNA, 310 bp, Glycine max
  unsure (1)..(310): unsure at all n locations
tgttttnttggctagacaccnnntagaacacggggaaggtatgaatgtcagaatttttttttcgaaccgccgggggggtcgatgattcaccactcgtggcgatgaaacctcggaagggagcgtatcggatactgcaatgtttggcctggtatagaagaactttggtgaacttaactaggaagacgcgaaggtagctgtcgtaggagaacgcttcgaacggaaggggattggatggaagaagtagggggtcgtgaacggagaaaaagtgcaacggacggatagcggttagaacgcaaatcgggaagaaccg

SEQ ID NO: 279824 - DNA, 404 bp, Glycine max
agcttgctttctcatggaagctcctaatatctcccacactttttggggtgggccattcttggatggccttgattttctcagggaccacttggaccccatttctaccaactactaaacctaagaaaactatattatctacacaaaaggtacacttctctatatttgcatagagggtgtttttcctaatgactgaaagaacttgtctgagatgtcctaagtgatcatctagcctcctactatacactaaaatatcatcaaaataaacaactacaaatctacctacgaaatcccttaagacatgatgcataagcctcataaaggtgcttgatgcattagtgagcccaataggcatctctagccattcatacaaaccagacttggtcttgaaagcacttatacactca

SEQ ID NO: 279825 - DNA, 812 bp, Glycine max
  unsure (1)..(812): unsure at all n locations
agcagagagcctggggnnnttggantttgantttcgaccatancgnnacnngncanncnnnncnnnnnnnntnngngngnnnnannannnnnacnngngacgcagaannagnagnnaaccanaanancgacnagnngctnccgcannnaacgcanccgagcacatttttgtggttgcngattttacgtcgncgacanangcnncacagacccgancaaggcggggaaggcgggagagctgtgtatctcgacatgaanagcatcatcnacgctacactcgcatcacacgtcgatcgggaaaatanactcgacagacgcgccgngtgccgatcacactagaagcgacagcgtacgcgagagtacactgngagtcgcnacagctatacgtgatcggacggacacgacgaggacnagacacgacgcagtgacgggtancnacgcgacagacgaatgcacagacgatgccgancgtacgagcacatcatccngaggtaccgacgtcgcaccgacacgcgtgactcgactgacagcncgcgagacatcggcgtgcgacacgcgccaggaggaggtcgctgaccgcgagaaaggacgtgccgtngcgctaggacagactaggcgacacagcgacatagcactcgcagcgggtgagcgacgatacacacgcgcacgacggagcacgcgagaggcctgcgacatcagcggtcaacgcgcaggatcagtgaggcagccaagtcgcgcacgaatgcacgacacgcacaaacggcgcgtacgcagagagcgcaccgatcggcagcactgagcgtgcagagagcc

SEQ ID NO: 279826 - DNA, 506 bp, Glycine max
  unsure (1)..(506): unsure at all n locations
cgccgccacacgaggagagaacagggggcagaggcaaacgcgaacacaaaagcaacacaccaacaaacacaaaagcgaattgaacctgtaaaccacgnaaagacgnccgcgagancacaaagccccaggagcaccacgttaggagagcggacgaacacaaaggggagagggcggaaggcaacaccacgcaaggagccacgccaaatagccacgaaaccagcgcacgcgaaaacacgagaacaaaagacaagactccgcccacaacaggttagaagcgaacaagaacacgggaaccgagcacgcggagaacaaatcaaagacaccgagcctgacgcgaatccaagcgcggagaagaacacaccaagcaaaaaaaagaaaagcaaacaccacccagaacaacgaacaaccaaagaagggcaaaacaaccaccccgaggcaacgacagaaaaaactgccaaacggcgagaaaaaccaaacaaagcacgaaaagaccgaggccacaagcn

SEQ ID NO: 279827 - DNA, 494 bp, Glycine max
  unsure (1)..(494): unsure at all n locations
gggggtcttaatgancctctcgtattacgtccancctagaatactcaagctntataagcgcgggtctgggagacaaaggtcaagtggtcgcgttatgcgaagatgatgttccgagtacattggatttggtacgaccatgccctcctgatttccagctgggaaattggcgagtggaggaacgccccggcatttacgcaacgagcataatgtaaacctttacggttttaaaagctctatagttgggcctaggctttagagtttttccttttgttaaggctttgtgtcttttgtttttgaatttataatacaaggatctttcttcatctgttcctacgtctctacccgttctcattcatttgcatgttcacttctttttctgaaacggcagatccaatgacgagtcccccgaaggtactaatacctgngacccgcttatcaacttcgagcaagaaaagaatcaaacggaagatgaaggaaacgaggatgtgagactn

SEQ ID NO: 279828 - DNA, 556 bp, Glycine max
  unsure (1)..(556): unsure at all n locations
cgcccgacacaccgncgagcacgcgtaacgtcgacgaaatcagccanaaacgaacacacagactacgaacccatacacctaaanccncacaaggacagcgcgcgtgtatccattgagaacaccannannannaanaaaaccccgcgagacacanaagagacccgccgagcaacacnnacgttattatgcagacaaatccacaacaanaaagaagaggcaccagagccacacgagacacacgcgagcaaacgcgagcggagaccgaaacacagaacaccgaaacggacgagcgccagtgcgccaacacgcacgagaacaagagcacaacgacggcaacgcacaaaggtgagaaacgagccacaccacgccaaaagaaaacgccgagaacaagaaagcacacgcacagagaaacaccagagcagggaacaaccagacgcgcccaaaccgaacagccaaaaaccgggacgacaccagagcaagggaagaccaaccccggcgcgaacgaaacaacgcccagagacgagcacacaccgggacggaacgccacgaaccggcg

SEQ ID NO: 279829 - DNA, 327 bp, Glycine max
  unsure (1)..(327): unsure at all n locations
ggcgtgagactacgagatgaanccgaataagcaacgcccaanaaaaaangacanacaacattaatgttgacaaccaacaaggggggggggaaagagaaccccccccccaaagcgggaagaggagacaaaaagacgcaaggaagaagaaagaaggaggaagaaagaggagagagcaaaagaaggaaccaaggaagggggcgggagagaacgagaggaaggacgaagagagcggacgaaacggagagaggagccgggaagcaacgcgaaaaagaccgaggaacaaagggaagggacgcaggcagagaaaaagggaaaaaaagaggaacg

SEQ ID NO: 279830 - DNA, 549 bp, Glycine max
  unsure (1)..(549): unsure at all n locations
cccacgcaccgcaacaagagaagtcgaaagcagcagggcgaacgcaaaaccacacaacacacccaaaagaagcggctgggaccttgaacccaaaaaagaaaaaccacagggcaagaaagggaggaaaagaagaaaaaattgtagaaaccaaacaccaaacaaccccagagggagcaaccaggccacaacgacaccccaccaacgcgaggaacganaccagacaaagaacacaaccaacacgaaaaagaaacgacaacacagaacaagacaccgcaccaacgnagggcgacacgaacgcaagacaagcacacacggcaacacaagaaggcaagcggacacaggagagacaaagcaccacagcccacnccagcaacacaacgaacagaacgacgcagcangaaccgacaggacacaacccacgcaaagcagacccaacaaccagcgcaaagacaggcganacggcgagcagaccacacgaccgaacacacagccacaccggccaaacgcagacccacgaaaaccacaggacgacaccgaacacaacgcacg

SEQ ID NO: 279831 - DNA, 185 bp, Glycine max
  unsure (1)..(185): unsure at all n locations
ccagacaaaagaaacaaccaaccacaaggttaccacccnaacaggaaaaaaaaatttccacgggggagaacgaaaaaaaaaaagagaaaaaaaacaaaaaacacaaaaaaaaaccaaaaacacccaaaaacccaagaaaacacaaacaccacacacaaacaaaagccagaaaacaacgaaagacc

SEQ ID NO: 279832 - DNA, 492 bp, Glycine max
  unsure (1)..(492): unsure at all n locations
accacccgaacacgaaagaacacccaaacaaaaaacgacaccaaaacgcaacaccaaacacagggcgaacttgaccgtgacccacaacngaccaccgggggccaacgcaaaccacgcacaaaccttattttacacaaccaaaccacgggagggaaaccaaaagacaacacacccaaacccagcaaacaacccccaaaaaaccacgaagcaaaaaacaaaacaacgaacgncaaacacagacgaaacgagaagcaaaaacaacgcgacacacacagacaaaaaaacaaacacagacagacagaccaaagccaacacaaccaggacacaccagacgaggncaaagaccacaacaaaaaaccacccaaccacaaccgaaaaccacaaaaaggaccaaaaccagaacaacgcaaaagacaacacagagagcacaacacaaaccccaaagaaacaaaaaaaaacacacgaacgcaacagaaacaaaccaaagacgcc

SEQ ID NO: 279833 - DNA, 418 bp, Glycine max
  unsure (1)..(418): unsure at all n locations
agttntttgctagcctgagtcnnncnnntnttaanaacaacgcggcgtngacatgatgacatcacgacctttattgtttctcacgccccaacgagggggggggtgtatctccatactccccaacccacatgcggtcgcggagaggacccaccactcactctccgacatgagtcacaaaccgaaagcatgagacgcgacaaccggatagctacggagagagacacctgctcaagggtccatacggcaaggtgacgggttacgctctggcgcgggaatagaggcgtgagaacatatgcgacgtcccccccgatatctattctgaagaactggacgtacacggacggatctcacccgtttgagagaggaccggaaatgcccgtgcgggctaatcgtactcggcagtcgaccgaccaccacg

SEQ ID NO: 279834 - DNA, 539 bp, Glycine max
  unsure (1)..(539): unsure at all n locations
ggcggaaacgagcagagaggaaagcgaagaaaggacgaagaaggcggagaagaacaagagataaaccanacaagagagaaattggagcctcgaaaacacncanannnaaaagncccggggggaaagagagacagaaggagaaagaagagtttaaaagaangagagaaaacggaagggagagggggagagagaaacaaaagcacaaaaacggaacgagagaggagcgacagagacaggaagcaaacaaggaagataagcgaggggaaagcaggagaagaagaaacgaaagaggaggaagaacgaaagacgaaaaacggacagaaggaggagggaggaagaaggaaaaagagaggaaaaggagcgggagaaaagaaagacagagaaacgaaagagagggacagggaacgaggggagaagaggaaagggaaaagagaangaaggaaggagagagatagaaagagcgagggaggagaaagggaaacgagagggaaaggaacgagcaaacgaaaacagaaggagagagagaagaggaagaaaag

SEQ ID NO: 279835 - DNA, 501 bp, Glycine max
  unsure (1)..(501): unsure at all n locations
ngcgcgcggaattgatgagnttangtacganctgcgaanananaatactcaacgctatgctgcagacatctacaatagacctcctcaaccttagcttcgtaatcagccacaacaaaacaattatgacctctccagcaacaggtacaatcccgggtggaggaatcatcccaaccttagatggtcgaatccttcacaacaacagcaacaacaacaatagccttattttcaaaatgctgctggcccaagcagacatacgttactccaccaatccagcagcagcaacaacaacaacaaccccagaaacaacatacagttgaggctcctccgcaaccttcccttgaagaacttgtgagacaaatgactatgcaaaacatgcagtttcaacaagagaccagagccttcattcagagcttaactaattagatgggacaattggctacatagttaaatcaacaacagtcctagaattctgacagattaccttctcaatctgtccagaat

SEQ ID NO: 279836 - DNA, 563 bp, Glycine max
  unsure (1)..(563): unsure at all n locations
ccacacgcgaccaccaaaacaacaaagccagaacagacacacaacacagaacaaaccaaaccacancncccagggccgcagttttgacccctgagaacaccccgaanagnnaaagcccccgagagcaagaaaaaaancaacgacaacaaaaacgttttttatcacaccacccaccaaaaaagacgggccgggacggaaaaaaagaaaccacccacanaaccaccgacccacagaagaagaacaacgcaaaaacaaaacagccaacgaaaacacaccaaaacacgacacccccggacagcaaacacgcgacgaccgcacaacaggaaaccaacaaccgacaaaccaccacagcgaaaaccaaacgcaaagcaaacaagcngaacacccagcacacaaaagacaacaaagacgacacaaacaaccaaaacaacacgacaccaaacgacaaacaccacacacccacagcaagaacaaaccaaaaaacaagccaaaacgcaaccccaagaaacccaacaacgacgacagagcacaaagaaaggcaaaccaaccccaaaaccaaaacg

SEQ ID NO: 279837 - DNA, 540 bp, Glycine max
  unsure (1)..(540): unsure at all n locations
ggggcggaacgaggcgacgacgactgcannctcnggaaatnagccaacggcccananganaagaaanancgagcaaccacacaannatanatagttattgaacaaggaaaacacaagcggggagggagaggagaacggaaggaaccccaccaccccacacaaacgaaagaagaagaggaagagacggangcgcacgangacggcacacacgaagacacgcagggcgacaaaaagcagcaaagcaggccagacacacaaagcacgnnaggcgacaccagaaaaacggacacaagcggcgaacncccagccagaancgaagagcgaacagcagaggcgagcaaacggagaanaaaacaagaagagaacgcacaacggcagcggaacaggacgagggccacacaacacgaaggggnacccagaaaccgcgaacgaaaagcaggcaaaagaaccgacggcgaccacgggccggaaccaggacaaccggaaggcgcgcagcgggacggagcgcacggaaacaaaagcgagcaaaggaagcaaacg

SEQ ID NO: 279838 - DNA, 408 bp, Glycine max
  unsure (1)..(408): unsure at all n locations
ccaccaaaaccgcggaaaagacaacgaaacacaacgcgaaaacaccctaaacaaaaaggggcggantgaccccgagcaccaaacanaacccaagagacgaagggacaaggaaaacaacttgtgaccaaacaaaccaacggggggggaaagcacacaacacaccacaaaggccaagaaaaaacacgcagacaaaaaaacaaaagagaaaagagagacaagaagccgagcaaccaaaacaaaacaaccgagcaacacccacaaccaacaaacgcgacaacagaagaacaccacaagagacaacgaaacggaacacaaacacaagaaaaaaaaggcaagacaacagaacacacaccaacaacagaacacagccgcagcaaaaaagaagagacacaacaagcaacaaaaaag

SEQ ID NO: 279839 - DNA, 178 bp, Glycine max
  unsure (1)..(178): unsure at all n locations
tgccttanataggcacagaagggacaaggcatgttatggggttagttgcgctccggagtatgatgagtagcggctttattgagcgcaagtacactcatccacagcgtttgcacttcatcaggagggtgggtccgctactaagcggagcctcagcgtacgtcctcagaggagacacgag

SEQ ID NO: 279840 - DNA, 408 bp, Glycine max
  unsure (1)..(408): unsure at all n locations
agctntccgtantggtcttcgctagcgaaatgatcgaagtgggtctgaaaagaggtatatctgaccatcctgctttgatgaattcgaaaactggggcaaatgaagagggtgagaatgaaggagaaacccatgctgcaattgtcattcctatacggccaagtttcccaccaacccaacaatgtcattactcagccaataacaacccttctccttacccaccacccagttatccacaaaggtcatccctaaatcaaccataaaaacccacctaccacacttccaatcacgaacaccacctttagcacgaaccanaacaccaacgaaggaaggaattttgcagcgaanaagcctatagaattcaccctaattctgatgtcgtatgctaacttgctcccatatctactcgac

SEQ ID NO: 279841 - DNA, 363 bp, Glycine max
  unsure (1)..(363): unsure at all n locations
atgaagctgtctcggtacaaacgctcccttgcattctataaccgnnggatcttctcagggagtggtttgcagcttcagaagacacttgtccacgatctgaccattgagatctttgagaagatgtttggagtgtgggcgacgtttcagatcccgagagcattgctcacttgagcgtatcacctttgctttcatgtagcttaggaaaaatgtcatttcttatcctttctttcttccaaaaccattgtcaatgttccaagctttgtctccatcacccatagccaccattagccaccacataccgccgttgttctccgttaaataccccacaccgagagcaacccttcaaccgaagcggaatcttcc

SEQ ID NO: 279842 - DNA, 380 bp, Glycine max
  unsure (1)..(380): unsure at all n locations
agcttatgattctcattcctgngaattcttggattggatgcttaagtccattggcttcccagcccagttctatacttggatcatggaatgtgtttcttccacttcatttagtgtggcagtcaatggatctatttatggtcacttcaaagggcagcggggtcttagacaaggggatcctctatccccttatctgtttgtgctttgtttggagtacttttccagagatatgagcagtctcaaggatgatgccaattctaaatttcatcccaactgtgcaggtattcagctatctcatttggtttttgcagatgatattatgcttctatctagaggagatatcctttctgtgtcaactatgtctgccaagcttcagcacttct

SEQ ID NO: 279843 - DNA, 368 bp, Glycine max
  unsure (1)..(368): unsure at all n locations
attctatagattaaacagctaatttctcanattatatcgatcacgttggagtgactcaatagtggatactctaattcgtcctattataattgcagtcgtaagttattctatgcataccaagaaaaattatatggatgaaaatgaataataattntacaaatttaatcttatcattattaatttatgtgtaattntggtttctcttatcattaatattataagaaatatgagtgaaaaaaattattacattaaaaagctaaaatgataattattttgaaataaattttctttctcacatgatgcttgttatgagatggagggagtattattttgtgtgctaatagtacatatcactttaatataacaca

SEQ ID NO: 279844 - DNA, 403 bp, Glycine max
  unsure (1)..(403): unsure at all n locations
agcttgagtacntttgtanggctccaaggctttccatcagctctgataaatctgccatatactcagccggtattaggcctcatgagctttctcatattcaacagcttactggatttagcttgggtgacttgccttgtatatacttgggtgttccccttttatcatgtagattaaatgcatgtcattatgctcccttgctttccaagattacttgcctgattcagggatggagcaccaagtctttatcttatgcaggtaagttagagttgatcagagcagttattcaaggaattgtgaatttctggatggagatttttcctttgccgcaatctgttctggaccaaatcaacgttttgtgccgtaatcttctgtggagcaaagcggatattggaaaaaacaagcc

SEQ ID NO: 279845 - DNA, 321 bp, Glycine max
ctatccactatatatgagaaatacactgcagcagtaagttgttgtgctcaaaggctctggatgacacaacagctagaagactttggagtaatcctttatcacattcctttaatcgattaccatacttgcttttgtggtgttatggcttaaggttctctcttcattataatcgattacatgttaggcttacagctttctctggcattgtgttctgttgtaatcgatgactgcctcattttaatcaattacatgctatggtttatggattcttctggctatgtgttcgtatttaatcgattacaaatgcctttacggaggggg

SEQ ID NO: 279846 - DNA, 403 bp, Glycine max
  unsure (1)..(403): unsure at all n locations
agctngttcatttattatgtcttcaaaagaactaggcgatatacatgctcaagaatttcacgatgctcatgttcttttacaatcgatcctttcgtaaagaacaacctgtatggatgcttgcacaacttatatatggcccaatattagttcttacctcatggatttgaacaatatgagttgtcctctctttgagttgattcttccatttgtcaaatgcaaaatgataactgcagctctgatcttgtgtccctaagaagatgagcaaaaaaaaaaaaagccatacgggctccaattgtgtacataatatttaatcaatttgagttgataatttaatgaatgtaggattaccttctcatccattaaaagcatctccaataaacctcctcctggagtcttttgtatg

SEQ ID NO: 279847 - DNA, 294 bp, Glycine max
gaaccactgagacttgctacttgagtgatatctgtagtcagatatcatcttacattataactatacactgagaagttagatacacttagatctgatctgctttaaatgtaaccaaataaaaactaactttatacagcagtatacaacatactaagaatctctttgtttatttaacataagaaaagagattacgctactactacgtgatcatgagctctataacggtcagttattccagatttggtgtttaatacttcaaattatatagtgtgaatgtgtataatctctctctct

SEQ ID NO: 279848 - DNA, 406 bp, Glycine max
  unsure (1)..(406): unsure at all n locations
agctntattcttatgttgtaccatgttgctcatgttgctccctttatctctagcattatctcttggcaatcttaatgcacaaatgtatatgaaagatcaatccactacctactctcctggtctgcatatctctagggccaccaatgttaagatagttgctgacaaggtatatccaggtttaccagtctaggatactgccaaaaagaaaggattctagttctactacaacgaggagatgccttcgaggaaaatgaaaatggaaatagtcaatcaccctcggaattggggctccctattcagtgggaaaaaggcttctctgtgctcttgatgcttatgatgtcaggaccttctggaaccagatcctatggatggacactcagatagcctccacttctagctatgatgg

SEQ ID NO: 279849 - DNA, 494 bp, Glycine max
  unsure (1)..(494): unsure at all n locations
gaacgctgttttttttttttcttttttncnnnncnnttagttaagcnnacngccggngaacaagacgggnnacactgcaccacgagttcatttatttctanccaagagccaaagcgagggagcgcgaagagagaagacgccccacacccacaaaagaagagngaaccagacaaaacggcgagncagaacgaccccacgagggacacgagaacgaagaacaaacagagcgccacgacaggagacaacacacacacgcaggagacaacccacaacgaggggcgagaacacagacgccgcacaacgaccagaagacccacccacggaaacaacaacaggagacccaaagaccggaaagacacgaaggcggacaccgagccagagagcccaggcaccacaagagccaaagcgggagcaggagacaaggcagacaaacgcgacgccaagcgagaagccanaagccaagacaggagaggcaccgaccagaaagaagcgcn

SEQ ID NO: 279850 - DNA, 408 bp, Glycine max
  unsure (1)..(408): unsure at all n locations
agcttactcccactattacccacaccacccaccaaacctatcaatgttaagaaaatgacatcggcagaaatgcagttgagaagagaaaggggcctatgctttacttgtgatgacaagttttcccctagtcatcattgtcctaataagaaatattttgttctacagtgggaagaagaggatgaacctgcattacaaccaggtccaccagacgaggttgagacagttggtgaccccagtttgtaagatcatcatttgtcttataatgctttaaaaggctcatcaggtcttggaacaatgaagtttcaaggatcaataaatggattgggagtgcagattctactagatagtgtgagttcanataacttcctccagcctagactagctcaatgcctgaagttacctatagaa

SEQ ID NO: 279851 - DNA, 309 bp, Glycine max
  unsure (1)..(309): unsure at all n locations
acttgatatggcctacccaagcttaaaataataataacaatatttgcttttattntttgtcattgttacttatttatgaatatggtttcagtgaccatgattgaatctacttatgagttgccaagtataaaattaatcccattgaatcaattatattttctggtcaccttcttctgattcttaggagctaatgattacattcttccagacccacctattgtctaatgaattgaagacaggacccagatatgataataaatatggattatgtgaaatgctgactcacttttggtttacaatccattctat

SEQ ID NO: 279852 - DNA, 391 bp, Glycine max
  unsure (1)..(391): unsure at all n locations
agctnngtanaaccaaccaatcagaatgctagacgaaatatagatgggaatagaggtaacaatggcggtaatgacggaccgaggcagaaccgggttgagggagtaaagctcaatgttcctcccttcaaaggtagaagtgatccagatgcctacctggactgggaaatgaagactgagcacgtatttgcctgcaatgactacactgatgcgcagaaagtcaagctagcagcagctgaattctccgactatgcccttgtttggtggcataaataccaaagagaaatgttgagagaggaacggcgagaggtagatacatggactgagatgaaaagggtgatgagaaaaaggtatgtgcccactagctataacagaaccatgcgacagaaactcc

SEQ ID NO: 279853 - DNA, 493 bp, Glycine max
  unsure (1)..(493): unsure at all n locations
nnncctccttggtttagaccttcnnagancnnantcatangaaaccaaccnncacagcncttngaccttggcttggnnagcnnncacttttttctttattaaanggagcaangcctggtggcgagaagatggacatgtaccttcctcatggatcctccatttgagccttccaccaatttgctttcaaatgaaaccttctccaatgtgtcagccaaggcagtgcccccgattatgctgaagttatatacataggctgcctcatcaattgcatcaactctgtgcagcacatactttgttttggcacctgcatatgcacccattaattcatctaaataaaatcatgactaatttcattaattttgactatgtattataattaacggtttaaataattggccgcatagtattattgcgaattcatcaggtcgttgatattgcaatacagtacagacaaatatgactgatgcaatcccagataacacaccttgatgcg

SEQ ID NO: 279854 - DNA, 259 bp, Glycine max
  unsure (1)..(259): unsure at all n locations
ccccacaaaccaaaaaaaaaaagaaacacatcnaccccgccaccgacccaaaaaccggannaaaaagaaaaagttgaaaaaaaaaaagggagaaaaacccaangagaagaaacgaaaaaaagagaaaggagagagaagaaagaagaaaaccaaaccaccaccacaaaaacaaacacagacgaacaccaaaaaagaaaccaagcagaccaacaacaacaaaacacacaacaaacaaaagaaccaaacaacacaaccacac

SEQ ID NO: 279855 - DNA, 374 bp, Glycine max
  unsure (1)..(374): unsure at all n locations
tcggacattcgtgtgaaagttatgatcattcgaatnnttcaagagcttccgttgntcaatttctagcgtgtcgacatattatgcgccagaatagaacatccgtgtganaagttaagaccatttgaatttctcaagaacttccgttgttcaatttcgagcttcttgacatattatgtgcccgaatcggatatccgtgtgaaaagttatgaccatttgaatttcgcgagagtttccgatgtttaatttcgagcgtatcgatatattataagcctaaatcggacatccgtgtgaaaagttatgaccatttgaatttctcgagaactttccgtgttcaatatcaagcttctcgacatattatgtgcctgaatcggaca

SEQ ID NO: 279856 - DNA, 399 bp, Glycine max
agcttgtttgtatcgaacatgcttcggggagatgcggtgaaggatgcaaaatgagccaaaagatgcactgtgaaagttgcaacagacagaggttgcacgagaaactcaagatgtttgcggtaagtgcgagtgtactactattgcacttcacttagccatgtattgagtaactcgcttagcgagacgatccgctgagcgagagagacatttggctttacgcttcctctcttggcatgccaacatgggcccatgtaagattctttggcttaccgcgccatccgctaagcggtagcgagagacgtttggcttctcaacatgctcgcttatcggaccgttctaccgagcccaatcccaaattatgaaattcttatatatatagaactgcgcttagcgcacagc

SEQ ID NO: 279857 - DNA, 558 bp, Glycine max
  unsure (1)..(558): unsure at all n locations
nnnnccttctancccgannttgcnangnnntnctnnncnnnatnagaanaancaaccngngcgaccagcacccagaagcccgatgcnangngcaaccaatttgtgtntttatactatacncacaccacncgggggagcggggagaatatatcgaattaatacctcctgcaccccctcatcatacgcatatactattacatctgtactaacatgacatcgcgatgtcgcatggacatctcacaatanaacatcactctgctctaccttgatcttcagaagtaatatcttgcaatttaaccttaataactccacctctaactgtatacattacaccgattgtcaacaatgcgagaactacacaactatgccaagagagatctatattccgcatgacgcccattacccaccatgatacagtatactgttctatacgcaccatctcttagactctgtcaccttcacagacaactatcctccgcacttcatactatatacaatttgatggtgagatatctaatacaacacatttcacagcacatgaatttaattacatgaccc

SEQ ID NO: 279858 - DNA, 470 bp, Glycine max
  unsure (1)..(470): unsure at all n locations
gacacgccaccagaccaagaagaaaaggaaccaaaagaccacccacacacaanncggggcgacctgaccccgaaccccggaangaangncngggagnnagaggganngaggaaagcagagagttggaagaaaaagaagagannaaagggggggggaaagaaaaaaaaanaagaagaaggaggaagagagaaggggaggaagaaaaaagagaaaggaaagaaaaagaaaagggagnagagaaggaggganagaaaggagggcaaaaaagaaaaagaggaagagaagaangaaaggaagaaaaagagaagaaaggaagagaggagggggaaagaagggaagggaaaagaaagaggaaaggangaaggaaggaagaaaggaaggaggaaagaagaagagaggagaaganaaaaaaaagagggaaaaaggaaggggaagagaggaggaaaanaagaaaggaaggaagaagaaaa

SEQ ID NO: 279859 - DNA, 194 bp, Glycine max
ataagtagatgcatgtgtaacacggggggtaactgcgatgagggagagtctcgtgagacacagcttaaagatgagcttctctccctatctcgtccttcagtagcgagctgcaccctcttgctatctctcgctctgtcatttactcagatgaggcatcctctacatgcttcttatgcacagctcatcttggaggt

SEQ ID NO: 279860 - DNA, 402 bp, Glycine max
agcttgatcagctctataggaacggctttccaggttccggtggtggtgccggtgggtttaggattcgaattcccactgggttgagcgcgccgcagcagcagcatcctggatctgcttccaaggtgtttgggaaggttgggaatcagagattcagccccaatttgaatcaaaaccctaaccctaatcttgggaagaagagggagagagaccccgtgggtgaagtggtggctgcgattaaggtattgggagatgggtttgtgagaatggaacagatgaagatggagatggccagggagatcgagaccatgcggatggagatggaaatgaagcgcactgagatgattctagaatcgcaacagcggattgtcgaggcatttgccaaggccgtttcggataagaaca

SEQ ID NO: 279861 - DNA, 381 bp, Glycine max
  unsure (1)..(381): unsure at all n locations
actcaagctctgtagctntatgttgaaagtcctcactaccaaaataggtagcatanatatttttgtcatgaagttgccatggtgatgcatgtaatactgctggttctgttatgaatgtcccatagtacttagaaattaagtgtttcatatatatagaagccaatcaattaaacaagataaaatggttcttgatccctctattccaattagtatcacttcctaacctccaaccattgacgtcccttgcatacatgactctttacatctggacaatcaatgcaaccagtcgcacattgctagagcatgttatatatgttcattccacggctcctgacatgacttgatcttatatatataaaccaattcaataatgaaatctga

SEQ ID NO: 279862 - DNA, 396 bp, Glycine max
agcttgcttgaggctggggctttttgcaacgtgtaagagttctaattaacatttacatgtaatatatgtaaagaagattaaaaagacattagacaccgtctgtagtttgagattgacctttaagatgaatttcataacttaattaaggaatctataacaacttaattatggtcttataaataaaatacaaaataagtggttcagttcgaattactttgcaatgctagtatttttttaaaagcattttgctttgctagctagtatgaactcttaagataatatttaatgttactcgagttaatttttttggatatgattgatttctcttactagcattcttatttagataaacaataacatagcaaatatttctttacatagcctatcaaaaaaata

SEQ ID NO: 279863 - DNA, 476 bp, Glycine max
  unsure (1)..(476): unsure at all n locations
ngntgttatcctccgatataagtgatagaacatgaaatcaggtttgntttatttattctttcgttccatcggagaaaatccaaacaataaaaaggttccagtccactcaatctctattaaatatctagacattgtcctacgaattgttggtattttttggtatagctttctatctaaactagacgagcaatataattgagcaggtttctttaccagcatttcttttggcaggagatagtgtattctccttgctgtttttgttatctgatgatcaataatctaatatagttatgaatcctaataactctttctgaataaatgcagggattatggctggacttgcttttgaaggtagctgattgtttctctaaattgtttgacaatgtttaccaattntatgaagaacattcagtgcaccggtcacaatgacttggcacttctccacacttgatagttaggctgcatttgcatcacac

SEQ ID NO: 279864 - DNA, 435 bp, Glycine max
  unsure (1)..(435): unsure at all n locations
gatcctctaagtcacctgctgcatgcaagctntacactaccaagatgatgcagatcggatggatggcagtcaaattgttagttgtagactattgtgcaaactagttacttgtcaaattgaagttataaaaaaaaggagtgctttcaagtttttcttaccatttgtagtgtgaaatttgaaatgatcttctatatatgaatgaaggagataatagatagatggagtggttttctttttcgttatggctgtgttgcttagtttccttctttttttcgctcggagtgaaaaagactacatattgtacacattctattgataacaagcatgtctttctctactgctatgagtggcatgccaatgatcaagattttagcaatggctcttcttgtgcttccccaatgaattctaaaagaagaaaatcaccaattgaatcta

SEQ ID NO: 279865 - DNA, 193 bp, Glycine max
ttacaagccataactgacaaaccatgatatcaccttacccttaaagaatgttggagctctggaattgcttctgaaataaactgggaataagtgtggggggtatgcttcattggaagatatgattcttggccatgcttgatgtatctgaatattgcctagctcttgcttaatcttcaaatccttctccaaaaac

SEQ ID NO: 279866 - DNA, 405 bp, Glycine max
  unsure (1)..(405): unsure at all n locations
agcttctnggtcnatcaggccaacttacaacagcaagcgccgagagactcagcataaggatgcacatgccaaagttgagtatgtgaaaagattgtatgaccaagtgaaggtgcgaattgcaaagaagaatgaaagctatgccaagcgagccaacaagaaaaggaaggaagtggtacttgaacccgatgatgatcctgtacatttgatggcaaatgttgtccaagaaggaaggaatgatgagaatcctgatactggacaaatgcaggctaaaggcccaagtggagaagggtattggcccaggtggagaaagacgaagtccccgagtggagaacgatgaatgcccatgtagagaaagatgaaggcccagaggtagatgcactaccaaaactattaattattgctaaa

SEQ ID NO: 279867 - DNA, 325 bp, Glycine max
agcaccttcttcaacagatctatgtccctctccacaacaccattctgttgaggtgttcttggcgttgaaaatttatggtgaattccatgttcttcacaaaagtgttcataggactcattctgaaactcacctccatgatcactgctaattgaataaatgtagagaccttttccattttgaattaccttggtaagtgtgcgaaaaacatccaaagcttcatctttggttgtcagaaacaatgtccaaggtaaccttgagtaatctccactattaccaagctatagtaatttctcctaacctatagctcttaaaggacctataatca

SEQ ID NO: 279868 - DNA, 404 bp, Glycine max
agcttgcttattcatggaagctcctaatatctcccatactttttggggtgggccattcttggatggccttgattttctcagggtccacttaaaacccatttctaccaactacaaaccctaagaaaaatatattatctacacaaaaggtacacttctctatatttgcatagagggtgtttttcctaaggactgaagaacttgcctgagatgccctaagtgatcatctaggctcctactgtacactaaaatatcataaaaataaacaactacaaatctacctatgaaatcccttaagacatgatgcataagcctcataaaggtgcttggtgcattagtgagcccaaaaggcatcactagccattcatacaaaccaaacttggtcttgaaagcggttttccactcat

SEQ ID NO: 279869 - DNA, 310 bp, Glycine max
tctgaataaaatctaaagacgtcactgttcatatagtcaatgactatgtcacattcggctctaactctatctaatagtcataactcttctaacgagtggcttgaccataaatgaagagtctataatagcaacgcttcgatctgcatttcaacaatcgtgaatacttctccaatcaatctcttacgatactttacaagcctcgagtctcttttaacgtcttcttattctttgtaccataagctttctaaagctatctgcgtctctaaaccttgaacacttgtcctatgcatctcttcattctcttctccct

SEQ ID NO: 279870 - DNA, 113 bp, Glycine max
  unsure (1)..(113): unsure at all n locations
agctntaatttatgtggcaggccactacatttcatattgaattntatctatttataccttaattggaaaccaaattattttaaattaattttttttttaaattacattctaag

SEQ ID NO: 279871 - DNA, 259 bp, Glycine max
  unsure (1)..(259): unsure at all n locations
actcctacatgatgatgcatgatacacatatgatttatagtgactaagatgcaacanacaatacagcaatatagagagtggngcatgtaaaagataaatcttcttcaagctcttcttcaagttctaaggctaagtcttcatgttgctcccctatccctaacataccctatgcaatagtaatagtagactctaaagtccanatattgaacccaaggaccagggtatncacagttaaaaagaaaatagattaaatcctttt

SEQ ID NO: 279872 - DNA, 428 bp, Glycine max
  unsure (1)..(428): unsure at all n locations
caagcctncgatttattgcaggtagcaccagacatctctataaagactccttatgaaatgcacatcacctatttttctattctcagcattgacttaggaatatagtcataacctgtacaagaacaggtatgagtgggagtagaatctgaaccgccatcagaacatacatattttcctcagggcccgtgtaactcgatcatagagttcggtatcactctaatcactcggtagatgatagtgatgcacaggtgaaaatctctgatgtcttcattgatgctcttctattgcaagaagaaatggatgcaatggcaacttttagttcgtctcagtaaaaccagtggattcaattcagcttttcctgattattaataatgtcttattggcgtaatctacttctgataagataacagtttcatattttgcttctg

SEQ ID NO: 279873 - DNA, 504 bp, Glycine max
  unsure (1)..(504): unsure at all n locations
naaccctctgttgngngaacgtttgangnacnnctncncanatnagtnaagcnaccncgcgctgctagcaagaactntatctctnggaagaggtttgtaatctgtgtggncagccaaggcaacagtgccaattggcaaaactgaatgtggctcatacccaaaaactgcatgttgggcacactgttgttacaatgaaagagccacgaacaaaagatacaagtaaacagtattccaatgacttattaggcaaaattatgcagacaaattaacttcaagactccattcaaaataggaaacagattctatgtttcttctaatatatgtttccatttcaagagagttcatcttatgcagggaaaagggagctcaaacaaaccataagcacggttaggatcaaaggctctcatatcctctacgtgaagcgtgatcggaaggtaattgcaagcgtgcttgcatatgaacctgaaatgtaccaaaataccaatagtgagatttatgagaccn

SEQ ID NO: 279874 - DNA, 407 bp, Glycine max
  unsure (1)..(407): unsure at all n locations
agcttattaattgaaagttgttctattggaagatcagataaacaaacatgcaagtatcattcctagaacctacattctattccattgtgactttacatctaatctgactttagttgtgtccaatgtgatcaacctagagcatatttgtatttttactcttgcatgcttagctttaaaaactagtgccaattttgaatatttttgagcaaaaacattagttcttagtttatgcgtattttatgtatacaattccttctgtgtgtggcagttgagagggtggaacgagaaggatgatgttgtagctaaatggaagaaagtgcanaatgatatgtgcctacatgctcattgctttgttagtgatcccaattccttcctggatttggctagtgaattgagatatcacatat

SEQ ID NO: 279875 - DNA, 449 bp, Glycine max
  unsure (1)..(449): unsure at all n locations
aggactcaagggagttagtgtggagattactctnggatggngatgatgctattctgngacttgcatgagaaggacctgtttgagaagtatttcacacggcttctggcaaagcaacttttgtcccgaataacagtctctgataatgcagaaagaagtctcatagttaagctcaagacccaatgcagttatcaattcacctctaaattagagggcatgtttacagacatgaaaacctctctagaaacattgctgaacttttatatgccaaccaccccgagttaagcaacggtcctacgcttgccgtgcaggttttgacaacagggttttggcctactcaatctactgttacatgtaacctgccagaagatatctcttcactttgtgagaaagttcagtcatatattaccttggcacacatactggcaggagatngtcctgcanactaatat

SEQ ID NO: 279876 - DNA, 375 bp, Glycine max
agcttatctacttataaatcacgtgatcatgaattccgaaatatagggggagtaaacgcatgcacattgtatctatatacaattgtttgttgcttgcttgaatcttgatttcaggtattgtattgtcatcatcaaaaaaggggagattgtagatgcaattgcctttgacgttttgatgatgatcatgatgatgtgttgcaattgatgcaaatgggcttttcaagattaaaattcaagacaatacttcaagattacaagtcacaacatcaagatgattactagaatattaggaagggaattcctaattgaattagcaaaggttcggccaagtgatttgaattaaaaaagtgtttcgcaaaggttttactctctggt

SEQ ID NO: 279877 - DNA, 493 bp, Glycine max
  unsure (1)..(493): unsure at all n locations
agnnccctcggggaggccttaagnnatgcatncacactatagattactcaacctngagatgaagaagggttgaagggtgaaacttcctgttttattcgttgaccacagagtggtacctggagatatgtcgcggnggtcaagagaccttgnggacgtcaggtggngtgctattgcccaaaaccaagcttgaccaatcccgacccaacccgggcatagtcggtcagtgagaacttgtgatgtacctaaacagacgagctcctggcagtcaacagataaaaggaacaaagaccacaaagcaaggaggcttgtggtggctggccagctgcgaatattgtgtgatatatgggttgtggcctctggtaatcgattaccaagggtgggtaatcgattacaaggcttaaaaatgaaaacaggaggctaagatggtctctggtaatcgattaccaacgggtgtaatcaataacacagcttgtaacgatgacacgacaccacc

SEQ ID NO: 279878 - DNA, 575 bp, Glycine max
  unsure (1)..(575): unsure at all n locations
caccacccgcgccttacgagccgacacgaggagacangcgaagtcgccgacaccgccaacacagacacaccaactcannacnaannaaaaannnggcggagacgagccctcgaacacccacnnnttngaaaannnccnnggggnnnannnnngggnnnnnngnnnnnnnnnnttttgttgngggagaagcgaaaaaagnggaagggggaggaagagagaganagagcgaaggaaccaaagggaggaagagngaagggaaagagcgaagaggaaagagagaggagagaagaagagaaaaaacaaacggagcaggcaaacgccgaaccgacagacacacccacgacggcaaccacccgccaacacgaaaaactcacaacaacacaccgcacgggacacgacgaaaacccacacacaccaccacaccaagcacagcggacgcccaagcgccacgcaacgccacacagacagaacagccagagagaacgcgacacagacccgggaaccaccaacagcacacaaacggccgcaagcagccgaacaacacacaccacacccacacgccacccaaccaagac

SEQ ID NO: 279879 - DNA, 343 bp, Glycine max
atctatatatggtgtattacaagcctcccgtcagtggtaccttatgtttcatgggataatatcttcaggtggttttgatgataatcccatgcataaatgcatataccacatagttagagggagtaaaatatatattcttgttttacatgtatatgatattctactagcagctaatgatcggggttgtctacatgaggtgaaacaatttctctctaagaattttgacatgaaggatatgggtgatggatcttatgtcatcgacattaacattcatacagatagatctctaggtattttgggtctgtcacaggaaacctatattaacaaaattttagacagattt

SEQ ID NO: 279880 - DNA, 400 bp, Glycine max
  unsure (1)..(400): unsure at all n locations
agcttgcatagttagaaatatcttggttgattccgatggtgtgaagtcaaggaaagatttttctattgccatgatgaggtcatctatagttttaggagcctctttgtgttgtaatgactgaatggcattaaagaagccaagatctaagacattaaaatcaagcaagtttgggggttgagaaaccaatcgaatgtcaaaaccgccttcactagcagcttaatggaagtcgttgtcatcttcatcaatgtgacatggagcattgtcttgttgtatgaaaatagtttctcctctatcccctattggccattttgctttgattgcagacaacacatgatgaataagaaaatgtttgcttacttgcttatttattgaagaatattggtntcgttccatagtccct

SEQ ID NO: 279881 - DNA, 492 bp, Glycine max
  unsure (1)..(492): unsure at all n locations
nnncctcttttccaatttgcanagatcgctcnncnnnatagaananacaaccccgcgnnngctgaggatgaaattcgaagactaaaactttattattttatgatcnaactctcgagaagggggatgtatttatatcatacaaacagcgccatgattcaatacctctatcaaaagcattgatttgtatagttagagtgtttttcttcttggttctagatagtagatactaaacaaaaacatactaataccaagggggtctagctcagatggctgagcacggtgcgtaaatgttgtaaatctcctgataccatgttcaattcctatggattaaataaaacaccaatgagacgctttaagttatgaattatagcataagggaagtctactaacgccagcgtggcttgtgtggactttcagatctgtccgcgctaagataattacctaaacccttatgtttatatgagacatgaacatgatctccatgagctatcg

SEQ ID NO: 279882 - DNA, 572 bp, Glycine max
  unsure (1)..(572): unsure at all n locations
accccccaaactagaacgttgagcttctgcaaaacanacgncgaatntgagcanagaaccccgaggangactctagaangcgagcttgacaagcgaagcaaancncacgggtgngcgtacggacaagaaacagcacggcngcacacgagggcggcatgtgtgagaaagacataacgcccacaccgcacacggacgcgaacaaagggagatagacgcgaccatccgagtgcgccgaactggagacaaagagagcgacggtacgcgcaanacgagaaagcgtcgataccgacagcgagtgcgaggaccacgaagaggcgcacgaagcgagagtgcgaagcaagaagcaagcgcaacagcacaccgggacacccacaacgccaacacgtaagcggagagaagacccaagggacggggacagagcaacgcgcatggggaagccgaaaagaaacgggggagagggaacaggacgggccaccgacgagcgacaagcgtagagcgtaagggacggcgaacggcgaaaccgacgggcacgcacggggcaacagcgacgaccgaagcaggagcgaaaggcg

SEQ ID NO: 279883 - DNA, 419 bp, Glycine max
  unsure (1)..(419): unsure at all n locations
cccaggctttgcggtagaactggtgtcatgaagctaagcacctgncatggcggctaagctgaattccttgcgggactgtaagcgctaagtgagtccttatcagctaagcgcatacttctctatactcaagatgcatcattntagctaagctggcccagaacccggcttagcaacagttgcatcttttctaatctgcagacctcgctaagcggacttatccgcacgctaagtcaagcctgtgtgctaaaaaaaaaacttgaatttcatagttaggctaagcgcacggtgccgcanagcgagcatcttcgaanaaccaaacgtcacttcgagaaagcaaaatggcttatgtgagtgtaacggcaactactctcacatttggtggaaactgatgtattgcctgcatcntctctcttgactca

SEQ ID NO: 279884 - DNA, 401 bp, Glycine max
  unsure (1)..(401): unsure at all n locations
agcttcttataagctgaaccattttatcaataaacacaagttgagttttattcagaaaattagagtttatctcttttatcttagtgagagtgattctcctaaattcttgagtgattcaagaacaccttggctgtatcaaaggactttcacaacctttgtgtgttgccctcgctggaaagagtgattctttccttcctttcatcatcacccttgttctttcaacccacaattccaaaaaatccacctctgcccagaattatctcgtggccataactcccattntacgcactcaaattaagtgattcttgagcctaaattgaatttcanaacgagacctttcacctcgttgtggaatcacctcatttggagccctgtagcttcagntattgccatttctatat

SEQ ID NO: 279885 - DNA, 313 bp, Glycine max
ctggggtcaattacgagtgtcgcgatatcctacggcacacaataggacatccgaatcaaaagttattacgtgggactgttcctagagctcccgatttcaatctctagcgtctcgatatattaaggggctcaatcggacatccgagttaaaagttattgttgctcgacttttcttagagcttccgctgtcaatattgagcgtctcgatatattacagggctcgatgcgacatccgactcaaaagttattgtcgttagatctttctcagagcttccgttttcaattacgagcgtctcgatatcctacaggacaca

SEQ ID NO: 279886 - DNA, 228 bp, Glycine max
  unsure (1)..(228): unsure at all n locations
agcnnttangtggttgaagtgtatgtggaagagggggtgtttgacaaatctgaaaaaaagttgaatgattttaagggagatgaggttgttgtaattgatggagtggaggctgaaccagttgtggagggtgaagataaggctcaggttcaacttgatgaggaaggtttggtggaggttgaggtgcaggatgaagatgaggctggtgttgtacgtgagatggaggttgtt

SEQ ID NO: 279887 - DNA, 499 bp, Glycine max
  unsure (1)..(499): unsure at all n locations
ntgtgataattagcactcaagggaggtagaactaagaactctgtgtctcagactactattcaatattacaaagtcaaggttatgataaaaataaaaaactatactccctcttttctcanatataagggaaaaaatgacatactaactaaaaaaagttacttaaaattttcttatatttgagaccaaaaacaatgtgtttccccttctcatatttgagaccagagaaggagtaactcattagattccaaaccacatgcaatgtatctaccataacagataagtccatgaaatgcttaccaatctgatcaatctggtgattgatcataattactgaaatcctttgtaaatccaaatcttaaaaggtgggcctaagttattgcttttgaaatctactggaactattcaatacanagagaatgttcagaaatgaacgaacctcaaccaaaatgccaagtttcatactcntttcttaaggcaagaatatatatgttgaaataat

SEQ ID NO: 279888 - DNA, 406 bp, Glycine max
  unsure (1)..(406): unsure at all n locations
agcttgtnatgnttttttctttcgatcaaagcagagtatggtgtatctgcatcaacaagtaaatatcttattgtgaagttcttagagaattggccttgaccaaaagtggtcattaggtccacgtagcctcaggtctctactctttcgcctgcaaagccaaggagtggaccgacgtgaggatggacagtgtcaggggagacctcgagtctctggaaagttttccagtataggatatcattggagcttccctggtcaatgagaaccttggacaccatgaaatttgcaatgatgatggagacaaccatgtggtcgtcctggttgatggggttgatacccttgaagtccctatccgtgaaagtgataggagggagactttattgtgatggtgcattgacgaaattgatgt

SEQ ID NO: 279889 - DNA, 495 bp, Glycine max
  unsure (1)..(495): unsure at all n locations
cacatagatactaagctgctgcncatggagctcctntatctcccacactnnttggttggaccattcttggatggccttgattntctcaaggtccacttggaccccatttctaccaactacaaaacctaagataactatattatctacacaaaaggtacacttctctatatttgcatagagggtgtttttcctaaggactgaaagaacttgtttgagatgtcctaagtgatcatctaggctcctactatacactaaaatatcatcaaaataaacaactacaaatctacctatgaaatcccttaagacatgatgcataagcctcataaaggtgcttggtgcattagtgagcccaaaaggcatcactagccattcatacaaaccanacttggtcttgaaagcagttntccactcaatcacccttttcatnctgatttggtgataccactttaagaacaattttgaaagaattgcaccatcaactcataagcaatcatc

SEQ ID NO: 279890 - DNA, 410 bp, Glycine max
  unsure (1)..(410): unsure at all n locations
agcttgtattgnattttccactacatcaattgtacctatctagctacttatatcctgaatcaaacatgaattagaaaagaaagttaacttgatatagagattaaattgaaattgaaagatggcaagtataacacatctactaagtgtaaaaattcaataaatttgactgttccagagtgtatggctatgacttgttgactagcaggcaggcgaactactatggaatttatttctctatatgtagaataacaagtcaatgaggatgcaatatgatctgtagcaccagaatccaaaatccatgttgtagcctcaagcttgtgagcattacaaataagggatagtatatattacctatgcttgatgtatgagcagaacttgtaccaatctagttaacttgtgatccacgagag

SEQ ID NO: 279891 - DNA, 381 bp, Glycine max
  unsure (1)..(381): unsure at all n locations
cgtccattagtacaaatagcactattattgaccttgaatatntttacattaagaggcaataatgtttgcatctgatatttgaactgtatgaaaaaaaaataaaaaattacatcatgacccctgaaggtctcggtgtcacgataaaacaatactttggaccggcttcaagaagctctcgcacgcctacgtccatgactctcgaagacccagagtaagggacacaaaaaaatcaaggaccaactggaggagtcaatcactgaaaaagtgactcgacaattaatgttgtctttcagccaaatgcagtcccaaatgcaatcgcaactgcaatcacaaagactcacactgcctcctgagcttgaagttggtctttctgctgctcgt

SEQ ID NO: 279892 - DNA, 421 bp, Glycine max
  unsure (1)..(421): unsure at all n locations
gccttgtnattgagattanatggcggngaatcatgtganagggcgcatcgccattatccgactctggtcacttttagggtgatagacaagaaccgattcaagaaatctagacaccatactgtgcgcataatagctgttgcttttaaagaaccatgaagatgtagcttgctcatacaacgttgaggatacgtaggagcaagaacgcctctccatattgcgtccaggatagattctagcatatccgagcggtcaatatgtatagaaatgttctacggacctacactataagttattgagccacccaacggctaacgaatcggaacgaagacaatgtcactggtgtatttgagtcacgaaagctgtggcattggaatgcgtattgggcagaggtttctttcatctgccctattctcttggctcg

SEQ ID NO: 279893 - DNA, 490 bp, Glycine max
  unsure (1)..(490): unsure at all n locations
agcntgatggcctggggctaaagatatcananctagataatnaagctcgaaacagtaataacatttgtaacatggctgcttagcatgtatttatattgcctttacatgagaacaaagggaggggaaatatatgtggaaaatgaacacgaggaagtaganaataattttctccttccttgatttgatgccccacatgaggcgaatataatgctcagaaaaattaaaatcacatactcttccatataagagatttgtcaagatattattntaaaaagaaccatatattttaacattgtgagaagttccttaaggtcaagtcccacacagttaacacccgatcaactgattgtctcaccaagaactctaataacacactactctgactcccacagtagcactatatgtgtgttcaattcactgtgtcaccacactgaatgtgatttcatttattgagaagaggattgatgttgaatgtgccttatacagaggg

SEQ ID NO: 279894 - DNA, 405 bp, Glycine max
  unsure (1)..(405): unsure at all n locations
agcttgttggtttatggggtacccgtcatatgtggtactaggtggctatcgggcgatggtgcaagtcgactctccacatccacaaatcacacataaatccaccatcccaagttgcccaccttcaactgagctcacgtagtcccacgtagcccttatcctgattcctctcaacaccgggtccccatcaatccctccaagcttccataacatccaagcaattcaacatccaaacatcatgaattatcagaaccaagaaaacagggcagaggcagaaaactctgcccaaaacacaaaccaataccacagctttccttactcaaataccccaataacattctctttgttgcaattcgttcaccgctggatcgactcgaanattttactggaggtccctagtacataagt

SEQ ID NO: 279895 - DNA, 444 bp, Glycine max
  unsure (1)..(444): unsure at all n locations
actcagctctagaggatactaggttgtcacccagtagggcctccttaacgtttggagccggtcgtgggatgatgatctgctgatcacaggcctagtgcctgctcgtacccgtccctgagaattggttaagtgggaaatgacattatgctgtgaaacatggctacgctaccacttacctcggttcatccctgtcttggatttggcgccgtattgaccatcgcttgaaatgatcttgtccttgtctttcgattcataaaataaaaatgcatgtgcatgtgtatgtatgagcagtttcaaaagcaataattctttagcaaaagcctgttgggttcagttntaattaagcgcttggggcatccncatggatcgagcanaaaggctcggatcattaaaagaatacgcatcttttaaggcacanagcgaggatcagaacaacgaatcatc

SEQ ID NO: 279896 - DNA, 407 bp, Glycine max
  unsure (1)..(407): unsure at all n locations
agcttgtgtttctggagattcaaccctctggctcaataatattttaccaggaatgttacgacccttgagtaaccttcacaaaggaaaaatataaaactataaattcccataaattgtataaggcatgtgcttccatgaaatgcattttcaaagcaacaataatccataacactacgaaaagaaggttcccaatttgactgaacggaatacagtcacatcagcattggattcaatcagacacacataaaccatttccaaccatttcttagaatttcacccttcgaaaattcgtgatcttaatgccaaaaaaattcaaatttttttaaatgggttttctaaatccgacggatgaaaacattangaagtgaagatcagcgaatcaggcattgaaattcttgagatcacga

SEQ ID NO: 279897 - DNA, 329 bp, Glycine max
  unsure (1)..(329): unsure at all n locations
tactntggcaacagaagggcattaganaagatcatatcttcttatatcttccattgnnncaatngtataatttcatctaaacaatattcagaaaaaatgaaagaaaatatcctcataaatcatgtttgctatctcccctactaaataattagactccatctatacctcanaccccacgtaggatttatgtacaaacagacgaaagagggggcaaaaaataagtgaaatttaaagaggaccttggacaactttcaataaccaagtttagtcccactctgcctatctacccatgcatcgttaagctaagctatgtactcattcaccttttg

SEQ ID NO: 279898 - DNA, 405 bp, Glycine max
  unsure (1)..(405): unsure at all n locations
agcttnatcctcatcgtccctcacagtctttagattggggagccaatccaatccttgtgttcggactctcagccacttatgatagccgccgatgatcccattactgcttcccctaagctctctgtcctttcttcacgccgcatcccatgccttgcgaactccttggagtaccctcgcgttgtggtcactaaaaccccgtgcgatgaaaggcgtgatgctttcgtctaatggcgctcctctcatggcgtagccaagctgtcttatggtgagaacaggattataattaatacaaccccttgttcccatcaagggaacatttggacatccttcgcatgaagatagaatcctgattcttccttccttctagcgagggaaccaattaacagacgcccccccatgctagcc

SEQ ID NO: 279899 - DNA, 377 bp, Glycine max
  unsure (1)..(377): unsure at all n locations
tagagctgcattcgcgcacctattttgaatcctctatgatgttcttatgtatataaaacagtcccacaatcncgatcttaataaatcacatccatatgtcattgcggcatttcaccgagcacttggtgggcgcgtgtttaggcataaattgcaagagaatgggggcaatgtggcatgccccattgttttagaataccacataggcgtgaggccatcctctacaacccctcaactctaacaaattaagcataaaaacccccaanactgccccacaaatatgagcacattctcacaatttagagcaccaaaagatgaacaaaatgcaccaatggaaagctaaaaactcaaggattgaatacttacttgttggagtgagt

SEQ ID NO: 279900 - DNA, 400 bp, Glycine max
  unsure (1)..(400): unsure at all n locations
aactaaattgggcacagcctgggataananntatagttagttggaatataaaccaaatnnataattgggaagtgaatatatatanntatatatatcatactatactatnactgagggagggaatcttctcaaagtanaaaataatacaancntatttggtannaagtaactaagctatttggttgtccaggggtttaactataatatacattggcatcctaggtaactacttcaaacacacatgtcaaccttccacgtcagttttgaaatagaagcacagacgcccagtccttgacagtcggactctccaacanacaagttatctataacctcttaattatttgaatatatattggaaccactttatctcttgacaggtgtcacgacctgcctcgtcgtt

SEQ ID NO: 279901 - DNA, 490 bp, Glycine max
  unsure (1)..(490): unsure at all n locations
ncccccgcgatgagaagtcancgtacnncgcacacttagaaactcaaccttgcanaanaatgaaaatattaaaatttcaaattcatattcttatgtttaaatttttaaatcatgaaacacactcttaatcatacttacaatcttagcatattttcatcacatattcataatataataccgtgtttttattatcataatacaatattttacattttccttcatgtgacaattgcatttcaaggtacgttcatcaccaacttcatgtgacattgaatcattgacataaacttagattagaaaatgaatgaacacacttaaaggaaagaaatcattgtcaaaagttgtgctttgtaattaaggtgtacaatatataaagttagtgatgaacataccttaaaacatagtgttacatgaaggaaaaaacaaaatattgtataataatgatgaaaatgcaatattatatgaataatatatgataaaaatattntan

SEQ ID NO: 279902 - DNA, 443 bp, Glycine max
  unsure (1)..(443): unsure at all n locations
cccccgaacagaggcgaaacggacagngaaacgcacgcaaccgaaccccacacaaaaacaccacnaagggggcgccccgaccctgnacccccnnaanaaaaancaaggagaaagaagagaggagagaaaaaaaatggtgagagaagggaaaaaagaaggggggggagaaaaaaaggagaaaaagaggggaaanaaggaaaaggaggaagaagaaagagaaagaaaaaaaaggaaagaaaggaaggaagaggaaagaagaagaaggagaaggaaggaaaaaggggaagagagagaagagaaagaaaggaaaggaagagagaaaaaaggaagaaaaaaaagaaaaaaaaaggagaaaaaaaaggagaagaagaaaaaaaagaaagggaaggaggagaaagaaagagagagaagaaagagagagaaggaaaaaaaaaggaaagacc

SEQ ID NO: 279903 - DNA, 424 bp, Glycine max
  unsure (1)..(424): unsure at all n locations
ctgcggatntggtcttcgccgggtaaaggatcaaagtgagtcatataagaggcaaatntggtcatcctgctgtggctgccattcctatatggccaagtttcccaccaacccaacaatgtcattactcagccaataacaacccattttcttacccaccacccagttatccacaaaggccatccctaaatcaaaccacaaaacccacctaccacacgaccaatgctaaacaccacctttagcacaaaccaaagcactaaccaagaaatgagttttgcagcgaanaaaaaacctgtagaattcaccccaattccggtgtcttatgctgacttgctcccatatccactcgataatgcaatggtagccataacccctgctaggtttcctcaaccttcattntttcgaggatacaactcgaacgcaacat

SEQ ID NO: 279904 - DNA, 428 bp, Glycine max
  unsure (1)..(428): unsure at all n locations
ttcnatangtatagggncnaccagagagacgaggggggcatttttgaaagaccacagacacaccactgcggcgagaacaccgcacgagagaaccgagacccgagggagagaagcncggcgctggagaaccncggcaagaacgcagcgcagcgaccagcgaccgacccagagcccggacagagacacccacgacgccagcggagcgaagccaaaacgaccgtgctatctccctgttattgatgcatatggaagcgttcctagtacctctatacgtaggatgctctgtgtggtctcctcctcggccgtacattctgtgtagtttattgtattccgcctctgatagtcttggaccctgggtgtgtttccgatctcttgttttaatacgataccccgtaccactatttatcgtgccaatgtataaccgcttg

SEQ ID NO: 279905 - DNA, 492 bp, Glycine max
  unsure (1)..(492): unsure at all n locations
cgcccaccggccttttagggatgccagatcgcacnacnnttngaaacgncacccgccgcatgaanaagaccattgtgataaggggaagattagtgcnttttgataatctaagcccttgagtgcgataggaaccaatgaatatttgtagccaagcctcactacaagcccgataaagcccttctgattctgtgaatacatttctgactgtatggtctgaaacgaaatccaaagactgagcctcttgctagttgtgattaattaatcacttatacactagtgcttgagagaaacaagagccgtgaaactgtggggaagctactttccttgagatctggcttatgcctaactccatctaaatgctcacgcgacaatctattcctctctttggagaaatgcataccttgtgaaacacaagtgatgagagcattttactccattctcttatcattctatcaagaactcttggtgcatccaccctatgtacatatacct

SEQ ID NO: 279906 - DNA, 538 bp, Glycine max
  unsure (1)..(538): unsure at all n locations
gacgcaccgactacgacaagagagataagcggcacgacaggacacgaacacacgaaacaaatactccaacaccnacaacaggagggnnnnnttgacctcgctcgacccccnnnnanaanananaaaggggagaaananagacggaaagaggggagaaagatggtttaagaaagaagaagaaggaggagggagggnngaaggaggaaagacagacacaaanaagaaagggggagaagaggaaaaagagaaacaagcaagaagagaagggaggggaagagcgagaaagaaagacacgagcagacaaaacgagagcagggacgaaacccaaaccaaaggaacgacaccggaaaaaacaccacacaaagaccagcaccacaaagagccacacaccgcaaaaagagaaacgaggcagcaagaaacggagccaaagagcccgaccgaacaacgaggaacagagaccagaacatagcacaaagaacaacacaacgaacgcaacgccacacgaaagaccaaaggcaacacaaaccgcaacagaaaa

SEQ ID NO: 279907 - DNA, 330 bp, Glycine max
gacactgaatttaacgcacgggcgcgggctgataaattacaatttgaacaattaaaggaaagagaacttttttgtccctttataaaagacatatagcccagatacatttaactaactgaaaagagaagggaatacaaagtgagacaacaaggttaatgttataccttcacctgccattgaagaagtcctaattttgattcatcaacttgtttgttgtggagaagcttgtattggtaggaagaacaaaaggtacatggtcttatataaacacatatattggtacttgagcaattacgtcacgaaactgtataacaaatatagcggtgatat

SEQ ID NO: 279908 - DNA, 367 bp, Glycine max
  unsure (1)..(367): unsure at all n locations
agcttcctcngccgtaaaaaagatattatcggccagtgtttgtaaaaaaattgcgcactgtccgctgaaaaatatccgtcggggctatttaactaccgatgtcggctattgttttttctattccacccctgaattatatttggatgatgcctattaggaaatgttcggtcggggtcatccggccatgcttctttttgaggcctcaatctgtcgtctttcctagccaggcgacgctggctagcatttttttcgatcaatatctgagtgaatcatgtttttttttgcccacgagggctaatggtttcatgtgccaccaaatgagaacatgccaatgtcggacgatacacaataccgcacgaaaaaccct

SEQ ID NO: 279909 - DNA, 471 bp, Glycine max
  unsure (1)..(471): unsure at all n locations
catgcgaagtgngtggaattcctagagcaattcctttatgttatcaaacatanaaagggaaaaggtaatattgtagccgatgctctttctcggcgtcatgcattactttctatgcttgaaacaaaattgattggtcttgaatgtttgaaaagcatgtatgaaaatgatgaaacttttggagaaatttttaaaaattgtgaaaaattttcagaaaatggtttctttagacatgaaggctttcttttcaaagaaaacaaattgtgtgtgcctaaatgttctactagaaatttgcttgtttgtgaagcacatgaaggaggtttaatggngcattttgnggtccaaaagactctanaaacattacaagaacatttttattggcctcatatnannaangatgtgcagaaattntgtgaacattgcattgtatgtaaaaaggcaaagtctaaggtaaagcctcatggattgatactc

SEQ ID NO: 279910 - DNA, 401 bp, Glycine max
  unsure (1)..(401): unsure at all n locations
agctttttcttgaagtactgggagtggtgctctgagacgaggtgaagtttccttgggactgcctctctatttatagttgctgaagtgggcttataggccttcgtagtcgcactcagcgccacacctcgcgcttagcgcgttcagatcgcgcgctgggcacgccatgcacgcttagcctgtgcttctgttggatcgcgcgctgggcgcctagctgggcttagcgcgcgtaacggtttctactccttcgtgcttaacgccacgcttagcgcctgcagctagttgctcgcttagcgcctgtgcgcgcttagcgccactgttgggctgggcctgcttcagaattccttttttttcttcctttctgttgccactnttgcttaatgtacccttttttttcgtatctg

SEQ ID NO: 279911 - DNA, 479 bp, Glycine max
  unsure (1)..(479): unsure at all n locations
gcactacttcaccttntatttaatttacanaataaataatacacaatgaanagganaacttaactactgctgataaagaaaaaacttctagaatttagccttatctttttattttaacaatagacaatgcaaaaaaaaaaatcaagatttgaattgactaaactctataaactgggctgattaattatgagttaaacagtcttaattatttaataataaatattaataacatttaaattgtacagcataatttatactattcacagaggtattggagggagacagagagaagggaaccaacctggtcttttgggaaagtagggcaacaacaccaaagatgaaaaacataagaagcattccagagtgctcaaagtcattcatgtgagcggngttaaggactccaccaacaaaaatcttgaggtgtgtgaatacaaaagctcgatgcacatgtcaacgaaagcaccaattgaataacatat

SEQ ID NO: 279912 - DNA, 406 bp, Glycine max
  unsure (1)..(406): unsure at all n locations
agcttgttattcnntatgatagaccagtgagcctcacgttcaaagggaagctagtatttgaggtgaacaggtatggcttcactgatggtggagcttgggttgatgggaacctaaactaatgcaatcctaccccgcaagggcattggatagaaaactccaagtagattaagccagagatgcaagagaaggccctaggattcttatgagccttacggtagatttcgggcccatgggctaagtatgagcccacttatctttgtaaatattagattaaggtttcattatttttgggccttgtatatagagctccataatgtaggtagggtaccctagaaatatatgaattttcagcccttgtattttagggcacctagactagtttttgtattacgggtagttttgtaat

SEQ ID NO: 279913 - DNA, 308 bp, Glycine max
gcagatgcatgaacatggtcagtttgcagcgctctgtcctcgtgcgtaacatgccagactatatatgcttgactcaatgaggaatgctacagtgtgtgagctcagcctgtgagaccatgacgagaccattgtagaaaactatagctaacgagagatacttactagaaacaccacatatagccacctgactagaataagaaaacaaaaggaggtgaggtatcctaaacgtcatacggagaatacatggagcagacaggcaactgtaagacgcactttgtgtaatgaagcagtggacatacttacaaaat

SEQ ID NO: 279914 - DNA, 406 bp, Glycine max
agcttttatttcgtcgtggtgctttcatcgttgtcatcttctcatgaccatcgtgtcactgtcaatgtcgaagtgtgaactcctccaccacaagactctcatcattagaagctatgaacccatctcttgcattttcatgtcttctttgttgaattttgttgggatcagagttggtgtggttgttgatgacattggctttaaggtgcggcggaaggagcgttagggtttgtggttaagattttgaaggaaaatggtctcaaaaccatattttgggctcaagagtcaattacatgtagagaaagtgttaacatcctatgatgtttgtcctaagacaattacctcacaactaatgtgcacatttagataaatttaaaattatttattttacccctcacaaatgaaaaga

SEQ ID NO: 279915 - DNA, 508 bp, Glycine max
  unsure (1)..(508): unsure at all n locations
agggaagggggnaggatcgtcngntcgatgcnnctcataacggcaccttagaaacanaaccttccttaagaagatacctaatgaagctagagcttaactacatctcttctctctaatagctaagctcacctgcttgagatgagaagctagagcttagctacacaccccatataatagctaagcttacccccatgacaaaatacataaaaataaaaaaaaagtccctactacaaagactactcaaaatttcttgaaatacaaggctaaaatcctatactactagaatggccaaaatacaaggcctaaacgaaggaaaaacctattctaatatttacaaagataagcgggctcatacttagcccatgggctcaaagtctatcctaaggctcatgagaaccctanggccttcccttggatctctggcccaatctacttggagtcttctatccaatgcccttgcggggtaggattgcatcattccctccaccttggaaaggatttgacctcg

SEQ ID NO: 279916 - DNA, 384 bp, Glycine max
agctcgtttatgggtaaacatgacacaagacaaggcttggtttggttcaaaggtaaaagggatgccccacattatttccatgacacaaatgcaaaaatgatgatttggaaacttcatgctaaactggtcatgcatgcacctatgtggacactcaagtgtcaaattattatggtcatgtgatgctaaagcttaagattcatttccactatgttaaatcaacccaatgtttccaaaatatgttcttttatcaatttgtgcattcattcgagtacatttcgggcgatcagtgaatttatacagcattcacccttcaagtgtagacacatctttcaaagatagggtatgatcaatgaatttctttcaaaaaaagttggaaattatttc

SEQ ID NO: 279917 - DNA, 493 bp, Glycine max
  unsure (1)..(493): unsure at all n locations
agggccgctttacgaagacgtagcagnacgtacnnnctngagtaatnaacnnncgaccncctgtgttctgggaacctctccttcctcaggtgttcctctttttcttcacctagttcaagcacgactgtgtttctgcttttgttggcttgccttgcatagcccgcattattcttttcaatttgagccttcacttgctcatgcagcttcttcacatactcagctttagcctgtgcgtccttatgcttaaacatagcaatgttaagcatangcaacaaatcaagaggagtcaaaggattaaatttatacatgacgtgccatcattttcttctatcttctaaaccctttttgcaccattttaattactgattggtcttaattgtcaattaattaggcagttttattattggggctcaattagctaatctgatgtttttaatctaatttcacgaattaatgaaacattgcgcttaatccggattttggttgtgactcn

SEQ ID NO: 279918 - DNA, 594 bp, Glycine max
  unsure (1)..(594): unsure at all n locations
ccgcagccgcggcacacacgcgtaatagtgacagcancaggaggaaagcgccgctaacacgacacacacgcctcccacatcatacatncgcacancacacagacacgagcgccgtgtagaccccgtagcancaccgcnaannnaccgacgaaccaccgcgaagcacccgagacgccgcgacggacgagcccctccaagcggtttgaccaccagcatacgccacaaacgcaggcgccaagaccanccancaccacaacacaacgcacccacacgaccgcaacaccgccgacacacacccaagagaagacacgcacaagagcacacggaaccacaaaccacaagagaccaacaacacgaaacagatgccaaagccaacacagcagcgcagacccacacaaagagagaccagcccaaagaacaacgcatcacccacccgagccagaccacaacacgcacggcacaagcaaccccccacagagaaccaacgagacacgcaaagcaaacagcgacaccgcacagcacacagaaccacaaaatgaacgaccaagcgcgagaaaacaccgaaaaccaaacacacacgccaccgaaaagacg

SEQ ID NO: 279919 - DNA, 319 bp, Glycine max
  unsure (1)..(319): unsure at all n locations
ttcactttattgtangtaacgcgagctctgaccactgttcttactggccgcgatgcttctnttcatgtccgcctgagtgggcttattgcctaaaccatactagccacgattcccttgtgtttttatcacactagttatgccgtcattgggtctgtctaaacccatctccgggttcataaccgttccacacataactcgggccatcattaccgccgcatcggacagacaaggctgcccatagagggagtccacggaggaaatgcttaccacctcacaagactggaaagcggtttctaacgattcttgtgcggcttccaca

SEQ ID NO: 279920 - DNA, 539 bp, Glycine max
  unsure (1)..(539): unsure at all n locations
acgcccgcaccaccaagacacgacgagagnactacgcagacggaacaagcctcacacagaaccacacaccaacgagcattgagcctgcaagcacgcaangacaagncncgggaccgnnaagcgacagcagcacgcaacccggtgaacaccaaccacgaacccnaccggcggagaacaaggngaanaccaaacaccccgagaacgcaacaaaaacaccggcgaagcagccaacaaaaccgccgacggagcaacccacacaagcaaccaggacgcacgccgcaggaagcaagatgaaccaccgcgcggcgaaggccaggaacccggaaaatgcacccccagcgaagaacacacgcaagacgcgcacgacgccggaaaccaacagagacaacgagaaacgcgaagacgagacccaagcgtcaagcaggcgccgcacaaccaacgaagacagaggagagcacacgccgccgatcaatacaacaatgaccatggcgcgaccacgaacaggcgaaaccgaacaggagacaacagccgacacaccc

SEQ ID NO: 279921 - DNA, 497 bp, Glycine max
  unsure (1)..(497): unsure at all n locations
nnnccggggccggtacggaaagtancangnagnncnnacanatacgcaagcnncnagctgttcattggtgtgttntgatctcctttnggtgttcnataatgtgggaatgtgctcaaatatgtggggcaattttggtttgttttcttgcttgattgggttgaattgggggtttgtatgagatggccctatgcctataatgcattttgaagtaatggggcatgccacattgtccccgttttcttgctattgatgcctaaacgcgcgcccaccaagtgttcggtgaaatgcctcaatggcattagcgtgtgattttcgtagggaaaccacccatggggcattttgatttgcacatattttccatttttttgggacatgcattcagtttcgaaagggctagagtaattgccccacatatatcctaggcctaagaacctaagttnttatgcataagaacacaagaagaggtgcatattgtgtaaagttaccttctttggccg

SEQ ID NO: 279922 - DNA, 471 bp, Glycine max
  unsure (1)..(471): unsure at all n locations
acgccgcctttcgtacccttgnanaccacccgtttgggaaacgctcgcgggaccttagaacacctgacgccgcagcttaatgacttagaaaatacccaccctcccgtggggctttcactatgagggaatcctctcatgaagccaactaagagcttcactttgacaggccttatggaccgaactctcaaccatacctagcatcttgactgactatgctaccatcgtacctacaagcttgtgttttctcatgacatgatctaggggatgtgcgcagctttatgagatctgaaggctttgtaaaatacatccaaaccttcggtcaagtttatcaatgctacagaacctcttcaattaaactctaaaccacatggtatacaattacaccctagtgcgggtcgacgaggactaacgtatctcaacatatcatccaaatcacgaaaattcaatgactgcagcacaatctataaatcg

SEQ ID NO: 279923 - DNA, 1056 bp, Glycine max
  unsure (1)..(1056): unsure at all n locations
agggcnnnncaggcggaccaccggtctttgcnttcnaatttactcncccctgcangtananngcccgannnacntattannngannananannannacccgangncgtgangcagctacnctcangnagggtgagnagtgtaacacgntgcgnnangaagaaaagagacaancgaaagttacatgttcgntctttannttacanttnancagnacggcnggcncacancncacnaaggancgctgatnntgtagtantnagngtattgtacccangantanaactctncagtaccctatantcntcaccactagcgatanttcancntacctntgnagtgaggtcggcgncatcgtagaccgactatatcactactgactaacgangccacntcgtcgactgnttcgcttagtacgtcgatctatgggcnctgaagaatcttacgtacacgtcgagcgaagcatgancagcgcttgatnggacacatcgtcgtgcagtgtgncctacacagtgggatcacacancgggtccccgagnanctactacntaatcanctaacgacgccagtcatgntaacagtcncngcacttangcctncatcgaaactagcagcgtancagtcngcactcgatacnatatngcgcgtagctagcgcaccgccataggcctntgacgctatctatntgcagcctgaaagagcaagcctcggganatantgcagtataatgttgcacanttaacctcgancgtacccgccaatnagtncantcgtactacgtcgtgaactcgtgcagcactaatcatgtcgangaagctactcatcgtcgtactaggcaagtaggaagtacgaacgacncagaantccgcnacngagtantcgctatctgcgtgtcnccgttntcgtatgtcccaacnaggtgcagacaccatacantgcaacacagtacacgtccgcccacgtgcgacatgtcatnacancacagtacgtaaggttacgagtgtctccgcacatctcacgtcgctttngttcncgatantctcctncgncacgcgcgn

SEQ ID NO: 279924 - DNA, 405 bp, Glycine max
  unsure (1)..(405): unsure at all n locations
agctnatcctttccctcatcagcagggccttcaaagagaaatattgcatgcccaggcaggcgcagcagcaggaggagcagaaatagccagctgcaagcgtcaccacctctacgacatccactgttaatcatcgtttacgactaacttttgtatataaaagttttccaaaatgtatataaatttcccaatttatggttctttttggtaggattgtaaataaaatttctttgttttgatctctgctcagtagaagcctctctagatggaattaatgttaaattttctttaatttcatgcaaaaatgagactatttgaagaagtaccaaatgagtcatcacgctaagcgagctcaatgcgcttagcgcgcatcaacagctaagcccagcaccaacacgcttagcgagt

SEQ ID NO: 279925 - DNA, 484 bp, Glycine max
  unsure (1)..(484): unsure at all n locations
ccgccgtcnttgnagaactcnagatcgacgngcncatagatannaacctccgagacagggttatgaacctacacgctagcatcctaattctttgtaacaagcttttcgtatatttggtgtgtagttagaaaaatctctccaagcaccttaaataccttgagagagaagactaagtacttagattgtacaatcgtttgtaagacgattaatatttagtcaatgtgcaaacaaactataaatatgttgacttatttatagctagcagtggcttgatagaacaaataatatgtcaagcttggtgtagagcttgaggtgtaaaagccaaaagtgataatgacttatacttataacttgttgaagttggtggaacttgggggttaaccaatagctagtctcaatggtagagatgactagtattctaatctgacttggggcttgaatttgattttgtctgaacgactcttttaatttgcaaaatctattt

SEQ ID NO: 279926 - DNA, 302 bp, Glycine max
  unsure (1)..(302): unsure at all n locations
agcttgttcntgattttttctaaggtctttaacaagcttataactatatacttgtccttcatttaactgactttgggcttggcggccacgatcaacaaagtactttggacacctactatatgttgatttgaccaacgctgttatcggtatgctacgacaatccttcaataccttatttatacattctgagaggttcgttatcatgtggccatatcgacgtccttctctatcataagccatgggccatttttcctttgaaatgcgatctatccatgttgctatggctggactcacttgacgaa

SEQ ID NO: 279927 - DNA, 480 bp, Glycine max
  unsure (1)..(480): unsure at all n locations
tataggtatttgtgaagtatgttgtatgactcttcccaatttctgtatacctacttgagggcccattgntttgccagccatgctttatgatatgtgatggtgtatccgactctagtcttacgaatgtacgaatggttagctgctcgcttcttcaaccatcacacggatatttttgcctacaagtttcgaatccatcttattgtgatcttgtgaaatggttggcataacgcatgtgtgaggcccttctatcattctaatttcccaaacttttagattatttctttcggatgctctaagtttccactagcacccatgattcttaatgtgccacatttttaccgtgtgtttcaagtcctccaattgacaaaatcgttgaccaacatacatcttgtcatcgtgagtcagattgtcgtgtgggctcaaaaatgcctatgtcggcgttgtccgcacttggtgtcaccacatcaccctatttgatat

SEQ ID NO: 279928 - DNA, 637 bp, Glycine max
  unsure (1)..(637): unsure at all n locations
accgcaagccaaggaacaaaggggaacgagacaaacacagacccgaaccacgccaaaaaggggggcatgtgaccctggaaccccccaanaacaaanagcaccggggaaccacgcaacagaacgacgaccaacaatcttgacgcaacgccacacagaccaccaggagaggcgcaacccagaatacacacaccaaacacgcacactcgcacagcaagcacacacccaccagcatcgcaaacgcacacacggcacgccancaggcgaaacagcaggacagagcagaacggagtgcacaccgatctgcgagcactgacacagaacgcacaatcaggcccacgaaacgcaggcaccgaagaanacagcatagcgcgcaacacagacgcgcatcggacggacgcacacacgagacacacacgcggatggcgcgagacgacgacacgcagccacgacaacgcagcgacgccgctgagagcgccacactacaatcgaccacagcagagagaagcacgcgccatcgaaatggaggcaggacaaaaccgaacaccacacacagcagagtccgacagagcaaagacattgacggcatacagggcacacgcaagcgccggacggaacgagcaacgcgcacaccacaacg

SEQ ID NO: 279929 - DNA, 353 bp, Glycine max
acgatagaggcatgaacgattggggatcattgtctcaataggaggcgatgccgaacgctgacaaccatgaagataattatgacaggctactagatccatcacctgacgagccataatcatccaggaggccatagaggaatcctcaactctcagctagattgcgagaatatgtcatgtttaatgacgaagatacatctaatgaagagattatcaatcttactttatttgcagactgtgatccagctatttttgaacacacctcaagtgactagaattgctgatcggcattggatgatgagatgcctgctattgacaacaatgacacatgagagctggtggacttgaacacaaca

SEQ ID NO: 279930 - DNA, 406 bp, Glycine max
  unsure (1)..(406): unsure at all n locations
aaaaaaaaagaatacaacaaaagaaaagaaaaggaaacggaacatacaaacannnaagaaggaganggcgcccctagaccccnnnanaaaannnggagagaaaaaaagaaaaagagaagaattttttagaaaaagaaaaaaagggggggaaggaaaaaaaaaaaaaagaaaagaagaaagaaaaagaaaggaagaagagagaagaaaaagaaaaaagaaggaaggaaaaaaaagaaaaaggaaaaaaagaaagaaaggaaggaaaaaaaaaaaaggagaaagaaaggaagaagaaaaaaaagaaaggaaagaaagacaggaagagaaagaaaaaaagaaaaaagaaaaaaaaggaagaaaaaagaaagaggaagaaaagagagaaaaaaaaaaaaagagaaagaac

SEQ ID NO: 279931 - DNA, 395 bp, Glycine max
agctagttttatctttatgcgagacagagaccaacatgtgagctatcatcgtcaagtaccaagaatagctaagtgtagccactgcccacgagcataaaatcacggatgagtatgctcaagtgtatgcggaaaaagaggctaaaggaagggtgatcgactctttacaccatgaggcaaccatgtggatggatcggcttgctcttaccttgaacgggagtcaagaacttccccgattgttagccaaggccaaggcgatggcagacacctactccgcccccgaagagattcatgggctgctcagctatttgcagcatatgatagacttaatggcccacataattagaaatcgttacgaaaattgtatggtctctcagaccttgactggatacgacttc

SEQ ID NO: 279932 - DNA, 355 bp, Glycine max
agaattaagtgcattctatatttccaagagcattcactattttactgaatacttagtactttataaagcattacgattagtaagatagggaagagaatagtattacttttccaagaattgcaaactttccagtaagttatttaaagaccagtcaaaccaatcttaacgaaggaagattcctagaggatagtattcacagcgaattattgcagggaatgttatccataaccgttacacgttgaagcagacacccatatgatataaagggtgaatgcgctacaatatcatcacaactctcgagccatttagttatacagtcactcaaccattaagtactattgatgagtactacaca

SEQ ID NO: 279933 - DNA, 559 bp, Glycine max
  unsure (1)..(559): unsure at all n locations
gccaccccacacccacaccggagaggaaagaagtgagaccacacacagacgaagcacacacaacaacacaaacacacacgcgagagaaccgnnnngtggatcccgtagcccaccncaanananagaaagaagccgcgagagnagaaagnccgcgacgacaaacaagcaaactgtggtggaagaaagacagacaccacaacacacaggaggcgagacgcacgacacaacgacccgacacnccacaaacacgcacgacagcaacaaccactcaaagccacaacgaccgagcagcaanacgacgaaggaacaacgagcagacgcaggaaaacacgacagcaaagacacaaacacccaaggagaagggaccaacacaccaccaacacacacgacaacaacaaccgacaagggcgaaaaacagacaccaacaaaccgagccgaaaacaacacgagaagcgacacacaaaaaccaacaaagaacaggaccaaccgcacaaggcaccacaaacaaccaccaccaccaaacaaacccacgcacaaggaaaccaaacagggagaagcc

SEQ ID NO: 279934 - DNA, 502 bp, Glycine max
  unsure (1)..(502): unsure at all n locations
ccacctcccgcgggggttgattgactgagtcgatcgnacnnnacgnganaatatagccaactcacgctntgggcataatgagaatgcaaatatttagagtttatttgtgttcaatgctaagctttagggcccattatatacttgtcaacgaaaaatgatttcgcttaagggagagcaaccaggtggaatagactcacttgggaggaaattgttgaagtataattgtgaatttttttatgaagctcgaatatatttagtaaatatattcaaatattggcacaagctatgatgacgaagtaaatatccttgtgtatgatgtacaaaaaataaaggtctttgttctagatcatggtagtatgatgcatcctccacactttaccaccaactctcttctttacgtttctttttttcctctcagtcgcataccaccatgattctcgtgatgaccttcttctcttccgctactaacaattcccaaccacaatagtgcaacccaccatcg

SEQ ID NO: 279935 - DNA, 393 bp, Glycine max
  unsure (1)..(393): unsure at all n locations
gggctagcgtttatgcgagacagagaccacatggtagctatcatcgccaagtaccaagaagagttaggcctaccccgggcccacgagcatagaatcacggatgagtatgctcaaagtgtatgcgggaaaaagaaggttgaaggaagggtgatcgactttttacacccaagaggaacccatgggatggatcgggtttgctttaccttggacgggaagtcagaactttccccgattgttacccaaggccaagggatggcagacacctacttccccccccgagagattcatggcttctcggctattgcagcatatgatagacttaatgcccacatattagaaatcgtaggaaattgatggctcttagacctgactgatcnacttcttttttaatan

SEQ ID NO: 279936 - DNA, 500 bp, Glycine max
  unsure (1)..(500): unsure at all n locations
tctcaagcaagcttccatcaatccttttatgttgctaagaatcataatgattccatcttangaacatgtcttaggaatttctgcacttttcttggattattcttacccaatggtttgtaggaaatataggatttccccatatgaagctttgcagaatgacccttcagaaaggagtaagaaatgtatacactaacaatctcttagcatctcacagtagggatagaatattattcctataaacatacttatgttcttcagatttgcttaaaagctataaatgcaaacttaaatgctttgaatttcaaacttccatgtttcttgaacactcttagtgagtagttntacttttatgagtgtttccacaaactaattactccccttgagctttctgagaaagtgccactntctctcttttagttntttgaacatcaaannagtggttcctatggcttggtttgaataaaatggtttctgaacatctgagtanatgatcatatatg

SEQ ID NO: 279937 - DNA, 389 bp, Glycine max
  unsure (1)..(389): unsure at all n locations
agcttatttttctaagcactaacaaaaaacctttattcaaacctttcaaagtgagtgagaaggctaaacgaaaaattagggaacttaagaaaactaaatccttaattgaaggcgtaagtgacaatcatagcgaattactaaacaagattggtagtttgcttaaagtcattccaaatactccccaagcctcggaaaatacttccaaaatggtaacaagaagtacctccaaattaattaatgttattaatgaagatagtgaccaaaactcagataacacaactgagataggatcagtgtcagaaaagaacataaatccgataaattccaaacactgganaacaccctccanattatattatcaacgtccaactgcccctgaccttctatta

SEQ ID NO: 279938 - DNA, 452 bp, Glycine max
  unsure (1)..(452): unsure at all n locations
gatcctattgaagactggcctaactaaacattattattgaacagcataattaaaaccaagacttaatccgcagatccctcttgtaagattaagtcttgatcctgcttcaatcaagttctaaggcaacagtacatttcccaatgctaaagtcacctaactatgcacacaaatggatgatcaaaccaaaagcatacaaacattaagcattgaaggaagcattgaacacagaaaacataatcaattaaatattaggtatttacatcagttgttcattagaaatccctaactagggtgcttatgcagccattacaaaaaaacccacataataataatgttacaaaacctanngttcaatgcacaagctgctctcttgatgcttctanggctttntttcccaaatatgcactgtggtgttctctggaatctgtgccctttcttctgcctacaatcta

SEQ ID NO: 279939 - DNA, 402 bp, Glycine max
  unsure (1)..(402): unsure at all n locations
agctntgtgtatattaaacgacaataactttttactcggatgtctgattgagtcccgaaatatatcgagacgctcgaaattgaataccgaagcgctaagcaaattcaaacgacaaaaactttttactcggatgtctgattgagtcccgtaatatatcgaaaagctcgaatgtgaatgtagaagctctgagcaaattcaaacaacaataactttttactcggatgtctgattgagtcccgtaatatatcgagatgctcgaaatggaataccgaagctcggagcaaattcaaacaataataactntntactcggatgtccgattgagtcccgtaatatatcggaacgcttgaaattgaatgtagaagctctgagcanattcaaacgacaantaacttttactcg

SEQ ID NO: 279940 - DNA, 357 bp, Glycine max
tctacattcaatttcgagcttttcatatattacgggactcattagacatccgagtaaaaagttattgtcgttggaatttgctcagagcttctacattcaatttcaagcgttccgatatattacgggactcaatcggacatccgagtaaaaagttattattgtttgaatttgctccgagcttcggtattccatttcgagcatctcgatatattacgggactcaatcagacatccgagtaaaaagttattgttgtttgaatttgctcagagcttctacattcacattcgagcttttcgatatattacgggactcaatcagacatccgagtaaaaagttattgtcgtttgaatttgctta

SEQ ID NO: 279941 - DNA, 404 bp, Glycine max
agcttatgtgctatttccttacgaacgttcacttgcacaagacatcctatcaactaagaaaaatgcacccatatacaatcaaggtagcttcattacctagattatttacatgtacttccaaggtgtatttgttatttacatcacacacgcctccttggctgaatttacatacatgcatactcaaagcattttggggtaccaaaaactgcacatgcgctcatcttggtatttctaatacccctacatatacaaacttcacgatgaatcttgactacctacacaataaggtgctacatttcatgctcttttttttcaagtttttgctacctaaagccacatgcaaattcaagcatattttcctttgctgactaaaattgtattcaaattagaaggcatatattttt

SEQ ID NO: 279942 - DNA, 449 bp, Glycine max
  unsure (1)..(449): unsure at all n locations
cataggctacatgccagctaactttgcggatctcgtcttcgctgataaaggattgaatccggactacgaagaggcaagttcaaatatgctgccaatatggcccccaacaacaacagaagagccccagtagtgggcgcgaggaaaaaggaaggagacgcccacgcggtcaccaccgccccgacgtggatgaaagcaccccaaaatatccaaagctcataccaacccaatcccccaaattttttaatccgagctgggaattccctcccgactcaagtaataggaccactcgcagcagaaagagcgccggcacaacgcacagctccagccgcaccccggccagttaataatacagcccgcggcgcgacttatagatatgcacaacacccgcccncgaaagacaacttcctcctattccatggatactccaagtatggcctcattattggaga

SEQ ID NO: 279943 - DNA, 407 bp, Glycine max
  unsure (1)..(407): unsure at all n locations
agctnttttctcacgtatgcaactattgtcaatctcatatcattcaattggaaaagatttgacaaagtggattggaggtaaaagttgacaggttgatgtctacggaaacaagagaaaagtaaaagagcaaaacacaggcgtattttgataagtttgagttattagtaaggccacaaaagagatacgtcaggataatttttaaaggaatttccaagccaagaggacaatgccttgatgcaccaaagaagtaatgcataaaagaagaccaaagagggattaaatgaatgaccaaagcctcaaggataaatagatagagcataatatcatcattcaaaatattacacggtaatattaagggtttcaaaaggaccatcaaattcacatgataatctaacacaataaagaaa

SEQ ID NO: 279944 - DNA, 433 bp, Glycine max
  unsure (1)..(433): unsure at all n locations
acactatataagacacaagctccaccacttccgactaaacttccagctggagctcatatacccncttgtgcttggcctggtacgtatnaattttcagaatattgctgtctggttttttgtttgcatatcctgtttttaactggcatgttcttttcttctgtaactgcaaaaaaatatttacttgctgagtggcttctaactttaataatctttaacaatttttaattaaggaatgatgcccattgctgattgcatgaacaaatgaattggaatccttccaatcctttgaataacttctcatgctatcatgcatgaggaatatagtgcaattttattcatatgccgacatatataaattcttgacccaatcaagtatgttattaacttattatctattagtatgaacgtctggtttgaatgttacatttcatgt

SEQ ID NO: 279945 - DNA, 394 bp, Glycine max
  unsure (1)..(394): unsure at all n locations
agctngtangatgaagtgttgaagggtgaaacttgctacttttattgttgaccacagagtggtacctggagatatgtcgcgggggtcaggagacctttgggacgtcaggtggggtgctattgcccaaaaccaagcttgaccaatcccgacccaccccgggcatagtcggtcagtgagaacctgtgatgtacctaaacaggcaagctcctggcagtcaacagataaaaggaacaaagaccacaaagcaaggaggcttgtggtggctggccagctgtgaattttgtgtgatatgtggattatggcctctggtaatcgattaccaagggtgggtgatcgattacaaggcttaaaaatgaagacaggaggctaagatggtctctggtaatcgattacc

SEQ ID NO: 279946 - DNA, 358 bp, Glycine max
  unsure (1)..(358): unsure at all n locations
gatcaactagcccgcaggtccattatgataagacggatgtggaacatgacaggaggatccaactggaaaggctcatttaagaagaaatccagagatatgaaagatagggagaatagttcaatgatttagtatgaatgcatgaagcaaggtgatgcaatcctactattcgctatcggcaagtgcaccggattgcataagtagtataaaacagtaagaaccgagtatcgaactctcgaggaacttgtgttacttggtaagctattgtagcgaataagtgtctggtgtgaaaatctaagtgtgaatatgaacatgtatgtaaactatctatgcataaaggaagatcatgcgagaganatgt

SEQ ID NO: 279947 - DNA, 406 bp, Glycine max
agctttcttgttagattcctaaagaagctagaacttagctacacacacctctctaatagctaagctcacctccttgagatgagaagcttgaacttagctacacaccccctataatagctaagctcacccccatgaaaaaatacatgaaaatacaaaaagaaagtccctactacaaagactactcaaaatgcctcgaaatacaaggctaaaaccctatactactggaatgaccaaaatacaaggcctaaacgaaggaaaaaacctattctaatatttacaaagataaacaggctcatacttaacccatgagctcaaaatctaccctaaggctcatgagaaccctatggccttcccttggatctctggcccaatctacttggagtcttctatccaatgcccttgcggg

SEQ ID NO: 279948 - DNA, 410 bp, Glycine max
  unsure (1)..(410): unsure at all n locations
catactgaattgagtatggcgcacacattgcatgtttgatattccttttagaggcttgaanagtgctagagaacgagctgtattttctgcgttntctggaaaacgcgatgaactcgctaagcgagcatgctgcactaagcgagttcatcaatactcattgtatgtaagtgttatctaaagaactcgctaagcatgcttaccgcgctaagagagttcatcctttgaggatgaacactcatcctcttgctgaactacttttggctaagcgaggctgaatcgctaagcccaggtaacttaacccatttttttggtgatagttatgcactaagccgagcattcctgagccaagcacaatnggttgcagcgtccgctgagctaagcgagcttcactcgctaagctcccaacactt

SEQ ID NO: 279949 - DNA, 400 bp, Glycine max
agctttttctaatacataatatcgtaactacaaaagtcaaaatatataagtctctacatattacagttgtcttatacacattttcatactttaaaaatattctataattttttgttgtcaatattataaaaaattaaaagcataaaatagtaaaattaatttcaatttattcttttttatttcttataattctttcattcatttataaaaaaatatatgaaaataatacctattttttgaaggaggcaatttatttttattacacatatacaaataatatataaaaaaatcataggaacaattgctcccaggttactattgtctatccgccacgtgatgtaacattaattaaatttgttatatcatatcatttataaatgtgcattaatactttacgaag

SEQ ID NO: 279950 - DNA, 429 bp, Glycine max
  unsure (1)..(429): unsure at all n locations
taataccttgnttagattctaggagagcatatggttcaaggaaaatttactctaaatttggggggaggaaagtcaattagaatgaaaagaaaaaggttaagcatcagcacacacaacaaataagttgtatgtcaaaaaaaaaaagataaaaaaaataacttgtgctgttacaaaaaggtcgaaagcaacttaagataagggaatagtgagaaggctatttgtacaaaacaagaaaagatcattgngattagtctaggacttgtgctctcttagaatctaaacttttgaatcctaganaaaccagtgattnttatgtagccacaacctcactacaagcttgagaaaagtcttctgattttgtttatatatctctgacttgatgacttgagatgaaatgcanagattggacctcctgttagttggtatcaa

SEQ ID NO: 279951 - DNA, 377 bp, Glycine max
  unsure (1)..(377): unsure at all n locations
agctnnatgcatgaccaccaatggtctatatatatgtgacttaaacacgaaattactcagagattttcagaacaacaaagtgtttatcctctcaaagagcaaattcattttatcctcttaagaattccttggccaattcaattgcaattcattaaggaattatttgagtgctcaatctgtaaaatccatctctttctagagagatttgttcttcttcttcttctcattttctaagggattaagagactgtgagtctcttgttgtaaaggatctctaaacacaaaggaaggattgtccttgtgtgtttagaacttgtaaaaggaatttacaagatagtggaactctcaagcgggttgcttggtgactgaacgtaagca

SEQ ID NO: 279952 - DNA, 378 bp, Glycine max
ctttaagatgagtaaatgaaaatctataggagaacatttttacatctttaacacattaattcctgagggtcttaacattgatgatactataagcgatgaggatcaagcttttttattattgtgttatttatctaaaatgcatgcatgtttcacagaaacctcactgtttggaagagactttttgtctcttgatgaagtatagactactttgaattcaaaagaattgaatacaagaaaagaaataaagtcctctggtactggtgaaggactaacagcatgaggcagatcatcaaagcaagacaacgacatcacaagataggatctaagccacaatagaagagtagcggaggaaatgttcctaacatcacgtgttatcac

SEQ ID NO: 279953 - DNA, 400 bp, Glycine max
  unsure (1)..(400): unsure at all n locations
agcttccttatcacaagcaaatcctaaatcttacattttaatatataattgcttaccatgtcatttatttttttatttatttttgggtaaagaaatgggagcaaatatccaaggattgtagggaaaatgcaatagatacctgaattgggcaaattgaaggtagtgatatggagtttcgagcttccacctcgggataaactgggaagctgcacacatacttcattaactgataagtgacaaacttattgtgaggtacatgggcagaaaacagatatctttaccaagttgtgaacatacatcagttttttggtacaatggcaacaatgaggtttaaacctaagactntatgcaaatactgaaattccccaccactatgtcgactccagtgggttcatgaatg

SEQ ID NO: 279954 - DNA, 483 bp, Glycine max
  unsure (1)..(483): unsure at all n locations
ggcctctttttttgatttntgacatgnacggntcnncnnnttnngnnaacaacggcaaggnanngcaagacgggcaacgaancaacagacattaatttggtttatatgacgatggcgacaagcagagcgtggtataagacttaatcttacacacccgacgcggcaaaaaacggccagctaatcttcactacaggggattctacgagcacatcacacccgtacttaggaatgcgaggtgaaattagaaccgtgctgacttacgaattgcaagacataccatactgcgaaggctgatatacatcaatggaaactaacaagtacgaagcgattatattggacccgcacagtagatgcagtagaaactttaactaaaacaccaaaacaagcttttaaactggtagcacacctaggaccggattaggatcagactacagcgacagtaataggacaacgtagagcgtagcagaccaagaaatgaaccag

SEQ ID NO: 279955 - DNA, 402 bp, Glycine max
  unsure (1)..(402): unsure at all n locations
agcttgttgtattatggggcacccgtcatatgtggtactaggtggcgatcgggcgatggcacaaatcaactctcccacttccacaagtcaaacataaacacaccatccccatttgctcacctttcaactgagctcacgcactcctacgtagcccttatccttgttcctctcagcaccgggtccctatcaacccctccaagcttccacaatatccaagcaattcaatttcatttatcatgaagctaccctaaaccaagaaaacagagtagaggcagaaaactctgcccaaaacacattcaaataccacagctttccttactcatataccccagtaacattctcttcgttccaattcattaaccgttggatcaccttgaaaantttactggaggttcctagtac

SEQ ID NO: 279956 - DNA, 307 bp, Glycine max
acatagttaaaggaagctgacttggatggctgaaattggatgcatagaaggaagcaaggagagcatgtagagagtgagagcacagtgcagagaaatagcaccaacataatgccaaaatgcagtttaaaagcacaaatgaaaatgtaactgccaaaggcagttatgccttatttttggcagtttcgaatggctcgcttaacgtgccaactcgctaagcaagcatacatgatgtttaagtttccaaacactcgtgcttagcgggcaaactcgcttagcccattgcacatattcaaaatttccagagaag

SEQ ID NO: 279957 - DNA, 343 bp, Glycine max
  unsure (1)..(343): unsure at all n locations
agcttggtgnttcacctatggagattttgaattaagggggtgtgttagttataattcacaatactagttgtaaagtttggtagtttgtttagttagttgagtgtgataagacagtgattgaggctgaacttgagttgtataaatagcctctgtgtaatttatttcataatgcaattcatctcattttagtatatgctttttcctggctttctctctttctccacaacatagattaggtacttattacaatcattagatcttaaaaaaatatatgatataaatgatgagtaactttaaaatcctccatctattactctgtgttggctacaacgatcagagaatg

SEQ ID NO: 279958 - DNA, 307 bp, Glycine max
  unsure (1)..(307): unsure at all n locations
ccaagcattgcagtggattacaagaggaaacataccttctccatagaaggtcanacaactttataaccttgttataatcaatttaagaactatgtgtgtgaggccaaaccttcggaatcactaagacactctgttatctagaagagactaagacttatctgtcttcttgaactttgatttcttgagctagattcggactgtaagaaactgttgagttgctatcgtcttggcgtcatctcatccttcatacacctacattcacattctatgccttattactgatgacaaccaactaagatgatttact

SEQ ID NO: 279959 - DNA, 388 bp, Glycine max
agcttgttttgtttaagtgttgaagggtgaaacttcctgcttttattgttgaccacagagtggtacctggagatatgtcgcgggggtcaggagaccttggggacgtcaggtggggtgctattgcccaaaaccaagcttgaccaatcccgacccaacccgggcatagtcggtcagtgagaacctgtgatgtacctaagcaggcgagctcctggcagtcaacagataaaaggaaaacaagaccacaaagcaaggaggcttgtggtaggctggccagctgtgaatttgtgtaatatgtggattgtggcctctggtaatcgattaccaagggtgggtaatcgattacaaggcttaaaaatgaagacaggaggctaagatggtctctggtaat

SEQ ID NO: 279960 - DNA, 418 bp, Glycine max
  unsure (1)..(418): unsure at all n locations
actcagctcgagagatgcttaatggaggataagaagagggagagaagtgagaggngggagcacganattgaaggaatggaagatgtatagaagtggaactttgaagtatgtctcacaagactctcattcatcaaagttacaacaagtgttacacatgcttctatttatagactaggtagcttccttgagaagctttcttgagaaaacttccttgagaagcttctttgagaaaacttccttgagaagctagagcttagctacacacacccctctcataactaagctcacctccttgagaagcttccttaagaagattcctaaagaagctagagcttagctacacatacctctctaatagctaagctcacctccttgagatgagaagctagagcttagctacacacccncctataatagc

SEQ ID NO: 279961 - DNA, 402 bp, Glycine max
  unsure (1)..(402): unsure at all n locations
agctngcnattcatggnaactcctaatatctcccacactctttggagtgggccattcttggatggccttgattgtctgagggtccacttggaccccatttctaccaactacaaaacctaagaaaactatattatctacacaaaaggtacacttctctatatttgcatagagggcgtttttcctaaggactgaaagaacttgtctgagatgtcctaagtgatcatctacgctcctactatacactaaaatatcatctaaataaacaactacaaatctacctatgaaatcccttaagacatgatgcataagcctcataaaggtgcttggcgcattagtgagcccaanaggcatcactagccattcatacataccacacttggtcttgaaagcacttttgcactc

SEQ ID NO: 279962 - DNA, 375 bp, Glycine max
  unsure (1)..(375): unsure at all n locations
cacatagaaactaagctaggcgctacttcntacgagcgttcacttcacaagacatnctgattctaagaaaacgcgcccatatacggtaaggtaccttcgttacctacatcatttatatgtacttccaaggtgtatctgttacctacatcacacacatttcctttgctaaatttacatacatgcatactcaaagcactttggctatcaaaaattgcatacgtgcacattctggcatttctaatacctatacatacacaaacttcatgatgaatcttgactatctacacaataaagtgctacatttgatgcttctttcaagtgtttttactacctaaagccgcatgcaaattcaagtatatattcttttgctgacta

SEQ ID NO: 279963 - DNA, 352 bp, Glycine max
  unsure (1)..(352): unsure at all n locations
agcttcnctccatttatctataaatagggggagaagagaaatgaataagggttcagccccttacgcacttctctctctttcgaatttgcttggaaaaattgtctccgtgaagaaaatctaagccgaggcgcttccgacgcgcttccgaaacgtttccgtaagcaatttcgcgaaggtgtcgaccgttcttcgacgttcttcattcgttcttcatcgatcttcgatcttcaacgagtaagtacctcgaaccaaacttttcgattcattctatgtacccgaggtgggccacattatgtatcatgaatttttattgtcgtaacattcactatatatacacgctcttgacgcgctt

SEQ ID NO: 279964 - DNA, 328 bp, Glycine max
  unsure (1)..(328): unsure at all n locations
agaatcaccgggacgagttttctctgtagctgnacaacnggttcagccgtatcttataaatctatacgacgcatacatgcggaggggctaataccaagaatgtgtaccaaggcccatcctatatccttcttatagcttcttgagaactaataacagcttatactcttgctcatcggcaagggaggaagatacaatcgctggaaaactctggctatcatcagagtaagcatactgtaaataagatggcagaggctttaattctggtgtgggcagctggataatgcgagaaagagacggtttctcatcctgtacctcataaagaaagtca

SEQ ID NO: 279965 - DNA, 494 bp, Glycine max
  unsure (1)..(494): unsure at all n locations
aaaccatcgtgggttaggtgccttgatanaccgccngaattagctcggacgccgggatgctcctntatcgacctgctggcatgccaccctgattgtaatctactcaaatgtgcacggaccactaagcattggatgtgttggagcagatctgccgctgagctgcctctcttgtgggcttaacgtgaagaagagtggggtatatgatgaactatgaagattgacgtaggcgacgcgttcatatgttcactaagcgagttagcacccgctaagccgacatatactagtgtgcacaacacacgaacggggtgagctaggcttacaagcgtttccgaagctccctgatgatgcactgatacagcatgtaaatacagtattctatactccacaacacataagagactatcgagagaaagtgtgacgacccagctcgtcgctaccatatcacttacctataaatatgacatttcaatttagaaagtacagcctcattaatg

SEQ ID NO: 279966 - DNA, 387 bp, Glycine max
  unsure (1)..(387): unsure at all n locations
tgaagtgatgaagtgcggaagggtgagacttcctacttttatttgntgaccacagagaggtacctggagatatgtcgtggtggtcaggagaccttgcggacgtcaggtggcgtgctattgcccagaaccaagcttgaccaatctcgacccatcccgggcatagtcagtcagtgagaacctgtgacgtacctaaacaggcgagctcttgacagtcaaccgataaaagaacatagaccacaaagcacggaggcttgtgtggtggctggccagctatggatcttgagtaatatttggagtatggcctctggtaatcgattatcaagggtgggtaatcgattacaaagcttacacatgaatgcaggaagttaagatggcctctggtaatcg

SEQ ID NO: 279967 - DNA, 405 bp, Glycine max
  unsure (1)..(405): unsure at all n locations
agcttggttttatacttcctgataataggctgccacacaacccagcttttagaactcacccctactggaattccaagataagagaaaggaatttccagttggctacaattaagaaattgagctgcatccctacaccaaccctctgatttgcccacataaccgaaatggctttccaaatattcagatagtattcttctatgtttcttggcatagctttccaatttgggacatgataggtgtatagaatgttgcttcatttcatgtaattgtagacctaatagggcagttgtgttgtctctgttatgcttttcctttgccaatatgtctatatagttntgtgggtacattaagtcttcaatagtttcgacttgctagtcattagttattgtctttgtgatgttctga

SEQ ID NO: 279968 - DNA, 279 bp, Glycine max
  unsure (1)..(279): unsure at all n locations
gatcactaagcgacagcttatcagtggctaagcgagtcntattgtcgctaagcgcgaatccttacggccatatctgaggtcgataaagctaagtgccagtcatggtagctaagcgagattcattgcggcaatatgagcgctaagcgagaacctctcagctaagcgcatgctcctctgtactttagatgcatcatcttagctaagctggccatagccacgcttagcgagagctgcgcgcttctaatcagcagacctcgctaagtggacgtactctcacgc

SEQ ID NO: 279969 - DNA, 401 bp, Glycine max
agcttttgattttccaagtgccaattcgtcttcttctttagtccagtcttcttctggcttcaattcatcagtgggctttccttctgtgtccagcatcttgggatgttcccagcctttgatgacagctttccaggttctgctatccagtgatttgagaaaggccaccatccttgctttccagtattcatagttgatgacagcacctttgtcaatgattttcttcatgcctcttaagtgcagatgtccaaatctttgatgccatattctgacttcatcttctttggaggatagacatgtggaggagtaactggtttcttgaggtgtccataggtaacagttgtcctttgatctgctgcccttcattagaacttcactcttctcatttgtcaccaagcattctg

SEQ ID NO: 279970 - DNA, 490 bp, Glycine max
  unsure (1)..(490): unsure at all n locations
gatagattgaacgaatctagtaactaatgccagctttaatcgtatgtatggatagactaaagcagagagtgatcaatataaagaggctcacaggtcgtggtcatgttgtcaagtatcaaatgatgtgaaagaaatgctattcaatggacaacaatatatataggagatatgataaacatatgaaagggaaaaggaaaaggaaaagtaagaaagcaatagacatgttaagttatgtaatgaggtaagtaggaaaaggaataatgaaatggaattaacacaaacattatagaaaaatgactatattattttataagttaacaattatttaaaaaatagaatataagtgatactctattctgaatatatacaaaagaattacacagtcagataacagaaatgagtatataataatgttctcttcgttcttctacactatatctatgtcttncaatggattattcacaattgcacatatataatactcatctta

SEQ ID NO: 279971 - DNA, 373 bp, Glycine max
agcttgctcatagaggtccaggaaggacaaggcggccgaaggaactagttccgccccggagtacgacagtcaccgctttaggagcgttgtacatcagcagcgcttcgaagccatcaagggatggtcgtttctccgggagcgacgcgtccagctcagggacgacgagtatactgatttccaggaggaaatagggcgccggcggtgggcaccactggttactcccatggccaagtttgatccagaaatagtccttgagttttacgccaatgcttggccaacagaggaaggcgtgcgtgacatgaggtcctgggttaggggtcagtggatcccgttcgatgccgacgctatcaaccagctcctgggatatccgatg

SEQ ID NO: 279972 - DNA, 440 bp, Glycine max
  unsure (1)..(440): unsure at all n locations
cggagaggatgcttcaatggaggataagaaagagggagagaagtgagaggngggagcacgacattgaaggaagaggaatggagagaagttgaactttgagttatgtctcacaagactctcattcatcanagttacaacaaatgttacacatgcttctatttatagactaggtagcttccttgagaagctttcttgagaaaacttccttgagaagcttctttgagaaaacttccttgagaagctagaccttagctacacatacccctctcataactaagctcacctccttgagaagattccttaagaagattcctaaagaagctagagcttagctacacatacctctctaatagctaagctcacctncttgagatgagaagctagagcttagctacacacccnnctatatagctaagctcacncccatgacaaaatacatg

SEQ ID NO: 279973 - DNA, 380 bp, Glycine max
  unsure (1)..(380): unsure at all n locations
tttcaccttctcgctaagctaatctgttggcttagagagcttccgctaagcgcaccactcatgggctaagtgtgaggaagactctggaagaagatgagctatataggttcactaagcgcaccgcttcatctcatccactaagcgagaaaggcacgcgctaagccgaaattcactaatgtgcgctaagcggtccataattgcactaagcgcacgaactcgaacaaggccacctattgatgcctgaaatcagattgtagagacggagttcggactgggattcagatctttgcatgtctagagtttctagagagagaaaggtccaagttccaaagagtcttgagagattntgctgtgtgaagatctgcagagaccagagcttg

SEQ ID NO: 279974 - DNA, 339 bp, Glycine max
  unsure (1)..(339): unsure at all n locations
tctcgacatatgatgcgcccgaatcggacatnccgtgtgaaattatgaccatttaaatttcgcgagagtttggcgatgtttaatttcgagcgtatcgatatattataagcctgagtcgtacatccgtgtgaaatgttatgaccatttgaatttctcaagagcttctgttgttcaatttcgagcctctcgacatattatgcgcccgaatcggacatccgtgtgaaaagttatggccatttgaatctctcgagagtttccgatgtttaatttcgagcgtatcgatatattataagcctgaatcggacatccgtgtgaaaagctatgaccatttgaatttct

SEQ ID NO: 279975 - DNA, 598 bp, Glycine max
  unsure (1)..(598): unsure at all n locations
ccgcacggcacaccgagcgaaggagcgtataccgtgataagatgagaacaagcgaatatacaagcaaacacanatatatntatnntaccncaaaaagagagagcaggggntccggacccccctcgnacacccacggngaananaagannngnangagggagananaaagagaagaaggaagangaaagagttgttttttatggatgaaggannaagganngaaggagagagaggagaagaagagaaaaaagggaagganaagagaggagngaagagaaaaatagaaaaggggggagagaagggaaggaaatggagaatggaaaaggttaaaaagagaaaaagagaggaagagggggagagaaaaatagaaagagagaaagaaagaaggagagggaaaagggaaggagagaggtgaaaaagtgaggaaaagaagtggtgatgaagagaaggggaggaagaaagagaaatggagggaaaagagggtattgagagaagagagaaaggaatgatggaaagggagagatagagaggaggaaaagaaaaagaagatagggaagaagaagggaaaggaagaagaggaaaagaaaagagatgagag

SEQ ID NO: 279976 - DNA, 396 bp, Glycine max
  unsure (1)..(396): unsure at all n locations
tggtattgaggtttaagaaccattattcactttcgatctaacgaanacactgtttatcggtgtatgtatctgaaggtcagtgcgagtaagattattttctaattctgtatattgatgatatcttgcttgcagctaatgatcttggtcttcttcatgagactaagacattgctctctataaactgtgaagcgaatgatatgggtgaggtaacctatgtgatacggatagaaatattccatagtagatcacatggattcgtacgcttatctcagaaagtatatatatcgatcaagtgctagagagatttaagatgaataggtgtttaacatcgcctattctaatttagaaatgagacagagttagtcttgcacaattgcctagaaatgatatggaatg

SEQ ID NO: 279977 - DNA, 399 bp, Glycine max
  unsure (1)..(399): unsure at all n locations
agcttgttataaaataaatattgaatggtggattaagttctgcactattgaactacttagacaatattaaaatactcaaagctataaaatatgacaactatcaagataatcgcgttggggagttcctactaaaatatctcttgccgtataaaaggtttttctctatttaacgctaccctagtgttcttacactgagaaaatacttagaccatgactcctcacatgaatgagcctaactctcttagcttttgttcttgattcctcaacaaacttgctctaacagagttgcactaagcatacagtgtaaaatatactagatcattgcactccattcctagacatacaaatttctagcttactctatcaagttctaaggttttaaagaattntccaatacta

SEQ ID NO: 279978 - DNA, 498 bp, Glycine max
  unsure (1)..(498): unsure at all n locations
agcaacgctgttacgacggattcaangcaagncnnncncgtangttagaaacccacccttagtaaatgtgctcttgcactacttgntntgttgtattaagcccagatgaaagaagggattcttcagtgcacacagttttgtaattcggctgctcgaattattttgtcatacgaaaatacaaattgttgataaagcgcttataacatgaaattcacagatcaaaatgattaagagggcatttggaagaactttcacagagcttttttgagcttctcttatcaattattgtatgaactcctaaatttaaaattgaagatgtgtggttaagcttatgataatggcttatggcccttctataaattccttcttgctcatcacaataagtttattgaattaagctcttatgatataagttctcatggaanaaagcttttataattatantaggacttanataagctattttcccaagcgtgcaataagtccagagacaattcg

SEQ ID NO: 279979 - DNA, 381 bp, Glycine max
  unsure (1)..(381): unsure at all n locations
agctgngtgntntgcaattctaagacactagagagcgggcaagtatatgacatgtcccacttgtactttttctatctaatttgcatcctgcaaaatcagaatatgaaaaacctgttatgtttaaggaggtacctttaagataccacataagcaaacacttagcatgatatccaatctacttgcagataggtagagaagcgattcaatcatacctctgtatcttgattcatccactaatttacctttctcatcaaacgtaaggtaggttgatgtagacatacgagtaaatgcttctttgcattttttcataccaaatttctctatcgagtttatgcaatatttgagttgactgaagaaggctccatgtatcaattgcttgac

SEQ ID NO: 279980 - DNA, 411 bp, Glycine max
  unsure (1)..(411): unsure at all n locations
tttgagaacactnnttagttatgctagagcttagctacacacacgcctcttgtaactaagctcacctccttgagcaagctccttaagaagagtcctatagaagatagagcttagctacacatacctctctaatagctaagctcacctgcttgagatgagaagctagagcttagctacacaccctctacaatagctaagctcacccccatgacaaagaacatgaaaatacaaaaaaaaagttcttactacaaagactactcagaatgccccgaaatacaaggctagaaccctatactactagaatggtcaacatacaaggcccagaggaaggaaaagctcatctaatatntacatagataagcggcgtcatacttaggccatgggctcggaatctaccctaatgctcatgag

SEQ ID NO: 279981 - DNA, 380 bp, Glycine max
  unsure (1)..(380): unsure at all n locations
agtttctantatgttgcatttcttccttgatgctcacttcgagctcaaataatccttggtctgaaaaactgagtcttctccagaacatatggattgaatccagtgggatgcaaccaacaacatatttggatagctcacaagcacaaggaagaccgtgcgtggttctcatcacacaaccacaagtggaatgattcttgctagcatagtgaacatgctcaaattcagcagcaatctggtttaaagcataccttgaaaccattccaagaagcctctnttataagggtttttttaagacatgtccaacgacatgtgcacttgtttcaaatgatactctaattttcgtgtgttgtagcgtcatcatgttgttcatggcattccag

SEQ ID NO: 279982 - DNA, 394 bp, Glycine max
catgttatccatgttgtctcctctatctctaacagtgactacaggacaaagttaacaataagccgggaatgtattaatggcatgatatggtacctgcatcaacttgctatctattagaagcttatccacataatcttgatgcaggtcaataagcacgctaaaacttctttaacatgaattcggagagagtttatcaatgtatgatgcgaacctgattacgagcggaatgtttgatacatgctatggagttctggatgacgccacttccaaagagggaagataagtcatggtagatgccacttctggtgaatgaagataagtcagggtagacgccacaaggattaccttgataagtctgataattggttcaacaaggaacccagagagaaactct

SEQ ID NO: 279983 - DNA, 401 bp, Glycine max
  unsure (1)..(401): unsure at all n locations
agccacttgtgnttctggtgaagcaaaagcgacatggcggggacataccagaacttgatctgacttacaaagccatggaaccagcagagtgactttctgctttgcaaattctgataaatatgcacctcgaaatagtgggtatacagctcttcccgtcatccaaggaagactagtagttgtcactattgcaacatgtctctcattggccaatcacaaaacaagctttctactatgatgccacataagtttgcaatgcaatcagatttgaataaattgtgaaaagagaatagcatatcgaatgaatcttaacttgtataaactaactgactgtctagaaacctactacagaaaaagcatagatctaatcctgncagctcatcaataattgatattgcaccaaa

SEQ ID NO: 279984 - DNA, 497 bp, Glycine max
  unsure (1)..(497): unsure at all n locations
ngccactctaaactgggngctagcactntcgngccactcttagaatactaacgctatgtgctntacaccaaatagacaccaaattcctcttaccttatatcattattcaaagataacccaactacctaaagaactttgacctgagtgaacaattaattaccttggcagacttagtacctcacttcctagtagtagttttcttaaataaggtagaaacaactggctcaggggcaggggttcaacaagtcgagccgtcaaaagtttacagagtgtctctcgtataacttttgtaggcacagcattttctgaaagtacatggtttaagattgaataatttgaaaggattcatgactttgagacatatagttgagctcaactgttttaaatacagtactttcaacatattattcataatcaagattatgtttgattaaattcaatatactgttcaactataggtctagtaataaatctccctataacgaaatntagaaagn

SEQ ID NO: 279985 - DNA, 222 bp, Glycine max
  unsure (1)..(222): unsure at all n locations
gagagaaattgaactctgaagcgcgtctcacaagatactcattcatcaaagtaatgacaattgagacacatgtgtctatttatagcctantacatgggaagcttccttgaccagcaacgaaggtagcttccttggcaagctaggaagaaagcttccttgagaagctagaggatggctactcacacccctccaatagctaagctcaccccatgccaaaacaca

SEQ ID NO: 279986 - DNA, 472 bp, Glycine max
  unsure (1)..(472): unsure at all n locations
cataacgaagtancgagtacnncacttagaaactaagcttaaattgaataaaacgttcataactgctggaatttttatcattatgtgtaatcgattacacaatgcagattgtgaattcaaattttaatagctgttgtaaatcagttttggccactggtaatcgattacatcctctggtaatcgattaccagagagtaaatctcttgaaaaagactttttaacttaaatttcttggccaaaccttttgctacttcaataggaattcccttcctattttaatatactctttctaagactctagaaactgtcttgatcgtccatcttgaatatctttgtcttgaataaagctttgagaaacatgtaaccctttggcaagctttccctttggcatcatcaacacattcagcttgatcatttgtctacattgtgaacaacattttaatcaattctatccgagtatttatgatatgag

SEQ ID NO: 279987 - DNA, 405 bp, Glycine max
agcttgaggttgtttgttaaagcaaccttatgttaatgccccctattgatgccatcaaaataattgaagatgtgttctaaccccccccccccccctacaacaactcatgggataagaggattatgaagagaggcatcaaccaggtggataaagatgaatcctaaactgaattgggaaagcagatgtaggctcaacaatgaacattgagacactcatgagagctcaagctcaagttccaatcgctacacctccattcccaacctatgatagatgtcagattgtgcatgggccagaagaatgcactattgatgataagctagttgtagccatgcttacgggaggaacaattcttataatttgtaccccaaaaatttcaatcaaggatagggctttaagcataattac

SEQ ID NO: 279988 - DNA, 376 bp, Glycine max
  unsure (1)..(376): unsure at all n locations
ctgcttagattgtggtctcagcctatctatgacaatgntaagctaagatggctcacagagtccatgggtggtgctctttcttaaccaacctctaaacctctccaatgcttcacttaaggattcatcanggaactgatgaaatgatgaaattgcagctttcccttctgtagtctttgactcggggaagtattacttcagaaatatatcaacaacttcttcccacgtctttagactgctacccttaaatgaatggagccacctcttggcttctcctgccaaggaaaacgaaaataggctgagtttgatggcttcatctggtatgcctgcaatctttacagtgttacaaatttcaatgaatgttgccaaatgtgcatag

SEQ ID NO: 279989 - DNA, 404 bp, Glycine max
agcttgccatgattagaggcgtcggggtcacgagctatgcggatacctaatgctcccatttgcttgggacgcgtgactggtcctagttcgcaagattccaacccttcgtataccagaagaagaccaaacgaagttgtgagtttttctatcaatggcggcatagattgactaatgcagccagaatagctgcataatgtacattggaagggaggataggacatatttagctaaacaaagtcatccagccctattcaaaagtttccctttccatgaagctagccttctatgaattttatccaagataaaatccaaagattgatggtgttgtctcccttgcaccaaggaaaaccctagatagcggccaaggttggaaacactcgcgatgccacaaacatccttgaata

SEQ ID NO: 279990 - DNA, 342 bp, Glycine max
tgatactatgtatcttctgcatgaatcaccataccagatactctgtccttctgttgcagcacatctaggagtcacatgagcatacttgaagctcatgctgcaaacatttataatagaccccctcagcaacacaaccaacaacacgagaataactatgatctttcaagcaatagattcacttcacgctggagagatcatccaaatctgagatgggcaagtgctgcacaacaacaacaacctggacgtattttgcaaaatgctgcgtggccaagcaagccatatgttcctcctccaatacattagcagcaatagcagcagttacaacaaagactacaagcacct

SEQ ID NO: 279991 - DNA, 199 bp, Glycine max
  unsure (1)..(199): unsure at all n locations
atcngtgnatttgaactgcgaagggcgaaactggctgcttttattgttgaccacacagcggtacctggagatatgtcgcgggggtcacgagaccttggggacgtcaggcggggggctattgcccacaaccaagcttgaccaatcccaccccaacccggccatacccggtcaatgagaacctgcgatgtccctaaacagg

SEQ ID NO: 279992 - DNA, 399 bp, Glycine max
  unsure (1)..(399): unsure at all n locations
ggccgtaacgagcctgatgctgaccccnntngnaaancccagagggggggagggaaccaaccagggtgattggttacagcgaggaaaagggggggggggggagcaaaaaacccacaacagccgcgcagaggggaccggaagcggcgaaggcgaaccgacgagggcgaaacggcaagaaaaagcacgagcgccaaccgccacgcaggcgcacaggaccacaccggacagcggcgcgccgagagccaacagcgaaaagggggagagcgaacanggcgaaggcagacccgacagagcggccgaccacgagcacggacgagcggggccaggcggcccgcgagggagcgaacgagaaaaggcggaagacgagagaagggcggccggggagcccaaaaagcgggg

SEQ ID NO: 279993 - DNA, 401 bp, Glycine max
  unsure (1)..(401): unsure at all n locations
agcttgttattcaatatcctgatgatggtgttccatatgttctcaagactggactaatacatttgttgcccaagtttcatggtctcgcaggtgaagatcctcataagcatcttaaggatttccatatttttttccaccatgaagccccatgatgtccaagaagatcatatctttctaaaggcttttcctcattctctggagggagtggcaaaagattggctatactaccttgctcccaggtccattttcagctaggatgaccttaagagggtgttcttggagaaattcttccctgcatctaggaccactgccatcaganaagacatttcaggcatcaggaaacttagtggagagagcttgtatgagtactgggaaagattcaagaaattgtgtgcaagctg

SEQ ID NO: 279994 - DNA, 459 bp, Glycine max
  unsure (1)..(459): unsure at all n locations
gagagcatctcttatttaagcatttcagccttnggttttcttgtagctctaagaacaatgccatgtggttttctttctttcttccaaatccatttctaaagttccaaatactttctccatcacccacatccaccattagccaccacaaaccatcattgttctccattgaaaacccacaccgagaggaacccttcaatcgaagcagaatttccaacttggcttgcgatttcggtagagaacgaacaccctaatctgatctttcattntctttcgaggtaaccatggntctatgcttgnttcttgttagtttcatcttgtctttgcatcttttctaactttgcaaccgccattgcatgtcttatngcttctttgaaaaaccttagagaaagagaacttgtaaacattatcctttcatgaaatgcatgttattnttgtaactacactgaaccccggcacatt

SEQ ID NO: 279995 - DNA, 238 bp, Glycine max
  unsure (1)..(238): unsure at all n locations
agcttgaatcgtacatccgtgcgaaaagntatgaccatgcgaatttctcaagagcttccgctgctcaatttcgagcctctcgacatattatgcacccgaatcggacatccgtgtgaaaagtcatgatcatttgaatttctcgagagtttccgatgtttaatttcgagcgtatcaatattttataaccgtgaatcggacctcagtgcgaaaagttatgaccatttgaatttgacgagag

SEQ ID NO: 279996 - DNA, 337 bp, Glycine max
cactatagacacacaagcctcggtattcaatctcgagcgtctcgatatattacgggactcaatcatacatccgagtaacaagctattgtcgtgtgaattatctctgatgttcacaattccatttcaagcgtctcaatagattacgggactcaatcagacgtccgagcaaaaagttattgtcgcttgaattagcttagagcttcaaaattcaatttcgatcgtctcgatatattacgggactcaatcagacatccgagtaaaaagttattggcgtttgaatttgctcacagcttcaacattcaatttcgagcgtgtcgatgtattacgggactcaatc

SEQ ID NO: 279997 - DNA, 578 bp, Glycine max
  unsure (1)..(578): unsure at all n locations
ggccgccgcccgacanaagagaacgagtgaagaggtaaagacgcgaaaaaagatcactgcaccgacaccgannnncnnncannccannnnggcagcgccccatncccctnganaccccggngagannnnganngngnnnggggggnnnnnnnagagnggannnggagagagggaagnggttgttggaaaagnggaaagggannagggggggagaatagaagaaggagaaaaaaagaaggggagagggaaagaaagggaagaaggggggagaaggaaataagagaaggagtagagaaaagaggtagaggtaggggaaggaggaggagaaagggaggagataaaaggaagaaggagaagtgtaaggggaatgagaaggaagggagggggtagatgagaataaggaaagggaagaagtaagaagagaagtaggggaaagggatgtagtagggagaaggagagaattaaagaatggagaaaagataggagagaaaggagggaattaaaaaggaaggagaggagaggagggggagaagggagaagaatgagaaaagagagggggaaggaagatagaagagagg

SEQ ID NO: 279998 - DNA, 89 bp, Glycine max
acctgaaactaatgcacctcgaaattgcctgcaaaagagcgagataccaaactatgattatatggaggatttgaagacggtaagacttt

SEQ ID NO: 279999 - DNA, 400 bp, Glycine max
  unsure (1)..(400): unsure at all n locations
agctnngtgaaacaatatttgctactggtaatcgattacaataaactggtaatcgattaccagagagtaaaaactctttggtaaaaggttttgtgaaaaattcatgtgctactcaatgttttgaaaaactttgaaacttgaaacttgaaacttctcttgaatcttgatcttgaatcttgaattgttcttgactcaatcttgaaatcattctcatgggctttttgtcatcatctttgttatcatcaaaacaccttgaatcaatcttgattcatcatcatgaagcaatgaagcttgcttctacagagaagagaagaatattactgcaagacaggacagtagtgtccattcttgaggaagaaactcattnttctgattcttcatcatctgattcaccatcatc

SEQ ID NO: 280000 - DNA, 493 bp, Glycine max
  unsure (1)..(493): unsure at all n locations
ngcttcccttaagcgagtgaacgnctgncgngccantatagaatactcacgcttgccacccagctcgcccaggcgagcaaggttgcttcttccttattttcagccttctggaggaatcttctggagggcccaagtgggcctggttgctatttgcacccctatttttactaaatacaccccctgccttttttttggtgattcttttttcgtaaagttacggaaacttatgaatttcgtaacgatacttgttttctttccgtaatgttacggaaccttgcggattacataatcatcccttttttgacttacggaatgttacggaacctcactaattgtgcaacgatgcttccttttgatttccggggtgtcacggaaccttacggattgtgcaccaatattatattatgatttccggcacgtcacggaatttatcatattgcctaatgatgggtgcaagcaccttaaaatgaccaaacacaagttgcatgccacg

SEQ ID NO: 280001 - DNA, 350 bp, Glycine max
agctttgttctaattcaaatgacaataaccttttgctcggatgtctgattgagtcccgtaatatattgagacgctcgaaattgaattctgaaccttagagctaattcaaacgacaataactttttactcggatgtctgattgagtcccgtaatctattgagacgctcgaaattgaactctgaaccttagagctaattcaaacgacaataacttattactcggatgtctgattgagtcccgtaatacatcgagacgctctaaattgaatgttgaaacctctagctaattccaacgacaatgactttttactcggatggccgattgagttccggaatacatcgagacgctcg

SEQ ID NO: 280002 - DNA, 356 bp, Glycine max
  unsure (1)..(356): unsure at all n locations
tattatggccaagcgaataacanagttaggtgccaaatcttggttaaattaatgtggaaattccatatcaattattatgcttacgcttcattgttaaaagctggaccacacaatacaaactcaggagcaccttaccatatatatatatatatatatatatatatataacgcaaaacacgtaaaagttgcatcatgtttttttggtaagccattgaaatgcattaataaaaaatcgcacaagatgtgtcaggtgtaatttaaggactccgatatatcattgttatccggccgtacttgtaatggcagtgaatgtgaggcattgttcagtactctgaggatcacatggaactatgata

SEQ ID NO: 280003 - DNA, 390 bp, Glycine max
agcttgttacccatggaagctcttaatatctcccacactttttggggtgggccattcttggatggccttgattttctcagggtccacttggaccccatttctaccaactacaaaacctaagaaaactatattatctacacaaaaggtacacttctctatatttgcatagagggtgtttttcctaaggactgaaagaacttgtctgagatgtcctaagtgatcatctaggctcctactatacactaaaatatcatcaaaataaacaactacaaatctacctatgaaatcccttaagacatgatgcataagcctcataaaggtgcttggtgcattagtgagcccaaaaggcatcactagccattcatacaaaccaaacttggtcttgaaagc

SEQ ID NO: 280004 - DNA, 402 bp, Glycine max
  unsure (1)..(402): unsure at all n locations
tacacacccatataattgctaagctcacccnctgccnattacatganaatataaaanaagtacctactacaaagactacttaaaatgccctgaaatacaaggctaaaatcctatactactagaatggccaaaatacaaggcccaaaagaaggaaaaacctattctaatgtttacaaagaaaagtggacccaaccttggcccatgggctcagaaatctatcctgaggttcatgaaaaccccagggccttctttagcaactctagcccaatcctcctggagtcttctatccaatacccttggggggtaggattgcatcatcccctccaccttggaaaggattntacctcanatcccgaggtttttcatactctcgactncttccctcaacacctgtaaaaagaa

SEQ ID NO: 280005 - DNA, 278 bp, Glycine max
agctttttacattcacgtgccttatggagctcagagcctgaacctccgcgtcaaactcctttgacttcccaccaccaccgtgcttgttcccaagcatgggggtgctactccacgagttctttctccttgcagggacatcggtgttccaaatatgcttcaccgcgagttctttcccattggaaagagtgaccctgtacacgttccccgagcctcctatccctatgagattctcctgcttgatggaatctacaatctctccctccgagaaactcatcacg

SEQ ID NO: 280006 - DNA, 321 bp, Glycine max
gcgatcgtccaataactccagaggggagtatgtgaacgaaatctctgcactccacagactaatgcccgagcttaaagttatttacaccagaaccataatgaaaagtttaattcaacaaagaacgaatataatattacggcgacaaaattcgcattgatggggaaatgcgatgtcccattttgccaacatgtgaaagcttatagatgaaactggatagaggactcactatcagctgcatacatcttgagctgctcaagaactgtggcattatttggagcaaccgatgatgcatcagaggccagagcgttccacgaataaacc

SEQ ID NO: 280007 - DNA, 173 bp, Glycine max
gcttccttcaccttcttggctgcgacgcgtacattgaccatttgtcttccttctcgcgatgcttcatttcatgtctgcctgaatgggcctatagcctataccgtacttgccacgatgaccttgggcatttatcagtctagatatgccggcgttggttgtttctaaacccattc

SEQ ID NO: 280008 - DNA, 461 bp, Glycine max
  unsure (1)..(461): unsure at all n locations
gcaaatctgtcggcgnccgtgtcaccccctgtgactcacccggctcnctccccccccccggtgcttgaccatgaaacccttaatccactcgtgacttatggaagaaaaaaaggcccttttaaagatttcctgaatcgtggcgatagaagaaaacctttggccaataaagtttcttttttattattattcaacttgcactgtcctattgatgaacaaaaggccctttcttttgctggaccatctccctcaagtgaaaaattgacttgaacctaaatctgctagttgctgcgttcttgtccatatcccgttctctggacgcagggcaggttagagcacatattattcaaacctcgataaacccgacgtgttcaatgtggtcgtaaatcaagcgaccaaaaatgatttactattatttgaataccctacctccagtatgatcttccctatatcacccgaacccg

SEQ ID NO: 280009 - DNA, 430 bp, Glycine max
  unsure (1)..(430): unsure at all n locations
agcttaacctgttatgttgaagacttatganaggttttatagaataactctagcaagattgttctggtatccttttagtaactctaattgaacctcttatcagttcaatcacaagtttagtttcgacttttgtaatccaccagagcaggcaatagttttttttatccataggaattgaacacagtaccaagaggtttactacacttacacactgctcaactagaataggcaataggtctttgtatctgtaggaattgaacacagtaccaggaggtttacaacaatcacacaaactgttcaatcagaacatgcaatagtagttctattacttatagatatccatttgccattatgtcatgtgcatatatatatatttcatatattaataaaaaaaattatcatctatttgcttatctctaagttggatttc

SEQ ID NO: 280010 - DNA, 262 bp, Glycine max
tacagatggcgggacatgacctatgtcgggatatttgtttagcaagtggttcaagaataaaggaatgccccatatcatttgcatgacacgcatatgataatgatgattagaaattcatgcgaaactgatcatagcacacatccatgtggacactcaaacataaagctttgtggccatgaaacacttaggcttacggtttgttttccccgttcaatcaacccagtggtttcaaacaatgcactttcatcaagttatgcacaca

SEQ ID NO: 280011 - DNA, 538 bp, Glycine max
  unsure (1)..(538): unsure at all n locations
gcgccacgtanacacaaancgtatctnagcgtatnattanataaagagatgtgaagacaagacganggcgcgcccacccnncgagcggcgccatgaaccctgtagagctgatacatagcaaacggcaganagaagccaagctgacgacacggcgcccacacatttgtaaaggagttacggacagggagcggaaatctgcgatgacaagccacaaacccacacccctgtgccgacccacaggagacgactcccacggacggggaagacgatcgaaccaggaggcagcaacacaaaagaccgcaaagcggagatgggaggagagacagacgggatcgaccaggaaaaagaaagagagaaaagcggggcgaaaagccagaaacagagacccactgaaggccccggaggagacggaacgcggggagaatgcggacagaaaaattaaagaaagagagaggaggccggaaaggcggggaaaatcaacacatcgagacagcagcggagcggcaagggggaggaaagagtggtacaagaagagccg

SEQ ID NO: 280012 - DNA, 425 bp, Glycine max
acactttatcgctaaaacaaaccgctggcataacgagcctccgctaagcgcaacactcataggctaagcgcacggaagaaacagccacaagatgagttgtccaggtacactaatcaacaccgcttcagaccatccgattagcgaagataggcaaccactaagccgtaagacgataatgagccgcacgcgattcaaagatgcactacacgcacagcatgagcaaacgcacctataagccagaatatgattaacaaagaccacagcatgccatacaatctagagagagacaagccaacgtctaacagaggtgagagatccgccacgagaaaacaagaacaccccacctgaactgaaccacctgagactcagatgatacgcaaagatgtacatccaaacgcgaagagacgaccaccagttgacattcc

SEQ ID NO: 280013 - DNA, 407 bp, Glycine max
ctctgcacttgtataattatgctatgatattgggctttgctgtgtgtaattagcttaattacgtagattagatggtcctaatcaaagcccattccttccttctacgtatccattatatatattaatgtagttagttagtcagttatttcattctatacaaaaacaaatttaaaaacttgttgcggaagttttaggattaaactttatctctcaattggtcttcattcttcttcctctcttcaactctgtgatacctgtattcttgcataaattccattgctctttcactggtgatgattattgaaggctaaacaaacaatcaatccaaagatccactccatgcagggtgaacttgagttctagtttagtattcaaatttgagtgaatggcatctttttttcattcta

SEQ ID NO: 280014 - DNA, 399 bp, Glycine max
  unsure (1)..(399): unsure at all n locations
agcttaaagtatgccttattcattcattcctatgagatgttgctgaagtattggcgatcagaattgccattccttggattacggngttgaaccaagctcatgcttttacaaaaaggctcatcaagtcaagttgaaatatggaagtaaccgtcttgcaaaattgtggcaaaagatgaatcaagtcacatcactgcttcgtctactgccaaacatatttaggattgttgatgtccttgttacttccagattcaccttggcaaagatgtcatggaccatgttgaatatctaaattgattcgaccccatatcctgcgtaacaatttgcaatacttcaattgtacatcattcgcatacatccatgcttttcattggttgcattgctcattgcattctttccttg

SEQ ID NO: 280015 - DNA, 408 bp, Glycine max
  unsure (1)..(408): unsure at all n locations
cccctcagtcgcagaaccaacaactttagaataattatgacctttcaagcaacagatacaatccgggtgggaggaatcatccaaatctaagatgggcaagtcctccacaacaacaacagcctgtccctccctaccagaatgctgctggtccaagcaagccatatgttcctcctctaatgcaggaacaacaacaacaacaacaaagacaacaagcaactgaggccccttctctaccttccttagaggagttagtaaggcaaatgacaatccanaatatgcaatttcagcaagagacaagagcctccattcagagtctgacaaatcagatggtgcggatggctactcgagtgaaccaagctcaatcccaaaattctgacaaatagccttcataaactgtgcacaatctga

SEQ ID NO: 280016 - DNA, 450 bp, Glycine max
  unsure (1)..(450): unsure at all n locations
ccacgcatccatcccttcataattgacctggctntacgccncccccccccccgagggccatgaacatgaagccttnaaacacaanccnggaaaacgcgacgaacacgagaacacggattaaagcatttgtggaacggaaaggcgtcaggaaaacaccacagcggcccaaaacgcgaaagaatatgacggagtgaccaggagaggcaacacacaggcaagaagagggacggaacaaaccacgaacggcacacacacaaaagcaccgccaccgacaccagagaacgcccaacaaaaggccgagaaagggacggcacaatgaggcgcaaaacaccgaaaaataaaccgggacaagaggctacagacaagaccacgcgccacaaaaagcgagcaaacagaagaccgaaaaaaaacggagccaacttagagaggaacactagaacaggcgcacag

SEQ ID NO: 280017 - DNA, 409 bp, Glycine max
agcttgtcgcaattactatctcattattatatttaaaaaacatgtagatgaacatactgagcaatcgaataaaattggaacagagataccatctatatgctgtatctaatacattcatggagaaaacaatattgaaatacgacggtatgcgactatattcttcggtgaaaaggaagttattatattgttacaatatatttctatagcagatttttacattcacccttttcttgtatctctctattatacgttatttatctcattctgtactttttttccttcttttatggcgcttttaattatagaagaagtatacaaagaagtaatataacacttcgctaacagatttgacatgtatttaacggttgggtctaatacgttctttgcattataagataatacgtgttca

SEQ ID NO: 280018 - DNA, 514 bp, Glycine max
  unsure (1)..(514): unsure at all n locations
cgcaaccccctgccctnnccggtatgaggatgcacggcataacccanaccccccccccgcgcgcgcatgacctttgaactgaacatcgaaacgaaccagccaaggtggactcgagcngaaggtgatccacgacaactgtgagcccagcggcagaccgggggaggaaccagcggcaaacaacgaccgaacaaactacggacacaaaggtcgcgagcaagaaggcccaacgtagccaccgcggcaacaaagcagggccaaccatgcagaagcgagaaccagagcaaaagcagccgggcacgaaagaaaaagcgaacaacaacgacctatggcgcagggacgacgagtaccaaggagaggacccacaaagacccagcaaaggtcagccacgaacaggccgcccagcgatgacaagacaccggtgaccccaccgcggacaaggctgtgtacaacaccggtgggtggcaggggccgaccaccaaaacatagtcacgaaagcgacatgaaggaacaaccg

SEQ ID NO: 280019 - DNA, 616 bp, Glycine max
  unsure (1)..(616): unsure at all n locations
ccgccctccacgtcgaccnnctttgttgnagatgaactatgcacgaataccactatantattcatanannanaaagagagaaggnnctgagacagtgaacacactgcgaatacccgcgagatcnagcgtggnacccggagatcctccagagagcacccgcacgcatgcaagcttctgttggaactttctgacttgcattccaatgtgacatacgccacagattctgcctgcgtatattgtcagatagggaaagcctataacagcagcaaagcgaatgattttcgtgatgcctcacaagcgcacatgtcccaatttatgatgccaaacatggactacatctccctcgtacaacaaacatgcggaggacgaaccggattcctgaagagtacatagagaacaacacgcccttgatctgctgcccatcactacagacacaatcttatcattagtcacaccacatactgactatgtgaagagacatcgaaaccttccgacacagctgcctgatgctgccaagcatgcacacaagcctcaccagcagtacttcgccagatagagacgcatctaggcaagctcaccactcaatgagatatacatacagcaacacccaatgtcc

SEQ ID NO: 280020 - DNA, 258 bp, Glycine max
aacccccaccaattgtgaacgcattccaacccccccggcctgcttactaaaccaacaacacggacagacggtttacatgcgacaagcgaagaccacaaaccactaccggcgacagcaactagaccactgccagacacaaaaaacgacgtaaacaaagcagaaacgaaaaacgggactgaaaacccgccagcaacaagacaatcgaaaaacaacgaaaggatagagaaaaccccaccacaacggaggcaagaaacgccc

SEQ ID NO: 280021 - DNA, 405 bp, Glycine max
  unsure (1)..(405): unsure at all n locations
cagcttgtccataaatatatgtnntttgaagttgtcatttcaatttcttactaagtaaaatggatcattttcaaggtccaacgccttataatgatcacctcttaagtaaaaaagaaatcacttgataagaaagaactacgtangtctgatttcctcatcacaaattgaggaatacgtaggagcaaagggaaacacccttgtcgaccacaaaaagagaaaaatataaaaagggtataaggatatatagacataaaaagggaacatataaaatcaaagtcatgtttgcacattcgattaaaggctgccgtcccttgggacggacgtgtggtgtgctaatacctttcccgtgcgtaaatacaactcccgaacctttctcttaatagatcgtagatcgcgtcttttccg

SEQ ID NO: 280022 - DNA, 169 bp, Glycine max
cattatctcattgtattttctaggatcatcattctgcatcacattcgacagtgactcggacaaagattgaatcatttgtcgtatcccagacagtcatctaggtaatgtcaaatgccatctgtactgtttattacattagctgcccttctgggctgcatccataaacgtg

SEQ ID NO: 280023 - DNA, 453 bp, Glycine max
tattatatattcttagatcgagaccccacacaccatgaccgtcgcctgaacgcaagaaaacacgtgcataagcagagcgactctggccaaatcatattctcatagtacagacttcactactcagataacccagatacatactctatcttacgatatgttaagcgtaggatcgacatgacagattaagtgaaagtgcctagtagatataatggcattatgacctgtgggaatctgtataaaaggatgagaagcacatacgtgctgattgcccataacgctcgatgcactatgcagttttacacatgagctataattctgatgaccaattcgacatgactgttctgcataatatggcagatacccaaatcattcttttctacatgccattttgataagatggatgctgcaagcctagatatgagtaatcgtattataccaaacaagctctaaccg

SEQ ID NO: 280024 - DNA, 582 bp, Glycine max
  unsure (1)..(582): unsure at all n locations
ggatggacgccccncntttgatngccagcttgaatngcgcttcgnanngaccnccncncnnttngcggaagannaccgtcncgngacncnncnncangncgcnannatncanacagtctttttcataatatatttatgtacnctgtgcangctcacaagagacccatcgaagattnagtatgaactgactccaaatggtacacatcgtacacattncttacactaacaatccgacatggcgtgatcatcatacatagcgcgatacggctctaggttcataccgaccgatatgctcgctcgtcaatgaagtgacgcgacaccttcgtcacgacacgataacacggctcactatactccctagaagaatagtatgcaactaacgactaataaacaatttagaacgagccatatcctcatatgagtacgataactaatagtgcgacgttactcaatgaccatctgcatcaaaatcaactaagtcattctactgtgtctaaacgtaaatcgctaatcactgctgtcgtcgtcaacactgtaaagcaaacggcgagatcattggactgactggatatatgtgtaccc

SEQ ID NO: 280025 - DNA, 619 bp, Glycine max
  unsure (1)..(619): unsure at all n locations
tatggggnnacgggcgtagagaccgtcgtactaccctggaagnacactacgtactatacggcgaatnctagctcggtaccccggngatgcctctagaagtcgtacctgcagggcattgccaagccttctttgatgcannattgagnnntatccctgtctgagggtatgcgctatcaaagtaggtngacatntcagaaatgagtttgaagtttcgcatgaacctttgtcaatagacttaggtgatttacatttacatgcgtggtttcatttgccgcagtagtacttcaagcattgtattgacaaggagaatgtcattgtgatcgaagcacaaatgcctgcacaatatgcaacgcatgtcgagtggttgacaactgccatgcgtggtcttgaagtgcctaacatagatcctacttatgcaaaaatgagagcagtatggtttgccttacttttcaagctgttaagcaaataggtgataatttaagaaacgtcagatcatggcacatgcctgcttgtgtatgtaattgtanataaagaaaatagacttcgggtgcaattatgagtcgcatttattagtagcttccgttntgatcggttngagaagctgcttatattcnacatg

SEQ ID NO: 280026 - DNA, 359 bp, Glycine max
  unsure (1)..(359): unsure at all n locations
tatacgctattaaattatgaattgtgtaaataaccgtgcgcganaggatgctgacactacgccacggctgtntcttgaactgttactgngactatgcctacgtgaatcatcctacgaagcacataanattgaacaagttatgtctttacatgaaaacatatctaatggttccaggaccatggtgtttctggtcaatcttcacatgacatataatcaacttttattaactcgtttctggtaaattaaaaaaactcagctacatgaacttactcctggtccagcgtctcctctgngacagctttgcccttgtgaatgaacttgaacatcttgctcatgcacattttgtacaaggcgtgtgt

SEQ ID NO: 280027 - DNA, 324 bp, Glycine max
  unsure (1)..(324): unsure at all n locations
ccccaccccacccccaagcagaagaaaagggccccccccccggcaatgacttagctgaactcaaccaanttccacaatcaccccacattcccccccttatccggcccgagggcgaccccacacaaaatcgacgaacaaccgcccagcaccccccaccacccgacaaagcacgacaccgcaaacaccgccacaacggcagcggggaaaaccgcccgacccgacacccgacggcgcgccccaaccccgaccagcgcgaacaccaaagcccgcagcacccacaaaccccgcgcccacccaacaccgacacagccagaccacaccccc

SEQ ID NO: 280028 - DNA, 457 bp, Glycine max
  unsure (1)..(457): unsure at all n locations
agctntagtcaaacagaataatctgaatatgtcttagaattgggtggtgaaaaagcataataagactgtctatgattggtttaaagatacaatctttgcagatgagaatgcttcagaaactttaagaaagctagcagatgggcctaanagaaatgttataacctggcaaggatacgacatanacaggtattcattntacacaaaagcacaagatgacaaaagtacaatgcagaacaacggngtcaccttaagggttgaatctcaacactttgcangtgtcaatgacgccaatccctgggtagcttccatcccttactttgngttcattgatgaaacttgngagcttaactatgtgaaatttacggtatgtgtttcaaatgtanagggttgacagcacaccggtgtgtgcccgatgatatangattacattgtagacctaagaaacttggtaccacat

SEQ ID NO: 280029 - DNA, 358 bp, Glycine max
  unsure (1)..(358): unsure at all n locations
cacaacaagtttttccacatccacaatgcgcgcataaacccaccatcccctgtagcccacctncaactgagctcacgtactcccacgtagcccatatcctcgtttctctcaacaccgggtccccatcaatcctcccaagcttccccaacatcaaagtaatacaacattcaaacagcacaaactatcacagccaagaaaacagagcagaggcagaanactctgccaaaacaccaaccaaaatcacagcttttctcacttaaagaccccagtacaattccttcgtccaattcgtaaccgtggatcgactcaattttactgaagtcttagacataacctacatttgaccggtggatctact

SEQ ID NO: 280030 - DNA, 399 bp, Glycine max
  unsure (1)..(399): unsure at all n locations
agcttgaacgagctgatgaatcatgtcgtgcaaacgccggagcggcactgttatctggcacgattgttangattcgactactctatccaatatcggacaggtaatgtgaatgtggtggcagacgtgttgtcgcgatgctcagagttacccaatgctgcttacttcgtcctctccatgccacattntatattccttgaagatctctccaaagagttgcaggcgcataatgagtatgttactctacgagacaagattcaaatgaacccataagcttatccagggtatgtgctaacacctaattttgtgttacaccattggcgcatttggctatcttcatattgcaccttcattcaagctctactcacagaattccatcagacaccaactgggggtcacatg

SEQ ID NO: 280031 - DNA, 434 bp, Glycine max
  unsure (1)..(434): unsure at all n locations
attataggtttagttatttattgcattccatctgacattatctgtcatgctacatctatgatattgagtgaggcataaccgcataagcatataatacaaactcttctagtttattgattatgaccagacaccagtcctttattatgccttgaacaggtgcttattcattaagtttttaaagttcttgttctttgcaatatgaatacataaacttaagataaaacttatagaaattagacagttctgtgaattacttgagcaagagcactcagcgtctgtggtatttcatatacatataaagaatgaatactttntacacttacaaggacaataataaggagttaatatatagtttacaactgattggtgcatgatttgatgtttcatgtgagagaatcttcaccccactgatactgacaaacagtttctttttg

SEQ ID NO: 280032 - DNA, 393 bp, Glycine max
  unsure (1)..(393): unsure at all n locations
agcttgcagnctcctttctgatcatggtcgaactgaacagaaagtacccacaaacatgcactaaattgcctataaactcaaaacgtgtttaattgaatttatgttaaactctgtcatatgtgttgcattacaattatgaggcatctcactgctaaatttggctcagcttggaccttctggccttgctgccaattggcttgataaagatagtttactgcatcgtcgattgctctctanggccaatctctaggacgactntaaggagtttatcttattattatgacatagaggttgattggattagaatatttgaatactggaacttcaaaagagtcagattactattcatgccttattctggaatatgacagtttgcttgatgtttatgtacct

SEQ ID NO: 280033 - DNA, 391 bp, Glycine max
tattgaaggatcataggaatatccattctgatgttgctaagaatgaatccatacttgataaatttcttacatgacgttgagattgagcttctatgctgaagtggcacaacttcatcactcttaacactatgtcatagcttcaagcattatgtgattaattactttagagagacttagagtgagtctagttgatgttgagctagtgatgtgtccaaggtcatactgagtagtgctcttaagtccttcgattagatgcgtctcatcagtgcgtttcatggacaacttcatcattcaacaatcttgcatctttgtatgcaattagttcttactttctaatgtgcctccaatgattatggaagcaggtgaaaagtgaagaactgccaaatttgag

SEQ ID NO: 280034 - DNA, 430 bp, Glycine max
  unsure (1)..(430): unsure at all n locations
agctctgagcaaattctggcgacaatatctatttactcgtatgtctgatggagtcccgtcatataacgagacgctcgaaattgaatgttgaagctctgagccaattcacacgacaataactctgtactcggatgtctgatagaatcctgtcatatatcgagacactctaaattgaatggtgaacctctgagcgaattcaaacgacaataactttttactcagatgtctgatactactctcagaatatatcgagacactcgaaatcgaatgttgaagctctgagcatattcatacgacaataacgtgttactcggatgtctgaacgagatccgacatacatcgagacgctcataattgaatgtngaagctctgaggaaattctaacgacaataactntntactctgatgtctgagcgagactagcacatat

SEQ ID NO: 280035 - DNA, 470 bp, Glycine max
gcgtctcgtatattacgggactcaatcagacttccgagtaaatatttattgtcgtttggattggctcagagaggcaacattcaatttcgagcgtctccatatattacgggactcattcagacatccgagtaaaaagttattgtagtttgaattagcttagagcttcaacaatcaatttcgagtgtctcgttatatcacgagactcaatcagacatccgagtaaaaagttattgtcgtttgaattggctcagagcttccacattcaattttgagcgtctcaatatattacgggcctcaatcagacatccgagtaaaaagttattgtcgtttgaattggctcagagcttcaacattcaatttcgagcgtctcgatatgtgacgagactcaatcagacatccgagtaaaaagttattgtcgcttgaattggctcagagcttcaacattcaatttcgagcgtctcgatatatta

SEQ ID NO: 280036 - DNA, 358 bp, Glycine max
gagctcttcaactattcttctctaacacaattggcaggattgatactattcctgcactgtacgagtcgaaccaaccaattccaaacaaggtcatattgcattgacttgttttggtcattgaaggcatgcattgatgcagttgcattttgtacacccattgtgcaaatcgatggaacatggatatatggaagatacatatggatgctattaattgcatttacataagatgaggctataaacatatctacattggtattcgccattgtcgatggtgagacagcagatggttgacacttctgtttttttctttgcgaacttgagatccatgtacacccaacatggatatgttaatctatga

SEQ ID NO: 280037 - DNA, 181 bp, Glycine max
gagaaccagcgcatgagagataacttccttcagcttgttgaaagccttctgagccttcggcgaccaacgaaatctgtctttggccaagagttgagttcaaggtgccactatggaaacgtatcccttaataaacctccgatagaagcctgacaagccgagaaagcctcttaaagctctggta

SEQ ID NO: 280038 - DNA, 400 bp, Glycine max
agctttttgaaaattcttatggtcataacttttcacacagatgctagattaaggcgcatcgcatatagagagactcgaaaatgaacaacggaagctctcgagaaattgaaatggtcataacttttcacactgaggtccgattcaagcttataatatattgatatgctcgaaattaaacatcggaagctctcgagatattcaaatggtcataacttttcacatgaatgtccgattcgggcgcataatatgtcgagaagctcgaaattgaacaacggaagctcttgagaaattcaaatggtcataacttttcacacggatgtccgattcaggcttataatatatcgatacgctcgaaattgaacatcagaaactctcgcgaaatttaaatggtcataacttt

SEQ ID NO: 280039 - DNA, 396 bp, Glycine max
  unsure (1)..(396): unsure at all n locations
caatttcgagcctctcgacatattatgcacccgaatcggacatccgtgtgaaaagtcatgatcatntgaatttctcgagaggttccgatgtttaatttcgagcgtatcaatattttataaccgtgaatcggacctcagtgtgaaaagttatgaccatttgaatttgacgagagcttccgttgttcaatatcgaatatcactatatgtgatgcgcctaaattggacattcgagttgaatgttatgaccatttggatttctcaagagattctgttgttcaaattcgagcgtctcgagatcttatgtgatcgaatcggacattcgtgtgaaaagctatgaccatttgaatttctcaagagcttgctgtggtcaatttcgagcctctcgacatattatgc

SEQ ID NO: 280040 - DNA, 377 bp, Glycine max
agcttgtttgtatctaatatgcttcggggagattctgtgaatgatgcgaaacgagccaaaatatgcaatgtgacagattcacaagaaagatgtcgcgcgataaactcaagattttaggggtgagcgtgagtgtactactatagcacttcacttaaccatgtttcgagtaactcgcttatcgagatgatgcgctatgcgatagagacatttggctttacgctgtctctcttgcactgcaacatgggcccatttaaaattctttggcttagcaagccatccgctaagcggtagcgagagacgattggcttctcaacatgctcgcttagcgagccgttctaccgagcccaagcccaacatttgagattcaaatatataga

SEQ ID NO: 280041 - DNA, 345 bp, Glycine max
  unsure (1)..(345): unsure at all n locations
aatctacctagtctatatatagaagcatgtgtaacacttgatgtaactttgatgaatgagagtcttgtgagacacaactcagagctcaacttctctccctttntcttccttcaatatcgtgctccccactctttctttctctccctctttcttttcctcaattgaagcatcctctccaagcttcttatgcaaggctcatcttggcgtgaagctacttcttcatggctattcctaacggatggcgctcctctccctatcttctttgcttcagtgatctccattggggaaataccattaaggaccccttgagctcaagatcagcctctatcagaacagctttatcag

SEQ ID NO: 280042 - DNA, 342 bp, Glycine max
agctttcttgtgacgtactaatgccgagttcagctgcgtatgtagattcacatgtcgcatcaaggaaattaacagcgattaacacaatacattgtagaggcaacgcaatgttcaattcgattcactcaaaacgcgtgtgggaaacatccgtaacattgaggttaaccgcttatactattcagtagcgactctgacggcgacacacatttaccttagtaatacagacgcgagtttctcgatagacctaaccaacaaccactaggcacttgcgatgaacttatatctgatttcatactcacaaatgacatcgtacacatgaattcatactcacttatacttact

SEQ ID NO: 280043 - DNA, 488 bp, Glycine max
cgaagagcaccgtttgtcatggcggctgcaccatctgatactgaatctcttgatatatgaacgttcctttcacaaggttactctgactatctcggataccgaatacacgctctctattcctactttttcacgaatctctttgccaccttcgatctccgcttcatatcaacgtagcgtccggaatgtctccctctttcgatacctacctcctcactatacgctgcctcgctagttcatgtatcgattcactttcttagatgattgttcgtgctgaatatcatttgtgattagattctctgctctgttctattggaccttgcacaatgaagactatagggttggcggcgcgacctgagagagtcccttcaagtcatgacaagagacataaggcggatgttgcgagcgattttagagcgtgcttgtaaagttcctagcgtgcaaagaatctgcagtttcggagtgcagagcaatggtctgtattgtctccg

SEQ ID NO: 280044 - DNA, 412 bp, Glycine max
  unsure (1)..(412): unsure at all n locations
agcttatctattaatttcgaccgtcttgatatgttaagggactcaatcagacatccgataaaaaagctattgtcgtttgagttggctcagagcttcaacattcaatttcgaccgtctcgatatgttacgggactcaatcagacatccgagtaaaaagttatggtcctttgtattggctcagagcttcaacattcaatttcgagcgtctcgatatgtgacgggactcaatcagacatccgagaaaaaagctattgtcgtttgagttggctcagagcttcaacattcaatttcgagcgtctcgatatgttacgggactcaatcagacatccgagtaaanagttatggtcctttgtataggctcagagcttcaacattcaatatcgagcgtctcgatatgttacgggactcaatc

SEQ ID NO: 280045 - DNA, 252 bp, Glycine max
gatgatctggctgaaccccttgaacccccaacggcaatttttaattacgccccggtaggagtttggagccctgctacatcctaggctcagtattccatggactccgatcatatcagagctcagagcttatctttagtaaaaaatatttcttttagcctctaagagagtttacgcccggatttgcgatttaatagtttataaacttgatggttagattgtatccttattatctttaaaactttgtaacttatc

SEQ ID NO: 280046 - DNA, 443 bp, Glycine max
  unsure (1)..(443): unsure at all n locations
ttgcggtcattactatcacactagatcgaccatgaacagcttgagctatanacatactgaataacgtactagcctataatataaccaattcaacaagtgttaacaattcagccggaggtacgcaatacacttgtattgctatggatagcgtccaagagaagcatatgatgtctctgagattccaagcgcgcagtagcttgttccaagatagtgtgatcgacatctaatatatttcacacctcacgaactcctcgcattgaaacatataagatatgttgtgatcttcagttctcaaacagagagatcttccaagacctttatctatgagcactattgtacacgagtaatctatattcaatagacatttagaatgctctgacaattggcattggaggcgggtttgcctcaatgtgtcttanatatacttcatctaacccacgtag

SEQ ID NO: 280047 - DNA, 345 bp, Glycine max
  unsure (1)..(345): unsure at all n locations
actttatctnttaattaatattgttcacattgattattaatatgctctaatgtatgcaaatgttcaagttggttgcaagaagaagaattagaagacttggattatttggataagaatntgatgggagtcgaattcatttttgacaagtattaatttgactatggatcttgatcctaattcttttcattgttcaattctaaatatgtatatggagatctataatacattcctctaattctatatacaagagaagttctaaggggggagatatataagttgaaatggctcatgtacgttgtgtcttaagattctgngctggatatagtatctagtttacttgattat

SEQ ID NO: 280048 - DNA, 194 bp, Glycine max
  unsure (1)..(194): unsure at all n locations
agcttgttatgaggaagtgttgaagggtgaaacttcctgcttttattgttgaccacagagtggtacctggagatatgtcgcggnggtaaggagaccttatggacgtcaggtggtgtgctattgcccanaaccaagcttgaccaatctcgacccaacccgggcatagtcggtcagtgagaacctgtgatgtacct

SEQ ID NO: 280049 - DNA, 427 bp, Glycine max
  unsure (1)..(427): unsure at all n locations
tctgttntcaatntcgagcgtcttgatatattacgggattcaatcgatcatccatgttacaagttattgcgaattgcattntctaccaccttttgttttccattaccagcatctcgatatattacgggactcaatcggacatccgagttgacaggtattattggtttgcatttttacaagcttccattttcaatttcgagcacctcgatatattacgggactcaatcgaagatccgagtcaaaacttattgtcgttngaatttgctcacagcttctgtattcaatttcaagcgtctcgaaatagtaagagaactcatcggatatccgagttaaaagttattgtcatttgaatntgctcagagcatcttgtcataccctaatttcgtccggggatctttgcttgatgacatgcgacctttctttggcc

SEQ ID NO: 280050 - DNA, 419 bp, Glycine max
  unsure (1)..(419): unsure at all n locations
agcttatggacatctttgaacctctagttngccgtggnggtattagcaaaatcagaaattcacacatccactaagtcgtacaagtgttgagctgtcttctangatgctcttttgactagctgttgntttgtctaattaaggacacatcttagttntctgttttgcttttttaccaaattgtctttgctgtcatttcccttttaatcttatccttagttataggcacanagagtggctatatatattctttcctctgtaantatacgactatgaatgaaatgtgttttcatacattccgttatagtctgtgtcgtttctctctttttcatcccttatatccaatcttatttgacatttgtaatgtattccagcaattccagcgagtgtgtcttctgctctttnngaaaatacctgaaact

SEQ ID NO: 280051 - DNA, 359 bp, Glycine max
  unsure (1)..(359): unsure at all n locations
atctttttttgtgagatataagaaaactttaattntaacttaagataggtgggtctatgcattgtccaagcttcaagcccaaagggctccagcgtgagggggtatactagaaatataatatagaattgaatantttttcacccaatagcttaagcttatgagattggaggttcttgacagataccatgtagacagaacaaaaaattcaaattgatcatattctaagactggaanagctggaaagggaaaaggataaggggaagctgcgatggtgtgaacaatngtgattggatggctgtgtactcccatcaacaagagatagactcatcaaagttacactagtggttacagcccacacc

SEQ ID NO: 280052 - DNA, 447 bp, Glycine max
  unsure (1)..(447): unsure at all n locations
agcttgctggtgaatccctccaaaaaccctggacggacaattctctggtcgtttctccaaaggctcgtcaaacccaagatttgcacttagtgagtctcactagttcacaaaacccaaggcccgtccttggtaagcctcgacgcacctctacacgctnttcaaaacctagggcaaacacgtccctggtgcaaggctcgttaaacccaaggttcacccttggtaagcccttcttttgctaagttccatctttacaagatctcaaggtacacaaggtcaacccttgacaatttttcttacccctaactgttatatgtgcaagaattcatgtttgcaagaatatcaaaaacctaaggcccgcccttagtactaaaatctcaaggtctacccttgatacacactcttacaaaacccaaggtacccttttggtccgcttacttgcaacaacaa

SEQ ID NO: 280053 - DNA, 232 bp, Glycine max
atgtgatagagcctaagtcacaatgtggtggaatgcaccttctctcaatagcaacttgggcgaagccgaactcgatccatgagaggcagaaccaagagtagagcccacagaaaaggctaagcccgaatcaaataaacattaaaatatagtaactaggaagtgatcctaggtcgttttccaacgagcaatgataaaccagaagttcataatatacttgcagtaacagtaaaaa

SEQ ID NO: 280054 - DNA, 443 bp, Glycine max
  unsure (1)..(443): unsure at all n locations
agcttgtatacatgatttngaattttatgatcctaatagctccgtgtttgggaaacataaaattcctcttcaatgtatccatttacgaaaacactnttgacatccatttggtatagtttgaaatccataacacaagcataagcaaatagaaatcttacaacctctaatctagctaccggtgcataggtttaaccaaagtctatatgctcttgttgagtatagcccttggctactagccttgctttattcctaatgatcaaaccatgttcatccgatttatttttaaacacccatntagtgctaatggtgtgcatatctttagaataagatacccaattccatacatcattccttttaaattggttcaactcctcatacatggacattatccaaaactcatctttaagtgccttctctatagacatgggttctacttgagacac

SEQ ID NO: 280055 - DNA, 370 bp, Glycine max
  unsure (1)..(370): unsure at all n locations
gttgattaatggtgatctagattctatggactcagaanagaagtaattaagtcataagagtttanagtggagggcactttcataaatgactatataactagtttaaaaatagaattttagtttaattagtgggtgactagctaaagtgtctaattatatgatgtagaataattaacataagttagagttgtaacaccctgaaaaattacaactcagactaacaaaggaaactctgtgttgtgtcattggtgcatgtatngaattaatttcattaattatatggttttaatcagataatttcatgttgtgtgtgtgtatgcatgtgactgatttagtaaagcttgatagagaaataanaactatctaacct

SEQ ID NO: 280056 - DNA, 456 bp, Glycine max
  unsure (1)..(456): unsure at all n locations
agctntacatttaatatttgattcggggttagccttgataggtgttgcacaaaatatgtttggtatttgtgtgtatggtcaattagtagtctaagcctttaatgaagaacctaagtcattttgcaagtatgattgtaatattaagtacgattgtgtgtatggtaaatttggccttgacatgattcaaaagtggatctttgtataagatttgcataaactatntagataaggtatctaagagaacttgtancaataagttaaaaacatcttcatagctctttttttcatttntaaataatntgactcattcaatggtgtactattatacagagttngacagtgattntcaccataataattcaaatattgattttcatagcaacaatacactgcacatgaacatctcatccncttacatgtcatgtacaagtgatgaaactctcatgccttatcact

SEQ ID NO: 280057 - DNA, 321 bp, Glycine max
  unsure (1)..(321): unsure at all n locations
cttatgcacttctctctttctcanaataactgaggaaaattagttccgtgaagaatatccaagccgaggcgcttccgtaacgtttccgtgagtgatttcgcgaaggttttcgactgttcttcgacgttcttcattcgttcttcagtcttcaccgggtaagtacttcaaaccaagcttttaattcattctatgtacccgtggtggtccacatttggtttcatgtatntttattctcgttgtcatttactttttatacccccttttgacgtgcttaagccatttatttaagtcatttctcgcttaatctaacaataaaataaa

SEQ ID NO: 280058 - DNA, 374 bp, Glycine max
  unsure (1)..(374): unsure at all n locations
agctntgtgtggagcttctatggtgaatgaagaagaagaaagctacgtgagagagggagagaaaaggcttctgaatttctttcttttggctgagtgaggagagagaacagctttttggttttaaataaaaagggttttctctttttctattattttattataaactatgccacatgtctccatttgagtggagcaaaaagggcccactttccccttttgactgtgacccatactcagccacaaaagtgagaaaaatctgacctttgaaacgctaaaatcctgcctcggtttgcgtgctgtttctcaggtttcagttcctcgcgtttctctgcgtccgtcggggccagttttcgaaagtaaccaatatatatatc

SEQ ID NO: 280059 - DNA, 443 bp, Glycine max
  unsure (1)..(443): unsure at all n locations
atgataaccaaagatgatgacaaaggtgatgaccaaaaactcanagatcaatcagagaacaactcaagtgaatcaagaacaattcaagagttcaagaaaagaatcaagaagaattcaagactcaagaagaaatttaagagtcaagaatcaagattcaaggttcaagatctcaaaaatcaagatcaagattcaagattcaagaatcaagagaaggcttaatcaagataagtataaaaagtttttctccaaaattgagtagcacatgatttttctcacaacatgtttaccaaagagtttttactctctggtaatcgattaccagattgttgtaatcgattaccagtagcanaattgttttgaanaagttttcaaattgaatttacaacgttccaattaatttcanaaaactgtaatcgattacaatgttntggtaatcaattacc

SEQ ID NO: 280060 - DNA, 435 bp, Glycine max
  unsure (1)..(435): unsure at all n locations
agctttattctcttaatccaaacctttgcaaactttttaagagattcttttaacatataaaggtctattgtaaatcgtttctcttgacttcttgatcttgacttgaatcaatgttgaatagctctaatcttttggcatcatcaaaatcttaatacagcatatgcacttacaaattcaacacaaacttagaacataatgtgataattattatgactaaaaatgactctaagacaacatgaatgaagtgattacacttagattattgtgttttcttttctaatctatattttgcaagaatattttgactganaacatgattcaagagtagatctatattattgtgactgaatatttctatgttntctaatttcaagggttagcacaagaatatcttgattgaaaaatgatagaaccctaaatcaacatataaacatg

SEQ ID NO: 280061 - DNA, 372 bp, Glycine max
  unsure (1)..(372): unsure at all n locations
tggtatctgaggatcacttgaaattagtgaananaatcgtttctgtgaagaacatcccagccgaggcgcttgcgtaactcgtccgagacgtttccataagcaaatccatgaagatcttttgccatccttcgttcgctcttcgatgctctttggtcttcaaccggtaagtttccgaaatcgaacttttcaattcattctatgtacccttggtggtccccacttgtttcccgtacttttattatcatttcatttaccttccgtacccccttttgacgtgctntagtcatttatataagtcattttctcgcctaataaagaaataaaataaattttcaccgatcatttgaattgaacatctgtaatttctgtaaa

SEQ ID NO: 280062 - DNA, 405 bp, Glycine max
  unsure (1)..(405): unsure at all n locations
agcttgtcatgaaagataagaanatttatagataagagagagtgaaaagtatgactatttgaaacagatgaaagagatatgaaatgagaaaatagaacataatagtgtagtaaaatatttcgtttttaaaaatcatttgtacaattgcaatcttattcatgtgaacttgtattaaataatattctagtttgatatatatatatatattccatttgattttgattttgctatnttttaaaaaaatttaacaggcataattaattatggagagatagaatcgaatatcattagatattggttaccagcatattattcaattgtatttactttcgggtgtacccttgtatttgttatcagcacgttcgatattgttggctcttattggcgacctaatgctatattgag

SEQ ID NO: 280063 - DNA, 415 bp, Glycine max
  unsure (1)..(415): unsure at all n locations
tatcgatggcaagtctntagagaagagttcggaatctggattcttctggattgctcctttgtaactcactctatgaatctttcactcatcccattaatatcaaagatttcttctagataaacttatctagagcaatgtgtgtcacatgcaatttaagttcataaatggtgcagatcatttctatgttgctagtgtacgaaaaaacgtgttcacatacacacatggcgaaataaaaggatatattttggatttaaattatattataatcaaatgacatattaaaaggtgtacctattgatgagttcttgaagcataaaaattcttcaatagtgtacagactctacgtgtatccacatcgatactgacctctattcgtcaacaactttgacatgtaaaaaataagaatagagaagtg

SEQ ID NO: 280064 - DNA, 259 bp, Glycine max
  unsure (1)..(259): unsure at all n locations
agctatgtaaagtgttgatnttcaccttctcactaagccaatctgctggcatagcgagcatccgctaagcgcaacactcatgggctaagtgagaggaacactctagaagaagatgagttgtatagggtcgctaagcacaccgcttcatctcactaagcgcaccacttaagtccatccgctaagcgagaaatgcacgcgctatgccataatcactaatgtgtgctaagcggaacataattgcgctaagcacacaagcacg

SEQ ID NO: 280065 - DNA, 398 bp, Glycine max
  unsure (1)..(398): unsure at all n locations
acccggcgtaaagaggaactatgataagagctacgtggaagtccgtgagcctcagtgaggtgggcaacaggggatggtgggtttatacgtgatttgtggatgtggagaactgttntgcactatcgcccgaccgccacctagtaccacatgtgatgggtaccccataatcctacaagcttgaaatgaggaagtgtggaaaggtgagacttcctactcttattcgctgaccacagagtggtacctggagatatgtcgcggnggttaagagaccttcgtgacgtcaggtggtgtgctattgcccanaaccaagcttgaccaatcccgacccaacccgggcatagtcagtcagtgagaacctgtgatgtacctaaacaggcgagcttctggcagtcaaccga

SEQ ID NO: 280066 - DNA, 90 bp, Glycine max
gagaggggggatcacgaaactgaggagaagatggacaaactgatccctgaatgtgtatccgggactttaattgtaaagctgcggcgctgt

SEQ ID NO: 280067 - DNA, 332 bp, Glycine max
  unsure (1)..(332): unsure at all n locations
cgaaagggaaagaatagctgggttgcctcccactaagcgctcttttaacgtcactagcttgatgcattgttctgttatccaggatccacaagagttcctacttcgaggaccttcttctcacgtctcttttcctccatcacatgcactntacaacacacattgtggcttggtggatctttcgcctcatggaacatatcaaagctgatcttctgatcttctatgcccatctgcaatatcttcttccctatgtccaccatggaacttgcagcagacatgaatgggcggccaagaatgagaggaatgtcagcatcctcttctatatctatgacaat

SEQ ID NO: 280068 - DNA, 406 bp, Glycine max
  unsure (1)..(406): unsure at all n locations
agctttgtgtggagcttctatggtgaatgaagaagaagagagctacgtgagagagggagagaanaggcttctgaatttctttcttttggctgagtgaggagagagaacagctntttggttttaaataaaaagggttttctcttattctattattttattataaactatgccacatgtctccatttgagtggagcacaaagggcccactttccccttttgactgtgacccatactcagccacaaaagtgagaaaaatctgacctttgaaacgctaaaatcctgcctcggtttgcgtgctgtttctcaagtttcagttcctcgcgtttctctgcgtccgtcggtgccagttntcgaaagtaccaatatatatatcaaaacgctcagaataacaccccgagcgtggttc

SEQ ID NO: 280069 - DNA, 561 bp, Glycine max
  unsure (1)..(561): unsure at all n locations
cgccgcccttgatcccnttaggaaaagcgcttcgnannaccccnccncnttngcaaagnaccgngcggtcanagctgtctgcaataaccaacatttatgactatgtttgactacaactcagagatcaatcggggagcatttcgtgaatcaagaacaatacttcatgttcacgaatagaatcaagagtgaatcacgactcatgagaaactcgtcgatcctagcatcaagacataaggttcaggatctccttcatcgagatcaagattctagattcaagaatcaagagatggcttaatcacgatcggtctaacaagtttgtctccaagatcgtgttgcacatgatctttctcattacatgtttaccaaagagtttttactctctggtaattcgataccagagtgttgatgtcgataccatgatcataatttgtttgaatagttttatactgagtgtacagcgttgtattattttaaaaacgtgattcgagtactatgtttgttaatcattaccgtcgctatgagtcgttattcaagtctcatggagtgtcgatgctttccttt

SEQ ID NO: 280070 - DNA, 416 bp, Glycine max
  unsure (1)..(416): unsure at all n locations
agcttgttgcaattcttctagacttggagttataacatgcagtcctcttgaacccttacctcccactctttcgtcatgccgggactcanganacccaacaggttttgccttttcaatgtactctgaacaaaactcaatagcttctttggcaatatacctttcaataatagatgcttcaagacagtctagattctttgcatacccttttatgatcttcatgtatcactcaaccaggtatatccaccacaaataaatgggaccacaacatttaatttccctcaccagatgaacaattaagtggtgaaccatgatgtcaaanaacanaggaggataatacatctccaactgacaaaataaaatagcagcctcgttttcaactcatctaacttgagaggatcaatgactntactacatat

SEQ ID NO: 280071 - DNA, 378 bp, Glycine max
  unsure (1)..(378): unsure at all n locations
tatgatatttgttaatgttntcttactaattgtagttatatgatctttctgtattaatttcttttataataaactcaccnctcacaattntgtactgtgtggttgatacctgtgatgatcgcgaacctttgttcgtgggagcagaatgacaacagtagagtacgagaagtgagattcttttgtcgagccgacgtgatgacgttgggtttattttgggagagagttgtgttttgttaatcaactcctccgtagctggttacataattcttttttctaattgaggatgtaaatcacagaattaggtatatgtatgaacanattcactttccattatgtgaatgatgtgtactggagtactatgcctatatatatatgtat

SEQ ID NO: 280072 - DNA, 465 bp, Glycine max
  unsure (1)..(465): unsure at all n locations
gctgagcttncttcttggcatccacctactaatcatgaggaagaagagcagaatgatgctgcaggatcaagtggagtcatagccattgaacaacaacaacagcaacagcagcagcagcagcaacaacaacaacaacaacaacaacaacaacaacatcaacagcaacaatcagagtcttgtggttacaactttcagctccaaaggcaattgggagccttcatttcaacacatgttgacactgaccacatcaatttccaaaccaacaacaacaactcctcagaagatcttggcctatccctccattggcttcaagaccaccctggccttattcagtggcaatcacaacaagaaggtgcaaatcaaacacctncttcagatgaacaccaaatccagcaaaccccntttgccagaatcaaccgcagtgggtttgagaaccattatcaaagaagtgtgacttggaacaag

SEQ ID NO: 280073 - DNA, 464 bp, Glycine max
  unsure (1)..(464): unsure at all n locations
agagaatatcatctctctngaaaagcaaatcacctgatctgcattctttattgcactcaaatattcaccactnggtgaaacatcagccacagaattcaacaaattctctctgggtatcctcacattatcaaacctgaagacacatgtgaataatttctgcgtttactcttttatataaaatntcattttcaggtgcaacttgtttgaaaaatgtatatattaccagatacggccattatcaactccatttaaaccaattntgtgaccacaatcagctattcggatgtttggacatatgtttccatctgaatccctgatttgngcaataaatgcatgcaccccttgattgctccatttatatagagctgtgaaaagactatagtgtgggttgcatgctgaataaaagaacaagttaatataagggtaatatatacaaagttggagccagtgaaaaatgtatcatg

SEQ ID NO: 280074 - DNA, 455 bp, Glycine max
  unsure (1)..(455): unsure at all n locations
agcttgccaagaagagaggtgttggtgttacgagctatgcggatacctaaagctcccatttgcttgggacgcgtgactggtcctagttcgcaagattccaacccttcgtataccagaagaagaccaaacgaagttgtgagtttttctatcaatggcggcatagattgactaatgcagccagaatagctgcataatgtacattggaagggaggataggacatatttagctaaacaaagtcatccagccctattcaaaagtttccctttccatgaagctagccttctatgaattntatccaagataaaatccaaagattgatggtgttgtctcccttgcaccaaggaaaaccctagatagcggccaatgttggaaacactcgcgatgccacaaacattcttgaatatattcttcatgcgggtngggattcccttggagctcatcatcgtagatttat

SEQ ID NO: 280075 - DNA, 385 bp, Glycine max
  unsure (1)..(385): unsure at all n locations
cctagtaactcagcttgccatgaatcaganatctgcacctgttgcaagagtctatgatctatgttcttctgcagatcaccatacagatctctgtccttctttgcagcaatctggagtcaatgagcaacttgaagctcatgctgcaaacatttataatagaccccctcagcaacaaaaccaacaacaagagaataattatgatctttcaagcaatagatacaattcaggttggagaaatcatccaaatctgagatgggcaagtcctccacaacaacaacaacctgtccctattttccaaaatgctgctggtccaagcaagccatatgttcctnctccaatacattagcagcaatagcagcagtcacaacaaagacaacaagcaact

SEQ ID NO: 280076 - DNA, 398 bp, Glycine max
  unsure (1)..(398): unsure at all n locations
agcttagtaagctgattctagaatgtgagtgttgttaatcaagaattcaatgtataacgatgtgataggatatgaaatctgatttagaggaaactgaatatcctctaattatgtgtaatcaatactacttgtctgtagaaacacctggtcatttatttttgccttgaaaaaaagctacttcaatatgggaaaaatctttttttgggggggaacatcaatgaccaaaccttgtaccttntctgtagacaagttaaaaacctacagttcagcaacatcacttttctttcacagctataatgggaaaggatattagcactctttactatctagcaataccagagcatggccacacacctttggaggctaattgtatcagaaacttttaaggaanaatcact

SEQ ID NO: 280077 - DNA, 410 bp, Glycine max
  unsure (1)..(410): unsure at all n locations
atattttatattattagtactttgattttcagccttgtattgtggctatattattatggtatttgaacaatttactatttccctatttgcatggtatgtttgaacaaatattaagtatgttatttgactatatgggttttatagataatctatttatgattgctgcttcatgattcttgcttcatgagttggttgttagtttctcaatgaatgttgtatggatgtttagttctatttgattatttcagatttgttacacactttggctgtttgttgatgccaaatggggagagaaatacggattaaatcaagaactcacatgagaaatcaatntgaatttaagatatgcacaaattccaaaacaaagggggagaaattatgtgagtgatcgactaggannaagtgtgtgt

SEQ ID NO: 280078 - DNA, 368 bp, Glycine max
  unsure (1)..(368): unsure at all n locations
agcttaggatatatgttaacattcattcccncanattattaacaaaccacaacttatgaattttcacaacaactaaccttttgctttgctactcttttcagcacattcattntctttgatgataagttaccccagcttttactctntaattntggtttttttttagtntttttttcaaatgtaactagagatattcatgttgggctggagtaaaatcatgttttgtgactcaatttaacttgcgttggttatttattttcccgcaatagaaaatcacccaaaaatattcccccaaatttaggacaaatttgtttggaccatgagtactctcccacaacctaagaaagggtagttagtaaatatcacat

SEQ ID NO: 280079 - DNA, 324 bp, Glycine max
  unsure (1)..(324): unsure at all n locations
ctcttctagaaggctgctgatagctgcgtccatgataatgttacctcctacatgcctaatgagggcactgttactcgaatcgagtgagtcagattataatttcttggctcttgttttgcccctttctctttataatcgagtttcactattcgtattaatgctctattctttcgatttttttattagtaatttaattctcaatacatggttgctctgcttttaatttttttcttatttttgtaatttactgatgatcatggacattgtaaaaggttnttttnttttccaattattcgctcgttattctgctctttgattaaacat

SEQ ID NO: 280080 - DNA, 455 bp, Glycine max
  unsure (1)..(455): unsure at all n locations
agctntcatcgganagttctcanacccaaaaatgctctcaaactttcaaaaatctcaagcagagtttaagataataacaagatggagaagtattggtagaaatggagaggtaaaatatttataacactttgaaaccccttcaaaacccttttgacttctcatcattagtgaccacctcgagagttacaaactctgcaatgtcgtcatttagggtttttctccaattgaagcaacatgtatcatttaagaccacaaacgttatgacacacggtgtgatcaagatatgcctagactatcgtgtcttagatcgaaaggtcgtgattctttntgtctaanaagtcattaccatgtcacgtgcatcataatgtttgtctaagatanagtcgaccatccaattcattggttatctatcgagatanatacaactcagccatttaaatagatgggattcattt

SEQ ID NO: 280081 - DNA, 405 bp, Glycine max
  unsure (1)..(405): unsure at all n locations
ttgggtggttttgttgtgtaggaaaacaattttgtagctgtgttataacttataagggatcttgtgatgaataatatccttgagaaagcaagttagcgttgtctgctctatgtagctgacctacctaatgggatatgactttgttgttgtgtcatgtagaaaacaatttatttttctgttacaagtgggttgtgattctattgttttgcaggggaaaaatgtcagagtagaactcttggagacagcactattacttccgagcacgtttagcaaaattctggatgttgtaaacagtgacaacttgtcaagggcaattgagtattattccaatnttgtcagggatgctcacattgaaaaggatgtaaagcanaactagaattcttattcattgtgtaattctcatta

SEQ ID NO: 280082 - DNA, 401 bp, Glycine max
agctttaacctcatcgtccatcacagtctttagatttgggagccaatccaatccttgtgttcggactctcagccacttatgatagccgccgatgatcccattactgcttcccctaagctctctgtcctttcttcacgccgcatcccatgccttgcgaactccttggagtaccctcgcgttgaggtcactaataccccgtgcgatgaaaggcgtgatgctttcgtctaatggcgctcctctcatggggtagccaagctgtcttatggtgagaacaggattataattaatacaaccccttggtcccatcaatggaacattttgacatgcttcgcatgaagatagaatcctgagtcttcctttcttctagcgagggaaccaattaacagacgcaccctcatgct

SEQ ID NO: 280083 - DNA, 339 bp, Glycine max
  unsure (1)..(339): unsure at all n locations
cagtcccacaatcccaatctgtaaatatcacattcatatgtcattggggcatttcaccgagcacttggtgggcgcgctgttacgcatatattgcaagagaatgggggcaatgtggcatgccccattagtttagaataccacatangcgtgaggccattctctacaaccgctctacttctacaaattaatcataaaaaccctcaaaacttgcgcacggatatgagcacattctcacaatttatagcaccaaaagatgaacagaatgcaccactgganagctatatactcaaggatcgaatacttacttgtcggagtgagtatgaatacgaaaaatcaaag

SEQ ID NO: 280084 - DNA, 438 bp, Glycine max
  unsure (1)..(438): unsure at all n locations
actgttcaagtattatgcctaatcataagtgacacatacgattagggacactggatgaggatagatcgaagaaataccggagatgattgacgaagtgtaagaccatattgatcgagtgatactgtcatggaggatcatgtctagtaaagaaaaacggtagtggctctagcatctcgacctgctagccagaggctacaaggtgtacatggggtacatagatgcagttctgacgcacatgaggtgcttacaagtggcttggagatgttaacactctcgcacagtccctgtcaaacgcactagccaactaaacagtggtcgatgaaatatcatatatgccaatgtatatacgcacagtctacanttggaaagtgccttaaaacatctccttggtcgacttgataaccatactgcgaaatgtactcttgtgatgatactcct

SEQ ID NO: 280085 - DNA, 548 bp, Glycine max
  unsure (1)..(548): unsure at all n locations
cccacctggcnttgaaaaccntttaggtatgccctaacgacnatgcgacactatagaaaactcaagcctcgcgagtatgctcatctgcaggaagagagatcacagatcgtcaganatgttgcctatttggtcatactgcagaggctggcgtntctatatagccaaatttacacccaacctaacaatgtcattacccaaccaataacaacccatcttcttacccaccacttatatatccacaaaggccatcccttagtcacaccacanatcccacctaccactctaccaatgcttaacaccaccattaccactaactagaacacttaccacgtaattatgtttgtactgaaaacatatctgcagaatatactccctatcctgcgtataatgcttgcttaccacatatctactcatatttnatagtatcctaaccattctatgttaatcaactacatattatatgatattctcaaactcatatactatatggaaaccttcgcattcattcctttcataattaaacattattcaagacttcttctgctgct

SEQ ID NO: 280086 - DNA, 402 bp, Glycine max
  unsure (1)..(402): unsure at all n locations
agcttattttgcaccctcactaagcgggaaaactcangcttagcgtgaagaatgtccacgacgaagcccaaatgcgtgcttagcacgaagttagcgtgaatagtaagctactttaggcctataacaggaattagaagcaaaaggaaaagataccactctggagactcaaggttctctaatgaatacatactaagtctgagcatctctaataggggaaagtctctatatatgtccattgtccccttctccttctctatccatccaccttcttctatccacattaacccctaaattgaaagcctctcatgacaatgagaggcttaatccccttagttagggactgacaggtctaaaaagtcataagatgtattatatgtttcatatctatcaactgcaacatgt

SEQ ID NO: 280087 - DNA, 423 bp, Glycine max
  unsure (1)..(423): unsure at all n locations
tgtgaatgtatgtatacatgattntgatgatgtcaaaagaagaatcaaacaaggctcattntgcttcaagattaatacaagattgtttcaacaaacaaagccttgattcaagatttcttcaagatcaagccttgcctcacaatgaaaggtttcaagtcattcaaggcacatgtaatcgattaccaatggtttgaaagtgtgtaatcgattacacatcatatgtaatcgnataccagagactctgaacgttgggaattcaaattntaaatgaagggtcacaactgttcaagaaaaacaactgtgtaatcgattacactaattctgtaatcgattaccanagaggattntcaaggaatatcgccaacagtcacatcttatcatttgaattttgaatggccatcaaaagcctatatatatgtgtga

SEQ ID NO: 280088 - DNA, 145 bp, Glycine max
ctccgctggacatatccggccgacagagatgaatcccttcgccctgtcactatgacgtccctgactccaacgactagtcgcttccgctacccaccgaagattgtcctcgcgaataggagataagcctgaagagtaaacgcaggct

SEQ ID NO: 280089 - DNA, 461 bp, Glycine max
  unsure (1)..(461): unsure at all n locations
tcaccttctggtcctcctcatagttgttgcatgagaaaacatgctctattntcatctcccactccaagtaggcctctggatcattctttcctttaaatggaggaatgttgagtttaataccatcaattcggttttgtctaagaacaccatcattccctcttctcctcctttcttcttcattatgatctctattctccatttgatccaacctctcatggagcgcatcatctcgttgcttcattaacctctccaaatgttgcatcanagcttgcatttggaattgcgaaagccccactccatcattatngatagtacctgacatctcanacaaacaaatcaaacgtaacaagacaattagtagtgctggttgaataccctcacccactcagtgtatcacacaattatggcttttctctaatgaaacactcttngcttttaccactctaatctccttgagtctt

SEQ ID NO: 280090 - DNA, 370 bp, Glycine max
  unsure (1)..(370): unsure at all n locations
agctttataagcgcgggtctgggatacgaaggtcaagtggtcgcgatatacgaagatgatgttccgagtacattggatttggtacgaccatgccctcctgatttccagctgggaaattggcgagtggaggaacgccccgacatttacgcagcgagcataatgtaaacctttacggttttaaaagctctatagttgggcctaggctntagagttnttcttttggttaaggctgtgtgtattttgttaggtttaatacaaggatctttcttcatttgttcctacgtctctacccattctcatccattngcatgtttacttctttatttctgaaacggcagatccgatgacgagtcccccgaaggtctaatac

SEQ ID NO: 280091 - DNA, 194 bp, Glycine max
  unsure (1)..(194): unsure at all n locations
accttctactgaccctgagcacccngaatcttcttcttaccgataggggttttagcctcccaatgattttcgtaccgatttattcattcactatttgataattaatccctacttttattttctattgatttctatttcacaatgaacttttaaaaatataatatacaatcttaactgctcttattatcaaatcc

SEQ ID NO: 280092 - DNA, 434 bp, Glycine max
  unsure (1)..(434): unsure at all n locations
agcttgggcaatctttattgtgcangccaatatttagggttaaggccctataaattctaatatcttcataccctacttgtaacacaagatacaaagaaacaaaatgcatgtaaatcacaaatttcgtcttaaactattactctgtcccctaaataaattctaaagtaataacactattcaagtaatccctagagtattgaatattcatcactgtagtccctaagttgatgtattggtttaatgtttaaggaatattttgaggggtattgtaatattaaagggaaaactttgttaatntctaataattataggactacttaagtagttcgtatactttaacgatattttactttaagtttgggcgatcttcatcatacaagataattgtgagggttaaggtaggccctatatattctaatatctgcataccctac

SEQ ID NO: 280093 - DNA, 297 bp, Glycine max
acccatccgacacttatgcagcttgatacccactattcgacccctgccccaccatacctgaactatacaaacacattagcacccttgtttgtgttccatttttccaaatctgagagtcaccggccacgtcggtgcactatcgtgtgtggagaggcataactttgatagcaacagaatgaaacttggatcttgattcatgtggggttctcatatctaaactattatgggtggtggagattgtcatgtgtgaggaggcaaaactctgatataggtgccaacgaactcacatcttgacgt

SEQ ID NO: 280094 - DNA, 439 bp, Glycine max
agcttatgtgaacgttctgtataatgtataaagccacaaaagaaggcaactacctgtctcaagagatccattgtactgttaaacgttaaaacaaatatctgggagcttatttgaccccactttgaaaaacgatattgaaatacaatgaacaactaagtactgcatacaagaagtacgcacgtaaactacataattcaataatggttacactcgtaactattgtgtcacattagtttaaaacaagtacaactttagcacaacttactacgttgactagggacattagattccacaaagcatacagtcgagcaagcccagctgatctcctaggtccttgactaaacaaagcgctgattccagatggaaatggaaataggacaccatgagggaggacaaatagaactaataagaagctcaacagagacagcgagtacatctg

SEQ ID NO: 280095 - DNA, 363 bp, Glycine max
  unsure (1)..(363): unsure at all n locations
cgatacanactccanatctctntcaaagtggacctcatcttataatatgatgatacaattaatcaaacaccctctgctctgcaactgtaacttccaatatgtaatctaaattgtatgactctttcaaatactatagactctaccanatctaacattctttatagttacataacacacaaactcagcatattctttagcgtagcgtgattcagcaaatagaatatatacgtgccaactccanaacgcttgtgcagtttgtacacctggattntgcctttgcaacttgcacttcctgatttccaggtcctatttcaccttcgttctttcttggcattccagttaaccctcggaatattctactat

SEQ ID NO: 280096 - DNA, 413 bp, Glycine max
  unsure (1)..(413): unsure at all n locations
agctntaggtgttggttcagtgggagggattatcacccgaggatacttcatgggaagactgggactagcttatatccacatatcaccttgatgacaaagtgcatttggaagacgtacggaatgctacgaaggaggaacctcaagcatgattaatggaaatgttacaacacctgtgtaccttaggaactacatctaatggcattgagagttgagctgacaatcttgtttgccttatctttttctgtctgccatntccattgtccaattaattctgttatgaatttgttattacaaaattacaaattctgctatttttaatattatatatatataggacccatgtaataagacacaataattgaaattacctagatatttccatgcctctcttatttaggaggtcatggtcctct

SEQ ID NO: 280097 - DNA, 386 bp, Glycine max
  unsure (1)..(386): unsure at all n locations
tatcctgatgagggtgttccatatgttctcaagactgtattaatacatntgctgcccaagtntcatgggcttgtaagtgaagatcctcataagcatcttaaggagtttcatattgtttgttccaccatgaaacaccatgatgtctgttccaccatgaaacaccatgatgtccaggaagatcactatcttttacaagctnttcctcattctctggagggagtggtgaaagatgggttgtactaccttgctcccatgtcctttaccagctgggatgaccttcagaaggtgttcttggagaaattcttccctgcatctatgaccattgccatcagaaaagacatttcaagcatcaagcaacttagtggagaaagcttgatgaatacttg

SEQ ID NO: 280098 - DNA, 421 bp, Glycine max
  unsure (1)..(421): unsure at all n locations
agcttatatcacataattgacaaactcttaataaactatgcttaagaccatcaacaagtaaaacattttctatggaggtagagggattcaaacctatttttccaactccaagaattntacctttgctgttgtctccataggtcacatgtttactatttttggaagaaatatgaataaactntgatgcatctcccatcatgtgttcagagcaaccgctatcaatgtaccaattatgcttcaaggagtctttcattcatataatcatatnttgattttggtacccanatnttcttgngttcttaaatgttagttatgactaacgatccttttggaacccataccatttttctaatgctactaccattctttctaatataacatattgatgcactataacctttcttaccacaatanaagcatg

SEQ ID NO: 280099 - DNA, 393 bp, Glycine max
  unsure (1)..(393): unsure at all n locations
agtatgtcgcggccacagngaaagagttcactaccataagcttgtagagtgtccatgttatgttcctagaattcagagactacgagacctccagataaaaggagattaatgagagcaaatttattgattgttatagctngcatttctattacaatgattgtccatttataggcaccaaatacttattctagttccttctacaagtcctacgatggaggctaacaataatggatcttggaaatatcctaatacaaagatatattccagcagacagaatatcctaattgcccatgatatgttccttttagtgctagactccttcttacctgctaacaattcttctgtgttgggttgcctcaacataacaattgattgatccatataaaacacctt

SEQ ID NO: 280100 - DNA, 382 bp, Glycine max
  unsure (1)..(382): unsure at all n locations
agctngcctcanagatgtccaggaaggacaaggtgttcgaaggaactagttccgctcctgagtatgacagtcaccgctttaggagcgccgtacaccagcagcgcttcgaggccatcaagggatggtcatttctccgggagcgacgcgtccagctcaaggacgacgagtatacggatttccaggaggagataggtcaccggtggtgggcctcactagttacccncatggccaagttcgatccagaaatagtccttgaattgtatgccaatgcttggccaacagaggagggcgtgcgtgacatgaggtcctgagtaaggcgtcagtggatcccatttgatgcagatgctatcggccagcttctgggatattcgttggtgctgga

SEQ ID NO: 280101 - DNA, 548 bp, Glycine max
  unsure (1)..(548): unsure at all n locations
ccatcaaagaatgatgcaatcctatctcgcaagggcattgantntacatatgtacacacatctctatattttctatgcatcaagggaagaccccggcgcgcatgctgttgtcactcgatactatatatcatggcgcgctacgaatatatcaaatgacctacatatgcatgttactcctcaccagatgtagcctgtgtctactggtaacattatcacgcacaaatgcatttcatctctttctagatcgttgatgatctcagaataactttgtcgagtccctttccaaagggctctggtcttgatacccctgggtttttgtttaaaatcgacgactgcggagttctccaacgacctgtacctcgtataccattttgcgcgagcaggatgtgttaacaaatcttgaatggtaagtgtcattcaactatagctaagcaacgcgtatgtatgaacgagtatgccctcatatgagagtgtacactgtgataattcacgccggcacgaagacaataccgttaatatactgntcgggctgaactctatatggagcg

SEQ ID NO: 280102 - DNA, 287 bp, Glycine max
  unsure (1)..(287): unsure at all n locations
agcttgaagganaactatatgcattgtttaacttgtttacccagctagccttgaatcataaatctgtacctgtcgcaagagtctgtggtttgtgctcctctgctgaccaccatacataccttngccctgtcatgcagcatcctggagcaattgagcagccctaatctcatgctgcatacatttactatagacctcctcaacctcagcaggcaaatcaaccacagcagaacatttatgacctcccatgcacatatacaaccctggatggatgaatcacccttatctca

SEQ ID NO: 280103 - DNA, 534 bp, Glycine max
  unsure (1)..(534): unsure at all n locations
agggcgtccggtggagacgnctganacctctcactacggannacctccccncncnncntnttttaantcatcgtgaacaaattaccacgttttatattcagcacgatgaggtgttggagggctttacgcgcacacttctcatatcatcattcagttatacggaacgactcacagcatacctgtacgaatcgatagaacagctccagtctaacagtacgctagagatggattacacgcgatgcgttggatgtgttgcaaacctgacaactctaacatagctaaatacttcgatgataagacatcatatgtttgattgtcgagagaatgcagggaagctatctggagtgtatctagtttggtagataagtattgtaatgtactgtattgagtaccgaatatagtaggagtgtataatcagtacgtggaagatatgctatagctataattatttacttcgtcgactcctggcatttctactaatatgtacggttaatgttaatggcgattaacatcatcgtagtaacgaattgttat

SEQ ID NO: 280104 - DNA, 428 bp, Glycine max
agcttgaaggtacgttatgatgagtgtaggagagggggaagggggaacaaaattttgatagagagaagatgaagaatgaagtatgaactttgaagactaatttctcatcaaagtttcaaaatgcacacacaattgttctttccctttttgtatttgataacatatggaaattgctctaataactctacccattttgcatgcctgttatctaacttgcattgccctctaatgtacttaagtgattcatgatcactatgaataacacactccttggaaacaaggtaatgttcctaagtttggaaggctctaactaaggcatacaactccttatcatatgtggagtggttgagagtggcatcatgaagtctctcactaaagtatgcaagagggtgcccaccttgcaacaacataggctcccacacctacac

SEQ ID NO: 280105 - DNA, 453 bp, Glycine max
  unsure (1)..(453): unsure at all n locations
ctcacggacttcggctggtttcctacttatgctctttagctntgtgagccaagttatcccttgcatcctagagggcaaccacttttgataaccgccgatgatgccattgctacttcccctaagctccttatctttcctttccactgtactccacgctttacggactctgtgaagtatttttgcattggcttcaatgaaacctcgcgcgacgaaaggcacgatgatctcctccgatgacgcacctctcatagggtagcctagttgtcttatggctagcatacgattataattaatacaaaccctcattcccatcaaggggacatttgggaatccttcacacgagcataacacttctgccgctcttctttccaccgagggaaccagctaatggacactcctaccatacctggtaagagttcttcctaattagctgttcccttgtcgacacacatg

SEQ ID NO: 280106 - DNA, 504 bp, Glycine max
  unsure (1)..(504): unsure at all n locations
tggtacnctgagacctgaaaccctcanatcgggaatacagcgatactctngatcctctgagtcatctgcacgcatgcaacttttttancttttataaaagagaaggtcagaactatcacgatgactataaatgccttgaaggggatctaagtgctctctaattattacatattatgatttggtggcatgctcaccactgattgtatcttttgaaactcaccataactaataaagcaaaatggatcccttatacacccgatgcttaatcagacggatacaaatacggagtgcatgaacagatgaaggcctacctttcagctgtattagatcatatggattctattattatagccatgccacatgttcgaaatcactaggatacctgctaaccagccgctccattactgctaggacacgatattatgcttcaccccgatgacttaagcttgactaaacgcgaaggtttaatgaaggatagctccatcctaccgtacgttgactccc

SEQ ID NO: 280107 - DNA, 537 bp, Glycine max
  unsure (1)..(537): unsure at all n locations
cgcgacgtccttatgtactcttggatngtcctcgannatcgnacacngcgactnagctcctactggttnctcctacctaaacctcagactttcgaactcactttaccgcaccaatgacgggccgtagagccaatcattctgcttttactgctctttacttccaccgatcacaatgcagaataacttcatctagtggcacgagcatccaataagataaagggatcattcttcaccgtaccgctgctgtccatcgacgtcacagtgcatgcggagcacccaccacacctattcctgcctctttggcatgtaccagagtagtaacactggtgatgtggacgataaccgcttcggctcattcctagagttctttcataattaattaagacctgagttctagaccgtaagtcctgatcaataaaacgtctgtggacagcattgttgcgacttatggctggctggtacatgcattacgtctgcacacatcctgccttgtaaagccttcactggaaatacaatccagagcgtcactgggcggcg

SEQ ID NO: 280108 - DNA, 429 bp, Glycine max
agcttgttcttgattttttctaagttctttaacaagcttataacaatatacttgtccttcatttaactgtctttgggcttggcggccacgatcaacagagtactttcgacacctactatatgttgatttgaccaacgctgttatcggtatgttacgacaatccttcaataccttatttatacattctgagaggttcgttatcatgtggccatatcgacgtacttctctatcataagccatggtccatatttcctttgaaatgcgatcaatccatgttgctatggctgcgactcagctgacgaaattcttctaaattctgatcaacaacatgcttgctaggagtgtagcctgcatgtaattacttagcaacaataatctgaagtatacatgaaacttaacataacatgaccatgatacatgatatcttac

SEQ ID NO: 280109 - DNA, 288 bp, Glycine max
  unsure (1)..(288): unsure at all n locations
ataatctagagacanagaaggtgattattagcagatacgtggcgtttaacgagataggcatgaaagattggtcttcagagtctcaatatgagtcgatggcgatcgctgacaaccatgaagaagattatgaaaggctactagatccaacacctgatgagccataatcatccaggaggccatagaggaatcctcaactctcagctagattgcaagattatgtcatgtttaatgaccaagatacatctaatgaagagagtatcaatattactttatttgcagactgtgatc

SEQ ID NO: 280110 - DNA, 398 bp, Glycine max
gctattttattatttcagcttctatatggactccttcacgctcccggttataggggcccatgccacaactctattagtacattattagagtaacttatatagatccacaataatttaagtggataatttcgaaagcccattgcagttgttcaatgggttgagttagagttccgctatatacattgccagaacgtaaatacaagtaatgcgattggaaacttattccaacataattccatgttaaatctctcttcttgtctcgaaatactaatatctaactaaactatagaattactctacggatattgcagtcattatttcctctaaatatatttacactattactatattccaaaaacatataaattagaagagaaactcataataaacctaacccc

SEQ ID NO: 280111 - DNA, 582 bp, Glycine max
  unsure (1)..(582): unsure at all n locations
aatgcaggtcgcncnnttgattaccgctgttaganacccaatgcatntatgtgacactatagcctactcaagctggtagagtnttccaacctcacacaaggaanattcttataagtagaggtctgtaattcatggagaatgagagatggagctagaatgatactgagaanatgtcaatagatggccctttgcaagatcaagatgagctaattgatgatgtacccatgataggcactacattgccctaaaatatttatgaaagatgcaatgcagcagttctagaacctacatgatattgggatgcaaaggaggatcctaaatgaagggatacaatgcaagataagcttgccataattgataaatatcaaacttgtgaactcgttgaaagacctgaacacacaacagtcataagtgtgaagtggatgtttagaaccaaactgaatgcagatggctcaatctacaaacacaaagcatggttagtattnacgcgtatgctcaaattctcggagatatttctctgatactttgtcccgtggcaggcggataccatttgatattgtagtatccaacacataaggatcg

SEQ ID NO: 280112 - DNA, 308 bp, Glycine max
gctttcattattctatgtaccgtggggccacatggttcaagtattttatttcgttcaggacttttatccccttttgacgtgcttaaccattttattaagtatttctcctaacctaaaatacataaattccaccgatcgttcgaattgattattcgaaactgtggtataatgaattccgaccgtcggtcggccgtaaccacgtggagatctaaagaggtaaatataattaatctctaaaacgtctttatataaaaagcggaaataatcggacgtttctcttggattctcattctattgactgctataac

SEQ ID NO: 280113 - DNA, 146 bp, Glycine max
  unsure (1)..(146): unsure at all n locations
agctttttctgcttcttattagagaggganggtatgacttgtgttgcaatgccgcatggcaaaaaaccaactggaatgggaatgtgcaccgactacactaatctgacagggctacccctagacgtgaccctctcccagcgtaatac

SEQ ID NO: 280114 - DNA, 200 bp, Glycine max
ctgctgctgctccctgatcgccccgcaattttatatttttcgccggggggtatctcccatacgagattcgatttctggaactcattaggagtctttagatcgtatacggaaaaatgttatatgtattgtacgtatgtcttataacttttagtgtttataacctaatctggaaacttttttgaactgaattttgacgtatg

SEQ ID NO: 280115 - DNA, 396 bp, Glycine max
  unsure (1)..(396): unsure at all n locations
agcttgtatgagtttattgcatcanggaacaatttcactttacaagtgggtcctaattggattcctaattntcaacttacctatttggatgtgacatcatggcagataggtcccaactttccatcgtggattcaatcacaaaacaaacttcaatatattggactgtctaacacggagatattagattctattcccacttggttctgggaaccacactctcacgtattgcatttaaacctctctcataatcatatccatggtgagcttgtgactacattacacaatccaatatctatccgaactgttgatctaagcacanatcacttatgtggtaaattaccctatctcttcaatgatgtgtatgagttagacctctcaaccaattcattctctgaa

SEQ ID NO: 280116 - DNA, 319 bp, Glycine max
  unsure (1)..(319): unsure at all n locations
acatacatctcttgagtctttttctctgtcaccacactntcacctgctaaccttctcttcacttactctgactcagttacctttcccagtattctatgatgttccattcttctctcacgatcatcctctctcttatgcacagcatcagaaaccacctttctcacaccttcttcagtaacttccactgagggcagttccttcttgtgcagagtctctgatatcacttcagagagagccctgtcttcatcaccaggcctcagttcgtccaccaaatagtccttcacagaaacccgcttgtcctgttccacacccatactac

SEQ ID NO: 280117 - DNA, 318 bp, Glycine max
  unsure (1)..(318): unsure at all n locations
agcttgtatataatgttactcgcaaacttagcanagctaagattcactcaatttgctcgagtatccttcatctagtanaactgacagcgttacaacatttgttcgttttgtctctgattattctcttatgattcgacgttgttaacacacacatctttaagctttatatagactttagagctctcatctgttgagagatcccaactaaccattggctaatagctttgtcgcttgacataaggccactattgtgcagagagagaatgtgaagaccacaaacactttctgcagcatatcttcaaaagagacaatttgtca

SEQ ID NO: 280118 - DNA, 256 bp, Glycine max
atgagaaggaagaaattcggagcccatcctcgcctcccacaagtatataacatctatttatacttgctcaaactggatgtacacctacaattccaccgaaacgaaatatgactcctcgacacccaattttaccctacacatggctcttagctcactatggtgatttgcatttctctctggcacagaccaaggttctcataaattctaaatgacattacagactacggtgaactcacattaacctccaaataccact

SEQ ID NO: 280119 - DNA, 461 bp, Glycine max
  unsure (1)..(461): unsure at all n locations
agcttcccgacaaacacttaaaggagaagaagattaataggaagaaaaaagttaanattaacttacgaaccttacaattattagaatctttctcatctaactactccaaaagttgactgcataacgtgattttatcttagtggagaagttntatttattttacctccctatttcttctcctataggtgattgtagaatgtacagaagcttatacaaattgaactattactntgcttatccaataagattagatntatatacttgctagatgcatagtctattaaaaagtaatattacacgaagttttggattattgaatntagtctcgtagcagtttattatttattataaattgaanatcctttntgaacactntgtttaatcgggttgactagttattgactaaccattacttgacctattaatgttagtatacatctcatatcatctcactggatata

SEQ ID NO: 280120 - DNA, 431 bp, Glycine max
  unsure (1)..(431): unsure at all n locations
tccaccccnatatctcaagttttaggtaagaattcaagaccctttggaaggtacactgaattaattctctcagagtctccattgtgagatntgaaagtgagtaatctcaggtttggcatctttctgaatactttggagcttaaatttatatgtgtaatttgagtcatatctaaccatattccttcaactgcagcagttccctgacaaataataattagaattaatgtttacatcttttgtaataatttggcatttttataccaagagtttaggaatgcaagtcaaagtatcattaacatactctattatttgtcaatacatcatagatntccacaggatcccacaatctactgcgttgccctgganatntaacagattcttcacgaacaacttctctacccatttcttgtatcagatcgtgcatatctatg

SEQ ID NO: 280121 - DNA, 410 bp, Glycine max
  unsure (1)..(410): unsure at all n locations
agcttattacactcatctcttctctattaaaatgtattactttgacacctccttagtcaatactgttaacttagcgtcttaatattagtgaaagataaaanaatatccttaaaaaatcccaaatttttaattttcaaataattaaaaatatacaaaacacctctcctccgcactcacccccaccgactccacctttgagtggcagaaattcgtagctatatagtttgagatcttgagcaacttgaagaagaatcaagggattttgcaaatagaatacttgacgtaagaaattcagatatcaaattcttaatctagttatcagaaaagcattattgtttttaatcaagacaccatattcattataactngacaaacactacatattaatagaaagggccaagacaatgaac

SEQ ID NO: 280122 - DNA, 414 bp, Glycine max
  unsure (1)..(414): unsure at all n locations
tcgtcgtctgtaatgctgactcgagagacaaggacaactccactctaaagcatttacgccatcagactcaatgcttgaggggttgtacatcatccaanatgggaatcccaataataccgactcaagagacaaggacaactcatgcttaagcatttatgccattatgcttaatgcttgaggggttatacaccgtccaagatgaatatcctagtaataatgactcacgagacaaggaagactcacccttaagcattctangcacaaggataaatgcttgatgggttgtacaccgtccgagatgagtattctggagatattgcctctagtgaggagatgacttagccctaaacatttatgcgacaaggctgaatgcttgaggggtatacgccatttaagatgaatatcccagaaata

SEQ ID NO: 280123 - DNA, 443 bp, Glycine max
  unsure (1)..(443): unsure at all n locations
agcttatgcgcatatnttcttacaaacgttctcttgcacaagacattctanttaaccgaaaaaatgcacccatatacaatcaaggcagcttcgttacctagattatttacacgtacttccaaggtgtatttgttacttacatcacacacatctccttggctaaattcacatacatgcatactcaaagcattttggggtaccaaaaattgcacatgtgcacatcttggtatttctaatacctatacatacacaaacttcatgatgaatcttgactatctacacaataaggtgctacatttcatgctcttttcaagtttttgctacctaaagccgcatgcaaattcaagtatatcttcctttgctgactaaaattgtattcaaattaaaaggtatacattttttggaatgtatcttcttacataacatgcgacatatttatgtat

SEQ ID NO: 280124 - DNA, 377 bp, Glycine max
tgtttgagaaatgaaattgagaatgacgtacattgggagcaaaccctgacctgccacaagtctataacatcaatttaaacttgctcaaactggatctacacctaaaatttcaccgaatcagaatttgactcctcaacacccacatttaccctagaaaaggctctttggtcactgtgggcatttggttctctctattgcacaatccaagctttctataagtactaaatgacatttcaaactaaggttaactcactttaaccttcaaataccactaaattcagatttggcctttccactcttcaaaacataatctttttacactcataacagcatattattactatctaacactagggtaactctacccttcatctcta

SEQ ID NO: 280125 - DNA, 407 bp, Glycine max
  unsure (1)..(407): unsure at all n locations
agctntgagccaattttattgataatatacgtttactcggatgtccaattgagtcccgtaatatatcgacacgctcgaaattgaatgttgaagctctgagccaattcatacaacaataactntttactcggatgtccgattgagtgacttaatatatcgggacgctcgaaattgaatgttgaacctctgagcaaattcacacgacaataactttntagtcggatgtctgattgagttccgtcatatatcgagacgctcgaaattgaattttgaacctctgagccaattcaaacgacaataactntttactcggatgtctgattgagtcccgtaatatattgagacgctcganatngaatgttgaagctctgagccaattcaaacgacaataactntttactcggatg

SEQ ID NO: 280126 - DNA, 371 bp, Glycine max
  unsure (1)..(371): unsure at all n locations
gctaacattcaactntgtgcgtctcgatatattacgggactcaatcagacttccgagtaaaaagttattgtcgtatgaattggcttaaagcttaaacattcaactgtgagcgtctcgatatattacgggactcaatcatacatccgagtgacaagttattgccgtttgaattggctcagaggttcaaaattcaatttcgagcgtctcgatatattacgggactcaatcagacatccgagtaaaaaagtattgtcgcttgaattggctcagagggtcaacattcaattttgagcgtctcaatatattatgggactcaatctgacatccgagtaagaagttattgtccgctaaattggctcatacgttcaaca

SEQ ID NO: 280127 - DNA, 462 bp, Glycine max
  unsure (1)..(462): unsure at all n locations
agcttgcanatctttttattgaactgttattcaaaaccaagaggtgtgtccatgtagacttcctcctctaagtccccatttaaaaaggcattctttacgtcaagttgttgtaatcgtcaatctaaatttgcagccaatgataagaggactctaatggtgttaagttttgcaacaggagcaaaagtttctgagtaatcaataccataggtttgggtgaagcctttggcaactagcctggccttgtacctctcaacaaacccatttgcgttatacttgatagtaaacacccatttgcatcccacggttgttnttcctcttggtaggtccaccactttccaagtctgattnttttctagagctctcatctcctccatgacagcttccttccacttaagaacccttagagcttcctgtatatctcttggtatttctatanttgtcagttcacaagtaaaagctcta

SEQ ID NO: 280128 - DNA, 460 bp, Glycine max
  unsure (1)..(460): unsure at all n locations
acatattgagtacatgccatccatatattttgttgattaacattaccaattntgactcccanatttaatgatggaagcttgcttgtggagcttctatggaggctggatctttgagcttcaatggggtcctttaatggtgattntccactatggagatgcagcggaagacaaagganaagaggtgagaggaggtgccatccttangattgcatcatcaaattcctattttgactgctagaaccagaaaagatacattnttctccttatctcttatgttgcttcgtattaaattgcaagatgtttctatatattggtcctaattnttaatactcgctcatgcatgttgattattttgagaacattangttntttataatntatgaatgatccttattgaaggactgctgtctgttagaggtcatatgtaaatcactgtcctagttntataatttataatact

SEQ ID NO: 280129 - DNA, 268 bp, Glycine max
aatatacctcaaactacatttattgattaacctttaatattgttaaataccttattatataattatattttttacgtaatgtttatatatataatattttcatttatatttcaatgcaataagtataaatattaattaccaatgtaggcttcaatatatttattataaaatttaattccacttattaataaaaataaactatatgagtatttgggctgaatctgattctttaaatgaacgaagctatttacatattaagcttcaaagc

SEQ ID NO: 280130 - DNA, 536 bp, Glycine max
  unsure (1)..(536): unsure at all n locations
cttgtcgcatcttgaagccacatctattangccgcactatagantactcaagctcggtagatgtangntcaactagagactcacaagatgtgtcgtgaaatatttagattacttgaacaatggctgcaccatttgtggtgcaccatgaggtttacactaacaactccatattataacacctaatgaacaatcatttgcttcgatctctcttgtattatcagagaacatatctggtatatctaatattgtatattattcatctctatgccaaggaccgcatgcgatttctaaccaagatttgtcatgagagatgatatatcaatatctcgctattgtacacattctatcaatatttattatactcttcgtctccctttctcgaatatcacattaactatcatatatatttgccttttctctcgttcttaagtgtagatacatctgaggatcaatataattatccgacctttattttgggtaacgctcttgcctcagtcatctttatcttatatgagttgttatattacaactcaact

SEQ ID NO: 280131 - DNA, 384 bp, Glycine max
  unsure (1)..(384): unsure at all n locations
agcttactaatctggtttaaatcctttcccataaataaattaaattcaaatctagataagataagataagatctagattaaataatatctagatgagaaattcaaatctagataagataagatcagatctagattaaataatatctagatgagaaattcaaatctagataagataagataagatctagattaagtaatatctagatgagaaattcacatctagataagataagatctagattaaataatgtctagatgagatcaaatctaaataatatctagatgagataaagatcagataagatctaattntgtagaataaaatagtctgccctcttcaagtccaagcccaattctggattcatacccatgcccgattctgga

SEQ ID NO: 280132 - DNA, 320 bp, Glycine max
  unsure (1)..(320): unsure at all n locations
atgaagtgttatcaagcattcggaccaccttcacctctaatatggatgcggtagcacaatgtgtctttgcactcaanaattgcttccccaccagttctacgacattggtgaactcctaccatacaccacatgacaaaaacccaaaacacttcctagaattggatgtctcacattntccagtgatgacccttanggatggatcttcaagatattccagttctttgagtatcacgttacacctaacgaagaatgaattaatgtggagtctttctacctcaatggagctgcattggtttagtatcaatggatgtataaaaatg

SEQ ID NO: 280133 - DNA, 407 bp, Glycine max
  unsure (1)..(407): unsure at all n locations
agctttttattatcagtagatgaagatgaatctgtggccacctcatggactcctctaagaacaatatcatcatttcttgcactgaatttgtgggagccatcttctcaatcaaatttctagcctcaacacggtcatatcaccaaaagcttcaccattggcagcgtcagtcatactcctctccatgttgctaagtccctcatagaaatattgaagaaggagttgctcagaaatctggtggtgaggacaacttgcacacaatttcttgaatctttcccagtacttatacaagctntctccactaagttgcctgatgacctaaatgtcttttctgatggtagtggtcctagatgcagggaagaatntctccaagaacaccctcttaaggttatccagctgantatggacct

SEQ ID NO: 280134 - DNA, 418 bp, Glycine max
  unsure (1)..(418): unsure at all n locations
cgcacatcgttcacgtctatgatatccaatcgacaaggtttgaagtagaggagaccttcaatcctataacgcaacgtggcggacaaaagtgggctgttaacttgaatggccattattgtcaatgcgaanagtattttgcgcttcactatccatgttcacacattattgcagcttgtggttacgtgagtatgaactactaccaatatatatatatatatatatgttgtttacacaaatgagcacatcttgaaagcttactccgcacaatggtggcatcttgngaatgaagcggcaattcctccttctgatggcgcatggacacttatccccgatccaactacaattcatgcganaggttggccaaaatcaacaaggataaggaatgagatggattggctcgaaccatctgagcaccgac

SEQ ID NO: 280135 - DNA, 310 bp, Glycine max
agcttatgtattactttatccatatcacatgtacaaaagggtaacacaataatcacgcacaggtgctgggtgtaccagcaactctaccagtgcatgtagcacattcgcttgattgtttgcacaaaataaatggaagtccactaagtcagtgcaatgatttttgtccacacacacacaacatatcaaattattgggctgcacctcgtactatatctaaagatgatgattgcttgcattcttacataaccaaaagtttgaacaaatttgtaataagcagcaacgtattgtagctatcaccgaggatgagatg

SEQ ID NO: 280136 - DNA, 386 bp, Glycine max
catatttgatcatcctactaagacgactgagagaactggtgcacataaagacggtgacgatgacggagacacccatgctgtgactgccattcctgtaccgacaagaatcccaccaaccgcacaatatctctactcaatcaataacaaactgtctccttacccaccacccagttatccacataagccatccctatatctaccacaaagtcagtctaccgcacttccaatgacgaacaccacctttagcacaaaccatatacaccaaccaagaagtgaattgtgcagcgagaaagcctgtagaattaccccaattcagtgtcctatgctacttgctccatattacttgatattcaaggagccataccctatcaacgtcatcacctcca

SEQ ID NO: 280137 - DNA, 189 bp, Glycine max
ctgctactgaccctgaacggcctcaactttcatatttaagcagaagatgacatacgtcagtgacatacctttgtaaccctcagatggatgatccctgtaacacacattaatctacaaggatctgtattacagctcaattctgcatgtatagattttggtctactcatttttgtcccaaagtcatttacc

SEQ ID NO: 280138 - DNA, 378 bp, Glycine max
  unsure (1)..(378): unsure at all n locations
agcttccgtaaaatttatatggctataactgttgactcggatgtccgattacaaccataatgatgcaatcctacccccaaagcttattggatagaagactccaagaggattgggctagagcggctaaaaaaggccctatggttctcatgaatcttaaggtagatttctgagcccatgggccaaggctgggtccactcttctttgtaaatattagaataggttttccttcttttgngccttgtattttgatgcaatcctaccccccaatcttattggatagaagactccaagaggattgggctagagcgactaaagaaggccctanggttctcatgaacctcatggtagaatttttagcccatggtgatgcaatcctac

SEQ ID NO: 280139 - DNA, 438 bp, Glycine max
  unsure (1)..(438): unsure at all n locations
atctcttttatcttagtgagagtgattctcctacattcttgagtgattcaagaacaccttggctgtatcaaaggactntcacaacctttgtgtgttgcccttgctggaaagagtgaatctttccttcctttcatcatcacccttgttctttcaaaccacaattccagaaaatccacctctgcccagaattatctcgtggccataactcccattttacgcactcaaagtaagtgattcttgagcctaaattgaatntcagaacgagacctttcacctcgttntggaatcacctcatttggagccctgtagcttcagttattgccatgtctatatttctgtccagccaccacttaacctacgttgtaccatcccattcatgcattgtatgccaagaaccaccttattaagacccacgaaattagccaccttattttccat

SEQ ID NO: 280140 - DNA, 363 bp, Glycine max
tctagcttgtatagttccgcaatttatgggtattgtgtagtgattcttgaacataaatcttattttatggttaacgctatctctagaacatttccattggatttaatgatgaaatctgtgcatttttatgggaaaaaatgctatgttttgaattgcaaattgtagcacttgggctaagcttaacagttgggctaagcgcatatccaccgctaagagtagctttagtgcgcttagcgcataggagaatctagtagagcatcagcatcaaagtcacgcgctaagcgcgagatcagtgcactaagcacagcaagtgccttcagtcaggctaagctcgagactagcgcctagcccaattcacttact

SEQ ID NO: 280141 - DNA, 214 bp, Glycine max
  unsure (1)..(214): unsure at all n locations
tctatactntgtacaagaatgaagctctgataccactcgttatccaagttgtcctcagatatcttaagaaaaggggnggggggtgaattaatatattccaaactgtttcccctaattaaaatatctatatcactctttactcaaactataaattcccttaatgaccatcttcttatatattaattcaaacaaagcaacttgaatatgaatataa

SEQ ID NO: 280142 - DNA, 446 bp, Glycine max
agcttggaaggtagtcatacttcacataatatatgtatgtgtgtttaggtagtgaaaatgccttagatatgcatgtatgtaaacaaaaaaatacttcacaaaatatatatatatgtatgtttaggtagaaagataccttggatatgcatgtatatagcaaaaataccttacaaaacatatataggtatgtttaggtagcaagataccttggatatgcgtgtatatagcaaaaatacctcacacaaatatacacatgtttatgtagcaaaatacctcattgaaaataaacatatgaacaaacaagaaaagagataaacaaatgataaataaggatgagaaaaataagtctgttagctcgaaaaccgatatgctgttgacaagagatgacttccaactcttctttgaaaaatcactgatcataactcagttttataaatgtgtataca

SEQ ID NO: 280143 - DNA, 345 bp, Glycine max
  unsure (1)..(345): unsure at all n locations
gagcttgagatgagttcgtgagtgaatgtgaggttctagaggttgaggagacatccttacgcttgtatttattcaatccttcattnttctcttctctttggtgaaaggaagcttcccagttatggagatctaaatctgctggtggttcttccttgtaggtacttgatgtaaatacctgtatatctatttaatgatgctntgtgtgtcactgggctatcagaacttcattctaccatgcatttgccttgatcacgtagatgtatgtgtcattaggatcattcaacaatggaaattggtctgattcttagaacatgataggacggggctagnttatcgtattatcac

SEQ ID NO: 280144 - DNA, 462 bp, Glycine max
  unsure (1)..(462): unsure at all n locations
agcttgaagctcaatgtaaagcttgaagatgttntgaagaagttttggcttttacatgcctaactctcttgagtgatacttgtattggttgttatcttggttgttgcatcttagtacatttgatatttgtattacattatgcatcatcatggttagtgtgaagaaaagtttcaaagttagaaattttttttcaaaggcaaaaattctctgctttaatcaattacagggtcatcgtaatcaattacaacaagctatttggagcttgtagagttgagtctcgatcagtttaattgattacaactatctcataatcgattacactgttgtttgggacaatgactgatttattcaggagtctctactttaatcgattaccaagtggattaatcaattacttctttctcgtttagttgtttagaagtgaacaagaacactttaatcgattacttagagcatctaatc

SEQ ID NO: 280145 - DNA, 422 bp, Glycine max
  unsure (1)..(422): unsure at all n locations
ccttctggaggaatcttctggaaggcccatgtgggcctgattgctatttacacccactttntactaaatgcacccncttntctatttatttgtaattctttttgcgtaacgttacgaaactttacgaatttcgtaacgatacttattttccttccgtaaggttacgaatccttacggattatgtatttactccttctttacctttcgaagaagtcacggaaacttacggattgcacaaaaacacctcttttgacttccgccacattgtagaatttcacggatcgcgcaagcctgcttcctttagatntctgagacgtctcgggacttcatttgtgtaacaaaggacgccaagtatctcaaagcggctaaccaaagatcgcatgtcatcaagtaataatccccggacaaaataaggtatgaca

SEQ ID NO: 280146 - DNA, 420 bp, Glycine max
  unsure (1)..(420): unsure at all n locations
agctntagaacctgatttaagacgttcagaaactgctggtaatcgattacacagtgcaaattatgaattcaaattgtaatagctgacgtaaatcagattttgccactggtaatcgattaccatagagtaaatttgctgaagaaagactttttaacttaaatttcttggccaaactttgtgctacttcaattggaattcccttactatataatataccctctctaagactctagagactgtcttgatcatccatcatgaatatctctaatgtctttgtcttgaatatagctttgagacgcatgtgatactatggcatcactcaaacattcagcttgatcctttttctacaactacttgtgcttaatttccacttattccccattgctcctctatctcttcgggattaactacttagtccat

SEQ ID NO: 280147 - DNA, 336 bp, Glycine max
ctcagggtccacttatatcccatttctaccaactacaaagcctaagaacactatattatctacacagaacgtgcacttctctatatttacatagagggtagttttcctaaggactgaaagaactttcctgagatgtcctacgtgatcatctatgctcctactgtactccaacatatcgtctctataaacaactacaaatctacctatgaaatcccttaagacatgatgcataagcctcatacaggtgcttggtgcattagtgagcccaataggcatcactagccattcatacgaatcacacttggtcttgaaagcgagattgcactcatcactctt

SEQ ID NO: 280148 - DNA, 381 bp, Glycine max
  unsure (1)..(381): unsure at all n locations
agcttgttgttctccattgcactgatgaccatgacaggtacgtttcatttcgtctacctatgttgttctattgaatagctaggtctgtttctggaacctttggttaacctaaggaccttntttggtttctggtgcaaggattagggaactcgtcgtgacctgagacccattgtcactgccattgaatggccgagtctcgatgccattgtcagtgatgggttcgaggcatgcttcatgtcttcattgtaactttatgctatcgcgtacgtgctctttgtgctcacttctctctgaagcatgtntatgttcccattgtaattngttcttatgaaaactagatggttattgttagttagattggtaattagttactactactac

SEQ ID NO: 280149 - DNA, 344 bp, Glycine max
tctagcaagaagcttctgacagtttatgactatgataatgaggcagtggaagcaatgattagttgctcagagaagagaggagccaaggcacatagcagcacctgcaaaaccaaaagaaggttctggaagtgtggaagcaaaaggaccagttgagagacttcaaagtaagaaagcacaagatagtggtgagaatggtgggtttaacattgagtgcaggtgtttggatcaagtggactctttgggattgataatgatcaccaatagaacgaggtaccttataaattggctggtgaactccatgatgaagctgaagcaccctaacgcagaggggttcccctagtcaa

SEQ ID NO: 280150 - DNA, 552 bp, Glycine max
  unsure (1)..(552): unsure at all n locations
aaaacagaagagggannnaagggtgagaccttgaatacactggactatcggcgaannccgcgagcctctgagacactctgaggcatgctggcgcgtgcagcatgttatgaatctgttcatcttcaagcccttggcgagaatatgcgcataatgcgttacagtactgcattactatccgtctattggctgactgatcacattatcccgattaatgtgagatattgctgtgggcgctctgatttacgagactattgaactatggccaatctcttcctgcatttgctgcccacatacagtcctacctgctctctaatttctaccttctactctatccgcaaggagtctagccataccgcttggcatgcagaataccacgctcgcatgtactcaacctcgcatgaatgaaatgctactacatgttgcatccttgaacaccagcttattggtgcacctaagaacttgatgagaatcccgtagtgcttccgtttccaccttgactacacaccagtccgagtctgatatacccatccacatacgtgatgattatgatcg

SEQ ID NO: 280151 - DNA, 414 bp, Glycine max
  unsure (1)..(414): unsure at all n locations
tctcgcanaacagtgggatcctgtctggtcttcctatgattctacctagtgagagtgacctgagtgaccagtgtgtagtttgttctcctacgcgtctgatgaggtttttcactacatggtaccatattgcatataagattaagtcttaatatatctgttgcataacgtttgtgtaatgatcattgtgacttgctacgtgatgatgggtaatgagttgtgagtgtgatatgttgtgttgtacgtgttgttctgaacacatgattaatgtgaaagtatgaaatggtgatttctgattacattcttgggacaagtgatgttgcgcaatgagtgataaactgatacggattgtactaagtagagcttgctatacttatatatgtgtgtgtgtgtgtgtgtacttgcttattcctacct

SEQ ID NO: 280152 - DNA, 397 bp, Glycine max
  unsure (1)..(397): unsure at all n locations
gaagagggcattctattgattangaaacaagcagtaagcaccgcgtctccccaatgatgtgtacgaacattcgaatttagcattatggaacgagcagtttcaagaagatgtcgattcttcctttctgctataccatttttgtgtggagtgtgtggacatgtggactgatgtataatacctttggaagacaaaaaagaagaaagatcatgcgagaagtactctttagcattatcacttctgaaaattntaattggtcatccaaaatgattctcaatctcattgagaatgacacgaatataggcaaaagttcagatctgtctttcattagataaacccaagtacatctggagaattcatcaataaaggttacgaaatatcgaataccaatagatgtgac

SEQ ID NO: 280153 - DNA, 428 bp, Glycine max
  unsure (1)..(428): unsure at all n locations
atttacccgatttcttctttctattgttgaccaatttgatatttctggttgtgtttgtgttttcaatcgtattctgcattgagcttcatttatttctagcaaaactgcatcataattctggtatgtctaactttttttttaatcttttgtcccttattgaatgttcttaaggaccaagtggacaatttattcaaggaattgaaagagatccatgacaaattcttagcactgatgatttccttgtgtgcagcaaaaaacagtgacacgggaaattctttgntcgcaaaacaacacaagctgatgatgtctttggtttggcccttgtctttactcttcttggtaccttgngacatacttctaccataataccggacacaaccttttttctatctacatgtctatgctatgtggaagtgtgttcaatctgc

SEQ ID NO: 280154 - DNA, 450 bp, Glycine max
  unsure (1)..(450): unsure at all n locations
agcttataataatgatatagcctatatcatttccaaatatgcatgcgaattaggaagcatcaacaagaatcaagccaaggctattgtgcaagcgatcaatggggcaaaacacaccaaatgattatgatgatggatgactcgaattctcacaaaggtaaacttatcactttcagattgagctttcaaaactatcatgacatgtgaaggaaacacatagatttccaatcacataatgtccagagacttttatgttcagaacaattacccattacttgaacatatactataattcaaagacaaacatgcaaatttaacacaaaaaactaacaaaattagactagaacccgacanaactaactaaattaaactaatttaacacaactaacaaaaccaaaaccaaagaacacactccccgctactaatacttaaacaacacattgtcctcaacgt

SEQ ID NO: 280155 - DNA, 276 bp, Glycine max
cttgataattctttgatagcctttgaccttgttcccttccttgtttgaactactacagccttaatgaaaaccatatttccatatcttaagaatttggagcttggaattgttgggaaaagtgtgggggttttgttcttggacaacttgtttgtggctatcttatgatgatttgggcatcttgtgacattgatattggtaatgtgacatgctgagaatgtgttctcaagctaagagtaaaaaaaaaaaatcaaaaaaaaaattcaaaaaaatcgaaaa

SEQ ID NO: 280156 - DNA, 397 bp, Glycine max
  unsure (1)..(397): unsure at all n locations
agctcttgtggtctctctcaccaccaccctctttcaccttatcagcaatagaaacattagtttgagaagattgtgtttccactgtgacatgaacatgaacatcctttggtgttgttgcttcatcatccatttctgattgtggtttctcattgccttgcactggaaattgttgctgttgatggtgatggtggctccttgttcttcttgacatggtgatgtcatagtgacgttctgctgcaagagattgaacctccattaatcttgctatctgggaaatttactatgatgataatctctaacangtctctcttcacttaattttgtgtggtganatctctcaaagggaagaagccatcatggctatagctgcacctcttagacagcaagatcactcttg

SEQ ID NO: 280157 - DNA, 411 bp, Glycine max
  unsure (1)..(411): unsure at all n locations
ctatcaagccttatctcgttattgtttgctganactctgagggatgtacttcattgaggctgaagcaatgatctttgaccagtgaccaccaaagagaatgagctaatacctcacctacaatctcgttagagtatgaatcagattttgaagttgcctttattttttataagtttgttgggcaggtccttttttttatccataagaattaaactgggtaccgagagatctataatactcacacaccttactcaactaactaaagtaaatcccgttagtggcatgtcatggtttaatatcttttagaatgggtaaacttgtgcatgtagctagtccctttatttatacgagggctaaactgttatacttgcttaagtttgagattcaagagtgagattntagaatcaacatgat

SEQ ID NO: 280158 - DNA, 444 bp, Glycine max
  unsure (1)..(444): unsure at all n locations
agctngaagagggtcttaaagttctgacaccaagtgttgatggtattgacacaactgtcagccatattggaggtcagttctttatttagaggagaagtgatcagttttttaattctgaggctgtagcttgtgcttgcaataacacctcttcaactacagttcttattcctcacagggaaagggaacacaatctctgtatcattgctcagttgttttgtttattttgggccataatcttgaataaattatataatgaactggcttgtgaatgtgtcagctactgggtagtgtatattaaatatcagtgaaaagctttctgaacaatgcggtcatttatcgctgattccagctnttgggttggtactaaacacgatgaattgtcttatgctaggatagtgttcatttttaatannaccatatattagtatagtcagactgattcta

SEQ ID NO: 280159 - DNA, 253 bp, Glycine max
agcctgctgaagacatcgtagagctctctgataattatagatacccatgaaccagagatcgaaatcatccacagtaactatttctatgtattattgcgaaggcttctccacattctgactttagacgacagactatatctttgtaaggggaactgacacctgaactgacatatacattgcactaacatatcagcagaagtgtgaagaaagataacgagactgctcaaaacatttgatagactaacactataaa

SEQ ID NO: 280160 - DNA, 125 bp, Glycine max
agctgatacttatgttgtgtggcggacttacttcgctgtaatgattgccacaccagctttgtgcactgttctgtcttcccgtgacgcttcctttcatgatccgctgagtgggcttatagcctaaa

SEQ ID NO: 280161 - DNA, 524 bp, Glycine max
  unsure (1)..(524): unsure at all n locations
agatggtctcnncgncgttgaaaatcggtttagcngatagnanancccntcncnnaatagnccacgcgccgcctncannanagcannggaacactattctctatnnactatctgtatttatancngcgagaggagtatagagtacatggtgtggtttctcgaaggctccatcccctacctaacacattacatatacaatatatagctattaactctaatttacgtaatttctaagatagatttatattcgtcgacaacatgtactgtgagcaacattttataagtagtaattatttcgagtagcatattggtacatttcaatctatgatgatataagtatacggagtaatacggactgtcattatatcgcatgtggttcctcgttcaaagattattgtgataggtaccgttaagagtaatatatttatctaagtctaattgtgcttgtctgacgcgggtaataatcagctcttataaaatattctctaaatcttgctggcatgtgtgttcgtagattacattta

SEQ ID NO: 280162 - DNA, 409 bp, Glycine max
  unsure (1)..(409): unsure at all n locations
agcttgatgagtntatgtactgcccgaggttcacaaaattaacgtggcaagtgatgcggcactagaatatgcacgtcaaccctacctgtcagctctagcataggaatgaggatgtaacacccttagcaaccaggccattagaccgacaggttattaacaaatatctatatatttaaatcttaatgataatgttatgattcgttcatcaagttacaggtacttatttatctataagcgatgaattatctactagctattatctataagatatgatgtatctactagctattatctactaggaattatctacaagaagtgtacaccactgtaatagctcctacagtcaaggatctgaagctcttatcccacgctataaataccagctcctgcattaatattggttccatac

SEQ ID NO: 280163 - DNA, 466 bp, Glycine max
  unsure (1)..(466): unsure at all n locations
agtggagcaatccatatacccacccctagntattgtgaatcgtttttcttaaccgccatacctgtggataatgactagtatattcattcactcatgggtcgaggtccgaagagactttatgaaatggacttaatatctaagtgaaaggtcactttaagactctaagtttaagaagtatacatcttaccatataatcgagaaggtacacnaacccgctaacatgaagccaaaaagacacacgaagctttaaaggataatgtgantggcatatagcttatactaagagcaagaagacacacatttatatatgagacaagtgatattagatgacgcacacatatagatagataangtatctctatttgttaagtanatgacacacaaaagctcttgtaaataacatatagataaacataactctcttatacactaattatatagaactcntaagtcttagtaactacta

SEQ ID NO: 280164 - DNA, 367 bp, Glycine max
  unsure (1)..(367): unsure at all n locations
agcttgtatgtgcgtaccccaccattgttcatagtataacattggtaatgtgtctactattattgtgatcatctctttctccggcattggaggtgccacttgagctgccaggtctctccacctttgggcgtattctttgaaagatctgtgccccttattgcacatgttctatagttgcatcctatccggagccatatcagaattgtactgatactgcccaacgaatgcaaccattaggtctttccaagaatggactcgagaaggttccaaggtatgtgtaccangtaacagctacccagtaagactttcttggaagacatgtatcagcagtttctcatcttttccgtatgcccccatcttccgacaa

SEQ ID NO: 280165 - DNA, 421 bp, Glycine max
  unsure (1)..(421): unsure at all n locations
tctacttatgtggcagggcgggcttccttcactatcttgcctcaaccgcgagctctgaccaccgctctttctttccgcgatgcttctctntatatccgcctgagtgggtttatagcctaaaccatacttcccacgatatcctttggcatttatcaagctagttatgccgccgttgtctttgcctaaacccattccgggttcgtaaccgttccccaacagaactcgggccatcattactgctgcatcggacaggcaagcttgcccagagaaggagtccacggaggaaatgcttaccacctcataagactggaatgcggattctaatgactcctctgcggcttccacatgaggcatataggatgggcagctcaccaagatgtcttcctcgcctgatacgatgaccagatgcccttccactacg

SEQ ID NO: 280166 - DNA, 448 bp, Glycine max
  unsure (1)..(448): unsure at all n locations
agctntanactgttctcttactttattcacagatcttaagctttgaagtattacaagtttgcttcattgctatgtggtgccacttggcttatcaccggcaaccacctggttatcctgtgtaaaactccatggtaccagagggctagggagttatgggcttctctcangatgctaatttttataggggtaagcattntagatntgatggatgagggaatcattaatttacagttcaggttttcttaagctcctgagtcctgattgtttgcaaactcattatattattggtgaggtggtcatcatactgcaatatgtatcgacaaattcataattcattnttaaaatatttagtggatcaaaacacgttggtatacattactggctngcattatctttgagcactgttctatgaattatacttctgctaagtcaagtgctgattaaattg

SEQ ID NO: 280167 - DNA, 349 bp, Glycine max
cacctatctaatcctattatgtgatatgggttttgtctcccttaatttgttactaaattgtcattctaactgtgaatctgcaggtgggtttgttgaatgtagatgggtatttccacagcttgctgtccttatttgacaagggagtggaagagggttttatagacaactctgcaaggcatattgtagtcatagcagacacagcagaagaactcatatagagaatggaggtacgatattacacgagacatgctgattgtcatcatgtttgaagaggacgagaaaactaaattgtatggtagccttgtaggtaggtaacaagtagtgaacttgttattcatttgttaatttt

SEQ ID NO: 280168 - DNA, 448 bp, Glycine max
  unsure (1)..(448): unsure at all n locations
agcttgcaatntcagataaaacaatcttgaacaagttatgcagcaacaaaatataagacaacaaattaatatgacaatacacatggagataaaaaaaagtatgaagatggaagttagtctaatggagatcatagcagcatgtaaaattcataagaatcagaacaatattgatagtctttttttattggtaaaaatagtgatagaatttaaaataatagtgcattaataaaattcagaacaattagaagcttattcttcaaaagcaaaataatatattactaagagtggtatagaatataacatgtacccaataaacccaccattcaaaggcaanaaatatattaataaangtgatatagaatataatatgtatccagtaaccccaccattcaaaggtataataatatattaatgaaagtgctatagaaattaacatcctgtgatgctc

SEQ ID NO: 280169 - DNA, 373 bp, Glycine max
gacaagagtggtgaaggagaagctgaatgtgccagtcactatgtgtcaggaaagaatgtgatgagctaaaagatatcaacgtgaccacggttgaagcgttaaaacaggaaacgaataaagctcgaaaggaagaatggagcaagaacaagttccaaagggctttgtggggcagcagtaacgagctcaaacttataaaggctgagattgacaaatcaaggatggaaagcatggtgttagatgataagttaaagatttgtcaaaggtcaaagagaagtttgacagagcagttgagcaaaatataagagaatatgttgataatcattgatcaatataaggagaaggtgaacctagttgctagtcacaggcagatgct

SEQ ID NO: 280170 - DNA, 469 bp, Glycine max
  unsure (1)..(469): unsure at all n locations
agcttgtgcatcaactgcnttctcctttattttcattgggtatganaagctagatagatcaggaactattatactcttggaaaaaatttctgtaattcagccaaaactattttgagtcacctaaaagttccaacttcattgtttccaatttctcttttactttcttttgcacgttntgtatttctattttagcattccttctgacttcatcaattactttntgtgttccaagtgcagaccttgttcccaattagtatacgttnttttaactaggttaaattataaatattcttccttgagaaaatataaacaattggaagctactatattagcgtggctaaactctccctcaaggtcaagtatgagtcacgcaattctatttctagaaaanaaaaaagagaanagaaagataatttgcaattgtaaaacctatatcaattactaattcaacgaaatatgtctgtttctt

SEQ ID NO: 280171 - DNA, 404 bp, Glycine max
  unsure (1)..(404): unsure at all n locations
ttattgcagatacagaaatacttaaacaaacctgccaattaggggttntgcggctntntgcaaattccgcccatgtttctggatcaaggccatacttgactgtaggatcagatatttgctgaccttcattgtcagcaaagacaaattttgaagtcaatgaagacttanattgcctccatcttgctgcaactgttgacatcacctttttttttgcattntcaccttcagggatatcaaatttgcgctacacaacaaaaggagttatgtaacagtatgtaaatgaatcctttanaagtaacttaacaacaaaatcatgaatacaagtgtgaattacttaccaaaatatctttccatattaagctctntagatcgtcggngacaacattccaattcgcgtgtataat

SEQ ID NO: 280172 - DNA, 457 bp, Glycine max
  unsure (1)..(457): unsure at all n locations
agctntcttgaganatcttccttgataagcttctttgagaaanattccttgagaagctagagcttagctacatacacccctctcataactaaactcacctccttgagaagcttccttaagaagattccctactacaaagactactcaaaatgcctcgaaatacaaggctaaaatcctatactactagaatggccaaatacaaggcccaaacgaaggaaaaacatattctaatatttataaagataagtaggcacatacttagcccatgggctcgaaatctatcctaaggctcatgagaaccctaggggcttcccttggatctctggcaccatctacttggagtcttctatccaatgctcttgcggngtangattgcatcattccctccaccttggaaaggatttgacctcaaatcttgagattcttcatactctgggctcccttcctcaacacctat

SEQ ID NO: 280173 - DNA, 417 bp, Glycine max
gttaattaatatagttagtagcattaaatagttaactatgttgtattattttgtcagaattattcttataattatcggaactcataattcttctcttttcacttaattactttcccacctaattaattaatgggtgctagtcttcctatctaatccttataagataggtaatgcatttatctttttagtatataacatttattgtaaaataattatgggtatttgggtcaaaaaataattaatacaaaagataacttgagaagactcttataagaagggaacaaataaaattgagaaaagattattatatctagggatagagtgagtatgtccgagcactaagccccttgttgaaactaatggcatgctgacccctctgaatacgacaccctctcctctcatctttcccttaccaag

SEQ ID NO: 280174 - DNA, 382 bp, Glycine max
  unsure (1)..(382): unsure at all n locations
agcttgtataaattactcggaattggtaactacattntttaagctgaaagttttactgaattntgtagacatttggaccaaaattataaaaaaagaaccaagcgatttggattaaagaacaaaattagaaaaatcacacaagttggatgaaaaatcagtgtccaggaaaataaaagtgaaaaggaagtgtgcttgttgtttagctcanaattntttctataattggtgcctactttataccactcctagttctgaaacttcaattgaaaataattatgaaaacaagtgccaaaaatagaggtttcttgagtctttntttcgttnttcttttttagttnttctactctactctatagcctttctaggtttgtctttgagtcct

SEQ ID NO: 280175 - DNA, 509 bp, Glycine max
  unsure (1)..(509): unsure at all n locations
tatgcgcatatntccttacgaacgttcacttgcacaagacattctattatctaagaaaaaatgcacccatatacaatcaaggcagcttcgttatctagattatttacatgtacttccaagttgtatttgatacttacatcacacacatctccttggctaaatttacatacatgcatactcaaagcattntgnggtaccaaaaattgcacatgtgcacatcttggtatttctaatacctatacatacacaaacttcatgatgaatcttgactatctacacaataaggtgctacatttcatgctcttttcaagtttttgctacctanagtcgcatgcaaattcaagtatattttcctttgctgactaanattgtattcaaattanaaggtatanttttttttgaatggatttccttacataacatgcaacatatntatatatatnnttttgtgagacattntgactaccannaaatatatgtacataccatccagtattntgctatcatac

SEQ ID NO: 280176 - DNA, 405 bp, Glycine max
caattcagagtcttcataaatgacgaattggtctttagttcttcttaagtacttaagtatggtcttaaccacttttcaattgttctcaccaacgtttgcttgatatcaactatgtacacctaatgcataagcgacatcatgacgtgtataagtcatggtgtacatgatagcctccagtgcactagcatatggtactctactcgtgtgttctctttcttcacgagttggtggacagttctccctactaagagtaaattccacacctacaggcaaatagccttgtttggaatatccatgtatatctcttaagatagatcaatgacatagattggagagtcaagcacctattgatcttctctataattttataccaaatatagtgttctccacatctcatggaaatgt

SEQ ID NO: 280177 - DNA, 542 bp, Glycine max
  unsure (1)..(542): unsure at all n locations
ctgatccatgttgagcccatcgatnangcgcacttagatactcagcttatgatgatgagtctagtngattcnagtacgttcgatgatgacaaagatgatgtacgaaaaccctgagaatgatctcaagaataagtctaaacagtcaagatcacggtaaatttcaaggttcatgagaagaaatcaagaagattccctattcacgataagatgaatccangattcaggagaagacatcacgaagacttcacatgggatgtattgaaaagagttttctagcacacacatagcacaatgttggttttcaaaagaagttttctcanaatattctaagttaccgaaagtcttactctctggtaatcgattaccagtttcctgtattcgattaccagtagcagaggttgatgtcaaaagcttctaactgaatctgcacattccaattgatattaatggtgtatcattacatatattggaatcgatactagtgttttgacgttgaatcacatcagttggagagtcctcttttctanatgcttgtgtatcct

SEQ ID NO: 280178 - DNA, 365 bp, Glycine max
  unsure (1)..(365): unsure at all n locations
agctntcatcacatcttacggcagtacatcttgagatggtttttgggaccagtcgtccctttatacttgtcgaagtccggcactttgaacttcgggggaataacaacatcgggtactaagcaaagatccgtcatgtctgcgaacggatagtccccaaatccttccatggccctcaatctttcctcaaggagatcgagcttnctcctttcttcagttgctgggggcggtccttccgtggacaaaactataggtggtgccgcgatgtcnggttgaggcaacgttcctggtgccggcccttcggggatcggtggatagaactcgacatcccttcgagcatagtcttgagggtctntatggacttcgtc

SEQ ID NO: 280179 - DNA, 235 bp, Glycine max
  unsure (1)..(235): unsure at all n locations
ctttntataaaatgagaagttctgaactcatcacgttatctaataaaccttggagtggatccaagtgctccgatcattcatttgcatattcatgntttggtggccgacttcaccgtgtttgtttctttagggaattcaccataactaagaaagcacaaaggcacccctataacactcgatccagaaaaatggataatcaagagggcgtgcaagagcagatgaaggccgatctatc

SEQ ID NO: 280180 - DNA, 376 bp, Glycine max
  unsure (1)..(376): unsure at all n locations
agcttgccacccagctcgcccaggcgagcaaggttgcttccttcaaaagcaacagccttctggaggaatctttatgagggcccaagtgggcctggttgctatttgcacccccatttttattaaacacaccccctgcctttnttttggtgattcttttttcgtaaagttatggaaacttacgaatttcgtaacgataccttgtttctttccataatgttacggaacataatcatccccctttntttgacttactgaatgttacggaacttcactatntgtgcaacaatgcttccttttgatttccggtgtgtcacggaacctagcggattgtgcatcaatattttcttttgattcccggcacgtcacggaatttcac

SEQ ID NO: 280181 - DNA, 393 bp, Glycine max
  unsure (1)..(393): unsure at all n locations
tctatagaaggttcattcctaatttctctacaatagcatcacctctcaatgagtagatgaagaagaacgtggcatttacctggggtgaanaacaagagcaagcctctgctttgctctaagaacagcttactaatgcacctattctagctcttcctgactattataacactcttgagctagaatgagatgcctctggagtgggagttggagttgtattgatacaatgtgggcaccctattgcttattntagtgaanaacttcatagagcctccctcaactaccccacctatgatacacagttctatgccgtaataagagtcctccaaacttgggaacattaccttatctccaacgaatttcgcattcatagcgatcatcaatcacttaagtaca

SEQ ID NO: 280182 - DNA, 435 bp, Glycine max
  unsure (1)..(435): unsure at all n locations
tgctagcttttagatccggtcatggaaagacttggcaactgccttcattaggcagtaccaatacaacacggatatggctcctgatcggaaccaacttcagagcatgaccaagcgggagcatgagctcattaaagaatatgctcanaggtggagagacctatcagcccaagtcgtcccccctatgactgacagggaaatgatcacgattatggtagatacgttgcccacattctactacgagaagctgatatgatatatgccggctaactntgcagacctcgtcttcgctggagaaagaatcgagctcggactgatgaaaggcaagtttgaatatgcctccagcgttgcccccaacaacaatagaagagccncagtggtgggcacacgggagaaggaaggagatacccacgcgatcaccaccgccctaacatggat

SEQ ID NO: 280183 - DNA, 330 bp, Glycine max
  unsure (1)..(330): unsure at all n locations
gtgcccttgacctgtctganncttgatggcaggcccggnagtatccattttactttgttctaaccaagaccttggagagtcttttcgaccatccattcaaaagacctatatcttattgaaattttagctatctgatcagtcgactcttccctccatctgatcctcataaggttactaagttgagttttcgaatatgtctgatttatcggcacaaagtttactttgaatcatcggatttgctcttccctctatgttatatttttatgttctcgtcattttcttcgtacgtctgttgcctctcctcctgactattatcattgcatcgttctc

SEQ ID NO: 280184 - DNA, 445 bp, Glycine max
  unsure (1)..(445): unsure at all n locations
tgtctttctattgaggctgagctaaacgccaacatgctgcgctaaactacaagcctcttcnggtgtgaaaattgtacacttatgctaagctcacgtgtgcgttaagcctattctgcacaaaaatatggtttttgtgtctatgaattaagcgccagcttgctgtgcttaacgcttgagtaanatttcataatgcgcgctaagctcaggatggtgcgctatgtgactagacaatagtttagccttatatctctgattttgtgaaataacctgtactaatctcttgtgtttgtcttatatttatgnagatggcatcttatgaagatgaatacaccctatacacctacccaagccaaattcnatagatgcactatcacatgccaagacgctggngagagatatatatacattgtggcgcctcacgagctactaccagaaatgaatgtgn

SEQ ID NO: 280185 - DNA, 226 bp, Glycine max
  unsure (1)..(226): unsure at all n locations
atcacatgtggtactaggtggcgtgcggtcgatggtgcacaacatgttntccacatccactatgcgcgcataaacccaccatcccttgttgcccacctccaactgagctcacgtactcccacgtaacccatatcctcgtttctctcaacaccgggtccccatcaatccttcgaagcgttccacaacagtccagcaaaactgcattcacaccgcacaagctatcaca

SEQ ID NO: 280186 - DNA, 400 bp, Glycine max
  unsure (1)..(400): unsure at all n locations
agcttcttttntaaatggcatttactacaccgtcaaacanatatgaaaataatcagctgccggtgtttgtttggtagctaaaacaaggcagaaattgtaaatttaatgaaaagatcaatggttaaggaatgataatgtaaactaattnttattctcaattaatactcaattaattttaaatggcattntctaattgatataattnttaagataattctattaacaaattaacanatgtgtattttggttaattgtattcttcaaaagtgttttttttattaatatgcttgtctaaactatgtttctctttntataataagtaatatctacttattacaaagtatttcttaaaaacatctttttttaaacattatgtttaaagttatcttctcttaatatg

SEQ ID NO: 280187 - DNA, 400 bp, Glycine max
  unsure (1)..(400): unsure at all n locations
tctactaccacacccaacanatctagatctcataaccttgcactcanaagaagaagcagaagtcgtgttgtgactgttagtgttatcttgttcaacaacaatgtgagtcttgagagaagaaccagatcaacacctatctttaagcctagcagaactagtacttcctgatgctgagttaatggttgagatccttggagtgttgttgtctctgaagctcttggagttgagcttttggatgatttggaagagagatagggaaaagaccacanatatgtttctcttcttgggactaanacctccaatgaccaaatcgttgtcattgttgatcaaagagtggtttcttcgcagcgtggtggtggatttgctacacttgagaacaatattatcgaaggttggtgat

SEQ ID NO: 280188 - DNA, 385 bp, Glycine max
agctttggttctaatagctccaatcacgtctattccccatatagagaacgaccaaggcgctgccaagacattcaaaggtacaggtgaagcattgacattattgacgaaggcctgacacttgtggcactttctcacatggatgcaacaatcgttttccatagtgagccagtaataccctgctatcaaaatcttctgggccatggcatttccattggcatgtgttacaaaggatccctcacgtacttccactagcatctgcttagcctccctggcatccacacatcgaagcaaaaccatatcatgggtcctctatgatgggaaaaccaagtgcttggttcaagttggatcttctaggatggaatttgtgcaccaggagcaacaaccc

SEQ ID NO: 280189 - DNA, 252 bp, Glycine max
gtgtctagacccttgaccccccctgggttctctcatttttttttaatcccccgttttatttagccctgccttacctggcctttctttgaaatgggctgctcccctttatacagccgtccttctaaattctgcttttttcttcctcctgcgcattctccttttttttttctagtcccctttctcttctttcaattttacccttctttactacccttgtttatatcttcctgctttaactttccttcccttttc

SEQ ID NO: 280190 - DNA, 392 bp, Glycine max
agtttgagatgaggaagtgttgaagggtgaaacttcctgcttttattgttgaccacagagcggtacctggagatatgtcgcggaggtcaccgagaccttgcggacgtcatgtggggtgctattgcccaaaaccaagcttgaccaatcccgacccaacccgggcatagtcggtcagtgagaacctgtgatgtacctaagcaggcgagctcctggcagtcaacagataaaaggaaaacaagaccacaaagtaaggaggcttgtggtggctggccagctgtgaattttgtgtaatatgtggatggtggcctctggtaatcgattactaagggtgggtaatcgattacaaggcttataaatgaagacaggaggctaagatggtctctggtaatcga

SEQ ID NO: 280191 - DNA, 287 bp, Glycine max
  unsure (1)..(287): unsure at all n locations
tattatacgagctagagcacatatccttaatgatcttgattgcatcaataaagggctctaacatgaggctacccncacaatcaacatcttaacttgtgctattatgtgaggacactccaccatagaanatgtgaaatagcctttgttgggagaagccatgatatggacaacttctgatcctttcttataatctctcttacgcttcaagtagactctcttgctctttctgcacaaaattcccaatgtcccttatgtactggtttatcttagaagagaaatatttcctt

SEQ ID NO: 280192 - DNA, 332 bp, Glycine max
tatggtagcttctgggaatgataactttggtacagagtcgcgatctgtattagatttttgtgatggcgtgtgcataccatattattccacattatgagtaatggactttttttaattgtcctgataaatcatcaaccatgtagcattgagtcgtaggtgaggtccactatacgaacgaagtggggaattatggcccaactccaagtgactgaaaagatggtgtgcatgatattaatgtccgtggctcgtcttctggatcaggcgaggtgcctactacttctactagcgatgacttctgggattgattggaattatccgatgactctctagat

SEQ ID NO: 280193 - DNA, 430 bp, Glycine max
ctcgcgcaggcgagcaaggttgcttcctccagaagcaacagccttctatatgagtcttctggagggcccaagtgggcctaggtactatttgcacccacatttctactatgtacacccccctaccttactcttggtgattctttattcgtatagctacggaaacttacgacattctgaacgatacttgttgtctttccgtaatgctacggaaccttgtgaattacataatcacccgttttttgacttactgaatgttactaaacctcactaattgtgcaacgatgcttccatttgatttccggtgtgtcacggaaccttacggattgtgcatcaatattctcttttgttgtccggcacgtgccggaatttcacaaatggcctagtgatgggtgcaagcaccttacaatgactaaacaaaagtcgcatgtca

SEQ ID NO: 280194 - DNA, 462 bp, Glycine max
  unsure (1)..(462): unsure at all n locations
cgtacnnccaccattttcatagtagaacattggtaatgtgtttactatcattgtaataatctctctctatgttattgagggtgctacttgagctgccaaatccttccacctctgggcatattccttgaaggattcatgctcttttttgcacatgttctatagttgcatcttatctgaagccatatcagaattgtactgatactgcttaacgaacacaaccattaggtccttccaagaatggactcaggaaggttcctaagttagtataccaggtgatagttgtcttagtaagactttcttangagaaatgtattagcagtttctcatcttttgtgtatgcccncatcttccgacaatacatctttagatggttcttggagcaagtagtccccttgtacttgtcaaagtccgacaccttgaacttgngaatgaccatgttcgggtactaagaacaactcttct

SEQ ID NO: 280195 - DNA, 381 bp, Glycine max
tcaagtttgacaggtttgaaatatatctctgatgtcttatatgtgcctgacattgatcaaaatctacttagtattgctcagcttgtagagaaaggcttcaaagttatatttgaagaaaattggtgcttgatcaaagatgcaataggaaaagacgtatttagggtaaaaatgagggctaaaagctatgctttaaatctaatggaggagaagcaaatagctttttcaagcatgaccaccaatgttgaactatggcacaaaaggctcggacacttccatcttgctagacttttatgcatgcaaaaacatgccttggtgaaaggtgtgtcaatccttgaagacaagttagccgattgcgtggcttgccaatatggtgagctagtc

SEQ ID NO: 280196 - DNA, 210 bp, Glycine max
  unsure (1)..(210): unsure at all n locations
atatgacaaaacacatcgatgtgactctatactctctcatatatgtgattgaatctgatactgtgaagagctancatgtcattacagaagataacccggctgatatgttcatacacttcatctctagtgtcaagatcaagctctgcttggactagataatacatcataatgcctgaggcacatgagagaattgcaaccctgattcacaag

SEQ ID NO: 280197 - DNA, 391 bp, Glycine max
  unsure (1)..(391): unsure at all n locations
tcaagtttgatattatgaaangncgaagggtgaaacttgctgcttttattgttgaccacagaccggtacctggagatatgtcacgggggtcaggataccttgaggacgtcaagtggggtgctattgcccaaaaccaaacttgacctatcccgacccagcccgggcatagtcggttagtgagaacctgtgatgtacctaagcatgcgagctcctggcagtcaacagataaaaggaaaacaagaccacaaaccaaggatgcttgtggtggctggccacctgtgaatttaagtaatatgtggattgcggcctctggtaatcgattaccaatggtgggtaatcgattactatgcttaagattgaggacacgaagctaagatggtctctgggaatc

SEQ ID NO: 280198 - DNA, 393 bp, Glycine max
  unsure (1)..(393): unsure at all n locations
tatttgactttcctatgctatctctacatacataanacaaccccaccatcccagtgttgcanaatcatattcatatatcaatggggcatttcaccgagcacttggtgggcgcacgtttggacataaattgcaagagaatgggggcaatgtggcatgccccattgcttcagaatacaacataggcctaaggtcggtccctttcctagtaaaatatatcactagggcctatggatatttcaagctgcccgcaatccatgagccgctgaagcaattcttccactgcgggataggtttccatgtcgtgcgactccccgaggtgatccgccacgggagaccatgcacgccgcttgcagtgattgatagatgaagcgtctagcagtagccacctcttct

SEQ ID NO: 280199 - DNA, 372 bp, Glycine max
agtttgccgcccagctcgcccaggcgagctcagctcgcccaggcgagcagggttgcttcctccagaagcaaccgccttctggaggaatcttctggagggcccaaatgggcctgggtgctatttgcacccccatttttactaagtacacccccctctgctgttttttggtgattcttttttcgtaaagttacggaaacttacgaatttcgtaacgatacttgttttctttccgtaatgttacggaaccttgcggattacataatcatcccctttttgacttacggaatgttacggaacctcacttaattatgcaacgatgcttccatttgatttccggtgtgtcacggaaacttacggattgtgcatcaatat

SEQ ID NO: 280200 - DNA, 570 bp, Glycine max
  unsure (1)..(570): unsure at all n locations
cgcccttgatgcattcgatgncgactccaanaacacnaagccagatctatagtcctaantctcatgtaggtcttatggccacttcacgctctgattattatatgggctanagcacatagtcctaatgatcttgattgcatcaatcatgcggtataacacgacgtgacctacaccaggaacatattaacctggcctattatgtgaggacgctccatcatacaacacgtgaaatagcctttgtcgtgagaacccatgatatggacaacctccgaacctttcttatagtctctcttacgcttgcagtanactctcttgctctctctgcacacaaataccaatgtgccttatgtactggctgatcttaaaagagaaatatttgcttaagaaggactggtgcactaggcaatgtggtatactgctctcttcacgtcacatacctatccatgccttcgatcgagagagaagganaggcttaagtctaattattcagatgatcctggtctgtttactgtgtcgccacttgaggacttccttngtgntgatangacttatggaaccctactagccgcn

SEQ ID NO: 280201 - DNA, 356 bp, Glycine max
agctttaacattcaacttcgagcgtctcgatatattacaggactcaatcaaacatccgagaaaaaagttattgtcgtttgaatttgctcagaggttcaacattcaatttcgagcgtctcgttatattacaggactcaatcagccatccgagtaaaaagttattgtcgtttgaattggctgagagcttcaacattcaatttcgagcgtctcgatatgttacgggactcaaacagacatccgagtaaaaatttattgtcggttgaattggctcagagcatcaacattcaatttcgagcgtctcgatatatgacgggactcaatcagacattcgagtaaaaagttattgtcgtttgaat

SEQ ID NO: 280202 - DNA, 539 bp, Glycine max
  unsure (1)..(539): unsure at all n locations
ctaagcttctatccaggcacattcttggtggtgaagctccttcttccatggtttattcccttgtggatggtgcctcccctctcctctnttcctttgccttccgctgcatctccatggtggaaaatcaccattaaaagacctcattgaagctcanagatccagcctccatagaagctccacaagcaagcttccatcatacctccatgtgggatgaggatgaaattattatagatacctccctctgggatgaggaagagattntggatacctccatttatgatgaggaaggagtgggatgccattgcatgaaatatgaactcctagaccttttgaagaatntgagatccaccttggttntgggaaccatagaattgagtcttgtaattccaggaaccactaagttgtgtctgttatatttatttggatgcgttgaggtattgtcatttatttaaatattntatttattcataattccatgaatggggattgtntaatatgattttactgcctatatatacataataatctatntaaatcat

SEQ ID NO: 280203 - DNA, 476 bp, Glycine max
  unsure (1)..(476): unsure at all n locations
gacactatgatactcagcttgagccattcanacaacaataacgttntactcggatgtctgattgtgttccgtaacatatcgagacgctcgaaattgaatgttgaagctctgagccaattcaaacgacaataacttttttctccgatgtctgattgagtcccgtaatatatcgagacgctcgaaattatatgttgaacttctgagctaattcaaacgacaataactcttttctcggatgtctgattgagtcccgtaacatatcgagacgctcgaaattgaatgttgaatctctgagcaaattcaaacgacaataactttttactcggatgtctgattgagccccataacatatcgagacgctcgaaattgaatgttgaacctctatgccaattcaaacgacaataacattntactcggatgtatgatngagtcccgtaacatatcgagacgctcganattgaatgttgaagctctga

SEQ ID NO: 280204 - DNA, 403 bp, Glycine max
agtttttatttcacgtatgcaactattgtcaatctcatatcattcaattggaaaagatttgacaaagtggattggaggtcatagttgacagggtgatgtctactgaaacaagagaaaagtaaaagagcatagcacaggcgtattttgataagtttgagttattagtaagggcacataagagatacgtgaggataatttttaaaggaatttccaagccaagaggacaatgccttgatgcaccaaagaagtaatgcatgaaagaagaccaaagagggattaaatgagtgaccaaagcctcaaggataaatagatagagcataatatcatcattcagaatattacacggttatattaagggtttcataaggaccatcaaattcacatgataatctaacacaataaa

SEQ ID NO: 280205 - DNA, 419 bp, Glycine max
  unsure (1)..(419): unsure at all n locations
atataagacgatacttacttanacaccgtccttganagttattcttttaagacagtacctacgtaagcatncgccttgaaataaagattaattttaactattgatantttttctgaacgatatttcatcagagaaaatatgaataattaacaataatatttattagcatgattgtaattaatattaatattaaaatttatttaaaaaataaatattaaaatgatatattaaataaaaataagaggttgacaaattagaaattccagagtcaatttcatagaanaaaaaagttatcaaagttcttttattataaagtacctcataaattaaataattattgtttcacaataatttagaggaccaattaacactttgacagcctccaagatattatctccaacagcagacacaaagagaag

SEQ ID NO: 280206 - DNA, 430 bp, Glycine max
ggcgactccgagctcgggcccgggatacttaagtcacgcgccgcattttatcttgtcctcgtccgagcggaataaatgctgtcaaataaacaatatcgcagacttcctaccatatggtctggtgatagatatatatatatggcccgagagagacagagagatatataaatctccagaccctctctcccagattctagattgagcaactaaatatcaattatatcagaaagctacttgagattccaagttccaactcaagtttaaaatgtggtgaacgcgaaaagtggttaaaataattgtaccaagtgtattatattacattacatataacgtgtcaacctataagacgtgagaaaaagggtgcagatgttttggtatggatgtgattatattatatagggggcaaatacagaccatatgtatatcaaaa

SEQ ID NO: 280207 - DNA, 586 bp, Glycine max
  unsure (1)..(586): unsure at all n locations
tgccttgttgccttttgatgccgttgcaanagcacacaacnagactcagcttcacagtcaagcatgagcgcttcgtcantaccggtctccatcagacgtactctgtaggaggtatcggcgcggagcatgggtggtattgacaccacacctcaatactgagacgctcnctcttatagcaggactcagtcatacattcgccgtaacagttagagtctttacgaatcgctcagagattcttcatttcctttccagcgggtcgcgatatcacagcgcttcatcagacatccgtgtaagaagtattgccatttgaattggcttaaagcttcaacattcaattccgagcgtctcgttatatgacgggactcaatcagacattccgagcaaaagtcattgtcggttggattggctcagagcttcaacattcattntgagccgctcgatatatacaggactcctcaacatgcgggtaaaacgtatctgtcgctcgacttggttcagagctacacaatcaatcttgagcgtgttggtctcttacacgactcaagccacattcngagaaaagttattgggtctggatggctccacg

SEQ ID NO: 280208 - DNA, 313 bp, Glycine max
cctatgctcctcctgctaagctggctctctggggaataagaccatgtaattgtccgcgaccatgcattgatccatacgactcgtatgtaattttttgcgctcactcggacgctcgagtcactttatgttgcccttgcgaatagttttaagcatttattggatccttttaagcgtcacgaatttatatggccccgaacctgacccgcgggagtcactactgtactcatgaatgggccgatcctaccgaggtcaggactcactatccatattatggccctgatgtgacctccattacatactatgccacttgggc

SEQ ID NO: 280209 - DNA, 435 bp, Glycine max
  unsure (1)..(435): unsure at all n locations
tgaagctcactacaagccttaagtgaacaaccatgatatttccatatccttaaggaattntggagctttggaattgttatgcgaataagtgtggngggtttttgtttcattggacaacttgatttgttggctatgcttcatgatgtattntgngccatacttgatgtacattgtatattggttaaatgttggacatgctgaatgaaatgttgtttctcacaggctatagagtaaaaaataaaatacaaaaataatcgaaaaacaatattcgaagaaagattaagaacagcactaaagttgagtgaataagatcttatatggcacaagaatgatgaaactcttggctctactcttcatgtgtaattgatatctgtacttcttgttattntcttattactttcttaatatgcacttattgccctttgctcctctatt

SEQ ID NO: 280210 - DNA, 406 bp, Glycine max
  unsure (1)..(406): unsure at all n locations
agtttggattcatcaaaataaactttcatccggcgctttagtcttctcagtctttcctcctacaaaatttttacaaagttgctgctcaatgaattcattttttttcttgttttcctcactgctctctgtcctcaacaaattcatgacaagaaaataaatgaagaaaaaaaactattaaaccatttatgatggagaacaccagacagtttggaaacaaattatgaatgcattttcaacattgtttctgcaattattctcagaaaacaaaacaacatttccaacaacatgaaactctagttataatcacattnttcaattaccttcaaaaactattgccagttagtttccaaaagttnttcagttattctcaaaaactatattgaaatatattntcacaggtcattga

SEQ ID NO: 280211 - DNA, 326 bp, Glycine max
  unsure (1)..(326): unsure at all n locations
ctcgcncaggcgagcaagggtgcttcctccagaagaaactatcttctggaggatatctttggagggcccaagtggacctggttgctatttacacccnccttnttactaaatgcacccncttatatattnttctgtaattctttttccgtaacgttacgaaactttacgaatttcgtaacgatacttattttcctttccgcaaggttacgaatccttacggatttatgtatttactctttttggctttcaaagaagttacggaaactcacggattgcgcanaaacacctcttttcgattntcggcacattacggatattcacggatt

SEQ ID NO: 280212 - DNA, 361 bp, Glycine max
  unsure (1)..(361): unsure at all n locations
atactcgcccattatctcagntgtctgttgtttattgcattcttacggaatctcttaccgaaaagacagaacaatgttagaagaagttcgtacaacaggattgttntactgcaatgatctggttgattcaatgcagatgagaggagaagacnattaatcggacatagaaacatatttgagaaattgtagagtatgtctgggtgcatagcttggtaatgaanacagatgggattataactttctaaccgaatgagaaccaatacaacagaatatgatatanatcggccttttaacaagtattaattcttaattctaanatatattntaaataacaagtcagacatatctatgataaactgta

SEQ ID NO: 280213 - DNA, 383 bp, Glycine max
agttttgatgtaacatttggagaggttaatgaaacaacgagatgatgcgctccatgagaggttggatcaaatggagaatagagaccatatgaattgctcaagagcttccattgttcaatttcgagcgtctagatatataatgcgcctcaatcggacctccgagttaaaagttatgaccatttgaaatgctcaagagcttccattgttcaatttcgagcgtcacgatatattatgcacctgaatcggacctgcgagtgacaacttatgaccatttgaattgctcaagagcttccattgttcaattttgagcgtcacgatatattatgcacctgaatcggacctgcgagtgacaacttatgaccattttgaattgctcaagagct

SEQ ID NO: 280214 - DNA, 401 bp, Glycine max
tagaaaccataatgacaattctcacatttcaaattaaaaccaaattacggcatggtgagcaccatcatgagtttcagaacttaataccaaatatatgcaccacattcacataatgggcactgccatggatgttgtgtttgtcctcttctctgtgtaaagcgaccacatgatcaagcgaacatcattcgtcaccctctcaagcatcgtaccagatcaagatcgagatctataaccaaatctataatgcacaatatcgagatttgtgtggttcgcggctggttatggtgggtgacgttctcagaggttgatggtggattgatatatgcggctcatgtgcacattgtgtattgtagtgggtaacacacggtagagtcactacttgatcacatgacatcggtgat

SEQ ID NO: 280215 - DNA, 203 bp, Glycine max
gctctgataccacttgttggacaagtggccatagatatcttaagaaggaggggggggggggagggtctatacttctaactcccacgccctatcaacgcgcataatatatctagacgctcaatattttacaatggaagctatttggctatacacatgctcataacctttcactcacaggtgcgaataaggcgcatcaatatatc

SEQ ID NO: 280216 - DNA, 376 bp, Glycine max
agttttaacctcatcgtccctcacagtctttagatttgggagccaatccaatccttgtgttcggactctcagccacttatgatagctgccgatgatcccattactgcttcccctaagctctctgtcctttcttcacgccgcatcccatgccttgcgaactccttggagtaccctcgcgttgtggtcactaaaaccccgtgcgatgaaaggcgtgatgctttcgtctaatggcgctcctctcatggggtagccaagctgtcttatggcgagaacgggattataattaatacaaccccttgttcccatcaaaggaacatttggacatccttcgcatgaagatagaatcttgattcttccttccttctagcgagggaac

SEQ ID NO: 280217 - DNA, 398 bp, Glycine max
catttcttggttggtggtttggtttatgctaaatgtggtgttcgtcattggaagtgcgatagacaggctgtgtggtttatttagggatggcctttgtggatgactgagtggtgggtaatgagaaaggttgatattggttgagtaatgatgttgctgagctggtgggggattttccatgtatgaacgacagtcacaacatgggtttctccttcattctcaccctcttcatttgccccagttttctcattcgtccaagcaggatgattaaatttgcctcttttcagacccacttggatcctttcgctggcgaagaccaaattcgtaaaacttacaggtgtgtaacccaccatttctcatagcagaacactattaatatgtctactatcattgctatcatc

SEQ ID NO: 280218 - DNA, 397 bp, Glycine max
agttttcttgagagaacttccttgagaagcttctttgagaaaacttccttgagaagctagagcttagctacacacacccctctcataactaagctcacctccttgagaagcttccttaagaagattcctaaagaagctagagcttagctacacatacctctctaatagctaagctcacctccttgagatgagaagctagaacttagctacacaccccctataatagctaagctcacccccatgacaaaaaacatgaaaatacaaaaaaaaaagtccttactacaaagactactcaaaatgccctgaaatacaaggctaaaaccctatactactagaatggccaaaatacaaggcccaaacgaaggaaaaacttattctaatatttacaaagataagc

SEQ ID NO: 280219 - DNA, 388 bp, Glycine max
  unsure (1)..(388): unsure at all n locations
tatatggactatgacagagtactagctaactacatgtacttaatttgcacttctcattagcgacacttaattgcttggaagttgatgaagcgacggctttcgcccagtctcggatctttgctttgatcttcactgcagccaccttagctaattcattatgctcagccacaaggtacagatgaggttgttgtgggtcacactcttccaaagtgatgcaacattctttgtaatccttgcctgccattgccatagcctcaatagacatgtttcctttcctaatatagggatattgaggatcgatatatgattaatgacgcanactaagtgtgactgtgaattgtaattgacgtagtaatagccgcatagaatcatttgtatatataccata

SEQ ID NO: 280220 - DNA, 344 bp, Glycine max
  unsure (1)..(344): unsure at all n locations
agcttgagttgtacaagccaaaagtgacagtgattaatacttgtaacttgttgaagttaatgaaacttggtggttagccaagaactggacatatggggggatgatgcaatcctacccccaagggcattggatagaagactccaagaagattgggtcagaactactgaagaaggccctatggttaggtttttggcccatggactaagtatgagctcacttatctttgtacatattagattagggtttcattattttttggccttgtatttagggctccatagtgtagggagggtaccctagtaaagtaggatctttcagcctatgtattntagggcacatagact

SEQ ID NO: 280221 - DNA, 415 bp, Glycine max
  unsure (1)..(415): unsure at all n locations
agccatgttctcagcatgaagattaacagccgaatgctcaacatcagaatattcagaatcactagcaacaaaatactcagaatgctcaaaatgctcanaatgcgtagaatgatcaggatgcacactatgcctaactaatctatgaaagggtctatctatttcaggatcaaagggttgtaagtcacgtggattgcccctagtcatgcactatatgcagcaaataatgtgttctcaaacaagcacctgacaagggggtaaaactacaactatagtcaaacgatatccaaaggagctgagattntgtcagcaacaccctagaatcatgaacagatagcacanaagatntcaaacaaaaattcaaagtctaactatgaanactacctaagcanagttatgaaaataggacaataatact

SEQ ID NO: 280222 - DNA, 356 bp, Glycine max
agcttgttgtatttgccatgtttggatgagttagacatacccattctgttttacggtttttgtgatgatgtttgtgatgtttatatgctgaaattgctgatggaaatctgttagagatgaagggtagaattaacccaaggttagaaagtgagaatgtgatgttatgagtggaaaaagagtgagactttgagagttggaaggctaagtctgaattctgtggtaaatggaggttagagtgagttaatactagcttgaaatgtcatttagaacatgtgagaaaggttacgctgagctagagagaataacaaatgaccaaagtgaacaaagagccattgctagggcaaatttgggtgttg

SEQ ID NO: 280223 - DNA, 411 bp, Glycine max
  unsure (1)..(411): unsure at all n locations
ctcactcggaggcccgattcangcgcataatatatcgagacgctcganattgaacaacggaagctatcgagaaattcanatggtcaatacttcgaactcggaggtcctattaaggtgcataatatatctagacgctcaaaattgtacaatggaagctctctggctatacaaatggtcataacttttcactcgaaggtccgattaaggcgcataatatatcgagacgctcaaaattgaacaatggaagctcttgagcaattcaaatggtcataacttgtcactcggaggtccgattcagctgcataatatatcgagacgctcgaaattgaacaatggaagctcttgagcaattcanatggtcataacttgtcactcgaaggtccgattcaggcgcataatatatcgagacac

SEQ ID NO: 280224 - DNA, 335 bp, Glycine max
  unsure (1)..(335): unsure at all n locations
agtcttgtagcaaattcaaacgacaataactttttactcgggtgtccgattgagttcagtaatatatcgagacacttgaaatagaaaacgaaaacttgtagcaagtgcataccacaatcaattntaactcgtcgcgaaatatgttgagatgctcgaaattgaaaaagaaatttcatagcaaattcaaacgacaataactttttacacggatgttcgattgagtcccgtaatatatcgagatgctccaaattgaaaacggatgctcaaatcatattcagacgacaataactttctacacggatgtctgattgagtcccgtaatatatcgagacgct

SEQ ID NO: 280225 - DNA, 357 bp, Glycine max
  unsure (1)..(357): unsure at all n locations
acacgagccaggttctgattaaattcatgaactgctccatatatgacacaatctcaaactaccacttttaatttcttaccctaccattgtttagagaagatcttccacaaangcatcgcacagaatccatgaggtgcaccaagcaggacttcttgtaatgctgcaatatgaccctgcatcatttatgagattatgtcaaaatagcacctagcttatgtcacttactgtcaatctactgccaattatgtcagcacagtccctaacatatgtcacttactgtcgaattagtacttcagaattaataacattgacgaatctatccaactgctattgcatgcatgccacatactatataat

SEQ ID NO: 280226 - DNA, 382 bp, Glycine max
agcttctacttttgttcaactgagaaaaggacgtcaatcgtcatttaccgaccatgatccgcttatttctttcttctctttcgtctaattgtcgtaaactaagaataatggagtataatatacaccacagaaaaaatggagtatcatattgataaaaagtaaaacatcggacggtgatcttgatgcagaagtctacaattgataatgacaggcaaatttatatatataagaaaaggcttatcatatgaaattatgcacacttatgagctatgaggccttttaatctctaaatgcacactagcgacactaacgaaagtagtggtactattgctaacatatccgaacatcttggaaacaatcggcgattggttaaataaaaaat

SEQ ID NO: 280227 - DNA, 473 bp, Glycine max
  unsure (1)..(473): unsure at all n locations
gcttgctagcgttatgcaacagaaccacatgttagccattgtatatgtaccaagaagaattaaatctagccacggaccacgagcacaaagtggcgtacgagtatgcctgagtgtacgcagaanaggaggctagaggaagggtgatcgactcgttacatcaagaggcaacaatgtggatggaccgatttgctcttactttgaacggnggtcaagaacttctctgattgctagccaaggccaaagcaatggcggacacctactccgcccccgaggagatccacggacttctcagctattgtcagcatatgatagacttaatggcccatataattagaaaccgctaggaagttngtattgtcactcagatcttgactagttataactntctgaataaaatgagtntatcccatgtttntactccaaagatcagtgcgaatcanatcactcccgcattntatctctagcatgcattc

SEQ ID NO: 280228 - DNA, 358 bp, Glycine max
tcaagttttagatgaggaagtgttgaagggtgaaacttcctgcttttattgatgaccacagagtggtacttggagatatgtcgcggggctcaggagaccttggggacgtcaagtggggtgctattgcccaaaaccaagcttgaccaatcccgacccaacccgggcatagtcggtcagtgagaacctgtgatgtacctaaacaggcgagctcctggcagtcaacagataaaaggaacaaagaccacaaagcaaggaggcttgtggtggctggccagctgtgaaacttgattgatatgtgagatatggtctctggtaatcgattaccaatggtgggtaatcgattaaaggcttaaaaatg

SEQ ID NO: 280229 - DNA, 569 bp, Glycine max
  unsure (1)..(569): unsure at all n locations
ccgccttgatgtttgatgcantgcaagacacnaagctaggcctcgatcctcatgtagacggggatcgccttgcggactgttgcatagggtcgtcacggcatgccaatgctaggactacactatcagtacacacactagtgcgtgatctcaccacgagcatgcaatgtatcatccatggaagaagcagtgaacatcagatagaccgactcgtgcgtattaaggtactgacatcaactgttgattatgaatactcaacaaggagtgtcagcccgccattacagaggaaccctaacacatatgagattaagagtggataagaactgctgtcttacacagcaatggggatccgttctgctctacacaacgtctgacagtcactcgtgagctcactagtctctctctaattacacaacctatcgctgtntgaagagctgaacgcttgctgcctcatagctgtgaactaagatagcactagtgcgtgcttggagtctatgcgaatatcatctacactaatctacatagacagcattcgattgttctaaatcggatgcgcaatagctcaccctccg

SEQ ID NO: 280230 - DNA, 356 bp, Glycine max
  unsure (1)..(356): unsure at all n locations
agctttttgtttgcttgttaaaagccatgacgagtgtggcacaagcagtgaccaaaaatgcaaccactctgagggacaaaagaacccaatccttctttggctaatttgtctcatgaggaaccactgatgcattattcataccaccaagctccactttctctccaccattttatgaggccattgtgcaattaataacaaacacttaattaattgccaaagtgagaaaatgaaggtggtgatgatggtgcagattattatggagaggacaatgggttattatatagatagggataccagtgaaatggtcanaccatatcatttggtaagtctaagaagccaagtgaggattctttctc

SEQ ID NO: 280231 - DNA, 496 bp, Glycine max
  unsure (1)..(496): unsure at all n locations
cactcagcttcgttaattcaccgctcgataataccggtctcatccggattttcgtgtataaagntattgtcatttcaatgtgctcagagcttctagtctncaatttgagcgtctcgatatattacccgattcaatcggacatccgagtaaaaagttattgtcgtttgaatntgatacgagcttccattttcaatttggatcatctctcgataaatcacgacactctgctgggcatccgagtaaaaagttattggcgtttgactcttctaagagtttccattntcaatntggagcgtctccatatattacgggactcaaccagacatccgtgtataatgttattggcattacaattctctcagagcttctagtctcaatttggagcgtctcgatatattacccgattcaatcggacatccgagtaanaagttattgtcgtttgaatctctatgagcttccgtntcaatttcgagcgtctcgatatattacaggactc

SEQ ID NO: 280232 - DNA, 411 bp, Glycine max
  unsure (1)..(411): unsure at all n locations
caacaacacatttcccaatgctaaagtcacctaacagtacacacacaagtgggtgatcagaccaagagcatgcaatctttaagcattgaaagaagcattgaacataagacacacaatcaattagatattaaagtaattacatcaactgttctttaaaaatcctcaacaagggtgtctagccagccattacagaaaaaccctaacaataatgagattaagagtagagaataactactccttacacaagaaggtggatccctcctcctcttctcagcatctcaaaatcactctgcaactcactaatctctctctaattacaaaacctatagctctctgcacaagctgctcctcttgctagctncagagctctttgtccataatagacactatggtgtgctcttgaattctatg

SEQ ID NO: 280233 - DNA, 363 bp, Glycine max
  unsure (1)..(363): unsure at all n locations
agtcttaaggatttccccatttgacatcaactgtgaatgaagaacaaataacttcagcctaatgattacaaagatgaagtcagtaacttccaattcattactaatttagaatcactatttatattttcaggaaatggataaaagaagaataatggcataaccattgtcctgagattaatgaatttaccaaaacagaatcaaatgctggtagaaagtcaacttgatgagttacaagtaaaacagttttctctttaagaccatccatgatgtattcctgccaagtttcanaaccatgttggagtaaagaatgacacataagcacaattatagtatgtgaggaaaggaagatgccattacattaaa

SEQ ID NO: 280234 - DNA, 103 bp, Glycine max
acgatgactcgacttcattgttattcacggcgacacagaaatgaacacagatgccgacgtcgcttcaccacagcgttcttctttgcgcggtagtacaacaacg

SEQ ID NO: 280235 - DNA, 328 bp, Glycine max
ttatcttgtctaatactactgcaccagggatgagtgagttctgcgaagcctttctcaaagctcctaagccaggttcaaaaaatgaaaattgcatcatcctcactgtccctacaaaattggcatgacgtgtcatcaacctgcacttgcctccactgcaaactctgtcttgtgggaagtctatgtctattaatctccgccaaagaaatctacttttcttggaacctttatgctccataatttgacaaaacattccttctgggttattgctgttgctcctcccattattacctctgtttttatcagccaaactaagtatattatatatata

SEQ ID NO: 280236 - DNA, 431 bp, Glycine max
tacaataacattctgattctagtattaatcactgtttataggaatattatctttgatttagtggaaacaaaatatcctctatttatgtataattaatgtaattatcctatatacgctcgcatcctctgtgtactctgacacacggttttagtctattgaccctctatattctctctcattctacagtatatactacgtattatgcaatcgatagatgacaaaaataatagagaacgaacatcacactctgtatgatatcccatgtacaatgcttctgtttctgagctacaatgcacaaagaaacaatgctcgagtgcttcatattaatgcatcccatgtgattccaatttccaaaacttctgaatcttcatgtactctttattccaaaatgccatcagacattctacaagaactattctgttttccaagat

SEQ ID NO: 280237 - DNA, 314 bp, Glycine max
  unsure (1)..(314): unsure at all n locations
tcaagtttgatattatgaagngcagaagggtgaaacttcctgcttttattcgttgaccacagagtggtacctggagatatgtcgcgggggtcaggagaccttggggacgtcaggtggtgtgctattgcccaaaaccaaacttgaccaatcccgacccaacccgggcataatcagtcagtgagaacctgtgatgtacctaaacaggcgagctcctggcagtcgacagataaaaggagcaaagaccgcctatcaaggatgctcgtgcggtggctggccatctgtgaatcttgtgtgatatatgggctatggcctct

SEQ ID NO: 280238 - DNA, 396 bp, Glycine max
  unsure (1)..(396): unsure at all n locations
tgatgataacaatgatgacatcagaagatgatgaacaaaaagctcaagtgaatcanagaacatctcacgagaatcaagatcaagatcaagattcaagaatcaagaattcaagactcaagaagacagccttcagaaaagtatcaagattcaagattcgagatctcaagaatcaaagatcaagattaagaatcaagaatcaagactcaagatctcaagaatcaagatcaagatgcacgaatcaagattcgagaatgaagaatagactcaatcaatataagtattaaaaaggttntttcaaacgttgaatagcacacgagtttttgacagaatctttaccaaagagctgttactctctggtaatcgattaccatattggtgtaatcgattaccagtagc

SEQ ID NO: 280239 - DNA, 396 bp, Glycine max
  unsure (1)..(396): unsure at all n locations
tcaagtttgtggatagcatccacagcattgttttcacccaaggaaatggtggtcctgacaccatcaagaagatcaccaccattgaaggtcagttaattaatgttacctttaattttttttatttgtaagaataaaagaataaaaaacatgtaccaaaatttacaccaactcatgtacttatatattgttcagctaattgagttagatgctttgattaatattatcattaattaattcaatacaagatattttcttgaacttatatataaacaaaaataactattttcacacagagttataattaaataaatgatattgtaataataatatcattaaataggaatgaagttacttanatgtacttatatttatatttgagtgttagatagagtaact

SEQ ID NO: 280240 - DNA, 311 bp, Glycine max
  unsure (1)..(311): unsure at all n locations
aaacaaatccatgtatggtttanagcaatccnccacgcaatggaataggagacttgatgaatttatggctcacataaagtttcatagaagtcactatgataattgtgtctacttcaaatttccttctaaagtcgagtttgtgatattgctattatatgttgatgatattttgatagcaagtaatagcaagagtaaggctgagaaattgaaatctgagctgagcacggaatttgaaatgaaggatttgggagcagctaagaggatattgngaatagaaatcaaacgggatagaacaaagaaattgtggatct

SEQ ID NO: 280241 - DNA, 391 bp, Glycine max
agtttacggcgggagaaataaaagaaaggaagcaaaaaagctaagcaaaaccaccgaaaagcaacatcgccacctatatgtcgctgtctcacaacaagtctaagtgtgtctctgagagagagagacatctttatcatcatttttaaacacaccaacaacacatgttgcaccaccaaccattctctctctctctctctctgggttttcttgtttttattgggtctctcaatgagagattgtaatggaaaaggatcatcaaagtctgtccaaggaacatagtgactcttcagtgtgttgctggcttatacgagtagtacttattcatcatctaactccttcaattctcttctccaatgattaactccttcttcaattctcttctccaatgatt

SEQ ID NO: 280242 - DNA, 377 bp, Glycine max
  unsure (1)..(377): unsure at all n locations
aatgacctttattctttgaagagtcgtgggaaccccttgattaccatttataaaattgaggacagcaatgcaataaaatgtacctttatttatattctcatgttgattactcctaccaaanagtatgacaaacctaaggtgtcccatatgagcacctacgtctgtattgaaacaaaacatacgaacaaacctacctaatgagtccctatgtacacaaatcatgaagatgttgagtgcatgagtgattgtacacaagacggttgcaccactcaacacattcatcataccacctattctgggcaccaacatagcacaaggatctaagatcttacgagccagaccctcatccaacaactctcatacttgatgaataacat

SEQ ID NO: 280243 - DNA, 397 bp, Glycine max
  unsure (1)..(397): unsure at all n locations
agcttctcatagatgtaatgtgctaaaagagagggaaaaggaagaaacaaaggtaacatctcttaccaaggagtctagctccgttggttaaattaggtgttgagtgtactaaattttttgatatcgtgttcaatatttaccgatattaagaaagtagcatctcaagtaaaccaaatagaagaaacagaaaaagagataatattaattataggtgacttttgtgtcttaaagatgtttaatttgtgttatgttaatagcgtgtagtagctatgcaaagagtgtgtttcttgagtgcctgtgtgttttttccctactatgatccttcttacgttttgagtggctttcagccagtngtgaataaaactatgcaactttagtagtatctactaaatatagt

SEQ ID NO: 280244 - DNA, 387 bp, Glycine max
  unsure (1)..(387): unsure at all n locations
aacttccttcagacaaggctcgatatattaagttaacttattctanaaananaatgccatatgtttgcttatacttattcaaggcacaaggctcacaatctttttntgtctagaattggatgtgtgtgtgaaggaagcagttgctcattacgtcaagtcatcttcaattagtttcgggaatagaacagaacaactatctttattagaaaaagattattgaacaaatagttataatgtgattaaattattatttttataaagcgcgtgattntgaaatcaaactttaactaaccgcagctnttactctgtatgactctccgtcctctttcatactcttgattacatacctctntgaatgattccaatgtgtaataagtagtcaacaca

SEQ ID NO: 280245 - DNA, 353 bp, Glycine max
  unsure (1)..(353): unsure at all n locations
agcttaaaggatgtgaacaaattagcatgggcagaaatgtctccgcattgattggtaaatctgttccccaaattcctgaaaaatgtaaagatccaggtacattcagcataccttgtattatagggaatagtaagtttgacaatgccatgctagatttaggagcttctgttagagctatgcctctgtctatttttaattctctatctctaggtcccttgcagtcaactgatgtggtaattcatttagctaatagaagtgctgcctatcctgttggtttcatagaagatgtcttagttagagttggtgaactgattctccctgttgatttttatattntgaatatggaggatggg

SEQ ID NO: 280246 - DNA, 416 bp, Glycine max
  unsure (1)..(416): unsure at all n locations
cggtgacaaaggcatatgggaggccttacttgcatatgaggtgtttctatgtgaacttctccaccttattagttgtaatttctcacagtggtcttgcctcgatcccttgngtgaagtaatcgattgccattagtaggtatttaactgttcttggggcctttaacagtggtcccagtatgttcattcctcacatggcaaagggccatgaggagctcacactatggagattgtccggaggggtgcatggaatgcttgcaaactcatggcatcatctgcatctctttgtaaagtcaagggtgtttgccctgaatgttggccagtagtagccaacacgcaccacctttgttgaagggatcgtccccagtatggagatcgaatattccatcgtggagtcctctcatgacataatttgctag

SEQ ID NO: 280247 - DNA, 385 bp, Glycine max
  unsure (1)..(385): unsure at all n locations
agttttgtgcaactgaagcatgggaagaagacattctatgctaggcatcattgatttctcaaagaatatcacccaaatcgttggttgaaaaaaacttttaatggaagataggagtttggatttgccccgataccaataacagaaaaaaaaatttatgagcgagtggaggaaatatgtactatctttggaaagacccaaaagaaggatgcaaatgagaaaaacaaatggaaaaagaggtctatattctttgatcttccatattggtttgtcctanatgttagatattgtattgacatgatgcatgtggagaaaaatgtatgtgatagtttaatcagcacacttcttaacattaaaggcaagacaaatgatggtttgaatgctcgtc

SEQ ID NO: 280248 - DNA, 308 bp, Glycine max
  unsure (1)..(308): unsure at all n locations
tcttggatgcctaagtgtggaccctctagggcaatcctccatttccatttattttgagccccatgaatgtcatggcctagcgtagctcatgtgtactacaccttcgagtatggagccccgcgaatgtcatcgtctagctctattagccaattctccattccacacttttatttggagccccatgagtgtcattgcctagcgctgtacatgtgtcctccaccttcaagtctggagctatgcttcatgaatgcctaagngtgaaccctcttgtgcaatgctccattctccacttttattctgagcctcat

SEQ ID NO: 280249 - DNA, 395 bp, Glycine max
  unsure (1)..(395): unsure at all n locations
agtcttttttctgtcccgagactccatggctgtaaagctgcgaatacaatcatgatgatctgattcatgttgaaggcctatagatttcgcaagaagtcattgctgcatagcctattccaagtcttcaagagagttttcttctgtattcttgaacccctcaaaagcctctagagtcctgttgtttgggcctttacaagaggaatcatttaaaccacccagacccttgtcctcccttagcgagatatcttcttctactacaggctcaagaggggcagctttagatgggccatgtctttgtctaacatagactctagagaacaaatcatagctcccttntgatgtctgagccgaagctgggtgggtttcctttgtacacccctccatcttcattattg

SEQ ID NO: 280250 - DNA, 445 bp, Glycine max
  unsure (1)..(445): unsure at all n locations
gcgagacacactatcgagcgactgacanatacaagttaatatatttggttgataaacacgaaaaaaggatacttagaaggtgcatgaaccacaccctaactttcgtcatccaccgaacattaatgggacccaatatctagtatattacatatcatatagtgacactatataaaacgacttaagtttttctaacgatcgttttcaaacgcaatagattcccgtgtcattcaatgctttaagcaaaagagaagacaatatagacaaaatataaataaaaatatgcactacatattagcggcaggcgaaatgaattatgctttcaagtataaattatgacagatttcaagtataaattatgctttcaagtgtaaattatatattatatgtaatattatgactctcaattgagaatctgtatttcaacacggattacttaatagtatca

SEQ ID NO: 280251 - DNA, 392 bp, Glycine max
  unsure (1)..(392): unsure at all n locations
agtttgacaaaccagcttggttaactaatgataataataataataactttattttatcaaatcttatcttatccagattttattctatctagattttattttattcaaattttatttcgtccagattttatttcatcacatcttatcttatcttgtccagattttatgttatttcgtttataagtttggacttaaaatagatttgtaagttttggggctgaggacctatataacagcaccaaagttttaggttagggagtttttttccggagaggagaataattctaggattttagaatttcagtttttattactgttcatgcacactgttcatgtagaataaaattcattttttgcaaatcatctctaatccatacattttntaatattat

SEQ ID NO: 280252 - DNA, 394 bp, Glycine max
  unsure (1)..(394): unsure at all n locations
taagtctagattaatntaattgtcactatccatggcaacctctttgatatttttttttttcctttttaagaggaaacagatcgagacactgacgaatacaaatcacanaaccgtgaagaaaattcacaaaaacgctaaaatttcataagttctcaacccacattccccaaaccccacaagttttcttcattntctcagcaaacaagcaggaaaaaaaaaaggcaaatcaggaggattgcacattatgcacaaagttagatctgagaaaaaaaaaaacccaaatgcatgcaaaatagaaaaaagaaataaacaagttgaatcaacaatgatgaaattgaaaaataaaattaanaaanaaaaagtagaaagagaaggtggaaaattgaaggttacc

SEQ ID NO: 280253 - DNA, 428 bp, Glycine max
  unsure (1)..(428): unsure at all n locations
gatcagctcgaccgggatccttaatcgactgagctgcagctttgtttttctttatcgccgccaccatcgggttagacggatatcttaatattagtactntgattttcagccttgtattttggctatattagtatggtatttgaacaattgactatttccttatttgcatggcatgtttggaccaatattaagtatgttatttgactatgtggagtttataattaatctatgcatggntggttgattcatggtttcatggctcttgcttcttgcttcatgatttggttgatattgtttacgaacattgtatggatgcttaaattaaatttatttgatacgcattttggctttttgttgatgccaaagagggagagaaatgagattaaatcaagcattcacatcaataatcaacttattgttaagatatg

SEQ ID NO: 280254 - DNA, 473 bp, Glycine max
  unsure (1)..(473): unsure at all n locations
tctgtcaactaactaatatttctaattgcaagttcacattcttgttctttctttgtctaacatacatacttgctcaaactcatgaaaagaaacacaaactccatcataatcatgcattcaaaccaaaatcaattcatacaccaattntcacaaaaagagtttcactgcataatcatccaagtcaagtcaaactgttctatatgcttcanaataagcataccaactaaccataaacaaaaaacaacaatgcatataaacactaaccaaaatcactaaaaacattgtactaaaactataatcataataataacaatccanaaagcatcatcaggaatntaaaattcctgtgactggtcctaagtgtcctgtgtctgaacatcctcctcatttgacagatgaagtactggagtagctggaggagaagtgttcagagtcangactagtgtgatcaggtcctcangtatctctaggat

SEQ ID NO: 280255 - DNA, 342 bp, Glycine max
agctttcatcaccgtcgtggtgctttcatcggtgtcatcttctcatgaccatcgtgtcactgtcaatgtcgaagtgtgaactcctccaccacaagactctcatcattagaagctatgaacccatctcttgcattctcatgtcctctttgttgaattatgatgggatcagagatggtgtggttgttgatgacattggctttacggtgcggcggaaggagcgttagggtttgtggttaagattttgaaggaaaatgggctcaaaaccatattttgggctcaagagtctattacatgtagagaaagtgtaacatcctatgatgtttgtcctaagacaattacctc

SEQ ID NO: 280256 - DNA, 412 bp, Glycine max
  unsure (1)..(412): unsure at all n locations
cactcaagctntctcttttgtgcaactatctcatcctctttttcaggtgtagaatgaagcttgtcttgttttggtgcaggtgctgctactggtggagacacttgaatttggattccagacctcaaggtgatggcactcacattnttcagattctgcacagtttgtcaaggatatttgtcagaattttgngactgagcttgtgtcaattgagtagccatctgccccatctgatttgtcaaactctgaataaaggctcttgtctcttactgacattgcatattctggatggtcatttgcctcactaactcttctaaggaaggttgaggaagagcctcagttgcttggtggatttgttgagactgccgctgtattggaggaggaacatatggcttgcttgtaccagcaacattct

SEQ ID NO: 280257 - DNA, 380 bp, Glycine max
agcttatgcttttacgaaaaggttcatcaagtcaagttaaagtatggaagtaaccatcctgcaaaaaattggggcaaaagatagatcgagttacatcgctgctttgtctattgccaaacacatttaggactgttgatgtccttgttacttccagtttcaccttgacaaagatgtaatggaccatgttaaaaatctaaattgattaaaccccatgtcatgcgtaaaaattcgcaatacttcaactgtgcatcattcacatacatacatgcttttcattggttgcattgttcattgcattctttccttgacaaaaaaaagataaaaacgaacttaatcattgttatcacaaagaaaagaacatgctttacggtacccttatc

SEQ ID NO: 280258 - DNA, 315 bp, Glycine max
  unsure (1)..(315): unsure at all n locations
tcctaccccgcaagggcattggatagaanactccaagtagatagcgccacagatgcatgagaaggccctatggttcttatgagccttagggtatatatcgggcccatgggctaagtatgagcctacttatctgttgaaatattacattaacgcttcattattattgggcctgtgatttatggctccataatgtacgtagggtaccctagaaatatatgatttttcagcccttgtattttacggtacctatactagatcttgtattatgggtagttgtgtagatttacatgaactaagtggatattngatgtgtgt

SEQ ID NO: 280259 - DNA, 354 bp, Glycine max
  unsure (1)..(354): unsure at all n locations
tctagcttctatgagaaaaacttacttgagaagctagagcttagctacacacacccttctaataactaagagcacctccttgagaagctttcttgagaagattcctaacgaagctagagcttagctacaaatgggggaaaagaaagagggagagaaagagaaacgagggaggatgatattgaaggaagaagaaaggaagagaagttgaactttgagttgtgtctcacaagactctgattcatcaaagttacgacaagtggtacacgtgcttctatttatagactaggtagcttccttgagaagcttctttgagaanaacttncttgagaagctagagcttagctacgcacaccc

SEQ ID NO: 280260 - DNA, 503 bp, Glycine max
  unsure (1)..(503): unsure at all n locations
cctctctattggggaatcacaactgatggatatgtagcatttgttatgatttagttggtaaggttcctctctaagagcaaaattataatctaagcaagttcggttaggctctcaagtggttgacaagtctcgtttaagtggtctttttggccttggttaacaacaaaatcgagtgttaggtgcaaaaattggaaagctccactacacataatagcagtattatttatttcaatatttgtttttgcattcatggttagtttgcttattntgtctgtgtggctctcttcatttatgaactntgagacttatatgttatgatatatttcatctatttgatgcgatgaactatcangtggaagggtcagcagtccttgcaggcacagagtagaagatccatcttcaaatagagtaccgtgtgatgcattaatggagtaatgtgtttatgtgcttgtgacagtaagtcttgcatgcanggccatgtaaatacctttaatgataactat

SEQ ID NO: 280261 - DNA, 373 bp, Glycine max
tcaagcttgaggaactcatacaaacttgaggcaatttatacgcttaccatggctagcatgatcacacctatatatctataattacctatccccactaattacgtgaatctatctcttatcattgaaatctgaactaataaatttaaatcactttgtaggtatctataaatacaaacagttgcagctataccccctttacctctttctttcttcttataccctaagcactattcatggaccgtatctgctatattcagctactttcttattgctagagagaagctaatgcaatcctaccccgaaaagcattgatagaagactccaagaatattggactatagctgttgaaaaaagccctacggtcctcataacc

SEQ ID NO: 280262 - DNA, 458 bp, Glycine max
  unsure (1)..(458): unsure at all n locations
gctcgcccaggcgagcaaggttgcttcctccagaagaaactacctttctggaggaatctttggagggcccaagtggacctggttgctatttacacccccctttttactaaatgcacccncttatatattnttctgtaattctttntccgtaacgttacgaaactttacgaatttcgtaacgatacttattttcctttccgcaaggttacgaatccttacggatttatgtatttactctttntggctttcaaagaagttacggaaactcacggattgcgcataaacacctcttttcgatttccgccacattacggaatttcacggattacgcaagcctgcttccttttggatttctgagacgtctcgggacttcatttattgcatgtcatcaatttataatcctcggacgaaattaaggtatgacagttgcccctctttacttacctctcatcggagat

SEQ ID NO: 280263 - DNA, 174 bp, Glycine max
agcttctattgatgttccaagtgattcttctgctgcagtaattgatgactgaagagccttacctgagatgttgaacatataacaaatatattgcgatatattctacacacaagattgttgagacgatacatgattcagcaataggggaggacaggcgcccggcacccttgttcc

SEQ ID NO: 280264 - DNA, 357 bp, Glycine max
  unsure (1)..(357): unsure at all n locations
tagtgttggagacttagtttgtaatgttattctgcccatagatagtaaggatcgagccttgngcaaatggtccacacattgtgaaggaccgtttaaaataattcagatctattcgaatggtgcttatgagttagaggagctaacccctcagaaacgtactttgagcataaatggtaagtatctgaaaaaatataaaccaacactgctcgaagttaaaataagcatagaataagagaaatacgggaaacataaaaatggcgataacagtaaattgccacgaaagggcatgtgtcaatattacatcgaatagtataatcgaaatacagaattcgaaataaagaaatcataagttctact

SEQ ID NO: 280265 - DNA, 353 bp, Glycine max
tctatcttgaataaaaactgttcgagaaaatgtccaactaaaaagtgaaataaaggaagaaagagaacgatatgaggaaaacaagaaaaaagacaggagaagattgaggaagtgaaagacaaaaatgaaggagtgtagcggcctcgtaggaacatgactgataaagaagaaaggaggtggctctagcagtgcaaccagcgagcaagaggcaaaatggtgtcgtttgggtagagaaatgcggaagtgtgcggagagaggggttctagaagggtcaaggagatgcatacagtcctaacaacgtcactctcaaacgcagaagcataataaacaaaggttgtggaaatatcataaat

SEQ ID NO: 280266 - DNA, 404 bp, Glycine max
  unsure (1)..(404): unsure at all n locations
cgcgggtctgtgagacanaggtcaagtgttcgcgatatgcgatgatgatgttccgagtactntggatttggtacgaccatgccctcctgatttccagctgggaaattggcgagtggaggaacgccccggcatttacgcaacgagcataatgtaaacctttacggttntaaaagctctatagttgggcctaggctntagagttnttccttttgttaaggctttgtgtcttttgtttntgaatttataatacaaggatctttcttcatctgttcctggtctctacccattctcattcatttgcatgtttacttctttttctgaaacggcagatccgatgacgagtccnccgaaggtactaatacctgngacccgcctatcgacttcgagcaagaaatgaatcaaac

SEQ ID NO: 280267 - DNA, 385 bp, Glycine max
  unsure (1)..(385): unsure at all n locations
agcttgttcatagaagtaataactaaatgggaattgtagaaacacctaccaaacgctgtcaaccaattaaaaaaaaaattgtggacaaatatggaagccattattctgactagcttccagcttctaatgaaagaattgaaccgccgttcacaaaatcatcatcaactggaatgttgctgtatcctctacgcattattggtgggtttaagttttgcagatcctcctcaaatacccactgatatccacaactgcacacctccaagtgcaaaccttgagagttgtcgaccatggcatgcattntgatgccataaagatcaagcattntctctattttaagataggaaaaaaactctcccctagtcaaatagagtaaccacaagtgatg

SEQ ID NO: 280268 - DNA, 567 bp, Glycine max
  unsure (1)..(567): unsure at all n locations
cgggcttgatgaatcattgcaaggcgaactatgatactaagctagaaggaagcttaatggaggaagagaatgagagagcggcgttgtgggtggctgtggcancnccncgcgacncnngctggagggctacctctcttctgtcgcccccctgcccgtccncgcgctcntgttctcacgtgccttctggtttccttttgtccctctgcttttgtgaccctccttgtcttccgtcgttgtctcttccgttgtctcccttcctgcgcccctccctccatgtctcccttccttcntggtgtgtgcctctgcagccctcgattctttacactctctcatatagactacctaaacacatcttgtataacgctagtgtcacataccacaacactcacggttaatctcagtccccgaccgtcacatacttatcctattatgtaacacctctccacactcttaattgtggatggtaagcttctctgcgtaccaccattcctatacaatatccctcacttgcaagtctcttatgtttaatcgttcataacctattctcactacacatgaatcttaacg

SEQ ID NO: 280269 - DNA, 377 bp, Glycine max
  unsure (1)..(377): unsure at all n locations
agcttgccgcccagctcgcccaggcgagctcagctcgcccaggcgagcagggttgcttcctccagaagcaaccgccttctggaggaatcttctggagggcccaaatgggcctgggtgctatttgcacccccatttttactaagtacacccccctctgctgttttttggtgattcttttttcgtaaagttacggaaacttacgaatttcgtaacgatacttgttttctttccgtaatgttacggaaccttgcggattacataatcatcccctttttgacttacggaatgttacggaacctcacttaattatgcaacgatgcttccatttgatttccggtgtgtcacggaaacttacngattgtgcataatattttttt

SEQ ID NO: 280270 - DNA, 477 bp, Glycine max
  unsure (1)..(477): unsure at all n locations
tctagccaatggacatatctccncatcctctctaccagttttctatctatattntaagcacacatatatctcanaacatcattattgaaccctanatcaacatgggcagttntgcttacattaaacatgtcaagtttagcataattacaataatttccttcacaaacaactaccctaaagcaataacctagtagaactacccattatagctcccaagaacccaacacctgttggatcgagtggcctcaaaataattaagaagggggggttgaattaattattcctaaacctttactaattaaaaatttactcttttaaggcttttacttatgttgttaagggaataaggagtagaagagaaacttaacagaaagtaaaagcgggaattaaatgcatagcgganagtaaaatattaaggaagaagganacaaacacacaagaagttttaatactggttcggaacaacccgtgcctaca

SEQ ID NO: 280271 - DNA, 363 bp, Glycine max
agcttatataatcgatcttagcatctaataaattggcatccttcaaccatacattcggtaaggagtgttctattttcttcaactcggattcaattggatcttctaaagccacactttcttcttttttagagcatggtctattttctaacatcctttttttgccttctcttgcatctatcatttcaactagagtacggttggccgaataaaccaaaatggctgatttttctgttggggctggtggatactttctgaaagcttggtccaatgcaaggactacttgacttaccaatgtcttgccttgccccctagctttcagatatgcaatcatggctagggtctacttcattttggtcatagcct

SEQ ID NO: 280272 - DNA, 326 bp, Glycine max
gacattcatatatcaagtatcataatattatcataaaacataagaacataaaatatcattattataattcaagtcatttaaacacatgcataataattaatctacacacacacacagttagacaaagtacataaattctctgtaaacatacagtatttgacaatttaaaatgtaatattagaataacattatccaaagtaagcaattcttaaaaaaattatcatgtctttataatctccactaactttaatagtaactttaatagatgaaatgtagctgtattagcagatggataatcatgcatattaatgacttgaatagggata

SEQ ID NO: 280273 - DNA, 384 bp, Glycine max
agcttgcatatagacgttgcaacttgcaagctctcacatcaccttctcaactcacaaaacgttatcacattaaccacagcatcgcatgccatcaccatattttctagtttgtgtctctaattctgctcttccatattggcctttgtcatttcaacgcctctctctctctctgatcagcttatgtttatgtttatgtgttctgcccaatttttgttctgctcgtggcatactaattttggacctcattagttaggctcatgaaaaaagcaagctacatgttatttccacctaacatttttgctgtttccaccccaaattttctttgtaatccttgcttctagatacagaacttatatattgcaaggcgcacacccaaaaccttat

SEQ ID NO: 280274 - DNA, 436 bp, Glycine max
  unsure (1)..(436): unsure at all n locations
gtcttgtctatctgctctctctnggtctcttgaatacacttcttgtcaacttgatgttntaataccaatcttctaactgctgaccacttcactcctctccccagccctctgatgttatatgagataatattcatgatgagatgtttctctttcccaatgcttcagcttcctttctatctctgatctccattgttgtgattntgtcgatgattgttgattgctcttcccctgatgtcatccccaggattntagccatttcccattgagcgctggcctcttctctaatgtaattattacatggaatcttggtttgagatgcccttgactnttctgattcagtttcgggctcccttgngcctgagtctggtggagcgtgttgtccatcattccccntgtttgctgcttccatttcctttatagcctgagtcaacttatg

SEQ ID NO: 280275 - DNA, 360 bp, Glycine max
ttatcttggctgttacaaaatcagagacatgagtcatactccaaatctaaaagaacattctatcttgatatatctcgatgaacaattgcgagtgaacagacgtgatgcataaaaaaaaattaaaccacaataaaagtttataacacaataaaaaaatacatatttcaattttttcaatgtcatccatgagctcttcaatatcacgtgtccatggagaggatcaacaccaattgtgtataaaccaatgcttcaattgtcttttgaggagagagctttcataacaattaagcactttacctcatgtcctataaggagactctgacagacccacaatcacaacatataatgatgatcgaaaca

SEQ ID NO: 280276 - DNA, 362 bp, Glycine max
  unsure (1)..(362): unsure at all n locations
gatcctgctattctctctatctacggttatgcgtganatttccatactacgtcaaagtcatggccaaaagatcgacgtttggctcaacaagcctgccaatggcgggacatggtgtatgtcgggatatctgtttagcaaatggctcagaaataagggaatgcccaaatcatttccatgacacacatatcatgataattagaaattcatgcataattaatcatagcacatatccatgtggacactcaaatataaggctttgtggccatgcaaacactaaccatgtgtttggatgaggaatttacaaattgctaggaagatcatatacacaacattgtgattgccttgacttaaattcctttcat

SEQ ID NO: 280277 - DNA, 377 bp, Glycine max
agcttaacatatttagaaatcaagtgatcatgtattccgaaatatatggggagtaaacggatgcacattttatctatatacaattgttcgttgcttgctcgaatcttgatttcaggtattgtattgtcatcatcaaaaagggggagattgtacatgcaatcggctttgatgttttgatgatgatcatgatgatgtgctgcaaatgggcttttcaagattaaaattcaagacaatacttcaagattacaagtcacaacattaagatgatcactagaatattaggaagggaattcctaattgaattagcaaaggttcggccaagtgatttaaaataaaaagtgtttcttaaagggtttactctctggtaatcgattacc

SEQ ID NO: 280278 - DNA, 480 bp, Glycine max
  unsure (1)..(480): unsure at all n locations
gtggtaatcagagcacaagagcttcaagtatgtgctccttatactctccattaatttntgctttaccttctcttccattagttagttcttcatttttctccatgtatctcctcacatgtcttgtgataaatgtttntaacatgattgtttagagtttccaccgattaaacttgctatagaagctagatttgattntatatggttcanatttcttgttcttgttcttgaaccatgaattgtgttgagtttaagttcctttgagttntgtcttggttatttttttggctganacctannaccatagaattcttaaaaaatattaaagtagaagaaaacctcanaaatctagagtgacttgttcacctattgtagttntgtcatagaagtcatgtctagtcatgaaacttgtcacataagatttcttatgttgtgcctgaattttttttcttggttctttgtctaactcatttgntcatgagt

SEQ ID NO: 280279 - DNA, 398 bp, Glycine max
  unsure (1)..(398): unsure at all n locations
agctttgagaaaattcaaacgacaataactttttactcggatgtctgattgagtcccgaaatatatcgagacgctcgaaattgaataccgaagcgctaagcaaattcaaacgacaaaaactttttactcggatgtctgattgagtcccgtaatatatcgaaaagctcgaatgtgaatgtagaagctctgagcaaattcaaacaacaataactttttactcggatgtctgattgagtcccgtaatatatcgagatgctcgaaatggaataccgaagctctgagcaaattcaaacgataataactttntactcggatgtccgattgagtcccgtaatatatcggaacgctcgaaattgaatgtagaagctctgagcaaattcaacgacaataacttttac

SEQ ID NO: 280280 - DNA, 388 bp, Glycine max
  unsure (1)..(388): unsure at all n locations
gagaataacaacacaaacaccattcaagtatgaaaacgttactgatattccttgggcagtggattggaggcagaaaggtgatgttacttcaatcaaggagtaccatcatcagtgctaccatgaccaataacagtaacaccatggtctagttgactcccacattgtccagtgcanaaaccccacttgagaagaattggaaagaagatccgccggcatcaatggtaatcgacactggttggtttgcaacagtaacaccaactgtctggatgattgatatatgtagctgagtatgtgtatctaaagcttacacatatatgttagaatatctgattcccataagacatatttgattatcatcctatatagatggttaatgttattctatcac

SEQ ID NO: 280281 - DNA, 390 bp, Glycine max
agcttcgtgggaaaccagtgcatggaggggaaggttggatagtgaagttgatctgtgggattcacaatcatgaattggccaagtccttagttggacatccatacggtgggcgattgactaaggatgaaaagaaaattattgctgatatgacaaagtcgatggtgaaaccaaaaaacatcttgctaacgttgaaggaacataatgccaacagttgcaccacgataaagcaaatttacaatgcaagaagtgcatatcgttcttcaataagaggagctgataccgaaatacaacatctgatgaagcttcttgaacatgatcaatacattcattggcatagattgaaagatgaagttgtggcgcgtgatctgttttggtgtcacccagatgctg

SEQ ID NO: 280282 - DNA, 492 bp, Glycine max
  unsure (1)..(492): unsure at all n locations
gctttcatatattacgggactcaatcggacttcctattaanaagttattgtagtttgaatgtgctcagggcttcggtattccatttcgagcgtctcgatatattacgggactcaatcggacatccgagtaaaaagttattgttgtttgaatgtgctcagagcttcggtattccatttcgagcatctcgatatattacgggactcaatcagacatccgagtaaaaagttattgtagtttgaatttgctcacagcttcggcattccatttcgagcgtctcgatgtattacgggactcaatcagacatccgagtaanaagttattgtcgtttgaatttgctcagagcttctacattcaattgcgagctnttcgatatattacgggactcaatcagacatccgagtaanaaagtatgggtcgttgcaattgctcagagcttcagtattccatttagagcgtctcgatatattacaggactcantcagacatccgag

SEQ ID NO: 280283 - DNA, 367 bp, Glycine max
  unsure (1)..(367): unsure at all n locations
agtttatgtcccaagctattcaaagtcttgactagcaaatttatttgtctaaattattgggatatgattatgttatacagtacaagtcaagatctcataatatcgtggctgatgcattatcccgaattgcggcaccggatgaagcacagttttactccctatcagtgcctatgtttgtcttcttggatcaattccgggatactctnttaaaagacacccaatacacaacactattggatgaggttcgtcaaaatcccgccaaacatcctgaactcaaggtttatcacgagcttctctttcgaaatggaaggatatggttgtcgttcgcaacacattttgctagcttactattgcaggaagttcactc

SEQ ID NO: 280284 - DNA, 488 bp, Glycine max
  unsure (1)..(488): unsure at all n locations
ctacaaccttttcttcccctttggcaacatcttagagtcaatgttctcgganatcaacacagttataacaatggagtagcaagatataagtatcagagtattaaatccaataagccaaactcataatcaagaaaataatcaaaccagaattcaaataacatacaatgtcaacaaccacaaaatatccaagactgaaacacaagagaaataagcaaagtacttagcataataatgtaaattctaagaaactaaaagccaaaatacacggcttataaaagataaataagcagaatctaaaatctaagaagacggaggaggtggtggaagatcaaaactctgacgaatgtatccgacatcctcttcaagctgtgtaagacgaatgtccataccggcaaagcgtgaatctaacgagtcanagcggtcaccaacatacgaacgaagacnccgtaattcggagaggacttcattcatgagtgcggaatcttcac

SEQ ID NO: 280285 - DNA, 294 bp, Glycine max
agtttctaatcagttgttgcttttgaatggacgattgttgctgttgatgaatattgttagtttggacaactctctggggattcagaagttgggtgtgagcttgatcgtgtggtaaagtttgatttgtcaagttccttggttggtgagtgatatcacccaactgctgcagcggctgtgtgactgctcccaatgcactggatgggcatggtggcttctgaatgtgatcgagttgctgggaagtctgaagtatattctgagcttcgacagatacattgtttgattgagagatttgtg

SEQ ID NO: 280286 - DNA, 415 bp, Glycine max
  unsure (1)..(415): unsure at all n locations
gctcgcccaggcgagcagggttgcttcctccagtagcaactgcctttctggaggaatcttctggagggcccaagtgggcctggttgctatttgcacccccattnttactaagtacaccccctgctttntttggtgattctttnttcgtaaagttacggaaacttacgaatttcgtaacgatacttgttttctttccgtaatgttacagaaccttgcggattacataatcatcccttgtttgacttacggaatgttacggaacctcactaattgtgcaacgatgcttccatttgatttccggtgtgtcacggaaccttatggattgtgcatcaatattctctttagttctccggcatgtnccggaatttcacaaattgcctaatgatgggtgccaagtacctcacaaggaccaaac

SEQ ID NO: 280287 - DNA, 375 bp, Glycine max
  unsure (1)..(375): unsure at all n locations
agtttctatataagctgaaccattttatcaataaacacaagttgagttttattcagaaaattagagtttatctcttttatcttagtgagagtgattctcctaaattcttgagtgattcaagaacaccctggctgtatcaaaggactttcacaacctttgtgtgttgccctcgctggaaagagtgattctttccttcctatcatctccacccttgttctttcaaaccataattccagaaaatccacctctgcccaaaattatcttgtgaccataactcccattttgcacactcaaattaagtgattcttgagcctaaattaaatttcaaaacgagacctttcacctcgttgtggaatcacctcattnggagccctg

SEQ ID NO: 280288 - DNA, 351 bp, Glycine max
ctggagctcatataccctcttgttcttgttctgatacgtataatatttcaaaaaattgctgtctggttttctgcttgcatatcctgtgtttaactggcatgttcttttcttctgtaactgcaaaaacatatttacttgttgagtggcttctaactttaataatctataacaattcttaattatacgaatgacgcccattgctgattgcatgaacaaatgaattgcaatccttccaatcctttgaatcacttctcatgctatcatgcatgaggaatatagtgctatcttattcatatgccgacatatataaattcttgacccagtcgagcatgatattaacttactatctat

SEQ ID NO: 280289 - DNA, 274 bp, Glycine max
  unsure (1)..(274): unsure at all n locations
tcaagttttacatatatgagaaaacctaggcttgtatccgtttagaattattactttcaagactaatggaggctcataatagaatcaggaccaatctaagttattaatacattctgcgtgaactaacttaggatacaaagtgggtttttacaaactaaatatatatacattagaagcgaaagaactaatcttataccatatttgttctttataaattaaattgcactagtagatcgttactatttaaaatcngaaggcctacttctaactaatt

SEQ ID NO: 280290 - DNA, 491 bp, Glycine max
  unsure (1)..(491): unsure at all n locations
gcttgagntctctccacaccattttttttatttaattcttttatattaacacttgatgtanatcacacagctcagctagttgtataggaatactctntcaagacaataatagtttatctacttgatcattccagaattttcaataatgttcaaaattcaatggccaattgatggttctatccgaatattctaccccgaattctaagtttaagccgtctaaatttcaaagggaatctaaatcttccacatctccacaaaccangatcctgcaatctcctanaggactctgtcctagtcaacttgcgcttgccactgttatcatttctataatgagagccagaatctccttccacgtaactacccttngaggctaactcactntctctctcggntccagcanaagggatggatccaatttgcttgatcatggcccaaggatcctggaattcatgctcagaatcactnntccacanagatatggacttgataat

SEQ ID NO: 280291 - DNA, 204 bp, Glycine max
caccaccattcacgaatgtacatcctatggtacttcttctgtccaaaacatctccacaccaattggagtcggaataagccacaagatgtggtctacccttctgatcgtgatgtaagaatacaacgcccatattcactgtacctccaagatatctcacacatctcttagtgtgctaccatgtgagagtgcctaggatcactcatg

SEQ ID NO: 280292 - DNA, 329 bp, Glycine max
agcttgtcttttcgtttatgcgagacagagaccaacatgctagctatcatcgccaagtaccaagaagagttaggtctagccacggcccacgagcgtagggtcgcggacgagtatgcccaagtatacgcggaataagaggctagaggaagggtgatcgactctttacaccaagaggcaaccatgtggatggatcggtttgctcttaccttgaacgggagtcaagaacttccccgattgttagccaaggccaaggcgatggcggacacctactccgcccccgaagatattcatgggcttctaggctattgtcaacatatgatagacttaat

SEQ ID NO: 280293 - DNA, 519 bp, Glycine max
  unsure (1)..(519): unsure at all n locations
gctatctatgcttttacctcaaattttattttggtgaatttatctatcaaagcattcaccctcaacatttaagagacttgtgagttntaccttctatcaatttacacataacataatttcactttntaaccccaattntttttttggcaaattttaccctgatcttttgttcttactaatggataatgataggaataaagtaagcaagttttcttaaaagtcaagagtaaaatgtgtcaaattaattntttgaaaataaaattcgccacaaaaaattgcgggtaaaaagtgtaattaagccaaattaactactattttcatcttactttttctttgtctttctaaaacaatatatgacaactattattgtgaaacggagggagtaacattatccattcttactaganaannaatattcattcctttgtatattacaagaaatagctatgataaccgaagaaatatgagttntgcttaccatggtattgatatgaagtatctatcacacaagatcatgac

SEQ ID NO: 280294 - DNA, 383 bp, Glycine max
agtttggatcctcttaacaacttcaccaatcagctttctaaaaatcaaccagttaaagttcacaggtgctataaatctgagtgacaaaaatgtatggtatttgtcaaatagtccctttatttgtcggacatttaaaaaaaaaaaaaaccaacccaaagcttatacacaactgactcaaggtaaattaaagaagctgcatagagatttactagaagaaatcaggatacaaacaagcacatttgtgttcatctccggcatgtgctgtataagatattcggttacagaagcctgttgcagaaaccccatacgaaaattttaatgataaaacattatatacattaaatggggatgtattcaataggagtgcaagcaggataaccctt

SEQ ID NO: 280295 - DNA, 484 bp, Glycine max
  unsure (1)..(484): unsure at all n locations
atggtatggtatagagaataaaattattatgttgtccctttgttnttcttcttcatcatttctcaattaattntcttccttaacgcatttgcatatgcaggttgagaaccatgaaattgacacacaactgatggngaaggtgaagcagttgatcaatgcatactatgaggaaaacctgaaggaaagcttctaccagtctgagatagccaagaggttggagaaacagcagaacacctctgatatagattgggaaagtaccttcttcatttggcatcgccccacctctaacatcaatgaaatttcaaacatctctcangagctntggtaagtcaatccatatatgttcctttntctttntttttacctacatgtattctcctttagagataattntgattgagacacagttaaacactanatgtgaatatttctccanacatanattcanactttgattaccatgtggtggaaactaacccttatg

SEQ ID NO: 280296 - DNA, 374 bp, Glycine max
  unsure (1)..(374): unsure at all n locations
atcttgttatacttgnatattatatgtgtgtgtgtgtgcgcgtgcgtgcatactttcgtttatctctacttatttagaaatgtgataactcactccatgtgtgttatttgtgtttagatcctgtgatgatatcgaattttatgttcgtgggagcagatgattaggtggatgattttaaataacctcgtgctagaggacgctgggatacaacactctgatggatgtgacattgacgtatgaatttctatattatttgtataatattctgaacatgttattttatgttgctccgctgtttaactagttttttgtttttaaaaaaaaatagacgactttgtttgcggctagagacgtttcatactcttataagtttt

SEQ ID NO: 280297 - DNA, 438 bp, Glycine max
  unsure (1)..(438): unsure at all n locations
accccttgaactacttcacattgatttatttggtccctcaagaactatgcgtttatgtggaaattactatggcttagtaatagtagatgattactcaaatttcttggactttgtttttgaaaaccaaaaatgaagcttttgatgattttcacaaacttgccaaggtgattcaaaatgaaaaaggtctcaacattgtttcaattagaagtgatcatggaggtgaatttcaaaatgacttttatgaanaatatgaaattcaccataatttttctgccccaagaacatctcangagactggtgttgtggagaggaaaaatagatccattgaataatgtgcaagagaccttctatatgaaacaagggtacctaagtactatatagaagaatgtatacatacgtatttgttcaccttgaacagagtacttattagacctatct

SEQ ID NO: 280298 - DNA, 397 bp, Glycine max
tctagcttataagaacaaaatcgcctcaatcattgtcaaatatgcatgtgaattaggacgcatcaacaagaatcaagccaaggctattgtgcaagcaatcaatggggcaaaacacaccaaatgattatgatgatggatggctcaaattctcacaaaggtaaactcatcactttcaaattgagctttcaaaactatcatgacatgtagaggagaatcaaggatttcaagtcacaaaatgtcaaaaatttttattgtcaaaacaattacccatttcttgaacatatcctataattcagagaaaaatatgcaaaggtcgtacatgcacacaaaattggacccaaacattaaactaacaatccgacaacattaacaaattaacaaaaccaacataactagc

SEQ ID NO: 280299 - DNA, 430 bp, Glycine max
  unsure (1)..(430): unsure at all n locations
ctaagttctttaacaagctntgaacaatatacttgcccttcatttaactgtctttgngcttggcggccacgctcaacanagtatttntgaaacctactgtacgttgatttgaccaacgctgttatgggaatgttgcgacaatccttcanaaccttattgatacattctgagaggttggttgtcatgtggccatatcgacgtccttctctatcataagccatcgttcatttttcttttgaaatgcgatcaatccatgttgctatggctggactcaattcacgaaattnttctaaattntgataaaaaaatgtgcttgcaaggagtgtangctgcataaaattagttatgaataacaatcttaagtacatatganagttaaataaacgtcaaccatcaaatatgaaatcttacccaatntcttcaacatttc

SEQ ID NO: 280300 - DNA, 274 bp, Glycine max
agctttgagttaattcttacgacgataactttgtactcggatgtctgactgaaaccagtgatatatcgagtcgctcgaaactgaataccgaagcgctgaccaaattcagacgaccataactttctactgggatgttcgattgagtcccggaatatatgcaccagctcgaagaagaatgacgaagctcggagcgaattcggacgacctaaacttgttactcggatgtcggactgaatcccacaatatatcgggaggctcgaatgtgattgttgaa

SEQ ID NO: 280301 - DNA, 397 bp, Glycine max
  unsure (1)..(397): unsure at all n locations
agtaatagnctgcatctagaagaagatagtaaacttgatacagggtaaatagataatgttcaaatgaagtaacggattttattacaaattcgtatgaatgaattgccaacaaagtattcaatatttctgccaatgtattgtcttgtaacttgtaaggttataagaacttaaaggcccctcaatatcaaaataacagaagaatcatcttgcactggccttanattattctgggaatttgtagcacanaatgttttcaacctctccgtctgtgttggctgataatcagcagttgtttggactctggtcatcaattgatttgctgttttcttcactctcttcctttcttgtactgtaattaatgtgtacaatttgcagcttcaaggaacacaatgatggt

SEQ ID NO: 280302 - DNA, 143 bp, Glycine max
agcttattttttctatacactaaccatagaccttcattcatacctttccgagtgagtgataatgctacacgaaaaattacggcacttacgatatcttaatccttagatgaaagcgtaagagactatcatagctaattactaaa

SEQ ID NO: 280303 - DNA, 344 bp, Glycine max
  unsure (1)..(344): unsure at all n locations
aacatgctaactntcacgtgtggcaccgtaaccgaggagatctccctgtgtcagacaggtgtccaattccaaacatgctgaagatcaacttatacacatatattatgatagctctttactctaacttctctaaaatctgaaatacatgagttgattctgattcatgggagaactacaacacactctagctgctatgtgtgtgttcttataggaagagtttacaaagaaggtcgcaatgcacacacgcgagctattcttaaggtacgtgatgatcttactaagagtgatactagttatggaacacacagatgccacccgctcgtcagacacactatcaagtaact

SEQ ID NO: 280304 - DNA, 110 bp, Glycine max
cagtacattatccaaagctaaaggcacctaactatgcacacaaatggatgatcacaccaacagcatacggacattaatcattgaatgaagcatagaacacacatcacata

SEQ ID NO: 280305 - DNA, 385 bp, Glycine max
agtttgcccagagaaggagtccacggaggaaatgcttaccacctcaaaagactggaaagcggtttctaatgactcctctgcggcttccacataaggcatagaggatgggcagctcaccaagatgtcttcctcgcctgatacgatgaccagatgcccttccactacgaatttcaacttttggtggagtgttgagggaacaactcctactgagtggatccacgggcgccccaacagacagctgtagggggggttaatatccattatttggaaggtaacttgacaggtgtgagggcctatctgtactgggagatcgatctctcccctaacctctcggcgggtgccgtcgaaggcacgaactgttagacaagtggcctcagatatctta

SEQ ID NO: 280306 - DNA, 417 bp, Glycine max
  unsure (1)..(417): unsure at all n locations
gcttctacattcaatntcgagctnttcgaatattacgggactcaatcggtcttctctattatttagttatcgtagtttgaatttgctcagggcttcggtattccatttcgagcgtctcgatatattacgggactcaatcggacatcagagtaaaaagttattgttgtttgaatttgctcagagcttctgtattccatttcgagcatctcgatatattacgggactcaatcagacatcggagtaaaaagttattgtagtttcaatatgctcagggcttcggtattccatttcgagcgtctcgatgtattacgggactcaatcacacatccgagtaaaaaggtattgtcgtttgaagttgctcagagcttctacattcaatttcgagctgttcgatatattacgggactcaatcagaca

SEQ ID NO: 280307 - DNA, 341 bp, Glycine max
agcttctagattagtgtaccaaatgaccgcggctccagccaagctatcttggaaaaagtgcattaacaacttttcatccctagaatacgcccccatcttgcgacaatacatattgagatggttcttaggacaagtcatccctttgtacttgtcgaaatcaggtaccttgaattttggggggatgacgatgtccggtaccaggcaaagatccgccatgtccgtgaacagatagtcgccatagccttcaacaactctcaatcactcctcgatgagatcgaggttccttctttcttccactgccaggggtgagccctctgtggacaaaaatattggccatgctg

SEQ ID NO: 280308 - DNA, 522 bp, Glycine max
  unsure (1)..(522): unsure at all n locations
tagcgtgcaccctcactaagcgcgaagactcangcttagcgtgaagaatgtccattangaagcccanaggcgtgcttagcacgaagttagcgtgaaaagtaagctactctaggcctataaaaggaataagaagcaaaaggagaagataccactctggagactcagggttctctaatgaatacatactaagtctgagcatctctaataggggaaatcctctatatatgtccattggccccttctcctcctatatccatcccgcttcttctatccacattagcccctaaattgtaaagcctctcatgacaatgagaggctaaacccctttagttagggactgacaggtctaaaaagtcacaagatgtattatatgtttcatatctatcaatgcaaacatgtgtattctttcctattatccttccttattctaattacatgtatcattcatccttgcattatctntaggagttaggtgctcgaaagaagataatcattagtagaaatacaaggaagggcttatat

SEQ ID NO: 280309 - DNA, 386 bp, Glycine max
  unsure (1)..(386): unsure at all n locations
agcttcgacttttactcgaaggtatctccttgtcttgtttaattttcgttttccgctagttgcagcatcttctggattggaaatatcgcttgttgcgtattctctttcaccgaacatgaaacattaactggtatagattaactattttgcatcttattatgctttgcttgcgccattgttgttaaaactccaatcatattgtttaaactttgaagacttattanggattaaagattgactatgaatttgggccaataattgtttcaaagaattactgagtgtcaaagtttaactgtagggtcaaaagttttagtatgactccctgatgctttgtgattgaatctggaaaactgatagcttaacagtacttctaaatttatacatca

SEQ ID NO: 280310 - DNA, 333 bp, Glycine max
  unsure (1)..(333): unsure at all n locations
tgtccacatatactntgttgcaacctacccttcggcgtgtatgtttacgcgagggctcacaggtgcgtcttccatgacaggaanatgtgtggagttgccaccaacgtttattcgaggaaaacgtcggagaaactggaaaaggcatggtctacgaactttaagtttgaaaggttcgggagttgtatttacgcacgaggaagatattagcaccccacgcgtccgtcacagagtacggcagcctttaatcaagtgtgcaaatatgacttcaatttgttatatcttcccttntttacgctntgtatgtctatgtatgccttttatattctttatctt

SEQ ID NO: 280311 - DNA, 394 bp, Glycine max
  unsure (1)..(394): unsure at all n locations
agcttttgttcctttntataaaaagagaagttctgaaactcatcacgttgtctaaaaaggccttgaggtggatccaagtgctataatcattcattagcatattcatgttttggtggcatactcaccactgtttgtttctttagggaactcaccataactaaaaaagcgcaaaggcacccctataacacccctatcggccttaaaagatcaaatggcttctatcacagaggccatgctaaagattcaataaactatagaagataatgctacagcggtcgcttccaatacggctagggaagcagaatcggtgctacaacccgcaataaacttgggccgagatgganacgcgacgggtttcaatcggaggtataatcctcaagctacccttatggtt

SEQ ID NO: 280312 - DNA, 390 bp, Glycine max
  unsure (1)..(390): unsure at all n locations
cttcctggctttattgttgactatagagtggtacctggagatatgtcgcggtggtcaggagaaccttgggacgtcaggtggngtgctattgcccanaaccaagcttgaccaatcccgacccaacccgggcatagtcggtcagtgagaacctgtgatgtacctaagcaggcgagctcctggcagtcaacagataaaaggaaaacaagaccacaaagcaaggaggcttgtggtggctggccagctgtgaaaattgattgatatgtgagatatggtctctggtaatcgattaccaagggtgggtaatcgattacaaggcttanaaatgaagacagggagctaagatggtctctggtaatcgattaccaggggatgtaatcgattaccaggctt

SEQ ID NO: 280313 - DNA, 391 bp, Glycine max
  unsure (1)..(391): unsure at all n locations
agcttgaataagcgatctaagtatttaataatatttagaatatgttttgaattccatctattaattaatagtaataatgttgaagtttaaatctgtatacgttataagttaattaaaccccattatcattattgcaacgaaaaagcattaattaaatgcatttattaggcttaaacattaaatgttgtaattactaaaaaaactaagtatttgttaaatggttttcatattgtcaaagggatttaacttaggttaggttaagcgaacgaattattgtaaatttttttatctttaattcctaagaacaaaanaattaattttatattntaaaattntattattatcataacattgatgggaaactaatacattacttagacattntttatta

SEQ ID NO: 280314 - DNA, 364 bp, Glycine max
  unsure (1)..(364): unsure at all n locations
cttcctgctnttactcgttgattacagagtggtacctggagatatgtncgcggggtcaggagaaccttgggacgtcaggtggngtgctattgcccanaaccaagcttgaccaatcccgacccaacccgggcatagtcagtcagtgagaacctgtgatgtacctaaacaggcgagctcctggcagtcaacagataaaaggaacaaagaccacaaagcaaggaggcttgtggtggctggcccagctatgaatttgtgtgatatatgggttgtggcctctggtaatcgattaccaagggtgggtaatcgattacaaggcttanaaatgaagacaggaggctaagatggtctctggtaatcgattacc

SEQ ID NO: 280315 - DNA, 345 bp, Glycine max
agcttccactatatccaagaaattcaatttccaaacatcatgaactaccctaaaccaagaaaacagggcagaggcagaaaactctgcccaaaacatattcacatattacagctttccttactcaaatactccagtaacattctcttcattccgatttgttaaccgtaggatcgacttgaaaattttactggagggtcctagtacataaatctacattatgaccgttgggatctgctagaaaatatccagaacccaatatgtactacctttcccataaccaacaatgcacaagcattttctacacatgaacaaaaattctgctgcacaaatttgacagcaattttc

SEQ ID NO: 280316 - DNA, 415 bp, Glycine max
  unsure (1)..(415): unsure at all n locations
ntgcagaattggtcttcgccagtgaaaggatcaatgtgggttctatanattggcatnattgatcatcctactangacgaccgaganaatctgggcaaataaagagggtgaggatgagggagaaacccatgctgtgactgccattcctgtacggccaaatttcccaccaacccaacaatatctttactcagccaataacaaactttctccttacccaccacccagttatccacaaaggccatccctaaatctaccacaaagtctgtctaccgcacttccaatgacgaacaccacctttagcacaaaccanaaacaccaaccaagaaagtgaatttgcagcananagcctgtanggttcaccccanattccgttgtcatatgctaaacttgatcccatatctacttgataattcaat

SEQ ID NO: 280317 - DNA, 385 bp, Glycine max
agtttaattggttcaggccggtttggacaagtctacgaaggaatgctacaagataatacaagagtagctgtgaaggtgatggatacaacgcatggtgagatttcaaggagctttagaagggaatatcaaattctgaaaaagattaggcacagaaatttaataaggatcatcacaatttgctgtaggccagaatttaatgcccttgtttttcccttgatgccaaatggtagccttgagaagtacctatatccaagccaaaggttggatgtggctcaattggtaagaatctgcagtgatgtagccgatggaatgtcctatctgcaccattactctccagtgaaagtagtgcattgagatcttaagccaagcaatatactccttgatg

SEQ ID NO: 280318 - DNA, 326 bp, Glycine max
  unsure (1)..(326): unsure at all n locations
gctactccgcacaatggtgacctcttgggaatgaagcaacaattcctccttctgatgtctcatggacacttatccttgatccaagtacactccatgcgaaaggtcggccaaaatcaacaaggataagcaatgagatggatnggctcanacattctgagcaccgacaaaattatagtagatgtggaacagaaggacacaacaggcgtcgatgtccaatgcaatctgaacgtggaagttgtaaattaatagattatgtattaagttgcgtcttcaatgcatcgtagtatccatgatcagtntgttttaaaattatttattaatatatt

SEQ ID NO: 280319 - DNA, 379 bp, Glycine max
  unsure (1)..(379): unsure at all n locations
agttttatatactttccatttttatataataggactatgaaagttttacctgaaatgttgaacatataacaaaaatattgggatatattttacacaaatcatgttggccaagcttcatgcgtatgttttgtactattaagtcaatggcaacatcattatctcctccactcgggatgataatatcagcatactttttagttggcaatacaaaatcttcaaaacttggctttacaaatctggaatactgaacaatcattntgtatttagtcaaggaggactttaaacatttttaaacaaaaacaactttgaataagttatatgctgaaaagaaaagctacaagaatcaataaaaaaatgttcaactaggggattgttagta

SEQ ID NO: 280320 - DNA, 408 bp, Glycine max
  unsure (1)..(408): unsure at all n locations
tacccatcacatgtggtactaggtggctgtcgtgtgatggtgcacnaacaagttttccacatccacaaagcgcgcataaacccaccatccnctgttgcccacctccaactgagctcacgtactcccacgtagcccatatcttcgtttctctcaacaccgggtccccatcaatcctcccaagctttcctcaacatccaggtaaaacaacattcaaaccgcacaaactatcacagccaagaaaacagggtaaaggcagaaaactctgcccaaaacaccaaccaaaatcacagctnttctcacttatagaccccagtaacaattccttcgttcccgttcgttaactggtggattgactcgaanatttactggaagtcttagacataacctacattttgaccgtggatctgt

SEQ ID NO: 280321 - DNA, 399 bp, Glycine max
  unsure (1)..(399): unsure at all n locations
tcaagctttcataagtgaaattaggtgcaaccatctccctatgagtcctctcacgaggtggagattgagccatgttctcagtatgaaaattagcagtcaaatgctcaaaatcataatgttcataatcaccagcaacagaatgctcagaatacacgaaatgctcagaatgctcaaaatgcacagaatgatcaagatgtacactatgcctaactaatctatgaaaggttctatcaatttcaggatcaaagggttgtaaatcacctagatttcccctagtcatgcactatatgcagcaaatcatgtatttctcanacaagcactaagggtaaaattaggggtaaaactaaaactatactcaaacgatatccanatgagctgantatttgtgagcaacacctt

SEQ ID NO: 280322 - DNA, 228 bp, Glycine max
gtcaacagaatcgtgcttcaaaagacgaataactcacaaggatcagatgtagttcagcagtttctaattagggaaatctattttctttttaactatataactcttatgttccaataagacaagatactatacattgtcaacacacacgaatttccatagcttcagctgtgtagtgaactataccagcgagcccgcactctgcaggacagcagaaacacaacatgaccc

SEQ ID NO: 280323 - DNA, 374 bp, Glycine max
agcttctaatctttatacaagaatgaagctctgataccacttgttagacaagtggcctcagatatcttaagaaggggggttgaattaagatattccaaactactttcccaattaaaaaaaactatttcactttttattcaagttatgaattcccttaatgacaatcttcttaaatattgattcaaataaaacaatttgaatatgaatataaagaaataataaataaaggagattaagggaagagaaagtgcaaactcagatttatactggttcggccacacccttgtgcctacgtccagtccccaagcaacccgcttgagagttccactatcttggaaattccttttacaagttctaaacacacaaggacaatc

SEQ ID NO: 280324 - DNA, 342 bp, Glycine max
  unsure (1)..(342): unsure at all n locations
tagtcccgctgtcaagatgatcattnggagtccttctgtctcttgctttcacattcaatcggcatttccaccaattaaatgtcaatacaactttccttcatggngatcctcacacagaattatacatgccacctnctctangctttagagacattngatccgaggctagtgtccaaactgcagaaatccctttatgggttaaagcaggctagttgtcaatggaatgacaagctatcctagtctctcattggttctagttattcctagttcaagacagattatntcccattcactaagttgaaactctaaagggtcgagcttcgctgcaattctttactatgt

SEQ ID NO: 280325 - DNA, 298 bp, Glycine max
agcttgccattcagctcgcccaggcgagcagggttgcttcctccagaagcaacagccttctggaggaatcttctgtagggcccaagtgggcctagttgctatttgcacccccatttttactaagtacaccccctgccttttttttggtgattctttttcgtaaagttacggaaacttacaaatttcgtaacgatacttgttttctttccgtaatgttacggaaccttgcggattacataatcatcccctttttgacttacggaatgttacggaacctcactaaatgtgcaatgatgct

SEQ ID NO: 280326 - DNA, 468 bp, Glycine max
  unsure (1)..(468): unsure at all n locations
cttcatggactatcaatatcagatcacgttcttcttgaattataaataactggcagattattggtttgaagtcaaaagaatcttgcttcanaagacgaaaaactcanaaggatcagatgtagttcagcagtttctaattagggaaatctattttttttttaaatatataacttttttgttcgaataaaacaagagaatatacattntcaacaaaaatgaatttccatagcttcagctntgtagtaaactagagcagtgagcccgcactctgcaggacagcagaaacaaaacatgacccattttctttgaaatgcanaaagaaaaaaaaatgcaacagttnttggcacatgtaacctttgagctntgaccggagaaattacttaatagaccctatnntttgcttgtgtcaccccatanaataatgagcaagaatggattatgtcccttggtagtatttactccaccata

SEQ ID NO: 280327 - DNA, 414 bp, Glycine max
  unsure (1)..(414): unsure at all n locations
taaatactatgctatttcagagagattatggaagtcaaatcctagtcgtcaagatatatgtggatgataccatattcagtgctactaatgacttgttgtgcgaggattnttccaaacttatgcaggcagagctcgcgatgagtataatgcgagaattgaagatctttgttggacttcaaatcaggcatacaaactatggcatatacacacatcgaaccaagtgcatgagggaacttctgaagaagttgaagatggatgatgaaaaccaaatgataacacttatgcatccaaccactgtacttggactaggcanagaatcatagcgggtggatgaaaagacatacaaagaaatgataggatatcttttgtatgtcattgagtccagacctgacattatgttcagtgtatgcttct

SEQ ID NO: 280328 - DNA, 357 bp, Glycine max
agttttctaatgagcttttgtccctggaatagagtctttcagttgtgggagtagttgaccaattgtgtcttctatttttggttgggtcgggtttcattaaagtagagcttgaagccctttttcttcctttcatcatagatgggcagtcttgggaaaactctgttaggcaccatcttgatgtcagtgcatctactaatgtggagtccaatgggataagtagttgcctagtctagtacgtacatttactttaagatgcatcctatcatattaagatattgttcggagggtattaggcaaccaagatgggaggtattgaatctggtgcgaagaatttagattagcaccttcttggaccat

SEQ ID NO: 280329 - DNA, 471 bp, Glycine max
  unsure (1)..(471): unsure at all n locations
actgaacatattctcggatgaaatgatgatcgatgtctatgttctcgtatcgttcatgatgagtanggttggaagcaagacatatagcagatttattatcacaaaatagcatcacagagggcacatcaacttcaaagtaaagaagtaactagcttaacctaacaatttcactagtaacagaagacaacgcatgatattaagcttcactggatgattctgaaacagtgagttgcttcttagaacgcctagagagaagggtgtctcccacataaacacaaaggccagaagtggatcttctggtatcaacacagcgtggccaatcagcatcagcaaatgcagtgaagttgacagagttgtgagcatggaagaacaaaccttgttcaggagcagatctgatatactacagacgaatatgaacaacatgtaggtgacgaactctaagtgctttcatatactgacttaatcgatcac

SEQ ID NO: 280330 - DNA, 562 bp, Glycine max
taagctaacctatacaatacgtcacatatacgataaggaatatagggtaatcatacacatatttaactagacaaagggagatttgaattcgaaagccatcgacacatcataggcgaatccgagctcagcgcccggtgatactctaaagtcgaccagcacgcattcaagcttataaatgcaatagactcttgctcaatcgattacttgataaccgaacgacgtacagccccttggatagcgaaacccgaaataaaaggagcaaatgcttgctaccctaacaattacattgtcattaacaaacgacatgcagctgaccaagatagaatcatttgccaaccaagcgataattgtgagtaccatctaatctatcctacaccaacataagaatatcagttaatgttgaaacgatagaacaaaagataactcaatgaatccctaatgcaatgagattcgacatctcgccactattgacgattcattaacatgctcttttttgcctaagaaaccccacatcacacacgttgcagtccctgaagagtacaacatcgagctgaaatggctc

SEQ ID NO: 280331 - DNA, 489 bp, Glycine max
  unsure (1)..(489): unsure at all n locations
tatgcgcatacttcttcacgaacgttcacttgcacaagacattcttataactattataaatgcacccatatacaatcaaggcaccttcgttacctagattatttacatgtacttccaaggtgtatttgttaccttcatcacacacatttcctttgctagattcacatacatgcatactctaaacactttggctatcaaaaattgcatacgcgcacatcttggtatttctaatacctatacatacacaaacttcatgatgaatcttgactatctacacaataaggtgctacatttcatgctctcccctttatttnttcaagtgttgttactacctagagccgcatgcaaattcaagtatattctctttagctcactaaaattgtattcaaattaagaggtagttccgtaatgtatcttctctacataacatgcaacatatctatagattgttgtgagacatcttgactaccagaagtatatgtcatacat

SEQ ID NO: 280332 - DNA, 311 bp, Glycine max
agctttcaacctgctgtttttatgtgcattcccttttagtcctcaaggcttttaatgatatcactgtggctgcttaagatataacaaatgtctggatgaatactttatcctattgtggcccacatggagtatccagacgcccatatctactgagacaatggtgactgcgctgatcattccgctcactatggtgtaaaattactctattatagtggacgatacactttgtataaacatgaggtgtacaaggggagatacttggcattgcttggacatttagataaaggtgacctttgtcatttgtatggaca

SEQ ID NO: 280333 - DNA, 349 bp, Glycine max
actgaagttgctaactttattattgtacccctttagcatcatgattagaatgttaaattgttgctagaattattttcattataattgatcagaggtgtgcatcccctgaacttcataaagcaccagtgctgtgctcttgattatattttggggtcttagacccttgaattgtaagtcacattggaatgacttgctctttactcaacaggcagctgctcaatcggcacacagtgctgaccctttctggagccttgcctcagtgcttttgagtctcgcatgttattttgcttacaggctaaatctgatatattttctcacctgcacattataattacgatgaatatgtctt

SEQ ID NO: 280334 - DNA, 382 bp, Glycine max
  unsure (1)..(382): unsure at all n locations
agcttgccactggagctgacccatcaactgccctaactcttttaaactggtgattcctatgctcttgaccttgacttgatagaacctctttttaagcgaaggcgtttgacttgatcccatgttttaataaagtgaaacaaaatctagtgcgaatcaaaactccgacatctatcatgggttgaatggatgaatgcataaagaaatgcatatgatacagatgcaatttatgaatacgggagcccgggaaattgtctccttcttagatacaacgtcttggggtagcacagtgcccaacgtatgtatttaagaaagtgacacggaccctccgttggnttgccaaagagaggngatcaagacagaacccatgcatgatgcatatgtg

SEQ ID NO: 280335 - DNA, 415 bp, Glycine max
  unsure (1)..(415): unsure at all n locations
atgtaacattgaggtatgggtttctgtttcaattgtatgattctctanacatattattttgctgtattgtatttcgttgcttaacttgagttctttagtaaacttggacgaccttgttttgttctggagatgttcttaataaattntatttagtaacagtgaagcgaatgtgatccttttacccacgtggatttgtttacatgatttgaataaaatgggtttaattaaattctggatttttatatatctttcttatttatatgtatctcggcgtagagggtgtcacactcagtgctcgcgtgaccctgttcacctgtccctatccctgttgctgtgcttgctcaactgctctactcagagtcaaagtacatcgtgacggatcaaggccgcgactagttcactactccgtcaatct

SEQ ID NO: 280336 - DNA, 366 bp, Glycine max
  unsure (1)..(366): unsure at all n locations
agcttgcttaagaagattcataaagaagctagagtttagctacacacacctctctaatagctaagctcacctccttgagatgagaagctagagcttagctacacaccccctataataactaagctcacccctatgccaaaaaaaacatgaaaatacaagaaaaagcccttactacaaagactactcaaaatgccccaaaatacaaggctaaaaccctatactactagaatggccaaaatacaaggcctaaacgaaggaaaaacctattctaatatttacaaagataagcgggctcatatttagcccatgggctcgaaatctatcctaaggttcatgagaaccctanggccttctttagtagctcta

SEQ ID NO: 280337 - DNA, 491 bp, Glycine max
  unsure (1)..(491): unsure at all n locations
tacctcaatgcnattttcctctatatccatgaagatagctaacatacaccttnggaaagtggttggtgcatttcacaatccanaggatatccttatgtatgtaaaaacatcaaaaggacaagtgaaagtagttntctcttggtctttaagatctactacaanttggttatagccgaaataaccatctaagaagcaataataagcttgtacggccagccgctctaacatctaatccatgaaaggaaggggaaagtgatccatccttgttgccttgttaagaattttataatctatgtacattctccatccggtcattgttgttgtgcgaattaattcattnttctcattcttaacaattgtcatgccacccttcttcagatccacttgcactcaactaacccatgcactatccanaattgngtangtcattctagcttctagaagtttanaacctctttccttaccccttncttcatcacaagaatcaatct

SEQ ID NO: 280338 - DNA, 373 bp, Glycine max
agctttggatttggtaagcaacacttatgtcgagtctcccccagtgtaaccgtgctcatttggcgtcgctttgatggtagctcgtgtgatgttagggcatggatacgagcccggaaggggtttgggtcggaacgacgacagcatggtgagcttggtggagtccaaagagaaccgcggaaggttcgggctaggatataagcctacacgcaccgacgtgaggagaagtgctctagaaaggaggggtagaagcatgggccaaccgtgaggaccgcaagtgaaagggattcccttacgtcacatcaatgaaagcctcatcagcgtgggctggatgtgtgaaatggcaatcgccatgatccatgatgaagtccttaag

SEQ ID NO: 280339 - DNA, 528 bp, Glycine max
  unsure (1)..(528): unsure at all n locations
tattagttgttgcatttcagtattactgcctcttatggaagaacggtatgcatttcttgtattgtatacttgcttgattattgtataactattggcattatcctctttcaatgttagcagaatatttattggttcaccattgactntgtcaataatcttttcatccaattaatgacttagtcaattcatgattgtgactcccacacattaacttcaccatccatcctttgcctccaaccactagtcttccatgcggcttaatggggcacccacattntctactgccagtcattattcttaacaaatctttcttcttgaccctatactgaccactcctttcacaaccaattaacacaaatgacgtcctttctctcataccaatatttgtgtctgacctcacaattaccgtcacanaaccaatttcataagcaacagctcgagcccaattcanaacatcatcacgggtagcanacatttacaatgcaatccanacatctntagttnttaagggacattcattaacttact

SEQ ID NO: 280340 - DNA, 357 bp, Glycine max
agcttctaggccttgtggagcttcttgcctctactgcttgaactgcacttgcaagcttagcttgaacttcaccagtaacatcatcagggtctggatcacttaatatttctgcattgatatgcatcattggcttcttgcttggatcatgcttgtgcttcatccatgtgttcagcttatcgaattggacatccttactaaaaactattagattcgctcttggatctaagagtttgtatgaccctatgggattgtagccaacaaagatcatgtgttcactcttgtcatccaatttcgcccttgattgatcaggagtatgtcatgaacatgatgaaccacaaactctcatatgcctcacag

SEQ ID NO: 280341 - DNA, 175 bp, Glycine max
aaagcctacatgcatcacatggaattcactatacatagcacaatactatccatgggttagcatgatcacgacgcgagctatacttgcctttatctaactagattgtacctcacacacttattgatatcagctcacgcgatggcaaatagacatgctatcgacttaatgttgaaca

SEQ ID NO: 280342 - DNA, 388 bp, Glycine max
  unsure (1)..(388): unsure at all n locations
agcttctcttccaattttctataaatagggggagaagtgaagtgaaaaagggttcagccccttatgcacttatctctctttcgaattcgcttggaaaaattgtttccatgaagaaaatctaagccgaggcgcgtccgaaatgtttccgtaaggaatttcgcgaaggtttcgaccgttcttcgacgttcttcattcgttcttcatcgttcttcgatcttcaacaggtaagtacctcgaaccaagcttttcgattcattctatgtacccgtggtggtccacattgtgtttcgtgtatttttattctcgtgttatttactttgtatacccccttttgacgtgcttagaccattttatttaagtcatttctcgcttanactagaaataaaat

SEQ ID NO: 280343 - DNA, 472 bp, Glycine max
  unsure (1)..(472): unsure at all n locations
cttattttcttctcctattagtgtgtgttgattattttatccaagcatgcccttatatacctttcgaagaagttgaatgaaaagagtctttatagaagtgcataagttgatattagtttatgtggaatatcaactcattntaccttatcatcttctcctgtaagtacttatagagaagtttatctagagaggaccttgtacactttctaatgtgtaatataatcctttctttgtgttctaagaaaataataacagggtcttgcagcggataaaggtgacatcgcaagaggcacagatttcactgcgacattgcctctgcctcacacaacagctattgatttcaggcanacttccagaatgacatttctatctattatcaaacataattnggtgtatntaatttcgagcaagactttgacgtttcttcagattctaacgtatcactntagtttagtagatgtaatcttaagtc

SEQ ID NO: 280344 - DNA, 392 bp, Glycine max
  unsure (1)..(392): unsure at all n locations
agcttactgatttagtcccttcaaacgggttgccatctgattcctataaaatatcagtttcaattttgtcacaatctctggctcagttttcggcggtcatcatccagtttccagcaagtgatggggctcttctgagatctagtttagaatctgctcgcctctatttccaccaaagggaaacatatccacctgcagatataatccatactagcgagtctcgtgagtggtgcaaaacatctggttattatgcagatcctcatttgtggcaagaaacttatgactatagaccaggattgactccttcagaacctaataattcaattgagttccccccggcaggtttgccagacatanttgccttattcggaaaagcagccagagatattctggat

SEQ ID NO: 280345 - DNA, 399 bp, Glycine max
agctttcataagtgaaatcaggtgcaaccatctccctaagagtcctctcacgaggtggaggttgagccatgttctcaatatgaaaattagtagttgaatgctcaaaattagaatattcagaatcaccagcaacagaatactcagaatgctcaaaatgctcacaatgttcgaaatgcacagaatgatcaggatgaacactatgcctaactaatgtatgaaaggttctatctatttcaagatcaaatggttgtgaatcccctggattgcccctagtcatgcattatatgcagcaaataatgtgttctcaaacaagcaccaggggagggttaaaactacaactatagtcccatgatatccaaatgagctgaaattttgtgagcaacacccttatatcatgaa

SEQ ID NO: 280346 - DNA, 369 bp, Glycine max
  unsure (1)..(369): unsure at all n locations
tcctggatctgagaatcacttagaattagtgangaaaattgtttccgtgaagaaaatccaagccgagatgcttccgtaacgctntcgagacgtttccgtgggtgatttcgtgaagaatttccaccgttcttcatcgttcttcggtcttcaaccggtaagttcccgaaatcgaactnttcaattcattctatgtaccttcggtggtcctcatttgtttcgcgtgctattattgttatttcatttgctttcccgtacccactttgacgtgctttagtcatttatttaagttattttcccgcctaatcaaaaataaaataaatttccaccgatcattcatattgtgacatcttttaatntctggtaaaataa

SEQ ID NO: 280347 - DNA, 349 bp, Glycine max
agcttctctttgtgtgagcttaactatgaaaagggtatgtgtatctaaactctagcttctcaaagatgttttctcaaaaaaacttctcaaggaagttttctcaagaaagcttctcaaggaagctacctattctataaatagaaacatgtgtaacactcgttgtaactttgatgaatgagagtcttgtgagacacaactcaaagttcaacttctctccctttatcttccttcaatttcgtgctcccccctctctctttctctccctctttcttttcctccattgtagcatcctctctaagcttcttatccaaggctcatcttggtggggaagcttctttctccatggctt

SEQ ID NO: 280348 - DNA, 214 bp, Glycine max
  unsure (1)..(214): unsure at all n locations
tactaagctaagaaanacattattttttatcatatttctagttagcttgcagttaatcttatttgtgtttccatatgaaaaagtttagagacattgaataatcttaaacttatgttttcaatgatcaagtcaataatatcaaggagggagcctttatgctttcttcaagaaatgacaactcattttgtaagtacaatggccttcctaaaggtat

SEQ ID NO: 280349 - DNA, 376 bp, Glycine max
  unsure (1)..(376): unsure at all n locations
agcttgcttctacaatctccccttttttgatgatgacaacttctgaaatcaagaaacacacacacacattttttcctagtcgatcactgacgtaaatttccattctccccctttgtttttgaatttatgcttcacttaacattaagttaattactcatgtgagttcttgatttaatccctatttctctccccctttggcatcaacaaaaagccaaagtgcgtaacaagtatgaaacatacaaatacaactaatcattcacacaacaatcatggaaaaatataaactaatcatgaagcaagaaacatgaccaaatcanatattatagaaaatcacataggcacataacataattcataattgttcaaacacaccatg

SEQ ID NO: 280350 - DNA, 482 bp, Glycine max
  unsure (1)..(482): unsure at all n locations
tggtcttcgccggcnaaggatcgaagcgggtctgaaaagatgcattntgatcatcctactttgatgagtgagaaagatggngcaaatgaagaggatgagaatgaaggagaaacccttcctatgactgccattcatacatggtcaaatttcccatcagcccaacaatgtcattactcagccaataacagtccctctcacccaatcatccacaaaggccatccctaaatcaaccacaaagtttgtttaccgcacttccaatgacgaacaccacctttagcacaaaccanaacaccaaccaaaaagcctgtaggattcaccccanattccggtgtcatatgctaacttgctcccatatctactcgataattcaatggtttctataaccccagccaagggttgctcaacctccattttctgaggatacgactcgaacgcaacatgtgcatatcatggaggagttccaggacattccattgagcact

SEQ ID NO: 280351 - DNA, 392 bp, Glycine max
attttgtgaattatattcaagagctcttaacactttggttgatgaattcttgtgttctattagggtaaatatatatggccaaaaggaaacaagttgactcctgactttttgctggatgggtcagatatggatcatcatgaagactaaaaggaaaaaagtaattaaaaatttgaagatttgcatgttcggttgcccatagaaaaaaagatacatgaaaaagaaagatgtgtttattaattaaagaattgaaagcaactttgtgatgctaattaaaagtatccctctggatgttgattctgttgaatttaaatataaaatccttatatgcataaaaacttggaacgtgtggttggacttaatggttggctggctggctgttactgcttatattg

SEQ ID NO: 280352 - DNA, 502 bp, Glycine max
  unsure (1)..(502): unsure at all n locations
gctttctctgacacctacattcctatacgatgaaaactntgtttgtatacacacgtattattataaaccctgtctctttatatcaacacggtctatataaaacatctattccttttcaaagatttctttntcctttntcaacatacactcgttgttgtataaaacaattttctttatatacactcattgctcacacaccagaatttcttttcacacattatttatacacacaaaatcttttcatacactgtntatatacaaaaactctnttcttttctttatataagatatgacatttgttcacaacgcctctntctttntctattcttggtgttatcatgatgtttgttcgttntattntaggacgacgttcctaaatgaaaactctacacggttccggaatttaacanacattatcgacaataacgaagtaagcactanagcaacagttcaacataatgtatgcacaaaacanatgacaatcaaaacaacataaacaaac

SEQ ID NO: 280353 - DNA, 274 bp, Glycine max
tattttgaagagcagatctgagcctttcttttatagactcttcatgtctggccaatataaccatttacaagagtgataacttttagaataacttacaaccaatttgaaaagttcaaaaaccctttcgaagagttacatctgtagatgtattcacaaacagtcactggtaatcgattaccatatcagtgtagtcgattacacagagctattatgtgataagatgtgactcttcacatacgaatttgaatctcagcgttcagaggtactggtaatc

SEQ ID NO: 280354 - DNA, 153 bp, Glycine max
ctcttctattgatgttctcatgtgcttcttctgctgcagtaattgatcatgaagagtcttacctgaaatgttgaacatataacaaatatattgcgatatatcttacacacatgatgttgagacgactctatactcaacaataggggatgaacg

SEQ ID NO: 280355 - DNA, 461 bp, Glycine max
  unsure (1)..(461): unsure at all n locations
tgtgtctgaatataaaaagatactagaattgtgtttattacgtaatttaatattgatttcatcaaattacagagcctgtttccaaagaacatgttaaattaatccttgggttcattaaattaatcatttgattcctataagtagtacttaagatttagtccatatacatccttattagtacacatcggtacctggtattactatgttccttaagttntatccttatatcgatgtataaggaccaaatcttaactttgcttttcatacaatgactaattcttagatgaatatcaccgataaggactaactaatttaaacttctgatttgtaaactccttcctattggtatgggacatttctttcaatgtcttctcanaattctttggcatctcatctttggaaattcttctaaaggaataaagctattatcagttgtttcaatcaacacatgtttctaaata

SEQ ID NO: 280356 - DNA, 58 bp, Glycine max
agcttatagagggagcttcaatggaggaaaagaatgagaggggggggggggcgccccc

SEQ ID NO: 280357 - DNA, 484 bp, Glycine max
  unsure (1)..(484): unsure at all n locations
acattgatcttagcactagtctcttccagactatccttgatggngatgggaacacgatccanaagctatgctagctccatcttctcatcttgccttactgttacatacttgaattcttcactcatagagaacaatcgacaaagctctatgtcccccattgtaggcttcaaatgctcgctatatgtggatatggatccgtgtgttatgtagtagtagctggcaatacgacccaagtcagtgacctgaaaatatccactcttcctatcatacttcaccaaattatttctatccaagatggttgcagccgtatgaatctgcaaaatttcagcaagatataaagatcanaatcagccaataaataatataagacaggatgaacaggcaagaaaaanattcaatattgaatatcatcngaaattcatttaagaaaaaatttgaaggagataaatcagactaccaaagaagaccaagaacctatctctaa

SEQ ID NO: 280358 - DNA, 390 bp, Glycine max
  unsure (1)..(390): unsure at all n locations
agcttgggattattgatggggacccggtgttgagagaaacgaggatatgggctacgtgggagtgcgtgagctcagatggaggtgggcaacaggggatggtgggtttatgcgcgcattgtggatgtggaaaacttgttgtgcaccatcgcccgaccgccacctagtaccacatgtgatgggtaccccataatcctacaagcttgagatgaggaagtgttgaagggtgaaacttcctgcttttattgttgaccacagagtggtacctggagatatgtcgcggnggtcacgagatccttgggacgtcaggtagggtgctattgcccataaccaagcttgaccaatcccgacccaccccgggcatagtcggtcagtgagaacctgtgatgtacc

SEQ ID NO: 280359 - DNA, 439 bp, Glycine max
  unsure (1)..(439): unsure at all n locations
tcttntctctctttttctctcaatcgttcttcatttttcttcctctnttcactctgtttcttccttatttcttgtacaaattntgtgtcttttccattagtgatgatcatggaaggctaaacacttaaatccaaggatccactccaagcaaggatgaatttgtgttctagtttagtattgttggacaaatggcctcaataacttaagatggnggattnttaatccccttctaaatgatatatgataggctcaaaatgtagaacatgaagcaacaattaaattaatcaatattctttatacgtgcaagacaaatatcacttgcaataaaataaatgagataagggaagagagaattgctactcgattatataggtcggcacttctgtgctacattatcctcaacaatcacttgaatttccatattatgtaatcttacagc

SEQ ID NO: 280360 - DNA, 381 bp, Glycine max
agcttgattttaataataatacaaccattgggagccattcctcttacacttattcattctcattccttttcccttcatattttacaccctttttgtatagttaagcccttcatggcaatgaagggctaaacaatccattgctgaagaactttccaccaaactctcttgatgtaattactatcactatctatttaatattattattatgttcattgcctctttccatgcttatttctatgtatttgagttgatcacccatttatatgctatgatagaggttaggtattggaaaatggggttaatccttataaatggaaagaacattctaaatgcttcattgctaaggataatgtgaagtggttatcctgtgatacatatcta

SEQ ID NO: 280361 - DNA, 486 bp, Glycine max
  unsure (1)..(486): unsure at all n locations
ggaggaggatgtctctgcacctttacgcanagggccttgttactattataagagaactntggaagggaaggagtatgttcaatattgcaggcgccttatatctgataaccaaaaggtgccatatgtgcatgacatcatgcccacaggacctgaagctcctccggagcatgttattttggatgtgaatgttaaggcacaacatcaccaatactgcaccaatactacagtattggtggctttaaggttagatcatatcattattaatggcattttttctcactttnttctggcttgtttcctgacttccaagttctgacctgctnttattntattccaaacttcacttcttttcaggtcagcccanataacaagttggtagcatacgccgaagacaccaaaggagatgaaatatatactgtatgtcattgatgctgagactcaagctactattggagagcctctttgtggtgaacatcatactttgat

SEQ ID NO: 280362 - DNA, 121 bp, Glycine max
  unsure (1)..(121): unsure at all n locations
ttacctatgagccggacatccatcgtgantatcccggcacaatcagagaaaggagacacgtgcagcctactgctctcttcgagcacttgagtcttcttcttctccatggacgctgcattcc

SEQ ID NO: 280363 - DNA, 394 bp, Glycine max
  unsure (1)..(394): unsure at all n locations
agcttgagtttggtctggattgaagttaagctgagagtgcatgttgacatcataatagggttatggtaaataaaaaattttcttgatgaccacaaccatgagttattgccaaataagctttgtaaaatcctgactagtcataggtcaatccttgaggtaaacatgatgttgttgaatagtatgaaagcagttggaatgggaaccccacaaatttttggttctattgcaaatcaatgtggaggctatgatagggtgggatatcgtatcaaggacatgtataaccaaactggaagaaacaaaggttgaaaaatgtggatggtaaattagcattgaaatgttcgagtagtttgagtgtgaatgaacctttatgttcttncatacacaattgatgatg

SEQ ID NO: 280364 - DNA, 344 bp, Glycine max
  unsure (1)..(344): unsure at all n locations
ttgttggtggtgacacccctgttgatccatatctagaagacgagggagactgttctcttacagttntgttcttgtcaccttttgtggcagggttttttgttggagactntgctctcttttttggcaaacgaagctgtgcattgtcgccttccttactgctttgcttaaggagcctaacatgaaagggatcaacggatgtgcagcagacagacccatcaactccatttctttctaaagttacatctccgttgtttacctgacaaatgatagaacccacatcatagattgaaattatgatccatggttaatccaattaattggactcttcaatgtcaaacatcata

SEQ ID NO: 280365 - DNA, 378 bp, Glycine max
agctttcttttttttttgttctgattttttttactaaatgtagtttttttttttcttttaaatttctatgcttcaatgaaattttatttgtggtggttgagaaccataatgttaactttaatcaaattgtgaatcaaaattgtgatactttatcaccagaaatcacaaatgatagatgcatgacaaaggtttattgttacacatttatagagatgagaaaccaaaagacgatgtttctaaaaggaaggattacaacatatgtttaaccatttaataaattacattaacaagttatagtgtttgagatattttatttttattcataacctagtgattttttttacagcaacctcatgaaaaaatagacaactaacatag

SEQ ID NO: 280366 - DNA, 408 bp, Glycine max
  unsure (1)..(408): unsure at all n locations
cagagcttgaaagatttcgagtagtcgaagagaagttcaagtccatagccatcanagtctganaagagtatgatgaactaagggacgtcaatatggccaccgctgaagccttggaacgagaaaccaagaaggcccgaaaggaagaacacgtgccagcaaagttntgaggggctttatagggcagcaatagtaagctcaagctccgaagaggtgaaaggaatcatcatgggtcanaggcatgatcttgaaggacgagctaaaggcttaccttaggtcgaaaagaaatttatcccaacagttaagcgagactgaagggaatatgtgggccgtcatcgatgagtgcanagagaagctaaatctagcggcgactcacgagcaaaggctagaggatgagtacgccaagatatc

SEQ ID NO: 280367 - DNA, 403 bp, Glycine max
ttgttttgctcagcttctaacttctggacccttttaacagtgcatcgcttcgtgtgcatcttcaacacacacacacacacacatacacatacacagccacacacacacagaaacacacacacacacagaaacaaacacgcagacagacacgacctgttagggcacacacacacgctgagaaacacactcacactgtcacggacagacacgcacatacgcataaacagacagacacacgcacacacacacacacacacacacaaaaacacacgcacacacagaaacaaacacacacacacacacacacagaaacaaacagacacacacacacaaacacacacacacagaaacacacacacacccacactgggtttctgtgtgatagaagcattataaattaacg

SEQ ID NO: 280368 - DNA, 231 bp, Glycine max
attgatgtgtgtgctattgtatgtcatgagatgaaatgcaaaagttgagactcgtgttggttgttgactgaagaattgccttacacacttgtgcttatgagtgaaatagtgaccgtgaggatctggctagatgaaccttgatatctgtgttgcttgctagcttatgtcacttgtgttgcttaataaccatggtcatatctttgacattctgcatatctttatgaaaagctg

SEQ ID NO: 280369 - DNA, 373 bp, Glycine max
  unsure (1)..(373): unsure at all n locations
agcttaatagtgaatcacttattgtgaggacaagttgctatgacattaaatntaattgccattcttgttgcatatttctaaccatgcttttgattntgttgagctaaaaagttgaatgtgggcaccaccatacttagttgattgaagcacatgaacaaaaaaattgttgaatgaaggggaatgcaagaagagtgtgtatgtaacttgtctttgtgtatacttagtctttagttntaattnttcttttgtttttgagtccttactttttttaagtagttntaactgttttagtagttttagttagtcttgcttgaggacaagcaaggttctaagtttggagtgttgataaatgtcaaatttaccggattctaag

SEQ ID NO: 280370 - DNA, 554 bp, Glycine max
  unsure (1)..(554): unsure at all n locations
ctggcgctcacanttnggtagtccctgtatnaaccannccattagtnnannaaccgcgcgcggctnttgccgatcgatcatcaacgttctacgacgtatgtttatcttattgacacaagacaaccgcacttgagggtgcgctcataatacaaccgactccacctccacnnccactagccataatcaactactggaacctcattatcgtgcgtacactaatattgataagtgcgttgaactatcgcctagatcacgaagtagtaattacgataacatccgatctcacagtgttatagactgatttgcacgcaccaagcgcacgtagagtttgatatgtggaacacaacaatgtatcccttatcaagacacactccccacgctatcgaactataccatacgcatgcatccattctgattacgctataacttacaacatcgctgatgcctgtattatcgtagtttcaatatgaacgacgtgacaacacacagaactcgtcaatatatgttaagaaatcgcgtatcactctgcatgacgttgttcacgatactaatcc

SEQ ID NO: 280371 - DNA, 401 bp, Glycine max
  unsure (1)..(401): unsure at all n locations
agcttaatgggaatgtgagctatcttcattntgttagggtagcacctggtttctagcaagtccacttcggtgaatctaattaaaaaaatatatataccctaagcaatgataaaaaaacatgtccctttggggacatccgaggaaataggaagcatagcccctatgcaagcatgacacgcttttatcaagagatggtccattttttttccccactttccttctttcaatatttttaggcatgggtctcgttaagattcanaggctcaaattggaagccttatttgtctaacaacaattaaggatacacaataaatccttttctgcaacaaaatgtagaatgtgaaaacataanattntatacttgttatangcatacgagtaagcatgaaaagagggacatg

SEQ ID NO: 280372 - DNA, 497 bp, Glycine max
  unsure (1)..(497): unsure at all n locations
cggacctatgatactcagcttggtatctccttcttcactacatcaagaatcaccgggttatgtcttctctgtggctgtcttactggtttagctccatcttctaaatttattcgatgcatacatgtggatgggctaataccaggaatgtccgccagggtccagcctatagccttcttatgcttcttgagaactgacaacaacttctcttcttgctcatcagcaagggaggcagatataatcactggaaaactcttgctatcatccaagtaagcgtattttanatttgatggcaaaggcttcaattctggtgtggtcggctggacagtggtagaaggagatggtttctcagcctttacctcataaagaaagtcagaggtatgtgtacttcctgaaacatggttagtcctatctgactctataaaatcaatctcaagaagtaaaacaccaccaccaggcattcatcaatatcactctcagattactctcacatcaaattc

SEQ ID NO: 280373 - DNA, 390 bp, Glycine max
  unsure (1)..(390): unsure at all n locations
agctngatacaaacccttgctacttttgctatactcgaagctatacgaatcatgcctttctttgctactcactctcatataaggatacttcagatggtcgctaaaagtgccgtcttanatggccttatcgaataggcgatatatgctcgacaacctcttgggtttgaagatcgtactcttacacaccatgctttcacacttaacaatgctttgtatggcctataacacgaaccacacgcttggagagacagactgtgttcattgctcttagaaacggtgttattaaagtcacaacggatacctctctctctaaatgacaagttggcaccgaattcattctagactcaatttatgttgatgatagtcttgttgaagctactaacgaatctc

SEQ ID NO: 280374 - DNA, 867 bp, Glycine max
  unsure (1)..(867): unsure at all n locations
gccgtagntantcttacgaacagactactctgctcagccactagttagtatttgtcncgtgntanttttgnatttnntnngctgantattancactgcgtactntcgtccatgactntcntggtaacgacnnacnganntgttgcagaccccgcttgnagtactcgtatgntgcacatgcgactcgnagtncactgctgcgacntattagttgcaacaccantgcatctntgatggactatgcatcggtgcatcanttactagctgggacangtagatcatttgctgatgcgcgctatatagatgagcancacntntagtagtgtacgaacatgtgatcangngatcgctagatatacactctctcananaggtatcacagtgacgtaggcatgataaataatgcgtagctatcgcncntctatatcgcgatatacgctactctagctcacagaacgacgcacttgtacgtctcgtaaagatgtgacgcttggagcacacaacactacgcgcagacggacttcatgctcagtgagacgacatactcgaatcttgatgatcggtgcgtcgcgcactcgctctncattgtactacttgcagcggaagacgcatctcgtatatgacgccgtacgtggatcacgagccagtattcactacctcacaacgccgccgcatatctgtgtcagaaatgttatgtgtcctattanactcacgaaggcgcctccttggtaaagtcatactatttatacatctctcactcggatagagcgcctatcgtacatatctctagctgtgatacacctatacgcctacgctacgccacccgccctcttcatcgcatatgtcatataatatgacgactgcggcc

SEQ ID NO: 280375 - DNA, 401 bp, Glycine max
  unsure (1)..(401): unsure at all n locations
agcttgcttgtggggcttctatggagactggatctttgagcttcaatgaggtcctttaatggtgattttccaccatggagatgcagcggaagacaaaggagaagaggtgagaggaggtgccatccactatggaataagccatggaagaaagagcttcaccaccaagataagccttggataagaagcttggagaggatgcttcaatggaggaaaagaaagagggatagaaagagagagggggagcatgaaattgaatgaagaacaagggagagaagttgaactttgagttgtgtctcacaagactctcattcatcanagttacaacaagtgttgcacatgcttctatttatagactangtagcttccttgagaagctntcttaagaaaacttccttgagaag

SEQ ID NO: 280376 - DNA, 494 bp, Glycine max
  unsure (1)..(494): unsure at all n locations
nttgaacttgaacacggaacaccaatactcaggttgaggattatggggtacccatcacatgtggtactaagtggctgtcgggcgattgtgcacaacaagttntccacatccacaatgcgcgcataaacccaccatcccctgtttgccacctccaactgaactcacgtactcccacgtagcccatattctcgtttttctaacaccgggtgcccataaattcttccaagctttcacagcatccaagcaaaacgtcatttaaacagcacaagctatcgtaaccaagcaaaacagagcaaaggatgaaaactcttgtcaacacattaaccacaatcacaagttttttactttaagacacagaacaattcttcgatccatttgtaaccgtggatcgactccaaatttactggagtctatatgctaacccacattggaccgtggaattatatcaaatccaaactattctgtctacctttcacaacaacaacacaagcttt

SEQ ID NO: 280377 - DNA, 423 bp, Glycine max
  unsure (1)..(423): unsure at all n locations
agcttcaagattaagatggcctcagcaaattccttatttccagaagggaattctatcaatagacctccaatctttaatggagagggttaccactactggaaaacccgaatgcaaatttttatcgaggcaatagatctaaatatctgggaagccattgaaatagggccttatatacccaccacagtagaaagagtttcaatagatggtagttcatcaagtgaaagcataaccatagaaaaacctagagatagatggtcagaagaggatagaaaacgagtacaatacaacctanaagccaaaaacataataacatctgccctaggaatggatgaatatttcagagtttcaaattgcaagagtgctaatganatgtgggacactcttcgataacacatgaaggaactacagatgtttaaagatcta

SEQ ID NO: 280378 - DNA, 441 bp, Glycine max
  unsure (1)..(441): unsure at all n locations
tactcaagctnttatcattgcttagaataggatagtacgatttcatacattgtaatctctctgttgatgagtggcccattcaaaagtgccatatgtctatgggaaggatattgcacttacggtgaacaacggttgaacatatagtctttggggttagctggtctggtattagatgataaagaccatgtctcgcttcaattataccaatcttcatacgtttgttcgtatcctgcaacatgcatgaattggaagaaaatatcaatgcacagtcagtagatgacacgagttttgaaatggaaataatattgaaagcgaatgtgggtcttaataatacattaaacagcgttatattgggtgagaggtgtacgacttcggaatgagtaacgtggacatgatggccgttatgaagctttactgtgactgggttgatgcattcatatg

SEQ ID NO: 280379 - DNA, 408 bp, Glycine max
  unsure (1)..(408): unsure at all n locations
ttagcttctatgtctcaaggtctcttaggcacttctttcactttagaagcatctcgagtacttgcgttcctttcgtgaatgttcaagcttctatgctttattattctttcgtaaatgtttaggccttgaataatatctccacaaatcctttggctttccaggtgaattgacgcttgtccataaatggaatttctgaatgacactgcttatttaagtatttgtatcaacacatgtggctctcactgttacgcaatctatttctactaattctcttttgccctactttctctccatgtccttattctatgatttataataatcattatcaatgcatattgttttcatatcaataatcgagaaacaaatgtttattttcaaatcaatactgaagcaatgnttatatacatg

SEQ ID NO: 280380 - DNA, 529 bp, Glycine max
  unsure (1)..(529): unsure at all n locations
ttgacattgtagcctttgtancnncncacnacttgacacatanacgacggaagcttacttgatcgaaaatgcctaaatcatcgcgcatatatgcatgttattgatgaagctacgcaagagatccatcctggccattgagcaaacgcacacaggtgctaaacacaccacaagattatgatgatggatggctcgaatattcactaaggtaaacttatcactatcgaaactatcatgacatgttaaggataaacaaggatatcagatacaatacgtcgagagacttttattttcagaacaattacccatttcttgaacatatcttataactcaaagacaaacatgcacatctatcacaacgaaacttacaatatttaactaaaacccaacccaactataaaatctaactaatttacaccactaacaaagccaaacctaaaacacactctccccatacttaaacacgcattgtcctcactgtgcccaattaacagataaatacactattacctcanaagaagctgacactgtg

SEQ ID NO: 280381 - DNA, 215 bp, Glycine max
agcaggctgattataactttaatgctgaaacgggaattgatacacacattcaaacagatgataaattatataactagagtaaagaaatctagtatttgatctgcttcggtcccaaattgaccagtctctgcactatagaagacaaatactgcatactagaagcaccatatgatagagaaagaattacacattacttactctgctctgacttgatc

SEQ ID NO: 280382 - DNA, 841 bp, Glycine max
  unsure (1)..(841): unsure at all n locations
agctcctactacagcanaccatnctgcgatgctatnagggatactgtntgntcntcgcatataatnctgtancgatacttactatactcccnnaagaaacganacangannngnagtttggaaacccttttgatnaccnttcgtgtagtcactcgncgganacncatnaggacagactgangagcactnctctgcacacagtcgcatgtgcaagaagtcgccgacgagacgcatctgtatgacggctncgaacgtctggggaactgacgtcantcgcactacacagccgcagattgcntgtcantatccgtcgaggatagcgactcgtagaactcagctgcgcactcttatatcgcaccatcganaaacacacatagcgcgactattcactggcgtgacacgatcatctgtgtcatctcatantacacatgtcgatggcacntcgcgcgctatctgtgaactacgngatcactcgtgtatgtntgtggacntatgtcacacacaatcgcgcgtgctatcacgttcgatgtcacgccatcatggtgagcgctactacatgagtactgtgcgcgtgccacgcggatatccacctctgcgacgatagggcgacgcacttcccgaacgacgatgggtcgaggcgcctcaggnatacgtctgtctgggaccatcacacatttgtcggaacgaacctatcctattcgaattcgcacctagggtgtaagaagaatagtaatctgttgtataggtcttgaaatgcacgactgacacgcgaacatactcttacctaatgcaaaagcctgactgccggcacgctcgcacggataagtgatctccatcttcc

SEQ ID NO: 280383 - DNA, 421 bp, Glycine max
  unsure (1)..(421): unsure at all n locations
agctntagtctaacagaataatccgaaaatgtcaaagaattgcgtgttgaacaagcataacaagactttctatgattggtttaaagatacaatctttgcagatgagaatgctttacaaacattaagaacactagctgatgggcctaaaagaaatgttataacctggcaaggatacgacataaacaggtattcattttacacaaaagcacatgatgacaaatgtacaatgcagaacagccgggtcaccctaagggctgaatctcaacactattgcagtgtcaatgacgccaatccctgtgtagcttccatcccttactttgggttcattgatgacatntgcgagctttactatgtgaaatttacggtatgtgttttcaaatgtatatgggttgacagctacatcagtgtgcgcaccgatgat

SEQ ID NO: 280384 - DNA, 443 bp, Glycine max
  unsure (1)..(443): unsure at all n locations
cttgaaaccccttggatatacgcgacactataggaatctcaagcttcatcgggagcaactcttattgattatccgattaattaagattagctaaatggaccatatatcagtctagacagtacacgaatattctccctaggctcgatgataagaaccgtacctttagactgtgttactccgcccactatttctatctctcaacttctagaatctcgnacacggtagagtatttgcatgctacgaactttgtgattagagatagaataattaaacgacttttggatagaatgggcacacaggtccctatttttcgactggcttttaccgtctatctttatttgcaaatgtctcatgagtgcacaaggacgtgtacacggtgaccttctttctgaatatgacccaaatgagggatctatattaacaatctgttaatagccttgccn

SEQ ID NO: 280385 - DNA, 365 bp, Glycine max
  unsure (1)..(365): unsure at all n locations
agcttcaataatgtgtgaacatggatagtgaagcgcagaataccttccgcattgacaatgatgaccattcaagttaactgcccacttttgtctgccacgttgcgttataaggttgaaggtctcctctacttcanaccttgtagagtgaatatcatacacgcgaatgatgtgcatacaagcttgttcttgattattcctcaattctttaacaagctntgaacaatatacttgtccttcatttaactgtctttgggcttggcgaccacgctcaacanagtactttcgacacctactatacgttgatttcaccaatgttgttatgggaatgttgcgacaatcctttanaaccttattgatacattcta

SEQ ID NO: 280386 - DNA, 579 bp, Glycine max
  unsure (1)..(579): unsure at all n locations
actactgatgtgctatcacatcacatgtgagtatgtataatttgttatatactantncncacntactttcncagaccaggacgatttgganncttgattccctctgtaatacgtggaactcatagaatactaagcctctatataagctgaaccaatttatcaataaacacatgttgtgttatattcacaaaattaaaggttatctctttcttcttagtgagagagaatctcctaaaatcttgagtaattcaagaacaccctggctgtatcaaaggactttcacaacctttgtgtggtgcccttggcagaaagagtgagtctttcctttctttcatcttcaaccttgttcttgtaaaccacaactcccgaaaatctacttttgcccaaaattattttgggggcataactccattttacccctcaaattaaggatttgtggcctaatggaatttcaaacaaacctttcccttgtttggaatccccttattaaccatgagcttgattatttccatttatttttggccgccccacttacctatgtttacatccttaatcattatgcaaaccacttttaaaccg

SEQ ID NO: 280387 - DNA, 355 bp, Glycine max
agctttgtcgtgcccttccttctacttcagattgcactgctttgtctcactctcattccacgccatagctagtgcattccctccattgcttacagctaccttcatcgtgtagtaagtaccaatgtcgcttttctcctacattaaatttctttgttgttcatgctccctcatttgttatagctttcatttatatgtgcctggtgtttgcaacatgtctatgaattttttgacattgcaaatatgtgtttgcttaatttgaaccctacatatactgagtgttatgaagaaatccctttttcgaatatattaaagttgtgagaagcatgtgtgtaatgggtccactgtctctatgaat

SEQ ID NO: 280388 - DNA, 397 bp, Glycine max
  unsure (1)..(397): unsure at all n locations
tagacataagttatataattgttcaaggaaatctgcagcagtgggtacttctattgtaagctaccacctcctgagacaccttttccttgttacctatcagcaccatagttgacatttaacttttttctagtgctcaatgcacactccaaattataaactcattcaagttaaatgttattggttgtgagcaatgctgtcaaatggtggcaccatggccaaatggtgtggaggcttctttgctacccaacctccaaaggaagattgtgaatggaagcctgctatggcggcaccatatgcaacaatggcatgtntatatggcaaaatttctgccttctgccatctgccattgataacattgttgttgagatacatacaacagaagctcctatgttatatt

SEQ ID NO: 280389 - DNA, 411 bp, Glycine max
  unsure (1)..(411): unsure at all n locations
agcttgctatacgtagagaaagaaagagtgaaacaaatcgaagaactggtgccatgatgcttgcttttgctctgttatgttgattaggatttaaaaagtcaacgaggaaataagcttgattttgttttgcaggaaggaatgtggaaagtttgagggatgaatntgttggaggtaattgttaaaagcacggagggaagaaatgaaggtagggaaaaattgtgtagagagtggttctaggcagggttagctactacctgttgctttaggcgggtaaaaattgttaaggctgggattatttcacaatagtctctatttgctgttatttatcttattttctttgttggcctcaatttcgatagtaaggagtttggctccattttacatcaatcaataagaacctatcagttcatt

SEQ ID NO: 280390 - DNA, 538 bp, Glycine max
  unsure (1)..(538): unsure at all n locations
nttgacncccttgnaacctagatgacgctctctatgtacgcgacactatacaatgctccagcttgcttgtgtggcttctatggaggcttgatctttgagctgcctgaggccctgttatggcgagtatgcaccatggatatgcatcggaagacctacgataatacgagagaggacgcgccctccactttgcaataagccatggaagaagaatctccaccaccacgatgagccttggataactagcttggataggaggcttcgatgtaggaatacacagaaggagagatggagagaggtgtgagcacgacattgatggatgatatagggagcgaagacgaactttgagttgtgtctctgaagactctcattcatcaaacgtacagcatgttgtacacgtgcttctatttatggactaggtatgctacttgagaggctttcttaagaagacttccttgacaagctgtgttgagacaactgtctctcgaagatagatcttagctactcacacgcgtctatactgacgtcacctccttgagat

SEQ ID NO: 280391 - DNA, 373 bp, Glycine max
tagcttgatcatgttaacaacatggattatgctaaggaacacttaatcttattgcactcctatccatcatgtcatgagcctatattgactgggaaccaggagccacacaaatcctgatttgctcacaattatggatcaagttcatgttggtggactacaagttatagatccacaatcattggattgacatgccctctattgctggagcactaggttgaaacactagagatctactacaggtaagttagatactcataatttaatccaattgagtcttgattagcatacaaactcaaagtcaatttgctgtactacagaaaattattacacaatatcatgaggtaaaagagtaatatcatgttgtcttaatttg

SEQ ID NO: 280392 - DNA, 527 bp, Glycine max
  unsure (1)..(527): unsure at all n locations
cgtacacactttgaaaccttctgtatttgactacactcgtctattccgtgacactatatagtactcacgcctccgatgatgaatcaaggcgcttcttgtttntctgatggttgcacagatgatgactgagagcctcagagaatgagtttcagattgagtcagcgcgttcaggatcaagttatatttcgtgtttcttgacgagaaatcatgaatatgtaagaatcgggagaagtttgctgtcaagattctcgagaagatgagtttcagattcttgagaagagatcgagaagacttcacaatggaagtattcgatatatttttccaagaacaaacgtagcatagctttgtctctcataagagtattgctcaagatctctctagttaccagagtatgttctctctagtaatccgctacagtttcccattatcgatacccgcggccatgttagttgcggcgcttttcctgaattgcgcgtccatttgttttaaaggtgtgggatacatatatgtgacgatactaaagaccn

SEQ ID NO: 280393 - DNA, 431 bp, Glycine max
  unsure (1)..(431): unsure at all n locations
agctntgagcaaattcaaacgacaataacttttgagtcggatgttcgattgtgtcccgtaggatatcgagacgctcgtaattgaaaacggaagctctgagaaaaatcaaacgacaataacttttaactcggatgtccgattgaaccctgtaatatatcgagacgctcgaaattgaaaacggaagctctaagaaaagtcaaacgacaataacttttgactcggatgtccgatatagtctcgtaatatatcgagacgctcgtaattgaaaaccgaagctcttagcaaattcaaacgacaataacttttgacacggatgtccaattgagtctcgtaggatatcgagacgctcataattganaacgaaagctctatgaacagtcaaatgacaataactntcaattcggatgtctgattgactcccgtaatatatc

SEQ ID NO: 280394 - DNA, 334 bp, Glycine max
  unsure (1)..(334): unsure at all n locations
ctggaactacttcacatggacttgatggngcctatgcaagttgaaagccttggaggaaagaggtatgcctatgttgttgtggatgatttctccagatttacctgngtcaactntatcagagagaaatcagaaacctttgaagtattcaaagagttgagtctaagacttcaaagagaaaaggattgtgtcatcaagagaatcaggagtgaccatggcagagaatttgaaaacagcaggttcactgaattctgcacatctgaaggcatcactcatgagttctctgcagccattacaccacaacagaatggcatagttgaaaggaaaaacaggactc

SEQ ID NO: 280395 - DNA, 387 bp, Glycine max
agctttatacttaataattaataaaacatttataaattaattacatgcgaggaaatatactaggtttctatctactccatggacgttgttcattaattaacactatgtataaaagcccactaccaatctcaatctatgttaatttccttataataatcaaatgtacgtgtaatttaaaaataattaattaaatgtataataacatgcacttcttttatcaatagggtatgttttgtctattgtcttccccacccactgaatgccaaaatgccactatatttacatgtcaagttggatgatgcatgtccattcattcatttcgcactatccaagaagatgttgataagccatatcaatatgtaacggtcattgaagaggtacctcatg

SEQ ID NO: 280396 - DNA, 316 bp, Glycine max
ggatatccatctaaatccagagcatgcaccaaaatcatattcaaacgcatatccggcacatgttgcatgcccttcaatcttagtgtgccaccattattggtttgaatgcacacatcaccaatcccaacaatgtttgtaatgctactattgaccatgttcacttttccaaagtctcctgctttatacgtagtaaagaattccttgttggaagtggcatgataagatgatgttgagtcaatgacccattcaacacatgaatatgaaacacggcactattcatcttccacagagatcctgtgggtacaagtgtgaagtg

SEQ ID NO: 280397 - DNA, 427 bp, Glycine max
  unsure (1)..(427): unsure at all n locations
agcttgtgcataatcaaatcactcctacatttcatctctagcatgcattttctttctttacccactcctcacgtttggttttttagggaaaaacaccataactaaacgcgccgcaaggtatccctatcgcaccagatccaaatctagaacgatgggtgatcaagaggagacgcaggaacagatgaaagccgacatgtcggctctgaaagaacaaatggcctccatgatggaggccatgttaagtatgaagcagctcatagagaagaacgcggccaccgccgccgctgtcagttcggctgccgaagcagacccgactctcttggcaactacgcaccatcctccctcanacatagtangacggngaagggacacanctgggcacgatggtagccctcacctgggatacaaccgagcggcttacccttat

SEQ ID NO: 280398 - DNA, 467 bp, Glycine max
  unsure (1)..(467): unsure at all n locations
cattgcctaacaagccaacttacaacagccagccccaagagtctcagcataatgatgcacaggtcaaagttgagtatgtgaaaagattgtatgaccaagtgaaggtgcaaattgcaaagaagaatgaaagttatactaagccagcccacaagaaaaggaaggaagtggtacttgaacccggtgatgatcctggacatttgangacaaatgttttccaagaaggagggaatgatgagaatcatgaaacaagcgcaatacagtctaaaggcccaagtggagaaagacaaaacccccgagtggagaaagatgaaggcccaagtggagaaggatgaaggccanangcagagacactatcaagactataattngtgctgaaggccaaactaatttgaggcccaagtaaataagtttantataattattttatttatagatttgatacanatagattgattgatngatacaac

SEQ ID NO: 280399 - DNA, 426 bp, Glycine max
  unsure (1)..(426): unsure at all n locations
agcttccttgagaaacttccttgagaagcttccttgagaagcttccttgagaagctagagtttatctacaccccctgtaatagctaagctcacccccatgccaaaatacatggctaaaatcctatactactagaatggtcaaaataaaaggcccaaaagaaggagaacctattctaatatttacaaagaagaatggaaccaaccttggcccatggctcagaattctaccctgaggttcatgagaaccctagtgccttctttagcagctctagcccaatcctcttggagtcttgtatccaatacccttgggggtaggattgcatcatcccatcccccttggaaaggatctgacctcanatcccgagggtcttaatactctgagactcttccctctacacacctgtaaaaagaatagaaacatatatg

SEQ ID NO: 280400 - DNA, 501 bp, Glycine max
  unsure (1)..(501): unsure at all n locations
nttgaaacttggtacatgcgaactatngatactcagcctatctggagactcgctagcacacttgcgggaccaagcgtgttattctgtgaagatgaacattcatcctcttgctgaactacctgtggctaaacgacgctggattggctagcccaggtgacttaaacattttatttatgtgatagtccggcgctcaactgaacattcttgagccaagcacaattggttgcggcatacgctgagcttaactccataacttaatgaaatntttgctgagtttaatggccgttagcgcaacttattcttgggttagcttcaattcatgccggttaccttaacactatgcttattaggaacctatgaagagaaccatgctttctctacttgttttacacagatntcttttgatgatttctttctttgttctagatagggaatacatgttataaccacagtatatttcatccagatgcgatttatctaatagctgcagatacacaagtg

SEQ ID NO: 280401 - DNA, 423 bp, Glycine max
  unsure (1)..(423): unsure at all n locations
agctttcttgagaaaacttccttgagaagcttctttgagaaaacttccttgagaagctagagcttagctacacacacccctctcataactaagctcacctccttgagaagcttccttaagaagattcctaaagaagctagagcttagctacacatacctctctaagagctaagctcacctccttgagatgagaagctagaacttagctacacaccccctataatagctaagctcacccccatgacaaaaaacatgaaaatacaaaaaaaaaagtccttactacaaagactactcaaaatgccctgaaatacaaggctaaaaccctatactactagaatggccaaaatacaaggcccaaacgaagganaaacttattctaatatntacaaagataagcgtgctcatacttagcccatgggctcg

SEQ ID NO: 280402 - DNA, 483 bp, Glycine max
  unsure (1)..(483): unsure at all n locations
ntcataagtgaaatcaggtgcagccatctccctaagattcctaacacgaggtggatgttgagccatgttctcagcatgaaaattaacagccgaatgctcaaaatcagaatattcagaatcactagcaacaaaatactcagaatgctcaaaatgctcaaaatgcgtagaatgatcaggatgcacactatgcctaactaatctatgaaaggttctatctatttcaggatcaaagggttgtaagtcacgtggattgcccctagtcatgcactatatgcagcagataatgtgttctcaaacaagcacctgacaaggtggtaaaactacaactatagtcaaacgatatccaaaggagctgaaattctgtcagcaacacccttaaatcatgaaaagatagcacaaaaaatttcatacaataattcaaagtctaactatgaggactacctaagcataggttagaacaatacgacaataatacttgaaaaa

SEQ ID NO: 280403 - DNA, 419 bp, Glycine max
agcttgaagatatataaatagcatgataacatataatcttatgttatttataatcatcaaactgaattatgtttgctttatatcttgtccatgcttatagaagtaaacattgattcaaataacagttaatatatacagtcatcacaattaactaagccaagagtgggactgcatgtatacaattgaatacctctactgttaccagcattctcaccttccagcattttgccaaccccattttgaaaatgttgtgagtcgtgtcctcctgcatgatcacaactatatttagataaggagaaaatatgtaactagcaaaatacatccttcttaataccaaacaaagtacacatcctatttagaagaaagagatatgatacataagaagaatatgagcctaccattattttactaccaattga

SEQ ID NO: 280404 - DNA, 528 bp, Glycine max
  unsure (1)..(528): unsure at all n locations
ttgaacctgagatctgtgaatacggacacttaactattaacctcggctcccttaaagtgacgacatgactaatatttctatattattgatgggcatatcatctttgcgatgcactcttgcatgtgatgtangaccgttcatcctactttgtgcgctgcttaaatctgtcttccctattctttaactaaggatcctaccgtattcaccaatcctcaggattgtcaacactcataacgtaatttattcgacgattacactgacaactattggcccatgtttgccacactatcggctgcatacagtgccactctagccgtgaactgcacactgagatgctnccgcctcagacgccatcggatattatgaatgagaataagctcctgacactcctagtaaagggggacttgcgaagacacggtgctcctgctgttccacgaggcgcaccggcattctagacttgccctgcgtatgcttgtgacggcttaccattgccgacttaatcgtccgaagaaaagccgacttctctcg

SEQ ID NO: 280405 - DNA, 416 bp, Glycine max
  unsure (1)..(416): unsure at all n locations
agctntcttgagaaaacttccttgagaagcttctttgagaaaacttccttgagaagctagagcttagctacacacacccctctcataactaagctcacctccttgagaagcttccttaagaagattcctaaagaagctagagcttagctacacatacctctctaatagctaagctcacctccttgagatgagaagctagaacttagctacacaccccctataatagctaagctcacccccatgacaaaaaacatgagaatacaaaaaaaaaagtccttactacaaagactactcagaatgccctgaaatacaaggctaanaccctatactactagaatggccaaaatacaagggccaaacgaaggagaaacttattctaatatttacaaagataagcgtgctcatacttagcccat

SEQ ID NO: 280406 - DNA, 433 bp, Glycine max
  unsure (1)..(433): unsure at all n locations
ntcataagtganatcaggtgcagccatctccctaagattcctaacacgaggtggaggttgagccatgttctcagcatgaaaattaacagccgaatgctcaaaatcagaatattcagaatcactagcaacaaaatactcagaatgctcaaaatgctcaaaatgcgtagaatgatcaggatgcacactatgcctaactaatctatgaaaggttctatctatttcaggatcaaagggttgtaagtcacgtggattgcccctagtcatgcactatatgcagcaaataatgtgttctcaaacaagcacctgacaaggnggtaaaactacaactatagtcaaacgatatccaaaggagctgaaattntgtcagcaacaccctataatcatgaaaagatagcacanaannattcanacaaaaattcanagtctaactatg

SEQ ID NO: 280407 - DNA, 424 bp, Glycine max
  unsure (1)..(424): unsure at all n locations
agctntcttgagaaaacttccttgagaagcttctttgagaaaacttccttgagaagctagagcttagctacacacacccctctcataactaagctcacctccttgagaagcttccttacgaagattcctaaagaagctagagcttagctacacatacctctctaatagctaagctcacctccttgagatgagaagctagaacttagctacacaccccctataatagctaagctcacccccatgacatataacatgaaaatacaaaagaaaaagtccttactacaaagactactctaaatgccctgaaatacaaggctaaaaccctatactactagaatggccaaaatacaaggcccaaacgaagggaaaacttattcttatatttacaaagataagcgtgctcatacttagcccatgggctcga

SEQ ID NO: 280408 - DNA, 216 bp, Glycine max
agccatgttctcagcatgaaaattaacagccgaatgctcagcatcagaatattcagaatcactatcaacataatactcacaatgctcaaaatgctcaaaatgcctataatgatcacgatgcacactatgcctaactaatctatgaaaggctctatctatttcaggatcaaaaggttgtaagtcacgtggattgcccctagtcatgcactatatgca

SEQ ID NO: 280409 - DNA, 350 bp, Glycine max
  unsure (1)..(350): unsure at all n locations
agcttgtgcttatcaaatcactcctacatctcatctctagcatgcattntctttctttacccactcctcacgtttggttttttagggaaaacaccataactaaacgcgccgcaagggatccctatcgcaccagatccaaatctagaacgatgggtgatcaagaggagacacaggaacagatganagccgacatgtcggctctgaaagaacaaatggcctccatgatggaggccatgttangtatgaagcagctcatggagaagaacgcggccactgccgccgctgtcagttcggctgccgaagcagacccgactctcttggcaactacgcaccatcctcccccaaacata

SEQ ID NO: 280410 - DNA, 344 bp, Glycine max
tgctctattcaatgggagtgacaagaatatcttcagactgatcaacacatgcacagtggccacagatgcctgggagatcctgaaaaccactcatgaaagaacctccaaagtgaagatgtccagatggcaactattgggcacaaacatcgaaaatcttaagatgaaggaggaagagtgtattcatgacttccacatgaacattcttgaaattgccaatgcttgcactggcttgggagaaagaatgacagatgaaaagctggtgagaaagatcctcagatctttgcctaagagatctgacatgaaagtcactgcaatagatgaggcccatgacatttgccacatga

SEQ ID NO: 280411 - DNA, 205 bp, Glycine max
agctttcaactaagcttctctgcaaaccccaacatcttctagttctgatcagccgtgaactcggaccttaaccgattcatgactgcatactgctaatgcttcaccgccgggtactagacttttcggcggaagttgcggcggcagccatgcgccgcgcattgtatggagtacgctccggtcatcgtgaactaaacgcacccctacg

SEQ ID NO: 280412 - DNA, 117 bp, Glycine max
tgtatcagcgtctagacctgaccctgtccctcttggtatctatggagtgcaggaacctgcaggaattattcgtgacctgagacctgcatcacaaatagggaacagacttctccttaa

SEQ ID NO: 280413 - DNA, 416 bp, Glycine max
  unsure (1)..(416): unsure at all n locations
agcttgtgacaagttgatatccncaaaccaaacctcttagacacaatcctaagagggtccccagtggccaatctccacaaacacacagccaccctttgcctcacaggaatagcattcctcaaagtggtgtcttccttcacaattgcagaattcaattcgtcacaaatcatatcaaaagtttctcttcccatcctaaaagcctttctaaactcttcttcaggaaaatcctctttgttgcatccatcccaccatgcccctgaacgatccttcacccacagccttctctgtgagcctcccacaccagatttcaccccttcagcactaccaccaccaccctctccctctctttcgcacgctaccaccgccaccgcacgtgccatgccgcgtgacttcttcctcttcaccctctctgactc

SEQ ID NO: 280414 - DNA, 318 bp, Glycine max
  unsure (1)..(318): unsure at all n locations
tgtcaagatccatcctcttctctggtgtctttatgtcatcaattctggatgaatgagatcacatatattctgtacgacaacaccatgtgacatattgtatgaccttatgctccataggacctctgactcttatcttatacactaattgttgaagtacccaacagttngatacatatcctttcatctatatatattgatggctgccagaacttacgaccgaatcgtgcatgtcttgagatatgtgatattcatacactgtcatgttatattcgcttagttttcttattatctgtcttggttcagtgctgcaagtcatct

SEQ ID NO: 280415 - DNA, 412 bp, Glycine max
  unsure (1)..(412): unsure at all n locations
agcttgaagaagctcgtaagcttccccttcctcaacaagtatacatgcccaagtggaaccaacgtacgcatcaacaaactctcatttttcatcacgaacaaaacacccccaactcatattggcattatgaatattgaacattgtatctatattacacttgaagaaatctttataaaagggaaaccgcttaatcctatcaaggtatttttgcattacatcagttacctcccttggttgtcctccaatcatgaagaaactatttagtgttatggacaatctaattcaacgagatagtcttatcttcccaccgagtagtggtttgactattccaaatattacagagtcatgcaaaanacaaagctttactcatttctttgagattctgtagcattntaaaacacaccctcacaaa

SEQ ID NO: 280416 - DNA, 426 bp, Glycine max
  unsure (1)..(426): unsure at all n locations
cttatgacggatntgcgagaggccaaattgtctcgaaaccaatttaagctggtatccaaccaggcctaaatagttcgattgaacacctgtacgacaagacaggatctgtggattcaagtaaaatgaccatatttcgctcacttcttcttcattgtctggatcgacaacaggaaaatagtcagtgaaccaggccgggccgacctctcgactaatgaatggagcatgttggggaagaaacttgtcaaagctcagaaaaatcttcatgtacttgaggaaaagcttttgtggatattgatcgaaagtcttgggtgttaatcgaagtgctctctggccttcgatcgagcgatnggcaacttcttcagcataatcttgcgtgattattaatcccattctctgttcgaaagtgccgttaagccacaactggag

SEQ ID NO: 280417 - DNA, 434 bp, Glycine max
  unsure (1)..(434): unsure at all n locations
agcttgaaaacaacaccaacagctacatccaagcccatatacctcaccggcagctgcatccaagtttggataccttactagtactagcatcaaaagccccaaacctgcctggcacttgcatcaaaagctcaaaacatgcccaacacctgcatcaaaagcacagaacctacctggcatctacatcaaaagcctggaacttcccgacacttgcattaaagcccgaaacctacccagcacccgcatcaaagcctggaacctacccgacaccaacattcanagcccaaaattatctcagcactagcctttgagtttcaaatatgcccatcaattgcataaaggccatagtacctacattatgttgtgcattagacccctgaataaaattgattcacttctttactcatttcttaccataataatctataaaaacttca

SEQ ID NO: 280418 - DNA, 264 bp, Glycine max
tatcatgaaactaccctaaaccaagaaaacagggtagaggcagaaaactctgcccaaaacacattcacatatcacaactttccttactcatataccccagtaacattctcttcgatccgattcgttaaccattggatcgacttggaaattttactggaggttcccagtacataaatctaaattttgaccggtgggatctactagaaaatgcctggaacccgatatgtactactcttcccatgactagcaatgcacaagcatttt

SEQ ID NO: 280419 - DNA, 429 bp, Glycine max
  unsure (1)..(429): unsure at all n locations
agcttggcaaacatagctggcacagaaaggatatctcctctagatagaagcataatatcatctgcaaaagccatatgagatagttgaatacctgcacagttgggatgaaatttaaaattggcatcatccttgaggctgctcatatctctagaaaagtactccaaacaaagcacaaacagataaggggagagaggatccccttgtctaagaccccgctgccctttgaagtggccataaatggatccattgactgccacactaaaggaagtggaagaaacacattccatgatctaagtacagaactgggctgggaagccaatggacttaatcatccaatccaagaattcccaggaaatggaatcataagctntatgcaagtcaattttcagtaggcactcgacgtgtattttcaaacaataataatgtgtg

SEQ ID NO: 280420 - DNA, 285 bp, Glycine max
  unsure (1)..(285): unsure at all n locations
ttcatttttaattataatgctagttttatggggaacgtattttatgtaaaatatgtaataacatatgttgatattggaactggtgttttgctgaagaatttgtagtacgaagaaatttgttgctactgtcagttacccattttaattaaatataatttgttgctgaaatttgcgatttaatcaattcacctaaacccagntcaattaaatataatttttatttattaaataaaatttggtggtgtatagccaattgaattaaatataattttattggtatttatt

SEQ ID NO: 280421 - DNA, 357 bp, Glycine max
agctttagcctttaggttgttcaccatgttgctccccttatctctaacaatagtttgtcataattaaaaccaaggatgtggattcaatatgtttaacccacacatttagagaactagagtagtagtctcgaataacatagatccttgttgataattcgcaatatcgagtttgagctataagcattttgtcacattattttaattgtaattggtcttcagatgatcccacatatctttaacattggagaaggagcacaaattacaaactattttatgctcaatggagacaaggatccaagaaatatttttttgcatccttggtttccatgtaaccaatgcaactttgtctgtgggagt

SEQ ID NO: 280422 - DNA, 565 bp, Glycine max
  unsure (1)..(565): unsure at all n locations
ttctcacctctttatgcttatgtctacttgtctccgtatgtacantatnncctctgatcctaccgcccatgacccttggacttctgcctctcaatcacagcttattctttgggagaccgttccgactgcaccatacatattgccctgagaagaaataaacatggcgcgagattgagccactggagtatgctattcagccctgatggagctgaaccgaaccttttctactatcagaaggtaaaatctatccatggattcttgtgcccccggtccaaagagtttgccttaattgttgcaagacgactagcacaaaagaaggtgatgctttccacgctggaacatctggtaatgagggttcacatgctcttggattctagcacttcttcttatgcanataataaatctaactattgtttcacaagacgtttccaaagaaccaccccttgtatgctcaattggggatgttgggccatctcatgattgaggttacagtgcctggattcctctaatttaaaaaaatggatttctccgggttagaagcaacttttcctctctgaccactccg

SEQ ID NO: 280423 - DNA, 396 bp, Glycine max
  unsure (1)..(396): unsure at all n locations
agctttctattctaacctcgaaattcaagagagcactttgattnttgaggtttatgggataaaaatggtcattgaccaatccctattctatgacttgacccaattatctagtgagggtgtaccatttgaaggtgcattgaatgatgattggaaatttgatttctctgtgcatgatgcccaccggttggtttgcaccaatcaagcggatataaccgaaaggcttattgccggatcattggctnttgaaagccgcatccttcactatctcattgtgcgtattttacctccaagatcttcaaaccttgcacaagtttctgaagaagatcttattgttatgtgagcttttcataccggccgaanaattgattggacacacttaatccgatatcgcatgca

SEQ ID NO: 280424 - DNA, 605 bp, Glycine max
  unsure (1)..(605): unsure at all n locations
ccgcttacagtgctgcacgatatatttactcatgcagtcactcgantatgcactgactttantncncaaaatcagaanangaaagattgggctttggtacgtcgtgaatccagacacataagcatgtggacgctgactattntagtctcacccgcttgtcatctatagatggcttgttcgatgacatgcggagatacccaagggtatccgtacctttgtcaactataggcaagcgagcctgttgatcgagactattttaatctcaccacttttgcaccccgacccatgagttatgtggcatgcggagatattcaacggttattcgcaccttngtcaactagaggcaagtgagcctcttgacgagactattttagtgtcacacctttgtcatccagagacggcaagtccgataacatgtcaagatacccaaggggtttccgcaccttttgtcagttagaggcaagcgagcctttgacctgctaagaccaatgtggtcatctgcaccctttccgaagatgtaggcatcttccggccgagacccacaacaagatcaatttccttttgtgacctatggggccggagcacacatacacacataatggttg

SEQ ID NO: 280425 - DNA, 413 bp, Glycine max
  unsure (1)..(413): unsure at all n locations
agcttggcctatcccacatcacatgttaggtgcaatgcaattgcatacaaatgctgacttttccttttaaaaaaataataaaacaaagatatttgcgggtcccatgttgctcaaaacgtttcgttntcagttgtcacatcttctgtaggtacatgaacatgtcctgcaagggcgagagctggcccatttgatactgaacagtgccaaaaaggtaatcatccacggaaaggttattatcgtccaagtaattaaactgaagatcaaacgcgttntctagctntaggtccagatcatcgttccacttggtgtcgctctgcacctgcctctcgcacgtgacatcgggcgaaaccacgtgctccgaactgctcgaagtcgtgttcaaccttggcaccgaatccgaagtctacatgtac

SEQ ID NO: 280426 - DNA, 444 bp, Glycine max
tgctcccaattcttccttacctttctctccatcactgcctctgtataacatttactctctctttctcaccgtgccagaatcataccctcaattcatcatttgccacatatccttcctattatgatccccattctctttgctaaccaatttcccaccatatatcatttaatgcaaatccttaatttttgtattgcctcttgtgccttcattgttggcattatgctcaaattttcttttgtccagagcccatccatttctttttttctctcatctgaactacttccatgcgacacgtgtatttaccttgtagaagctctgtatattcatattactttattattgttgccacatttcttgactgcactgcagatctacttttcttgagcccttataaattaccctttcccccattctttaatgaatactatcacattcacattcact

SEQ ID NO: 280427 - DNA, 417 bp, Glycine max
  unsure (1)..(417): unsure at all n locations
agcttatcactactctcaatctctacctgattgaaattctgatctacattcaatgaaacttccctcanagctttaagcacacccactaaattttccaacactctagctcttaatgataaaaaccacctctgataacaaaatgcttgagaacttgtcacagacgcttctaaaaatttcaaggaagagcaaactgccacatgagactgagtaagctgatcatagtaattagaatcattgatactcctagcacgtcttggacatgtatcacccttgtaatcacatgattntaaaggaaattttatagtctccatcaactccattgaggtggttccctgttttggttgactaagaagttggatctttccttcagaatgagcataatgaaataatgcttttaaccagctacagcaagaatca

SEQ ID NO: 280428 - DNA, 281 bp, Glycine max
tacacaggctgaactttccatgtaaaaccatgaataaattcaagacaatattaactgaaagacctgtgaagcacctttatcattgtccacagcaataacctgaccaattccttctactttacgagcatatctgagagaccttagcccagaagcagacaatgcctgtgtgcaggcaagagagcaattatattacacacatgatacttgctctggattcaattgccataaaatattaaattcaatcaatattgaatggacgacaatgatgatgacatgaaaca

SEQ ID NO: 280429 - DNA, 406 bp, Glycine max
  unsure (1)..(406): unsure at all n locations
agcttgaaggtgtgtaacccactcatttttcatataagggttgtggttgggggcaaaattgaggcccctccaaagtgttttgtaggggtataccactaactgcttgcccttcagtggcatattcgaggcaaggctcgaaatcagctagattctggtggggaatttcatgtgtctcccccatggtttgagaggcatgtgcatgatcagattgaggttgttggctctcaatgagtatgagagtggagttattgacattctcactgggagtgtacgccacattgngaagtgtatagttgggaggtaagccatatggcgggaaggtgtgctttgtttgaattacacataatgggggccgcccgtacttcctaaatctttgcctaccatatctgagggtggatgattcatt

SEQ ID NO: 280430 - DNA, 467 bp, Glycine max
  unsure (1)..(467): unsure at all n locations
ntaagatntatctaacatagtattcaatcccacttctagtgtgatatttgntatttcaaactgaacatagcaaaataaaaacttgataagaaatgggccacaaaaattagctcatatcaaggcattaaagatatgcaataaaatcataaaaaaacaataaaagacacatgacaaatatcccaattcccgtgggtattggcccgaacccatcctgacttttacgaggagtngcctgtttggtcgagtataggtatgggtattacccgaanaatttaagcgtggatggggatggcgatggngatgacgacgtgtatcaaattatacttatagccatacctggccaccattacatttttgtatgaattttttgtcacaacatatatttacagaatatatcttgaatatttattggtatattttttaataattaataacacagtaaaagataatgaatcttattttatctt

SEQ ID NO: 280431 - DNA, 416 bp, Glycine max
  unsure (1)..(416): unsure at all n locations
agctttaactatttatggactggttgtagcattagcacttttatttgctaatccttttgtttaatcctaaaaaaatagaaatacatantcctttttccgtggacttgctttaccggtcttgctttttcgaattctatttatattaatatttcactcctataattctttatccgttcggacaagaacacaggggaaggactaattgaaaggtgaagaattcacatactgattcgccctctttcttctctttcttagtccaatgacccccccttctttttaagataattattctcaagtgttaaaacttgagagatcttgcaatggatataagaactggtatctaattcgaataagtatcattcttttgggaatccttcaattgattgaccatccaaatatatatggaatatatatat

SEQ ID NO: 280432 - DNA, 447 bp, Glycine max
tcttacaaagcatacggctttctggatgtagatgatgatatctatacagatggatcttatatatctatatatctatagatagatatatagatatagatatatagatatagatcatacaatgaagtaccgcacgagtgggtatataggaatccaaatctgccgaatcactcatgttatgatcttctacatcctaggtcttcccgttccttcatctggcttatgttcttcatgtagcattcagactgaatgactctatgaaattacgtcgctacttccacatggtacgggtaacgtaggagacatctctatttttccggggggaatccttatattaccacagcttaactttcattcgcctctgacatcacatgaaaggataacccgcctccctcttgaaatttaaacaaaggtgttcggtctgtcgtgttgaacaatttgctttcatat

SEQ ID NO: 280433 - DNA, 298 bp, Glycine max
agcttagccttccattacaagcaatataatctctcaatacaaggaaggaatagtttttagtgaacaaaaatggctaaggatgattaaggatgtctcctacaacctctaaaccctagacttcactactctaacctaagctctctcaactgcttcctttctgtcttctcagcttcctctcgtgcgctctttctccctctcccttttaattccatcaacttcagtggtttaaaggctcttggacctttcagctttcgaacgctcgtttagcaagattggcttgctaagctagagtgagtga

SEQ ID NO: 280434 - DNA, 369 bp, Glycine max
gacatggaaatctacttcagaatatttgttgtcttggattaaaggctgaatgtggatattcattcaaagacttcagtatgacaaactgagataattatgcattaattaccaatgctgaacctagtgccattaaagagaaaaattgtgtaattttaaaaatattcccagaatctacattctagaatcgtttttactagttcccattgactttctatggagggggggaattaagattctgaggggaagttttataactatggctcatcccggaatatctgccacaatctatacttttacgaacataattccagaaaatgatctcgggacaaaaaattactgaccagttagatattggttttaccccccaac

SEQ ID NO: 280435 - DNA, 210 bp, Glycine max
agcttacttgagatagcttccttgagacgctctgttgataagaccatgctgagggtgtagagcttatctgcgcacacccttctcatagataaggtcaggtacttgggaggcttccttatcatgagaactgaggacgctagagcttagctactcttacctgtctaatagctaagctgacctacttgagatgagaagctagagcttatgtac

SEQ ID NO: 280436 - DNA, 204 bp, Glycine max
  unsure (1)..(204): unsure at all n locations
tgcgtatgcganatcatgagcaggcatctccatatgatctctaacacgaagtggacgatgagccatgttatttgcatgaactttcacatgcgaacgctcacaatcatattattcgagattcactttctctgctctactctgaatgctcacaatgctcaaaatgcgtacaatgatcangatgcacactactgcctcactaatcta

SEQ ID NO: 280437 - DNA, 407 bp, Glycine max
  unsure (1)..(407): unsure at all n locations
agcttgagcttgacttgtttaactcatttataacttatgatttttgcttttacaatttgttaaattattttttaactttatcgattaagcatttgataattattttaataccagataattatttactacttaaaaaatgtgcttaacatgtgatatgtggaattaaatctttttagactattaaaatagttcatagcttattgacctttacaaaaaagaaacttcanaatcaatttaacattctcaacaaagttcaaattacatattttcataatcaatatataaataacaaagaccaataaaatcttcatcaattnttgtatcaactaaatcatttagacctcaatgaaacatanacaacaacacctttcatgttttctaatttcaactaaaaaatgataaatagt

SEQ ID NO: 280438 - DNA, 469 bp, Glycine max
  unsure (1)..(469): unsure at all n locations
taatgatggaatagctcttcctactatatcactcagctgcatgggtaaatactttcattcacataatgattaggtgattgagactatacatattccaacgagtaaatttagatacacaagtcattntcaccaattgtgctctgatcatattgcctttcctctctgcatatgtttaggagaacttttcctacacttttagatacataaaaataacatataaaaacaaccttatcccactaggtaaggtcggttacatagattacacatgccataaaattaatggttctgactcctgagaaatacagacaatctatttaataagttgtcactactgatttacctcattaatcaaagttcaacactagtaaaaaaattggatgttacagatcctagcatttagttgaccatatacaccanacaatttaaacttacaatacttacantgaagtttatactctctacttctaaa

SEQ ID NO: 280439 - DNA, 272 bp, Glycine max
agcttgttgagtctgaaaatttgttgtttcgattttaaatgtgataaaaacgaagtgggagattacgttatttatttgggtgcgaaggggaggcttattaggtttgaatgggcaattcacgaactgatgcattggcaattcatgaacgttgtattgtacactaatctacggtctatgttcgcgatccgtggactgatgaatgggcaattcacgaacgtcaataagaaagttttaccgcgcaagtattgtttcctgagccagttacggatttg

SEQ ID NO: 280440 - DNA, 256 bp, Glycine max
tgcaccccaatatcggtgtctgatgctaacttactcctatatctactcaatagtgcaatcataacctatgccacggttcctcaaccttcatttttctgaggatacaacttgaacgcaacgtgcttatcatggaagggtctcatggcattccattgagcattgtatgaccttgaaacataacgtgcataatctaattgatgcatgctgtctaaaatttgacgaggatcatcgcttgtgatttgtgaattctgacatt

SEQ ID NO: 280441 - DNA, 432 bp, Glycine max
  unsure (1)..(432): unsure at all n locations
agcttgaaatggaagatagaaagtgtgttaatgatctacaaagagggtatgatgtaccttcaaaatttgattggaatgaagctcgttcgctcctaccttttttaaagatgttttatgatgcaacgatgcagatttctggttcttactatgtcactagtaatatgtatgtgtgtgtgtgtgtgaaggaagtatttgcaattggtaggtagatccgcaagtgtgaaaatgataataatgtttgcataagttcaatgactactaaaatgagagttaaatatgacaaatattggggaacacctaacacaatcaacattntgctaatgattgtcgttgtccttgatcctangtgtaaggtgaaatatgttaaccactttgttaactacttatttaatgaaaaccagacaaatgaattgaagttaaagttgtcttcta

SEQ ID NO: 280442 - DNA, 402 bp, Glycine max
  unsure (1)..(402): unsure at all n locations
cttctncctcataaccttctttntagtctaatcattacttgcaatgatcatatcatccacatagagtaagagtgtgaatttcccatcatgcgagtgttttatgaaaaaggtatgatcatttgtagatgtgtgtaataccacacttcaggatgctttatttttaataaagatatcatataattaaggatacaatgaaagaataaaaatccctaattcctagttatacacctttccatatttccctatttacatacaagaaaatcatatctttacaatacccctcaagttgaagcatatatgtcatacgaacccaacttgtcacgaatgtagtcaacatgagaacccttgagagatntagtgaacatgtctaccacgtggtctttggagctaacaaagtcagtg

SEQ ID NO: 280443 - DNA, 432 bp, Glycine max
  unsure (1)..(432): unsure at all n locations
agcttgtttcagctatttggtggcgttcagttgtcttgcgcctctgtttttctattatattcacaactgtttcaaaatgtacttgaaatactcccaccggctcccaatacacatgcacctatgcctgattttttctcagtttactgaatgttcatgtttacctattctatttctagaagctggaaaatctgcaaatacagaatggaaggagcaggtttatcaaagggtaataataacaactgttgtttttcttcactttctttttcttcttcttccttcgttngtttgctttttcgtatctctgaaatctctgccttcatattgtatgcatgcatatattacttaatttgtcaaattttactaaagtgaactgtaaaggatgtatacattntgcataactgtatattggttatactttgctcccactcctac

SEQ ID NO: 280444 - DNA, 447 bp, Glycine max
  unsure (1)..(447): unsure at all n locations
tctgatgctatatccgttggagtgtatatttataatgttaatttaaacagacaaaaaaatgagcttgaacctgtgaacacanactactaatacccttagagtggcaccacactagccttacttttaaattgcaaaggccagttgacaccccagtcttaaccaaccgtacacagtctttaggataaaattcaccactggtgaattcagtgagaggacatactgtgatgtgaataattggttattatattgaggaattttttttggcgagcatactacaaaaagtagtgatggaaaacataccgtactgatagacttaggggtccaatttgaaaagtaacattctatgtatcaaggaaaatgctcacagatgctgatatggcaaatggttttaacagcacattatgtgtgctatttgacagtgttttattattaaacttatgatgaccg

SEQ ID NO: 280445 - DNA, 423 bp, Glycine max
  unsure (1)..(423): unsure at all n locations
agcttgcatcaccactcctatctacataatcatatcgttggtttacgacatatgtccacttcaccaccttgggtgagcgttgccatttgacatttgctttcatgatttccatcattaccacatctagaattccccgtgcaaatttatttgtctttcactttcttcatctcatcacgcactcagttgtttgcacaatatctcaacatcatgcttacattaccataacagagttttagtcatcacaagtactcgtattcaagtttatgtgagactaccacaaacagaaaataatactagaagtgtaacatcattgttgaatattaaccttatcacacaacaatcacgagcacatacaaattttcagtgcctgaggttcatacccnctctagttaaagttaaatacatcacatacatacttaacat

SEQ ID NO: 280446 - DNA, 304 bp, Glycine max
  unsure (1)..(304): unsure at all n locations
acgatgatagcacttatcgcaacatggtctgcttagcgcaatcatcataaatcctaaaatattntaacagttgcaatgaataggctaagtgcagtaagcgcgcttagcgcgctcatcgcaattcccaaaaataaacacaggggttttcaaccctttcagctacattgcccctaatgggcttcaaaactacctaaaagtctaaaatacctaacctgacaacaactaactacgaaaaccataaatgaactatcctaaggtttgaagcatgaaaagtaaaaatagaaatgtgctaacttacttggat

SEQ ID NO: 280447 - DNA, 432 bp, Glycine max
  unsure (1)..(432): unsure at all n locations
agcttaaccaatgganaaagagtcatcttaccttcaacgtttgttgggagcccacgttatatgaatcaactttactttgatggtatggcaatatgcagtcatgttggttttccaaatctttntattactctaacctgtaatccaaattggcttgaaattcgtagattactttcagctttgaatctcanaccaacagacagaccagacattgtatcacgaattttcagattaaaatatgaacacatgctgtcaaacttaacaaagggtcaattactgggaaaagtggtgcatgtaagttgactattcattttatacttaaatacaaatataagttgcttatttggccattnttctttgttctataatgcagatattaatggctaanatattacaatntagccaacacttttatagatatgagatacagaatta

SEQ ID NO: 280448 - DNA, 307 bp, Glycine max
tctcgtagtacccctccacgtcattcccaaacaccgacgcgagccccatcccgtgataaccacgtgcttcttcgggtccttctgccactacggggcggacaccttcggcgccactgtggcggacacgaagaacacgcgcttcgcaaaggaggcgcatcgcttggcggcggcattgttggggccccgaagagggtccaagggagaaccgcggagggtgatgatcatggaaggccaggttgttcgttagagcctcgatggcgccgccgcctcgcatggtggttcccgcggtggtttgggggttggagat

SEQ ID NO: 280449 - DNA, 496 bp, Glycine max
  unsure (1)..(496): unsure at all n locations
atactctctactcccttgtttctactccgttctatacttgatctcatacaccnnccggnngngttttgtgccccgttgtgggagtgtaaaaaaacacagctcgccgcggggagactctagagacccgcgggcccctctctatactcttatagagagccgttaacataaccgggcggcgttttacacagcgtggattgggaaaaccggtgttaccacattaatgcctggagaaaatcccttttccctggggataacaagaaggcccaccattcccttccaaattggccacctatgtgaatgggcctatgcggttttttccttcccactgtggtgtttacacccatatgggcctctctaacaactgtctgtggccgtatttagccagccgagacccgcacacccgtgagcgaaccattgggggggtttaatatttttttaatgtttttttgaattcacaccttacctctgctttcttgtgcttcccggaacaactacg

SEQ ID NO: 280450 - DNA, 329 bp, Glycine max
agctttaatctcatcgaccctcacagcctgtaaatttgggagccaatccaatacgtagaggcggactctaaaactataatgatagcgcgcgtacatgcgcttactgaatgatctatgcactctgctctttcatgacgccgaatcccatgccttgcgacatgctcggagtaccatcgagatgtggacactaacaccccttgcgatgaaaagcgagatgctctcatctaatggcgctcctctcatggagtagccaatctgctgtatggtgagatcaggagtattagtaatacaacccattgttcccatctatggaacatcaggacgtcctt

SEQ ID NO: 280451 - DNA, 580 bp, Glycine max
  unsure (1)..(580): unsure at all n locations
atgaacctgagacgtgnactnaccccgccttgtaactaacccctctccggttaaggcgctatccgcatacttatgaatctcccttgctgtcaaacagaacgacactccgtatgttaaaagattcctttcatatcgcgttggagcaatttgctcgagcactttggttggcggcagtgttatgtccatagtcgctaagacaatgtgaggcgatagttgttattccccgttgtgctcatagtaccacaataggctgtgagtgtcgtccttttactacacancttatgctcttaaccactgtcaagattatacagcgcccctctatacatgtacccacacagatattgagtcactatgtnctcaccatattctatagccaccacanaggtatgactcagacatggctacgcatggggaaanacttactacactccttctggttngtaatacgtaacttgatgtgattgcgttaagaatactcaaaatacgtatctaaatcgtggccaaaattgggtctgggtgaggaaataaacgcaagatttgtgaatcctctcgtttagaatgtagggggcggtgtgacccg

SEQ ID NO: 280452 - DNA, 392 bp, Glycine max
  unsure (1)..(392): unsure at all n locations
tagcttgaatataaactgttcgagataatgttcaactaanaagtgaaataacggaagaaagataaagatatgatgataataagaataacgacaggagaagattgaggaactgaaagacaaaaatgaatgagtgtagcgtgctcgtacgaacatgactgattaagaataaaggaggtggctttagcagtgcaaccagcgagctagaggcaaaatggtgtcgtttgggtagagaaatgcggatgtgtgcggagagaggggttctagaatggtcaaggagatgcatacagtcctaacaacgtcactctcanacgcataagcaaaataaacaaaggttgtggaaatatcataaatgccactgtcttatacctagtgtcaacacttgaagatatcca

SEQ ID NO: 280453 - DNA, 447 bp, Glycine max
  unsure (1)..(447): unsure at all n locations
agagaggaagcttcatggaggaagagaatgagagagcggtgtgagcgtgtggcctaccgcttagtggcgcaccatgtcttggcttgttgatacacactctcgactctattatgttcttccaccactatacataatctcttgcatggatccctcccacctatatgaacagtggaatactccatattctctgggcctcgactctcagatcttatcttcttcccgcctgttgacccaccatcgagtctctttgcacttttatccaactcctattaaggccttatggggaagcattaaattctatcaggctctcttttttgctcctactctaactatttcctccaacctacagacctcctttaaatcccctctcttaaatcctctaacaagacaacttctgtccttactatttcttccaatctgttggcaccccacttctctttgtcttcn

SEQ ID NO: 280454 - DNA, 304 bp, Glycine max
  unsure (1)..(304): unsure at all n locations
agcttgtagatctcatccgatcttgaggcaatttttacgcttaccaatgcaagcatgatcacacctatatatctataatttcctatccccactaattacgtcaatttatctcttatcattganatttgaactaataaatttaaattactttttacgtatctataaatacaaacagttgcagctatacccactttacctctttctttcttcttaaaccctaagcactattcatggccctcttctcctatattctgctactgtcttattgctagagagaatctaatgcaatcctaaccctgaaagc

SEQ ID NO: 280455 - DNA, 508 bp, Glycine max
  unsure (1)..(508): unsure at all n locations
ntgaaacctgatacgtcgcattcgtgactatgaccctagctggccgtgtggactacataatatggttttgcttgaagtgtcaaatctgacattgatgtgtcaagtctcgtaatattatcatagaacaacgaaaagatagtgtcattattataacccaagtcatttacacacatgcataatacttaatctagactcacacgatgttggacaaagtacataaatactctgtgtacatacaatatcttgaccatgtcataatgtgatatcagattaacattattcaacgtagagcagatgtgtaaaagaattatcatgtctgtttaactccactacttggatagtaactataatagatgaaatgtagctgtattatcacatggataaacatgcatattaatgacttgaataaggataggctaagatgangtggacagaggtggaagggacagcctagtttatgatagaatacgtatagataagaggatacggattgcgttgagtgactaag

SEQ ID NO: 280456 - DNA, 396 bp, Glycine max
tagcttaagcttcttcaactgcacaaggctcttaatatttgaagagtatccttatggaaccttcacctgacacagatactgacaaaaaattatcttctcctttttggacaaagtatgacaatccgggggcaagtaaatcttctttccatcagaccttgtatgcaactgtgatcgtatccccatgtcagctagatcttgacgagtattcaagccatccttcttcttgccttgaatgttaaggagcatcccaatcacactgtcacatacatttatctccacatgcataacatcaatacaatgtctaacgtccagatcaaaccagtacgggagatcaaagataatggacctcttcttcatatgcaagtcttactcttaatcttcttttgggactttcca

SEQ ID NO: 280457 - DNA, 440 bp, Glycine max
  unsure (1)..(440): unsure at all n locations
tggtacaactagtattctttaatctaccaaatcactattggttctaacacanataagaagatttattggtttgattgcacaatgactaacactttatcagcttacagatggataagtaatttcaacacttagtcacttttctcaagatgaacaaagtattttgagagctttgttaaactctagaagaatttccataaagatgcctttacccaaagaatgaaataatgagcgcttcaaatcgagcttcatattttcaaatctcttggtatatataaaccctcttcaatcaagtatatgttggctctatacggacatatttcctctcttatgcttgagtctgaagaaaatggcattggaggcattaatgcatgtacttttcatgctgagaaacactcttcttgttggtgtgttgacactccacaagaaacacttctttttat

SEQ ID NO: 280458 - DNA, 417 bp, Glycine max
  unsure (1)..(417): unsure at all n locations
agcttggagaggatgcttcaatggaggaaaagaaagagggagagaaagagagaggggggagcacgaaattgaaggaagaaaaagggatagaagttgaactttgagttgtgtctcacaagactctcattcatcaaagttacaacaagtgttacacatgcttctatttatagactaggtagcttccttgagaagctttcttgagaaaacttccttgagaagcttctttgagaaaacttccttgagaagctagagcttagctacacacacccctctcataactaagcccacctccttgagaaacttccttaagaagattcctaaagaagctagagcttagctacacatacctctctaatagctaagctcacctccttgagatgagaagcanaagcttagctatagacaccctataatagc

SEQ ID NO: 280459 - DNA, 455 bp, Glycine max
  unsure (1)..(455): unsure at all n locations
tgagtcttagcataattgtctcatgcgctngctaattatttattatgaaattgatgtgttattatgtcttgatcagagcatgtgatttgtgtgtaatgtgattgatgattgaaaagtgtgattgatggatgaaaagtgaactttgaatgacaaagtgatggaattgcgtgaattacgtgtaagtaaattttatttggtttatatgatatgtatatctagttgtcttgtttctctattagttaggaatgtgataactcactccccgtgtgttgtttgtatttggatcctgtgatgatcttgaactttgtgttcggnggagcagacgactaggtgaattgatttaaggaaccttgtgctgaaggacgtcgagacacaacgctctaatangatgtggcattgnggtataggattntatattaattgtatgaagtcttagacgggcttgtttaaaccga

SEQ ID NO: 280460 - DNA, 396 bp, Glycine max
agcttgtcctccatcaaagataagacaaagtataaaaacaagtacaatcccttctgctcggctgctagctatcatgtccacagaaatccatatactattatgacaatagagattgtaaagtaatcatcacaatatcacatgctatttgctacggcctacgggaaagctcgggcgagcaaacttgcttggtgagtaatgctgactcgcataagtagtccattacttcacttgacaaggagtttcggatcaatgtcttttgttttgcgtgataacacgaatgcagatcaacttgcacactacgttcaaacgtgaatgataataacccaatatatcagtggatgaacttactttaacttcctgagccatgagggcttaaatatacagtaatacagggta

SEQ ID NO: 280461 - DNA, 418 bp, Glycine max
  unsure (1)..(418): unsure at all n locations
tgttcccatccagctgtcagattcttttccacctttgaacgttcctcttactgctaagtggcaccaaatgtctgcctttgtgtaagctctttntctttctttctttctttacactaattaacaatcctcttgtatggatcttacgtacctattaaacactggatttccaaatattctatggcgccgtacgttcagttttctttcttcttcctgcatgttaatcaccaattgttgccactctgtcatctatatcagtcactaattaatgctgtaattggtgaatctatatcattagtcaggttatttattcgttggatcattaatcaaatgatttctgcatgttaattaggatacttcttctaacanacacctttttatatatactcttgacatgaagtcactctgtgtccctattata

SEQ ID NO: 280462 - DNA, 389 bp, Glycine max
  unsure (1)..(389): unsure at all n locations
agcttggctctacatgagacaaganacagcagaggacgtaaaatagaaaaagaaattaaaactatggtataagttgtcagaatcacttgacctgaaaattaagctagtacggaacgccctggaaatggtttaactctttacagctcctcctatganagccctctaggcaagaaaactcatgtttatttgcctatctaaaaggtttaattggcgtatcatgtttgctactttggttgcatgggaaaacacaacagacaatatacgagagagtaagacacaacttggttttaaagccatctaaaccagatactgagcctttcaatgattctaacccaaatctgttgtttaaaccaaaatattcacagaatcattcactgctaaccaattac

SEQ ID NO: 280463 - DNA, 389 bp, Glycine max
  unsure (1)..(389): unsure at all n locations
tttggctttacagctcactccttgataccattgtattgggtgtatcttggtngctgcatcttattacatttgatatctattttgcattgtgcataatcatattgtgtgtgaagaaaacttttaaattagacaaatttcttagaggtaaaactttctgtttaattgatacacctcattgaatccatacaataagtgtctgaagtttgtaagttaagtcttgataggttaatcattataatatctctaatcattcactgttgttgaacaagatgattagtatgagtcttcttaatcataccaaggaataacgatactctctttattgatgttatggggacaagatacttaatgatactagatatcaatcattacttgtcttgattgttcta

SEQ ID NO: 280464 - DNA, 417 bp, Glycine max
  unsure (1)..(417): unsure at all n locations
agcttgtaggcctaggatcttcatcaatggattccttttctttttggaagatgaatggcagcagaatggagaaggaagagagagaggagacgccacttcaaggagaagatgagtctagaagaagctcaccaccataggaggccatggataagagcttggaggaagaaggagatgaatgaagggagaggaagagaatagcacgaaattntatgctctaaaagagctctgaaatctgaagtttaattttcaaattatcaaagttgaaaaaatgcacacacatgacctctatttatagcctaagtgtcacacaaaattggagggaaatttgaatttctattcanatttcacttgaatttgaaattgaatntatggagccaaattttggagccaaaatttcactaattatgattagttaat

SEQ ID NO: 280465 - DNA, 389 bp, Glycine max
  unsure (1)..(389): unsure at all n locations
aaggaatgttttgagagatgtccttgcaagcacgccttctttatgaatttaagagaaagtggtaatattgncattgttattctttacatttatgatttgacttttactggcattgattataatatgttgaaggagtttaaaatgcgtaacactgattttcataattttgattaagtgttttaattagattgcaagaatcctctttcccttcctattgaagttccattntcattttccttcatagagcacacatggggttcatganactgctcatttcttgggttttaatgtggtttctatttgttgatgggttatgggtggtgactttgtgtgtgatggttgagtaatagtgggaaagctctcatctttggacccaatccctctcattt

SEQ ID NO: 280466 - DNA, 428 bp, Glycine max
  unsure (1)..(428): unsure at all n locations
agcttgcttatatctttaanaaaccattaactgaagaaatgttgattatgttaagaagtcaacttcaaatgatctctgttaatgaatgatttgatctctatatgtcatcatctattgcatccaaggatatattgtaacatcctggaaatttctacccggaatttttgaaaacgatgtattttgaatgattatatatatataagtattattcagtgtacatgcctatatgttcttggtagaagtaggaatagtgggggcaagatacgcgagttatgctaattaaggaagagaaatccataactgggaggttgtgggttaattcttaattaattagttaanaatcatcgttntgcgtgcgacttannaattaacgaaaccaacctctgaaccacgctcggngttctattctgagcgttntgatatatata

SEQ ID NO: 280467 - DNA, 436 bp, Glycine max
  unsure (1)..(436): unsure at all n locations
tcaagatttagtcttcatgttgttcatgttgttctccctatctctaacactntgcccttataccaccacctnctccatcttcaccaccacattctcaacctccaacaccactgcctgctcaagattgactatgatgttcgtcattgtttttatcttcaaacccttttttgcttatgagaaaatggggagaaataggaattntgattgtaaaagaactaatatttttaaataaaagttggtttggaatattntcatatgatctctcattagttattaactattattattatgttgtcacatatgtcatatataattntactgtcatatattcttcccatgattgaacttanngggaagttaacaacattacatttttttcactttcttataactctaattacttttataaatcanaatttatattggttgtcatcat

SEQ ID NO: 280468 - DNA, 371 bp, Glycine max
  unsure (1)..(371): unsure at all n locations
agcttgaaagagcccgggtagtcaaagagaagttcaagtccatagccatcaaagtctgaagagagtatgatgaactaagggacgttaatatggccaccgatgaagccttggaatgagaaaccaagaaggcccgaaaggaagaacacgaccaatacaagttttgagggactttatagggcagcaatagtgagctcaaactctgaagaggtgacaggaatcatcatgggtcanaggcatgatctggaaggacgagctaaaggcttgccttatgtcgaanagaaatttgtcccaacagttaaagtgagactgaagggaatatgtgggccatcatcgatgagtgcanagagaagctaaatctagcggcaactcac

SEQ ID NO: 280469 - DNA, 403 bp, Glycine max
  unsure (1)..(403): unsure at all n locations
ntgaagggtgcgcagcccaccatttttcatagtagagtatctataatgtgtctaccatcacgatcatcgtctccctttccatcattgggggtaccacctgngccgccagatccctccaccttttgggcgtgttctttgaaagatccgtccccctttttgcaaatgttctgtagttgcatcctatccggaaccatatcaaaattgtactgatactggctaacaaaggcaaccattaggtccttcctagaatggactcgggaagattccaagttaatgtaccacgtaacagctaccccagtaagactttcttggaaggaatgtattagcaattcctcatcttttgcgtattcccccatcttctgacaatacatctntagatggttcttgggacaagtagtcccct

SEQ ID NO: 280470 - DNA, 178 bp, Glycine max
  unsure (1)..(178): unsure at all n locations
agctntgagctataatctaatgattttaacgttttactcggatgaccagttgagtaccgtaatatatcgacacgctcgagagtgtatggtgtagctctgagctcatgccaacatcaataactgtgtacttggatgtccgattgtgtgacatatgatctcgggacgctctaagttgaat

SEQ ID NO: 280471 - DNA, 508 bp, Glycine max
  unsure (1)..(508): unsure at all n locations
ntgaaacctgcatcacggacacttaaaactcagcttaacattcaactgtgtgcgtctcgatgtattaccggactctttcttacttctccctttaaaggccttgacgggagaatcggctaatagcttagacattcaactgtgagcgtcgcgctatattacaggactcgatctgacattcgacttaaaagttattgacgttagaattggctcacatgttcaaaattcaatgtcgaggcagctcgttgtattacgggactcaatcagcattccgagtactaagtatcgtctttgaactgggcacatggtcgaattcaatcttgagcggttgaatatattaagggacttcatcacacattcgatgtggaagctattgccgtttacatgggcatgaggtcaacatccatttccatccgaccgacttattacggtacttaatcacacattcgagtaaaaatgattgccgtgtgaatgagtcagatgttgacatcatgcccaactcgcgtatatn

SEQ ID NO: 280472 - DNA, 356 bp, Glycine max
agcttcaatgttaatgtcacattatataatgtcaaaaacccatatcaaattatggagatcgtggtatggtattgtaagtgacatccttggccagagtggatttgattgggatggcactaagcacgtgatcacagttgagaatgaaaatgcttggaatgaatattgcactgtaagtattctttaatatgttgctatttgttattcaaagtagattgaatttgactttttttttcagtcgcataaatcggctaaaccgtttcaattcaaggtgtttcaaaattgtgatgatatagtggatttgtgtgctatagataaagccaccagtcatggagctggatctgctatagatgctgatg

SEQ ID NO: 280473 - DNA, 243 bp, Glycine max
taagaagcagtgtgcatttaccgaagaagtatttccgtacgctgtgtacggaataactttatctgtaacaagtcttttacagttacgaaagaactctttcgtacaaaatgtactgaacacgaacttcttctgtatgtaacagatctacacataatagcggtaaaatgcgtacctcttgcgaaacaaaagtagctatggagggcggccaccaccattatctgacctgttccaaatgactacctc

SEQ ID NO: 280474 - DNA, 410 bp, Glycine max
  unsure (1)..(410): unsure at all n locations
gacgaagtgttgaaaggtgaaacttcctgcttatattcgtcgaccacagagaggtacctatagatatgtctcgcgggtcatgagaccttggagacgtcaagtggggtgctattgcccaaaaccaagcttgaccaatcccgacccatcccggtcatatgcatgcagtgagaacctgagatgtaccttaactggctagctcctggcagtcgacagataaaaggaacatagaccactcagcatcgatgcttgtggtggctcgccacctgtgaactttgatttgcatgtgggttatggtctctggtaatcgattactacaggtgggtatccgatcactacgcctaataatgataaccggaggctaatatgtctctggtatcgattaccagcttgaatagaggtctgaacgtagn

SEQ ID NO: 280475 - DNA, 650 bp, Glycine max
  unsure (1)..(650): unsure at all n locations
cgtagctactctcttccgcgtatagtgaacgcgtgcaatgatgagtattcaaatatacanacttctattggacgaanaganngatttgaaccttggtacntcgcgaaccgtgaccacatgacactggaacttcgtctggacgctgaacaggcaacgaactcctttttctaaaccatgctacgtgctcgcgaccggtccctatctttcttacgcaacttgagtccacctattgctactcccataggagcatgagccgaatatttgtgtccgcgccatacgtttacactctgccgagcccgtcttggtcctcttgtgtcaaaggcgtcttgcgagtaatagcaattcttctgtcccgaaaaccacggcagcacgtcactattacgaacaggtgtgtatgcaggngcaacttagaactatccctctggcaaggattaagcctttcactatctctgctctatgagagctttgtgaattctatcgtccacttgttccgatgcttcaanaccattgtctttgctgacgaccgtttaacatcgcgagcgcatctaaaccccggtttgaactttaacccttcgcggaccccaccatgatgccttaccaatgccctaagcccttgatcttttgtaacgggattcccaccctcaggaccn

SEQ ID NO: 280476 - DNA, 407 bp, Glycine max
agcttatcaacatgagtagggtctaaaataggttggctcatcatgttagtaaacctatcaatataaataatattcttttagatataacaacaataataaaaatgataataaacacgttagactacaagatttaagagattttaaaatcacttaaagctaaaccttgtatttaaatagactgtaaagaaatttctaatatgactttttaatgaatgccatgtcatgccatacccaggctaaattaaacagcagagttaaattttgaaagggaaatattaatttaatattttcaattgatactaaagtttgtcactataagacaaacacattaaagatcatgaccatggcagttgcaatcaatcatataattattgtattacggagaagagaacattagttcttgattt

SEQ ID NO: 280477 - DNA, 408 bp, Glycine max
  unsure (1)..(408): unsure at all n locations
tgtcagatgagagacaagagnnttgagaaaaagttatagcatcacatagtctccctcaagagactccaacagagattgctcccagaaatgaccacgagcaactcgaagctgaagtgcaacctgtagaagaagttggtatgtgtccttttcctctaaaattatgtgtttcaatttgcaaaatcaattcttacattttaatctaaatttcattgactaatgtgtttgttatttatgatcttggtattcatttattgcttctttgttttcgatattcagacttatatcanagttattctatgagtgagggggacaacgatgatgatggtgatgaggatggngatgaagatgacgatgangaagagtatgttaatgtgatttgtcatcaaaaattctctagtcatttcaatg

SEQ ID NO: 280478 - DNA, 513 bp, Glycine max
  unsure (1)..(513): unsure at all n locations
caacccaaccccgcgacaactaaagggaagaaannaaaaaaaaagaaagaaatgacctgaacccgcacacgcacaacaacacgagccagaaggacgcccaacaggacgcggctgtacattcaccacgacaaacacgaaggacaccgggaacctacctcacacacacaacaaacagcacccgcccgacacggcgcccgagggacacagcagggaaacaacgacacggccagatcacacgaaggcaagaagacactcaccacaccaaaatcacccacaaccaccacatcgcagaaagagggncccacaacaaatagcaaagcacaccacaacccggcacgaaccacaacgaaggccaccaagaagaagcggcnnncatanncataccatncctcattcaacgaagtaaccacacccccccaacacaccaaacgaaaaaaagcagcactaaccaacgcacacctccgacaatgagcgccgacgaaccacaagagaacccaacaccccgaagcaacc

SEQ ID NO: 280479 - DNA, 209 bp, Glycine max
ggcttcacattcttgctttcatcaatacatgagtaggtctatcacgttaacacaattgattcgaaaaattaacaactgtctccctactcgggcaattgaaacagttgttcaattgttatatcgtgttcctatttcatttcatcatgaccaaacatgttgtatttcttcacacctacatgacaatgacaatcttaaaggtgtgctagaaa

SEQ ID NO: 280480 - DNA, 693 bp, Glycine max
  unsure (1)..(693): unsure at all n locations
gggtcttgagagatgcgtcgctcgtgcatgcgattacgaaagcttgtgttgttccantacntacaaaagtcataggacgagncgaactttgggaccttgaataccgtcgccccctccgagacaccacatnanactaatgcttatgcacgcccagttcgcggcatcaaggcagcatgtatgcatgcttacaactctgaacatgcacggctggggtgattactctancttgtgcgtgtcactcatcgcgcatcacctgatagaagcgctctattccagagtgcngacagatcacaatnattgatgagcaggtcactgtatatccacgaatatgtgtgagtagcgaagatcggacgagacaatgggaacacaatcgacacttcgttatcacgtcatcgtcgctancgttcttgattggaatctctctgtactgcacgcttcgcttacgccgtcttgtcttacctttgtggtaggaagacaccaagtatgagttgtcatgacaagctgactctatccctcttagcgtcgatatatatatggtattattagtagtgatataatcgaatgctagtgagtcgaccagatatctctctcacataatcaaacctactcacctgcatcataacttggtttcctgccaccatatcctctgcgtcgactgcattgacaaccaccgtacccaccgttgtcattccg

SEQ ID NO: 280481 - DNA, 386 bp, Glycine max
  unsure (1)..(386): unsure at all n locations
agcttcatgatgaatcaagattgattcaaagaagttttgatgataacaaagctgatgacaaaaagctcaaaggtcaagaacacttcatgataacaaagatgatgatctcaagaatcaaagaatgagttcaagattgaatcaagaacacttcaaggttcaagaggaaatttgatttcaagaatcaagaatcaagtttcaagattcaagttccaagaatcaagatcaagattcaagactcaagattcaagaatcaagagaagacttaatcaagataagtatgaaaaagttttttcaaaaactgagtagcacatggattcttctcanaacctttttactgtctagtaatcaattaccagattattgtacttgattaccagtagcacaat

SEQ ID NO: 280482 - DNA, 553 bp, Glycine max
  unsure (1)..(553): unsure at all n locations
ggcttacctcctcgtctccgcgacgtctcatctgcgttactcgtcgtcaaattgagacgaagtgaacttgaactgtcgcctcggacacaagaaactcaaactgtcgcaagagcgtcagcttggcancaccttccgttctttgagattagatagtggaccacatgctcctcctagtgggaaaagcccaactgaaaagccatttttgttactgaatgagcggacatgggtgataccacagagagactcttttgtgtgggactaccagctgcaggtcctcaatatagatgggcgggagacaatcactatgacgttggcacactcaccacagagtgtgtctcaaatcaccactgctgaataattcacccgtggatcaaactgagttgtggatggcaaagtactacacacgttactattctaattgtttggatggattatcaagaagacatccagagatggagataagtgattcacactctctgctctggatatgacgaatatcatcatgctttctagtgaagcattgtgctctatttgttagatattggagcagccn

SEQ ID NO: 280483 - DNA, 411 bp, Glycine max
  unsure (1)..(411): unsure at all n locations
agcttgtccttggtttagacatgatttatacatgatttangacttgtaggattcaatttgggcaaaattggacgagggcaagtgtgatttcgaaaatctgcactattatgcagaattttgctgttgaaatgtgcagcagaattttggctttgtgcagaaaatgatgtgtatttgctggttgtggaaagagtagtatagattgcgttctggatgttttctagcagatcccaatggtcacaatgtagatntatgtactacggacctccagtaaaattttcgagtcgatccaacggttaacgaattggaacgaagagaatgttactggggtatttgagtaaggaaagctacggtattggtttgtggttttgggcagagttatctgtctttgccctgttctcttggttttgatag

SEQ ID NO: 280484 - DNA, 461 bp, Glycine max
  unsure (1)..(461): unsure at all n locations
cttgataaactggtataattaattttcaatattaaaagtatatttaatatctagaataaaaaataacttaccttgattntataaattctataaaaataaataaattattgttatatatatatatacacttttttaaaagtttaaataaatgcactctaaatttctaattagcctttagagtgagctgagtatgaaagtaaaatatgtttcttctaccaatgaggttcagtatccttaaagctgttgacagtctcatgatttcccccgctttgaagatatctttctttggaaaaaacaaatcttcttataacaatcgcggtatttatgcatgtgtttcatataatactactataatatttttcttataataattgngatataaatttagcattcgagcaactgcaatgtgcacaacctattatttangataaacaattactttgtgtttcaataggaaatga

SEQ ID NO: 280485 - DNA, 364 bp, Glycine max
  unsure (1)..(364): unsure at all n locations
agcttagcattntaattaaagacgtacgtggccatgtgaccgcctgagctggttatcatgtgattaacggtttaatgaatcatttaattggttgggttatatcgttaatcgatgattcggctcctattgctttgcacgtgcggnggggctctttcttttctcgtaccgtggaatggaattatacaaaacgtacgtgtgctccataatacccaccgttaattatgctaataagccttacacatgagcacgggctgaaggttataatcggaaacaacgtgatcgatcgaatggattctgtccttgcagatgctaagcattttaaaaaatggagcaagtagcagagaatatgcattatggcacatga

SEQ ID NO: 280486 - DNA, 384 bp, Glycine max
cactgtatagactgctggttttatgtattacagaccaagcgatgtgaagtgttaaccgcgcatattggtaagactgacaatctcttctcttctttttcttctcattcctctcagtcgaattcttcaactgaaaaataataggaaaaattccgtcaatacaaatttgcaaggtagaagagaatatataaaaaggttgttgcttaacgatcagactcaccataataacaagaatccggacaaaaactgcgaccaaatcggtaaacaaggtcaaggcatgctgtacatagtccagatcgcccaagtgtgccctctcaacctattcttgggtgtctactacaatgtaacctacaaacaccaatagcccaaagtacaactgcaacacca

SEQ ID NO: 280487 - DNA, 420 bp, Glycine max
  unsure (1)..(420): unsure at all n locations
agctnggttgttcttttattactaacaatagattctacaaacatcacaatctaatcccctttcgtgtttgagtctgaacaacctcttgtaattcaacaattctgaacatgtgtcctcgacatgatctttccttgagatccttccggacctcaaaaacatattccatccaaagtatacactatatttcatnggattttttatcctcgttatggagtgtatctttaatttattgaatcagaagttaactctagtgatgatgtgtgactgtgttggtctatctttttttacaaatggaagacattaaacatagattattctattaaatagatcgttatctcacataggaataccaataaatcttatatcatcacgtcaatgttttgggatggcgtaatcgataacgcctaattagttcatgat

SEQ ID NO: 280488 - DNA, 442 bp, Glycine max
  unsure (1)..(442): unsure at all n locations
actgatatgtcagatgaatttgaatattactntcatctcaacagaggacaacgtcaatggataataggtgtgcttttattcttatgccgaatataaatgttattgctattgtcaactgtttggctatcaaaatataaggtttatttgattcttaaagtaatttctatgcttttgcttctcacaccctctctttaatttggagtatatgcattaattntttattttttatttttggtaattcttcctgttccttttcatcattactcatcatgtgtttttgaattgataggccggacttaagtgtcattgacctctgattctccatgtggactctcagagcaatggctctgaatcatcatgaaacctgcattggaaatcagcattgcctcttcaagtcgcccaataaacagactatgtggtatggacctatctttaaatttcg

SEQ ID NO: 280489 - DNA, 412 bp, Glycine max
  unsure (1)..(412): unsure at all n locations
agctnttggttcaaagaagaagatgaagttcaaaaagtttcaaggcttgtaaaggattgatcaaatgaatgtgaaagtattgaatgaattgaattaaaatgcaaaacaaagccttgcttttatagactcttcatgtctggtcaagaagaccatttagaagagttataacttttagaaaaacttaaaaccaatttgaaaaagtcaaaaaccttttgaagagttacatcttttgatttattcagaaacagtcactggtaaacgattaccaaattagtgtaatcgataacacanagcatttaagtgaaaggatgtgactcttcacctttgaatttgaatttcaacgttcaagggcactggtaataattaccaaaacattgtaatcgattacagttttttgaaaataattggaaca

SEQ ID NO: 280490 - DNA, 552 bp, Glycine max
  unsure (1)..(552): unsure at all n locations
ctctgaaactcgtcttcttactatcatgctttacacatatatatacaaaatgaagaanagannnttganccttgtnactctngaatctccaactcagctttctttccttgcttacgaatgctgagtcctgcaatactagtttaacaggccccattttatattagaaataattctgaaggcatggatcaaccaacctaattaacttggataggagacaaacaaccaatgttttacgatccacaattgaccactagatgcgtcatgtactggtaatcttacagcccctggtataacggtaagcgtgctcactgctgttattccctttttgaagtggaatacaatcattcctgttgacctctccttttttcatataaaatttggatataaaaggaaaaaaaggaccttacatggcttaattggtcaaagaaagactactccaataatgggtttccatcatttgaatttggggaccataaacctctctggctaccaaataaaattgaataaagaaaccccattaaccattaaaccagagaccaccttttttagttg

SEQ ID NO: 280491 - DNA, 348 bp, Glycine max
  unsure (1)..(348): unsure at all n locations
agctnttgaacctactatgtgattttcagtcagttgagcacccgtcacattcatgcgaaaaaatctgggaaattgctaatgaagaacttggaaatatagacccatacagtctctttactcctccgtgccaacatgctaatgttagccagttaagtcggctggtgagaagaaagcatgtgagtggtaacattttaaattttttagtatactatacagggcctgtaacgggtttgtgatgcagatcattattaatgatgtgttatgcttatgtcatgctacaaagaattggtagactcagtgcagagtatgatccatgcactgaanagcactccattgtatacttcaatc

SEQ ID NO: 280492 - DNA, 439 bp, Glycine max
  unsure (1)..(439): unsure at all n locations
tagaatanatgtgaactgcgtacnctntggtaagaacctccataagttgactntgtgaaggtgcatatggagtacaaatcaagcagcaattgagcttttccttgataaaatgtttgtaaacttctacatgctttgttcgagcatgctaaacaggattatgagctatgctgatagttgatttattatcacagtatggtttcattggtccatcccattcaatcttcaagttctttatggacacaccaaattgactttttaatcgttgagaagatattntaaaagacattgctttcttcagatttttgtttaagaacaaaacccaagtgatctgggtacaatcatcaataaaagtcataaaccagcaagcccctgaatattttgaataggagatggccctcanacatcagtatgaacagaataaagaggaaatatacttttc

SEQ ID NO: 280493 - DNA, 366 bp, Glycine max
  unsure (1)..(366): unsure at all n locations
agcttgcaatttaagacattgtatatatgttgatgaattttccattcactaacacaaatttgtttaatttgtatgctcaaatctattagctcatgagttcaatttgaaatatgaaatttctattttacatcttttatttggcattatgtaaccttgtccagcacatcacaattttttctttgatttctcttcgccattgattagacctgttttatatagttctactttgctgtagttaaaatcaagattaaagttgcgtaagccatcaatggaagttaaaattgcaactgaaatatcaaacacatgattntagcanagcagtgatagctacaaaaatggagtgataacattcatggcaaacacatt

SEQ ID NO: 280494 - DNA, 250 bp, Glycine max
acagagtggtaccttggagatatgtcgcgggggtcaagagaccttggggacgtcaagtggggtgctattgcccaaaaccaaacttgaccaatcccgacccaacctatgcatagtcagtcagtgagaacctgtgatgtacctaaacaggcaagctcctggcagtcaacagattaaaggaacaaagaccacaaagcatggaggcttgtgtggtggtttggcagctgtgaatcttgtgtgatatatggggtat

SEQ ID NO: 280495 - DNA, 432 bp, Glycine max
  unsure (1)..(432): unsure at all n locations
agcttgtttcagctttttggtggcgttcagttgtcttgcgcctctgtttttctattatattcacaactgtttcaaaatgtacttgaaatactcccaccggctcccaatacacatgcacctatgcctgattttttctcagtttactgaatgttcatgtttacctattctatttctagaagctggaaaatctgcaaatacagaatggaaggagcaggtttatcaaagggtaataataacaactgttgtttttcttcactttctttntcttcttcttccttcgtttgtttgctttttcgtatctctgaaatctctgccttcatattgtatgcatgcatatattacttaatttgtcaaattttactanagtgaactgtanaggatgtatacattntgcataactgtatanttggtatactctgctcccactcctac

SEQ ID NO: 280496 - DNA, 425 bp, Glycine max
  unsure (1)..(425): unsure at all n locations
tcatcaaagactatcaaaagtgcacaaccaacacctaagccataagctttataaaaaattgtcaaaagtgccaagtctgcaccaccaccaagttcttaatcacaacctgttacacatgtctttgaggattagaaagttcaccaacttggtgagatttcaagtgatgatgaacattatgttgtatgtgacattaattttgttagtttatatttgtagggaatttttttttttgggcgaggcaataactaacaaaaaagtcaagtgatttgaaagatcaatacctgttacatgaatagcacttaaggggatccaaagtctgaaaaagttaaactattactaatgtaattcanaggaaaataatgcaatcgacaagattgactgaattatgtgcgagattggttttctaacacaagcaacatctgatg

SEQ ID NO: 280497 - DNA, 411 bp, Glycine max
  unsure (1)..(411): unsure at all n locations
agcttaacaattaattaaaagttactagtacatgttcgcgtttgatgcacaactaaaccacctatttttctctttttgagataccactctcacttgattatgcaaaagagtcgagttcaattnttaattgtttttaatttcatatattacatgtgaagctcaattttttaattatcttgtataaaaataattcttaaatattatattgataaagttataaaaaatttaagacaaattaataaatataattgagttataattaagttaggaaaatttaataataataattaaattataattttaggttaggggactaaaatagcctaagattntgtttggcccaactntntttgggcttacaagctacttataagttaaaataagacaaattagagctctaagaaataagta

SEQ ID NO: 280498 - DNA, 383 bp, Glycine max
tgagggaaaacttgatgcattggtcaacctagttactcagctttccatgaatcagaaatttgcatctacgcctgttgcaagagtatgtggtctatgttcttctgcagatcaccatacagatctctgtccttctttgtagcaatctggagtcaatgagcaacctgaagcttatgctgcaaacatttataatagaccctctcagtagcaaaaccaacaacagtagaataattatgatctttcaagcaacagatacaatccaggttggaggaatcatccaaatctgagatggacaagtcctccataacaataacagcatgtcccttcctgtcagaatgctgctggtcctagcaagccatatgttcctcctccaatgcagcaacaac

SEQ ID NO: 280499 - DNA, 381 bp, Glycine max
  unsure (1)..(381): unsure at all n locations
agcttatgggattggcatagagaaagatccaaataggcattntatggcttanatattattattttggttttattatttttaatttaattttcagaanaatactagttgatatgacatgtatggtcgttattttntgtgaatccctaatgaacatacgatatgcactatgtagtgaatcatcaaatgaaggaagagtattaattttatgtttatctcttgaaattttaattgtagaatttaggagtagtggtagcatagtcttttaagcctgtcaaaagccatgcataanaaatctacaaatgagctaaatggttgttgtgttaacaaggttgcggactcaatagcaacattaattttaaataatggtgaataaaaacaagt

SEQ ID NO: 280500 - DNA, 186 bp, Glycine max
gcggacagaacccgctctgatgccaacttgaagctttgatattttaatgagtaaaaaagttaactcacttagcttaattttattgcctttaacacacatccatatatacacaatacaagacttgatgagaaaacagcttgatgggacatcacaatgttgtcttctgaaacaaattaaacagaaaat

SEQ ID NO: 280501 - DNA, 326 bp, Glycine max
  unsure (1)..(326): unsure at all n locations
agcttggattgattcagtctaactagggatcgaggttttgtaatttatgctacaacatagaacacaaaagcatgactgattatataaacatctttatatacatcagttggcttgatagaaagacccaacatctttacctacaggtgtcactcttacttgcatttttactattttttagcctagacttagtctcaatttgctctagatcatgaattatcaatgtttctttcaacaatgccttatttctgaatntaaccgctgctaagactagttccctgagttcgatacttggattcatccattttaactttaaatacttgatgatc

SEQ ID NO: 280502 - DNA, 64 bp, Glycine max
ttgagcctagatactgactcaccatacaccttgtatcccggtgagaatgcgcatcgttaccctc

SEQ ID NO: 280503 - DNA, 424 bp, Glycine max
  unsure (1)..(424): unsure at all n locations
agcttggaatctttgcttncacattaacaactcttctagctttttactccaatggtaaactatctaagaaggaattggagctgcaatttcatggtctctgtgcaaatgccatatctctctctaaaaacattatttcgcaaatcccaatggtagaaatgtgtgaaaatgggttacgaaagtggtatccaatttcaagatgatccaatggtttaacgtgtccaggatcgtagttttactgggacaggtttgggtgtatgcaagacaaagaaagggctttgggagagcaagaacggagaatgagtttgcgacgaagagagagncaaaaatgtacatacgtttctaaaaactactctgacgttaaaaggcctatttatatgcttgagtactntgaacttatcatntaccatcagtttctttattttat

SEQ ID NO: 280504 - DNA, 462 bp, Glycine max
  unsure (1)..(462): unsure at all n locations
tcaacatcagaccacttccagggtgctggaactacttcacatggatttgatggngcctatgcaagttgaaagccttggaggaaagaggtatgcctatgttgttgtggatgatttctccagatttacctgngtcaactntatcagagagaaatcagaaacctttgaagtattcaaggagttgagtctaagacttcaaagagaaaaagactgtgtaatcaagagaatcaggagtgaccatggcagagaatttgaaaacagcaggttcactgaattctgcacatctgaaggcatcactcatgagttctctgcagccattacaccacaacagaatggcatagttgagaggaataacaggaccttgcaagaagctgctanggtcatgctccatgccaaagaacttccctataatctctgggctgaagccatgaacacagcatgctacatccacaacagagtcacact

SEQ ID NO: 280505 - DNA, 411 bp, Glycine max
  unsure (1)..(411): unsure at all n locations
agcttgtaggattatggggtacccatcacatgtggtactaggtggcggtcgggcgatggtgcacaacaagttttccacatccacaatgcgcgcataaacccaccatcccctgttgcccacctccatctgagctcacgtactcccacgtagctcatatcctcgtttctctcaacaccgggtccccatcaatcctcccaagcttccacaacatccaagcgaaacaacattcaaacagcacaagctatcacaaccaagcaaaacagagcanaggcagaaaactctgccaaaacaccaaccaaatcacagcttttctcacttaaagaccccagtaacaattccttcgatccaattcgttaaccgttggatcgactccaaaatnttactggaagtctatagtgcataagcctacat

SEQ ID NO: 280506 - DNA, 442 bp, Glycine max
tgaaggacatgcacaaagtgtgactatatgatgtggcaatggtgtgtatcaagcaaatgctcacctcccccttaggctggaccaaactttaattgggttgggcttctcccaattcaattaaatttatctcccaacacacatcaaatagggcacttaatgcatgtgaaattacaaaactacccctaatccagaaactagtctaggtgccctataatacaagagctaaaaaatcctacattactagggtaccctccctacactatggagccctaaatacaagtcccaaaaataatgaaatcctaatctaatatgtacaaagataagtggtctcatacttagcccatggacccaatcttcttggagtcttctatccaataccctcgagggatagtgatgtagctccatgtggagcttgagaaccttgatcttcttcatcaatgga

SEQ ID NO: 280507 - DNA, 105 bp, Glycine max
agcttgcctatcctatgcaccgctcttgattgacacagttatgttggcgaacgattacgaactccaattgggacgacgcaactacatggtgtggataacttacct

SEQ ID NO: 280508 - DNA, 445 bp, Glycine max
  unsure (1)..(445): unsure at all n locations
acaacaagtggagcaatatctgtgctcactacacgttgtcgttgaccactatcactaccctccctacatgagagcctagacgatgggactctgacacttncttggatgagtacaagaacacgtctctgtacgtacatgctatcaacagatgaatggcctcatgaagattacactgaagatgcattcatctggatataaactgcacaaggcactctacacgtgtatgcggaactgtatcagactaccaagatgatactcgtgatgggagtgccattttcgcacgcatatataggattactacgatggaccttatccacggatattacttgaccgccataggatgaacaatttgtgtcttgttaagccatgatagcatacgtattgctgttcacctcaattacactacttgaagaaccaacattctttgtgtcagcgcaatattatg

SEQ ID NO: 280509 - DNA, 411 bp, Glycine max
  unsure (1)..(411): unsure at all n locations
agctttntgaggaacctgcttaactcttgattctttggcatcatcaaaataatcttggaaggcattgcttccacagatacttctacaatgtctgagactcaactaaaagaccaagaagccttttgtaaaataattcgaagttaagaatctagttattatttgttgggtagttntaatttgttgtaaccatcttttaatttgtattttaggaatcatgtttgatttgttttttcattttaatcatattataatttgttcaattntttaaaatttttgaaactagccgttatggaactagccgttatgaaactagtcattataaaattagccgttatggaactaactgttacaaaagtagccattataaaactatctgttgtacaatttggtatntaatttttcaattatcat

SEQ ID NO: 280510 - DNA, 428 bp, Glycine max
  unsure (1)..(428): unsure at all n locations
tctggtgggacatcttgacttgctgtccaatctgacattcaccacagattctgccttcttctattttcagattgggaatgcctctaacagcacctttgtcaatgattttcttcatgcctcttaagtgcagatgtccaaatctttgatgccatattttgacttcatcttctttggagaatagacatgtggaggagtaactggtttcttgaggtgtccataggtaacagttgtcctttgatctgctgcccttcattaagacttcactcttctcatttgtcaccaagcattctgactttgtgaagtttacattgaatccttcatcacacatacgactgatgctgatcaagttcgcagtcagtcccttcaccagcagtactttgttcagactangaagtccatcatggactagctttcccattccagtgatc

SEQ ID NO: 280511 - DNA, 432 bp, Glycine max
agcttcatcctcatcagggttaaggaggtgttaagggttagcgtagtctcaatgttttccagtcgggtagttgtattctccaacaaactatgaacttcagttgagtgctcttgatggaggtgcagcataacatccatcttctgaatcataagtgaatcaaaaggactccattgatgtgtaggctcttattgagcttcagcttcagcatcttcttccatctgttcaaagtttccaactgctggctctccagccattatccattcatgatcaacaaacctcattccaagcttcttgagatgcctttcagtaatttcactcgacgctttggtaaatccacaatctcattagagacatcaacattgaagtagtcaatgaatcttgaggcaagtacaacataagtgtcacaacgtgggccacgatgggatgacaaaa

SEQ ID NO: 280512 - DNA, 317 bp, Glycine max
cgccttataacggtcctctttgcttatattggttaaaatggaccattcaaagcataaaatcaacatataaatttatcgcttttgcaagaactacgtaggtatgattttctcatcacaattgaggatacgtaggagcaaaagccccacttttgtcgaccaccccaagagatcgttaattatccaacgccttaacgcttctctcatttcaaaaatcaagagatcattaatggtccaacgccttaatgtttctctcctttcaaaaccaagaaattgttaatggtccaaacgccttaacgtttctctccttttcaaaaatc

SEQ ID NO: 280513 - DNA, 437 bp, Glycine max
  unsure (1)..(437): unsure at all n locations
agcttccttgagaagctagaggggaggctacttactcccctccagtagctaagctcaccccatgcccaaatacatgtgaaaataaaatgagaagcttccttgagaagcaaagaaggtagcttccttgggaagcaaggaagaaagcttccttgagaagctatagggggactactcacacccctccagtagctaggctcacccccatgccaaaatacatgaaaatacaaaaaagtccttactacaaagactactcaaaatgatctaanatacaaggctaaaatcctatactactagggtacccttgaattgtagggtaggatgcccttaatttgtagagtaccctacanacctannattagccaaaatacaaggaccgaaagaagganaacctattcaaatatntaaaaagataattgagctcatacttagcccatggg

SEQ ID NO: 280514 - DNA, 509 bp, Glycine max
  unsure (1)..(509): unsure at all n locations
ntgaacctctgcacattgaactatgatactcagctatcactggagttgaagagttttgtcattgccgaaatcattcactaccacagatggcactttttcgcccttgtgttaaatgtgtccaccggaggcgtcattcgctggatgaccttatatcgcatctgatatgtgatggctttaacccgacgtacaccaagtggatatggcatggtgagttggttggtcatacagcaacatgtccaccttatccggttgatctacaaagcggagatctcatggaagacatgattcgtgatcttgggccaaagggctttcgggaatgtcatgcagatatttacgatgctcttcanacagatgcgcatacgccatttgttggtggatgccatagctttactatggtatcagctgtgctaacttttgttaacctacaagctcgattcaggttgagtgaccaaagctttacagagttggtttgttatggaaatatgtttcctgacataacagcttacccg

SEQ ID NO: 280515 - DNA, 431 bp, Glycine max
  unsure (1)..(431): unsure at all n locations
agctntcaatgcacaaattctaaataattatatgaacactgtggtcagtttcaattatgatattaattttttaaaattatatataaaaacctaaataacaagaaaaacagaaaatacaaaatcaatatctctctctaaatntctccttactttatttcatcaattcatattaattagaaaaaagtactcgatttatagggttcacactcaacacaatagcatatcaatttcacaaaaattggtctgtcaaacatatataattcattgtaataattataaggataaaatgaaaattgaaaaacaccccanaactcattccaattgatatctctaaggatccctacacatgtnctcactaattccctattgtgaataattcatcccttacctctaagcgggctcacgtgtcttcagccagcgatagcagcatc

SEQ ID NO: 280516 - DNA, 364 bp, Glycine max
  unsure (1)..(364): unsure at all n locations
tttttttttttatctggtttatttcttattttcattntttttatttatctcatgaatctctgcatcaaatcaaattaaattaatttttttcttaatttattattcaaaatagtaatttctactttctattcaaatgtttaggtttcttccatggatattaattatctttaaatattaatttataaatcaattgatttatagttacaaattacacttattatatatatatatatatatatatatatatatatatatattaatttcatttattaatttatatatatatatatatatatatatatatatatatatatcatagtaatacctggccttaatttaaaaaatttattttcgcatcttttaa

SEQ ID NO: 280517 - DNA, 436 bp, Glycine max
  unsure (1)..(436): unsure at all n locations
agcttgcacttggaaataaagatagtatctgaataatttaaactacacagcttcaaaagctcagcagactgttgtttcaatataggattgcaaccactctgaatcacgagcaggagtttcgcagcaagccctgcatcaaccgcaatcgacgagcactcatcaggtgaaagcttgcacacggaccatagaatcgacaaagcatactgagtgcagttttctgagatcctcatcaacagcttcaccatgatgggtatggtgttagagcaatccttcaaagccactctaccttcggngaccgacgccaacgcatccaaaacacanagggccaattccgtacaatcaggctccatgccagacaacaattcaaccaactgagaaacagccccaatgctcacaagcaaattcctaacttccttatgcanacanattgttctga

SEQ ID NO: 280518 - DNA, 429 bp, Glycine max
  unsure (1)..(429): unsure at all n locations
tcttttaccgtaagagatgtgttccanattatctagctatcacaatcatgttgaaagctaaccaattgattctgaacatgtacttcccaatcagtggtgacaagggtgacagcattaaagcatcatacctccatcatctggatctattgaagaagagtgccgcagttgcagagatcacgagaaagttctcaacaaatgagaacactnttacagtangagggtcttttgctgttgaccctctgacacaggtcanagcaaggctcaacaatcatggaaagctcggggccctcctgcagcacgagatcataccanagtcagtgtttactgtttctggtgagattgacaccaanggccctgataaaaatcccaggtttggattgcaattgccctcaaccttgaggttttattcatttttagaaagtgatcgag

SEQ ID NO: 280519 - DNA, 349 bp, Glycine max
cgctatagaatctgacttagatatttcagaatctgctggtaatctattaccatatatgtgtcatcgattacacagcgcaaattttgaattcaaatcttagtagctgtcgtaaatccgttttggccactggtaatcgattacatcctctggctatcgattaccacagagtaacattgtataaaaagactttttaacttatatttcttggccaaaccttttgctacttcaattggaattcccttcctatttaatataccatttctaagactctagagactgtcttgatcatccattcttgatatctttaatatctctgtcttgaataaagctttgagacgcatgtgaaact

SEQ ID NO: 280520 - DNA, 488 bp, Glycine max
  unsure (1)..(488): unsure at all n locations
ctcaagcttatccatgatgtccttcatcaattctttcaccttcaaaccttctgttttttttntactaatgacaaaagggggagaagtttatgaaagaaatttttttaagtaaacactagtcaatcaataaaataaggcgttttgaaagatatatttgtgtctacggctacatccactcatgcacatacatattatacttaaggggagctaaaagctatcaaagatagcattctgatgcgtagacattattctcatatatacttgctatattcactactcacaatttatacagcttgtcatcatcgaaaattgggagattgttagacaccagacgatccatcactagaagacccaaccatcttttacgatcttgatgagaacaaatatataatattatgttaaccactttgttgcatgtgagtcaacacgtttgatgactggaagctacaccaggagaaacctattcactactagataactcacctact

SEQ ID NO: 280521 - DNA, 401 bp, Glycine max
  unsure (1)..(401): unsure at all n locations
agctntaacctcatcgtctctcacagtctttagatttgggagctaatccaatccttgtgtccgggctctcagccacttatgatagccgccgatgatcccattactgcttcccctaagctctctgtcctttcttcacgccgcatcccatgccttgcgaactccttggagtaccctcgcgttgtggtcaccgaaaccccgtgcgatgaaaggcgtgatgctttcgtttgatggcactcctctcatggngtagccaagctgtcttatggcgaggacgggattataattaatacaaccctttgttcccatcaagggaacatttggacatccttcgcatgaagatagaatcttgattcttccttccttctagcgagggaaccaattaacagacgcccccccatgct

SEQ ID NO: 280522 - DNA, 249 bp, Glycine max
  unsure (1)..(249): unsure at all n locations
tatgcttgtttcctaatacaaaaaattgaaaccaattattgtaaggattaatagaataaaaatgcataatcgtgataaccataaccgaatgaaaaattctaaaaggtcatgagcttcacttctcgaaaaaactaanacaactttataagcattatagtcaccatttggaacacataaaaaaacacttagtaaggaaatcataaagcaacctcgacattaataaataggaaatatacttcacaaaatgat

SEQ ID NO: 280523 - DNA, 414 bp, Glycine max
  unsure (1)..(414): unsure at all n locations
agcttaagatgatgaagtgttgaagggtgaaacttcctgcttttattgttgaccacagagtggtacctggagatatgtcgcggtggtcaggagaccttggggacgtcaggtggggtgctattgcccaaaaccaagcttgaccaatcccgacccaacccgggcatagtcggtcagtgagaacctgtgatgtacctaagcaggcgagctcctggcagtcaacagataaaaggaacanagaccacaaagcaaggaggcttgtggtggctggcccagctgtgaatttgtgtgatatgtggattgtggcctctggtaatcgattaccaagggtgggtaatcgattacaaggcttanaaattgaagataggaggctaagatggtctctggtaatcgataccaaggggtgtaatcgattac

SEQ ID NO: 280524 - DNA, 428 bp, Glycine max
gcacctcttaatgaaattgtttaagaaaaaatgtggggtttaaatgggggagaaacaagagcatgcatttactgcactcaaaggaaaattgactcatgtacctattcttgtattacctaattttaccaaatcttttgaaattgaatgtgatgcatccaatgtggggataagggctgttttaatgcaagaatgacatctcattgcttattttattgaaaaattgaatgagggtgtgcttaattattctacatatgacaaagagttttatgcattggtaagggcattacaaacttgacaacattaccttttgcctaaagtatttgtcattcatagtgattatgagtccttgaagccattaatacgacaagacaagctgagcaagagatatgtcaagtgggttgagtttcttgataatttcctacatgatc

SEQ ID NO: 280525 - DNA, 408 bp, Glycine max
  unsure (1)..(408): unsure at all n locations
agctnttatccatggcctcctatggtggtgagcttcttctagactcatcttctccttgaagtggcgtctcctctctctcttccttctccatttcgctgccattcatcatccaagaagtaaaggaatccattgacgaagaagatcctaggcctacaagctccaatggagcttacatcacaacagttcttcttaatgtangccaagttaatggctgtgcttaagctctcgtaggtcagactatcagtggtaactcctctagctctacttagagtagtggtcaaggctangaattcgagcctaaaggagttactttgggcaatggtagaaatctgacctgagaatanggctccaaagttcatgtccatgcccgtgactaatccgtacaccaacccggctctgtccatatta

SEQ ID NO: 280526 - DNA, 381 bp, Glycine max
  unsure (1)..(381): unsure at all n locations
cgtcatttaagagcttcacatatatttggngattttcgcactctaccccaaatatcattctacattgttttcaagtcctcataatcattgtgtgcctgtgaacattctcaccataaatcataccttttctacattgagatcttttaactccttttgtatagcctcaatttattttctaaaatattaaagttcctcatcatagcatcccattttttggaaactttgtcattctctagaacaagctctctctcccttgatatcaacgttatataagcttcactgttttgagtaggtggtatcacagaacttatatttttagttcgatgggtctatttaagcttagtattatctttggacagtttcttaaattcttctcacaag

SEQ ID NO: 280527 - DNA, 410 bp, Glycine max
  unsure (1)..(410): unsure at all n locations
ttgtattattatggcgtggccatcacatgtggctctaggtgtgtggacggcgactgtgcgcagcagaatgtcctcctccacaaagcgcgcataaacccaccataccatgctgactacctacatctgagcttacgtacttcaacgtgtatcatattctcgcttgtgttgacaccgctgccccatcattgatccgcagctctcacatgatccatgcgaaactgcattcgaacacaacaagctcttacaatcgaacagaacagattaaaggcagaagactctgtcggaacaccagccaaatacagctcttatcagttaggacctcaatacaattctttcgatcaactcttaaccggtggatcgctgcgaaatatacttgaattctatactgcatatgatgacattgtgaccgn

SEQ ID NO: 280528 - DNA, 274 bp, Glycine max
tgaaggacatgcgcctactgtgaatatatcatgtggccctgtcgtgaatcagacatatgctcaccttccactcatgctgcagcacactttaatagcactgggctactgccaattcaattatagttatctactaacacacctcagatacggcacttactgcatgtgagtatcactaaactacccatagaccggagactactctatgagccctatagtaccacatctaatggaaaatacattactaggcgaccctccctactctatggagccctag

SEQ ID NO: 280529 - DNA, 346 bp, Glycine max
  unsure (1)..(346): unsure at all n locations
taatatatcgagactctcgaaattgaacaacggaagctatcgagaaattcaaatggtcaatacttcgaactcggaggtcctattaaggtgcataatatatctaaacgctcaaaattttacaatggaagctctttggctatacaaatggtcataacttttcactcgaaggtccgattaaggcgcataatatatcgagacgctcagaattgaacaatggaagctcttgagcaattcaaatggtcataacttgtcactcngaggtccgattcagctgcataatatatcgtgacgctcgaaatngaacaatggaagctcttgagcaattcaaatggtcataacttgtcac

SEQ ID NO: 280530 - DNA, 385 bp, Glycine max
  unsure (1)..(385): unsure at all n locations
tagagaaaattatgttctatgtcnnncaaacngctgtaaacctttggaggaatctagtcctatctgatctgtgacagaaacgaaacatctataggacagttatgagtggatgcttaatctcaaatacattgtaggtctcaccagtctacagaaacctacatcatatcatgaaggtatgtacaccggacgtaactgagcagtaattccgcgccgagtgtataatatcaaactcagccgtaaaacatcacatatagaatatagtgcagctctattccaacggtgggaattcaatcgaatacctacaattgtgcgggaagaggggtgcatatataggctccaggtataattccatggtgacagcgaaaccctgtaaaagaagggagcg

SEQ ID NO: 280531 - DNA, 465 bp, Glycine max
tgtccaaagattggttcattaacttattcttggacaaaaactggttcttgagccacaatcattagaggtgataacctttatgttaacttcaaaacattaaaggtcttttagtgtccatcccatgttcgtgatttgttatttaattggaaacttgagcttcatcaagtttaatcatttttccatgactagctctacaagaagtttcctttttagaaatgttactcgtcttgccacaagcactgtatggtcagaaggttggtataaacaatatttcataatttctttgggatacccaatgagtctacatttctcataccttggctcaagtgtgtctatttgcaatctcttaatgtaagtgggacaatcccaagccttggtgcgtttgagattcattctagccctttccatatcacatatggagttgtacatatacttttctaagacatgatgtatcacatacacttt

SEQ ID NO: 280532 - DNA, 387 bp, Glycine max
  unsure (1)..(387): unsure at all n locations
agcttcttagtctcagatgatgcagctgagtttgtagctacctcatgcactcctctaatgactatggcatcatttctggcgctaaactgctgagagttggaagccatcttctcaattaaatttctggcttcagcaggagtcatgtctccaagggctccaccactggcagcatctatcatacttctctccatattactgagtccttcataaaaatattggagaagaagctgctccgaaatctgatggtgagggcaactggcacatagttttttaaatcgctcccagtactcatacaggctctctccactgagttgtctaatacctgagatatctttcttgatggctgtggtcctggaagcanggaaaatttttctaagatactctctt

SEQ ID NO: 280533 - DNA, 367 bp, Glycine max
  unsure (1)..(367): unsure at all n locations
gagcttgacaagctgccatagcagcaacaacatattctgcttcacatgttgacaaaacaactagactttgcttctttgagcaccaagagattggtgatgttccaaatttgaaaacatacccagcagtgcttttcctgtcatccttatcaccacaccaatctgaatcactataaccaaacaattttccttctatattcttctgactgtaaagatataaaatgccaagatccaatgttcctttcacatacctcagaatcctctttgctgcctggaagtgaggtgtcttggtttctccataaacctgcttatcaacccaacacaataggcaatgtcaggtctggtgttacatangtacctcaatgagtct

SEQ ID NO: 280534 - DNA, 434 bp, Glycine max
  unsure (1)..(434): unsure at all n locations
agcttgaaggtaaactagatgccttggttaacctggtaacccaactggccatgaatcaaaaatctgcacctgtcgccagactctgtggtttatgctcctctctcgaccaccacacagacctttgcccttctgtgcaacaatctgaaccaattgaacagcctgaagcttatgctgcaaacatctacaacagacctcttcaacctcaatagcaaaatcagccacaacagaataattatgacctctccagcaacaggtacaatcccggatggaggaatcatcctaaccttagatggttgaatccttcacaacagcagcagcaacaacaacatacttattttcaaaatgctgctggcccaagcagaccatacgttcttncaccaatccagcagcaacagccccagaaacagcaaacagttgaggcccctccgcatcct

SEQ ID NO: 280535 - DNA, 390 bp, Glycine max
  unsure (1)..(390): unsure at all n locations
cccatcacatgtggtactatgtggcggtcgggcgatggtgcacaacaagtgttacacattcacaatgcgcgcataaacccaccatcctctgttggccacctgcaactgagctcacgtactcccacgtagcccatattctcggttctctcaacaccgggtgcccatcaatccttccaagctttcacaacattcaagcaaaacaacattcaaacagcacaaactaccacagccaagaaaacagggcaaaggcagaaaactctgctcaaacaccaaccaaaaatcacagcttttctcacttatagaccccagtaacaattccttcgatccaattcggtaaccggtggatcgactncaaaattttactggaagtctctagtacataagcctaca

SEQ ID NO: 280536 - DNA, 392 bp, Glycine max
  unsure (1)..(392): unsure at all n locations
agcttttcgctttataggttggtatgaattatgagcagaacaacaaaccaaaacaacttggattcacaaatcattgcttcaattntagctgtgctgtgccagacaagacacttataatgggaatttggtggtggaggctgattctgctttctcttgctgggattctcttctctcctaaacatggtgcttcccagagaggtacgttcgtacgtaatgacattaacatacttttgtggttgactntatacatatacttataggtatgaaatatacgtttatgaagaataatgcaagctcagctccaagcgtgtggtactacgagtacgagtacatcataattggtggngggacggcggngtgccctttagcagcgaccctgtcccanaatcaca

SEQ ID NO: 280537 - DNA, 465 bp, Glycine max
  unsure (1)..(465): unsure at all n locations
tcttggggttgcaacagggactaggactatggaccaattccatatttggcaaaggcatcataattggaattctggacaccggcataacccctgaccacctttcgttcaatgatgaaggaatgccactcccaccggcaaaatggaatggccgctgtgaattcactggggagaagacttgcaacaacaagctcattggtgcaagaaattttgtcaaaaacccaaactcaacccttccactggatgatgtangtcatgggacccacacagccagcacagctgcaggaagacttgtgcagggtgctagtgtctttggcaatgctaagggttcagcagttggtatggcaccagatgcacactntgtaatttacaaggtttgtgacctctntgattgttccgaaagtgcaatactagctggaatgggcactgcaatacctcacttggaggaccatctgttcctttctttga

SEQ ID NO: 280538 - DNA, 433 bp, Glycine max
  unsure (1)..(433): unsure at all n locations
agctntgagccaattcaaacgacaataactttttactcggatgtctgattcagtcccgtaatatatcgagacgctcaaaattgaatgttgaacctctgagcaaatgcaaacgaaaataattttttcttggatgtctttttgagtcccgtaatatatcgacacgctcgaaattgaatgttgaagctctgagcaaattcaaacgataataactttttactcggatgtctgattgagtgctgtaatatatcgagacgctcaaaattgaatgttgaacctctgagcaaatgcaaacgacaataatttttttctcggatgtctttttgagtcccgtaatataacgagacgctcaaaattgaatgttgaacctctgagcaaattcaaacggcaataacttntttctcgaatgtttgattgagtcccgtaatatatcgac

SEQ ID NO: 280539 - DNA, 123 bp, Glycine max
gctgaagtttcttttggtgaaggaaccatggaaaagcagagcgtttggaatggtttaaccaatttctgagaactgttgggggatgctgaaaacgagattatcacgaatatataagtttgaatg

SEQ ID NO: 280540 - DNA, 390 bp, Glycine max
  unsure (1)..(390): unsure at all n locations
agcttgtgctcctgattgtccacaaactgtggcttcgtaatttgcagcagaattgcagaaaatgccctgaagtagcacttcagaaaatttaagtactcagcagtgtgagctatctcaagactatccctaacctccatcaccatctgcagtcttgccggaatcgctgttttcaaccagaaacacaaaaacaaaaacaaaaaaattaagcaaaaacaaaacactaaatgtcaaaacaacgaatactgaaagcacttaaatgccaatacatcacaggcatagttgaatccattntcctacgacaaaagaacatganaataagcactaaatgtanaaacaacaaaaactggaagtgcttaaatgtcaatacaacagaggcatangtgaatccat

SEQ ID NO: 280541 - DNA, 465 bp, Glycine max
  unsure (1)..(465): unsure at all n locations
tgccattcactngnacttttatattattctattctattaagtttttnttagaagattgttttattaaggttaatttagtggtaaatgaataattttatgaattacaagtttaaatttctgccataatatacaaaaaagtatatatattttattagagattntatgtcgaattgtaatatacataaaataaagtatataaattgaaaataacttttatatttagaggtaatttttaagattaagctagaatcaatccgaaattgttggattgtataacaatttatcatagtaattattgtttggctaataaggctcttccccttattggattattattagatcactctcgattgtgtaatcttataatttcacgctctaaatatnttttttccacgtgaaaatagtgtatgagagagctcacattaattagtaatgtgattagagtanaacatatatgtagaggat

SEQ ID NO: 280542 - DNA, 413 bp, Glycine max
  unsure (1)..(413): unsure at all n locations
agcttgataggttcaagtgcaggtgctgctactggtggaggcacttcaatttgcttgaaaagggttntgaatttgaattttgaacatgtaatcgattaccatatgtctgtaatcgattaccagcaacgaaactcctgatattcaaattcaaaagtcatgacccttcaaattataactgtgtaatcgattatacagacattgtaatcgattaccagtgaagagatttcagaaaatctgtcaacagtcacatattttcattggatttatgaatggccatcaaaggcctataaataggtgacttgngctcgaattntatgagagagttntgctggtccaaaatgtcttatcctctcanaagaaaatgagagagattccaagagaacttcattgccaaatgctctctcaagaagtct

SEQ ID NO: 280543 - DNA, 474 bp, Glycine max
  unsure (1)..(474): unsure at all n locations
tgtagatcaatggagtcctttngaattacttatgattcagaagatagacactatgttntacctccatcaagagtactcagttgaaattcatagttcgttggagaatataactacccaactggaaaacatttaaactaggctaacccttagcaacctccttaaccctaatgaggacgacacttagttgtgttataagtgattgtcgcaacctacccttcaacgggagggcgaggcgaaacgtaatagtgtgtcttctcatgatgaaaacacatggagtccccaccaacaattattcaaggaaaacgttagaaaaaccaaaaagagggttgtaaatgatgaanataaaggttcgggagttgtttacgcttggngaaggtattagcaccccacacgcccgcacaagagactgcagcctttaatcgagtgtgcataacatgnacttcaaaatattacttttcttctttatatttttat

SEQ ID NO: 280544 - DNA, 393 bp, Glycine max
  unsure (1)..(393): unsure at all n locations
agcttataagaacaaaattgccttaatcatttccaaatatgcatgtgaattangacgcatcaacaagaatcaagccaaggctattgtgcaagcaatcaatggggcaaaacacaccaaatgattataatgatggatggctcaaattctcacaaaggtaaaatcatcactttcaaattgagctttcaaaactatcatgacatgtagagaagaatcaaggatttcaagtcacaaaatgtcaagaacttttattttcaaaacaattacccatttcttgaacatatcctataattcanagaanaacatgcaaagtcgtacgtgcacacaaaattgacccanaatattaaactgaaaatccgacgaaactaacaacattaacaaattaacaccactaac

SEQ ID NO: 280545 - DNA, 423 bp, Glycine max
  unsure (1)..(423): unsure at all n locations
tgaaccacaaaccggtaagagtgtgaccttaaactatgagtgaacgactagttgtgagtaataatctttgcatgaatctctgaattntagaatgaaatgtataaatgaggacatgatgaaggccatggttgtacatacacaagttctctgaccaaatagcttaccttgaatgatacttgtatcttttgctcctgtgtataaagcttattgatttgtcattaactgaacgctgaactntaaatgattatctcctaataccttgtttagattctaggagagcatatgcttcaaggaaaatttactctaaatttgggggagaaaagttgaaaagaatgaaaagaaaaaggttaagcatcagcacacacaacacataagttgtatgttaaaaaaaaaagagaaaaaaataagttgtgctggtacaat

SEQ ID NO: 280546 - DNA, 419 bp, Glycine max
  unsure (1)..(419): unsure at all n locations
agcttcttattttcagcagatgaagatgaatccgttgccacatcatggtctcctataaggacaatagcatcatttcttgcactgaattgttgggagttggaagccatcttctcaatcagattcctagcctcaacaggtgtcatatcaccaagagctccaccactagcagcatcaatcatattcctctccatgttgctaagtccctcagaaatattgcagaaggagttgctcggacatctggttgtaaggacagcttgaacacaatttcttgaatctttcccagtactcattcaagctctctccaccatggttgttaaactcacgattctacgtagaatcgtgaaggttccatanactcgactcgtagaatcgaatcataaactcgtaagagttactcanaggcagcaacaaaacccact

SEQ ID NO: 280547 - DNA, 474 bp, Glycine max
  unsure (1)..(474): unsure at all n locations
ttaacacttcttggcaaaaaacttanatgatgtttaaattccaattattcacataaaaaggaagaattaagagagaaaatttaacaatttctacataatttaatcccaaaatatacctatacatagcagttatcagtgattcaaaatgcaagaagaatgataaagaaaaggttaaagatgatgattacgactacaaacctgaagatgaaggagaaattggttcaaattgtttaactaaacaagatagggatgaaataggtgatggttccatcattgaaaatgcttttgggtaccaaaaaagaaaggttagtcttgaaaaattgtcaacattgcttttcttctaaactatctttttggaagatactttnttttcttttctanattgtatattagaaaagataaagtcctgtgttactattgtaaattctaggtatctcattattacataattntatcatacaaaacatacaacat

SEQ ID NO: 280548 - DNA, 418 bp, Glycine max
  unsure (1)..(418): unsure at all n locations
agcttgtaacataacaggtaattganattttttttttaaaaaaagctaaagcattactcttctcgtagattgtgatcgaaggaaatctacacaaatctggcgtccacctaaccgcttcccgttcatgactttcatcgcccgagcagcagcatccagattgagaaactcaacacacgcagtgccgcggtctataaagaacttaaaatcctcaatcttaccgaatttgcgaaattccgcttccaaatcttcccttgcaacagtgggactaaaaccacccacccacaattgtttgcacggctttgcctgaaacacacaattcatttaattaattaattaattattctcaacagaaagccacattgtgaaatanattatatataaaaaagcgttntcagtttggacacacaaaccggtctgg

SEQ ID NO: 280549 - DNA, 402 bp, Glycine max
  unsure (1)..(402): unsure at all n locations
tgtgtaatcgggagattcaaccctctggctcaataatattttaccaggaatgttacgacccttgagtaaccttcacaaaggagaaatataaaactataaattcccataaattgtataaggcatgtgcttccatgaaatgcattttcaaagcaacaataatccataacactacgaaaagaaggttcccaatttgactgaacggaatacagtcacatcagcattggattcaatcagacacacataaaccatttccaaccatttcttagaatttcacccttcgaaaattcgtgatcttaatgccaaaaaaattcaaatttttttaaatgggttgtctaaatccgacggatgaaaacattangaagtgaagatcagcgaatcangcattgaaattcttgagatcac

SEQ ID NO: 280550 - DNA, 395 bp, Glycine max
  unsure (1)..(395): unsure at all n locations
agcttgagatgatgaagtgtagaagggtgaaacttcttgcttttattcgttaaccatagagtggtacctggagatatgtcgcgggggtcaggagaccttggggacgtcaggtggggtgctattgcccaacaccaagcttgaccaatcccgacccaacccggacatagtcggtcagtgagaacatgtgatgtacctaaacaggcgagctcctggcagtcaacagataaaaggaacaaagaccacaaagcaaggaggcttgtggtggctggccagctgtgaatcttgtgtgatatatgggttnttgcctctggtaatcgattaccgagggtgggtaatcgattacaagggcttataatgaagacatgaggctaagatggtctctggtaatcgattac

SEQ ID NO: 280551 - DNA, 465 bp, Glycine max
  unsure (1)..(465): unsure at all n locations
tgcttgtagggcttctatggaggctggatctttgagcttcaatgaggtccttcaatggtgattntacaccatggagatgcagcggaaggcaaaggagaagaggagaagggaggcaccatccactatggaataagccaaggaagaaggagcttcaccaccaagaattgtcttggataagaagcttgaagaggatgctttaatggagaaaaagaaagagagaaggggggagcacgaaattgaaggaataatagagggagagaagttgatctttgagttgtgtctcacaagactatcattcatcaaagttccaacaagtgttacacatgtttctatttatagactangtagcttccttgataagctntcttaagaaaaacttcttgagaagcttctttgagaaaaattccttgagaagctagagcttagctacacacacccntctaataactaagctcacctccttga

SEQ ID NO: 280552 - DNA, 388 bp, Glycine max
  unsure (1)..(388): unsure at all n locations
agcttgtggaagataatgctggggtggattcctagcatgtcagatggcttccaagcaaacaagtccgcattcctatgtaggacgtcaatgatgcatctatgctcatggatggtgaggttcctgcttagttgcatgcattgcccgagtttgcgtctaagcagcatcttaacgagctcttcaataggctttgggcctctgtcaaaagtatcatcacgcagatctacatcaagttcgttgtctacgctttcttggtagacagtcagggcttggactgaagaccctcatccacactcatgacttgagtaccttcgaccactgtggggtgaggcttgacaggctntctggtttctactagctcccctacaaagctgaggagtggactagcatg

SEQ ID NO: 280553 - DNA, 448 bp, Glycine max
tccactccagttcccatacgagtacctgacgggtgtgattttcaaacgttaaaaaccagaatacacaatacccttaagctaaccgacaagcaatttttggatgaaatttactatcggcagcctttcacgtatgcaggtaatcaatttcggtttcaatgtatgcaactgatagatgatgctgatgttaacacaatgttaatgtgtaatcatgaattctcatttgttggttcgattgagttattatgtagcattgctagaaccccaaatggtattttaaacatacttgaagctactatgacccctactcatgatgccctgctatattacaatgggaggtggaacatgtcacgccaaaatgagtatgttggttactcgctcacaggaaaaaatcccaaaactctgacattccatcggatgcccatggtgaactgaaggattgatcacaagt

SEQ ID NO: 280554 - DNA, 440 bp, Glycine max
  unsure (1)..(440): unsure at all n locations
agcttctatataaggtttgttcctaatttctctacaattgcatcacctctcaatgagctggtgaagaagaatgtggcatttacctgtggtgaaaaacaagagcaagccttttctttgctcaaagaaaagcttactaaggcacctgttctagctcttcctgacttttctaaaacttttgagctagaatgtgatgcctctggagtgggagttggagctgtattgttacaaggtgggcaccctatttcttattntagtgaanaacttcatagtgccgccctcaactaccccacctatgataaagagctttatgccttaataagagccctccanacttgggaacattaccttgtttccaaggaatttgtcattcatagtgatcattaatcacttaagtacattagagggcaaaacaagttaaacaagaggcatgcataatgggt

SEQ ID NO: 280555 - DNA, 439 bp, Glycine max
  unsure (1)..(439): unsure at all n locations
agcttctatgtgatcaatgtgtctatcatgtgttcaacaatatggatgaggactccaagcataccttaatagttaaaggttcaatagttgctaaaaaacaaaagtttagcaaaactaacctgaaggctatgaacgtggccttggaacaaacctggaaggaggctctagaagtgggcgtggaagccatcagatatcgaaaacaaaaaagattggccaagtccattgttgaatntgataagatagaaatgaatattccaacatgtacgatgcattagataaagagtntgtgtgtgtaagtataggataatattgtattaaatattatggttgtacaatgaacaaaacatattctaagttttacaatgaattatatgttntgatgtaacatcctcagctctacatcttagtcatcaagctgatagtataaacgcatatgata

SEQ ID NO: 280556 - DNA, 204 bp, Glycine max
tttgctttgcatgctcggtccactgcagtggacggaactatgtgggtactgatcgacgcatgctcgatgatcctagtagcatgacagatactgctgacgcctcttgagagagcctgcaaactggagatgcccatactgtgactgttgttcatatactgccaagatctgcacatgaccgaggaatagtgtatctctgactttcac

SEQ ID NO: 280557 - DNA, 405 bp, Glycine max
  unsure (1)..(405): unsure at all n locations
agcttaggatttcattctcttatcttcaatgcaaggaagtatgacttatgcctaanaatctaaattttggttttgaaagtggaaaggcgtgaaaattaagacatgcttgagagggtttttactagaatttggctgccccatgagggatactttgcatctaggtagcatggaaaataccttttaatggtatgtatatatgtgtgtgaatataggtagcatggaaaatacctttcaatgatgtgtatatatgtgaatatatgtaacaccctgatatatatatctatatattattagtaattaatgttgatgtttgattatttgttgcgttattttcatcccgtaattattttaagggaagttaattagttaatagaggggtttggatagataaggatctaacttctc

SEQ ID NO: 280558 - DNA, 442 bp, Glycine max
  unsure (1)..(442): unsure at all n locations
agcttgtcatcttgttacatcagaggctagtattttaataaatgtgggtaggaaaaattcaccanattgatagagaaaaatctaaaatcatacatcttaggcaaataaggcatgctagcccccaacattattgcattntgattccatctttggacattcaaattgttgtttatttttcctgttatcttttcctttgccttagtctaaatttcaaacttacaattcggtatctctttcttcttttgtttctcctcatttcttaataattggatttgcatcacttaagtacaaccaaagtccctctggattcaacagttgaacttcaatttcaatctttactacttgtgataaaattaagacactngtcaatctattaacaagtttttggcactgttgatggngactntggttntcgtacttggttgttacaaatcccaatttg

SEQ ID NO: 280559 - DNA, 442 bp, Glycine max
  unsure (1)..(442): unsure at all n locations
agcttgcattattcacattctccccctttgtcaagcaaattctttnttatatcatcaaaacctgcatgatttacattctccccctttttgatgatgacaagcattatccaaggcttgatctttttgacatcatcaaaatcttcatgatttacattctccccctttttgatgatgataaccacctataagttaggagcaacaacaaagaanaaatatctatttgcatatagtttactcccccttggttntggaatgtttgcttatatgagacaattgaagatttcatatttttcatatataaaaagttgtctcataaagaatagacattnttccttactaatttatcttgtatatttctctccccctttgtcaacatcaaaaacaaatcatgaatagagaggagaaaaatgttaccacttgttgtaatgtataanaatcaagt

SEQ ID NO: 280560 - DNA, 431 bp, Glycine max
  unsure (1)..(431): unsure at all n locations
agcttagagtttctggtagttcattaaatacttgtttcatttcctccaagctcatattttccaaaacggagggtctaggggcaaccctcacaatttcactaccttttggttcctgaactcgtgcgtcggctttaatgactagttcggaattagagtttgcaccacattttattataaatggtgaggacgagcctgtattaaattggagtacattccactgtgcaacgtcagtttcagatccagagcccagatctgttgatggcttgcgaccatgaganatatcttgaatggngtcatcttcttcaggaattgactgtatgataacaaaataaaggatttgggcatcaaagaaaatcaatccanattcattntcatcagtgcagttctttagcatatacctaagctatagtcacaaacagcaaagtaatcaa

SEQ ID NO: 280561 - DNA, 436 bp, Glycine max
  unsure (1)..(436): unsure at all n locations
agctttatcttctttaggaatcttcttaaggaagcttctcaaggaggtgagcttagttatgagaggggtgtgtgtagctaagctctagcttcccaaggaagttttctcanagaagcttctcaaggaagttttctcaagaaagcttctcaaggaagctacctagtctataaatagaagcatgtgtaacacttattgtaactttcatgaatgagagtcttgtgagacatacttcaaagttccacttctctccctcttttattccttcaatttcgtgctcccccctctctctttctctccctctntcttttcctccattgaagcatccttccaagcttcttatccaaggctcatcttggtggtgaagctccttcttccatggcttattccctagtggatgacgcctcctctcacctcttctcctttgtctcccgctgca

SEQ ID NO: 280562 - DNA, 426 bp, Glycine max
agctatgatttgaacatgcttgaataacctgcacttgtgaagcatgcacatgcatgaatagtatacaagtaaagctttgtacaagaaggatgcacatgctagtaaatatcagcctcctgaatattatatagggtctcttacatgaaatgaggtatcatacttgtggaatcttagtaaaaaaatagttgggtgaaagactacaactcgtatatagctagtgaataataagttgtcatcacgggccactgaaacgattaagtgcgtgaggtccaatcaagctgaaatatcacatcatgatgttgataggcgcgtgcttgatgccggatacatcacgtgtaagagttcattttatgtatcttcctctattatcaaatatgattgtggcaagtcattacagttgtggtgcagcagtattagcatcccttt

SEQ ID NO: 280563 - DNA, 432 bp, Glycine max
  unsure (1)..(432): unsure at all n locations
agctttgtacttcaccgattccagagcgtggaacatcaatagtgtttcaaggccatcaaaggatggttattcctcaaacagagacaggggcagctgagggatgatgaatttttgcacttccttggaggaggcagagccatacaactaggatcggcaaacttgtgatctatccatcattatttcttttagttattctattattctgttatttcccttgtgatctgacattatctgcttccaaatattatgtccattgtgattgaactgcacatgcagttatctgtcgcattgtgagtaatttaaccgctttggcatatggtcgtacttactntacgatgatttgtctgaaacacanaaatgtgtaagtctggtgtactttcgttcacacactttntttcaataaaatgtaatctcgggtatcaaccgtaccca

SEQ ID NO: 280564 - DNA, 319 bp, Glycine max
  unsure (1)..(319): unsure at all n locations
agctttgnatgtatttttgtgacccggtgctgagaggaacgatgattaaggctacatgggagtacgtgagcttagttgaaggtgggcaactgaggatggtgggttcatgtgtgatttgtggatgtggagagttgatttgtaccatcgcccgatcgccacctattaccacatatgacgggtaccccataatcctacaagcttgaagtgatacagtgtggaagagtcagtcttcctacttttattcgtagaccacagagtggtacctggagatatgtctcggcggtcaggagaccttggggacgtcaggtggggtgctatt

SEQ ID NO: 280565 - DNA, 381 bp, Glycine max
  unsure (1)..(381): unsure at all n locations
agcttttcttcttgagaagctgccttgagaaatatccttgagaagcgtccttgagaagattcctagagaagctagagcttagctacacacacctgtctaatagctaagctcacctccttgagatgagaagctagagcttagctacacacccctcataatagctaagctcaccctatgacataatagatgaaaatacaaaagatgtccctactacagagactactcagaatgccctgaaatacaagatcaaacagaatggcaaaatcaaggcccaaagatggaatacctattcgatatttcaaagagagagggtccaccttggccatggctcagnatctacctgagtcatgaaacctaggcctcttatagcttagccatcct

SEQ ID NO: 280566 - DNA, 420 bp, Glycine max
  unsure (1)..(420): unsure at all n locations
ttgcttatgctatactttcgtaagctacttgagctgagtctagtcttacatgagggatttgcagatgaaactcagtttaagttagtctaaacctaagagggctgtctaaatcgagcctagtcttacatgagggatctgcgaatgaagcttggattaattcggcctaacgagggattgaaggtttagtaatttacggtataacatagaacacaagagcatgattgattatagaaatatatttctatgcatcaacttatttgttataaagacccaacatttctacccactgctgtcattttatttaccttgcattgtatatgctttagcataatagtttagtctaaattctgtttganattatcactcttacatgttctctcaacatgcttcgattctgaacttaattcaagttaacattag

SEQ ID NO: 280567 - DNA, 425 bp, Glycine max
  unsure (1)..(425): unsure at all n locations
tagcttgtcttatgcgtttatgtgagacagagaccaacatgttagctatcatcagcaagtaccaagaagaattaaatctagccatggcccacgagcacaaagtggcgggcgagtatgcccgagtgtacgcagaataggaggctagaggaagggtgatcgactcgttacatcaagaggcaacaatgtggatggaccgatttgctcttactttgaacgggagtcaagaacctccccgattgctagccaaggccaaagcaatggcggacacctactccgcccccgaggagatccacggacttctcagctattgtcagcatatgatagacttaatggatcatataattagaaaccgctaggaagttngtattgtcactcagatcttttataactntctgaataanatgagtttatcccacgtttttact

SEQ ID NO: 280568 - DNA, 440 bp, Glycine max
  unsure (1)..(440): unsure at all n locations
agcttgttatttatataaccaattatcggtccccttagagacttagtgaagatatctgccaacttatcattggagaaattggggtacatttgtttcatattgaggttacgagaattttgattgaaaatatcctttatgatttttccataatgttctattttagtttggcctataaatccttgagcttgacttgattttattcattttttcttccataaactactttcaggttcttatctcttcattntttatttgttgtttctctcattctctatcaatgttgtgagtgtgtattgatatttttttctattttatttatttatattntattgtacgtttatgcttatcattntctacatctacaacttcatatttcatcaataaaataagtgttntaatgcatgatgcanattccaaatcacaatntgctttattctaac

SEQ ID NO: 280569 - DNA, 439 bp, Glycine max
  unsure (1)..(439): unsure at all n locations
agctntgagcttattcatacgacaataactntntactcggatgtctgattgtgtctcgtaatatatcgagttgctcgaaatggaattccgaagctctgagcanattcaaacgacaataactntttactcggatgtctgattgagtcccgtaatatatcgatttgctcgaaatggaattccgaagctctgagcaaattcaaacgacaataattttttactcggatgtctgatttagtcctgtaatatatcgagcttctcgaaatggaattccgaagctccgagcanattcanacgacaataattttttactcggatgtctgatttagtcctgtaatatatcgactgtctcgaaatggaattccgaagctctgagcaaattcaaacgacaataactttttactcggatgtctgatttagtcctgtaatatatcgagattct

SEQ ID NO: 280570 - DNA, 439 bp, Glycine max
  unsure (1)..(439): unsure at all n locations
agctntgtccttgttggtataggactgggaggaacaacctcggnggctcttcccaaaggaagctgggcttcaggcctggccaccttgtccagaaattnttccatggatactattggcctattgtgagctaactgttgttggttgtatacaatcaccagctgccccctgaataagctctgcaacataggaattatgggtggtgcatgttgggcatctggttccatggttgctgtcggaggaggtgggttggatgatgaagggatgtcttcagctcttgctctctttcttgaggccatctgtaagaaaagaatgtgaacatttacaaaaattaagacaacagatagataaaggccgcttagtgaaatagcagttgcttagtggtcctcacanaacaatatatatcgcttggcgaagtanaagtcgcttagcgaagtttcaa

SEQ ID NO: 280571 - DNA, 441 bp, Glycine max
  unsure (1)..(441): unsure at all n locations
agcttaagcttgtcttgcattataaatagaggaatgttatcttttcatactatcctatgtataaaaaaagtagtaaataaaaaataatagaaaattttagaattattttaaaattatgatattctcatttatttaaacaggtcaaattcaaagtttggatttggcttgttaaaaagcataatacttacatttgacttgtttatcttatttataactttatttttatatttatcaaatacattcttaattgtaagtgtattaatataatatttaatagatgttttcatttagaagatgatatgaaagaaagagaataacagaatggttaaaaattcaaaagatatatataagtaacttnttatgacgaaattgtaatttatttattaaaagagaccaccttcatcaagcatttaataaccctacattaatacactgacaaag

SEQ ID NO: 280572 - DNA, 432 bp, Glycine max
  unsure (1)..(432): unsure at all n locations
agcttttgattggagcagcatcagataagtaccattcaaggtaagagaacttagaagcaagctaacatattgtagccatattatctgtgtgtgactntgtagctttctgttaaccatgttttactttcacagttntgaattactatttctcaacattaacattcttagctatggagcttaaccttgatctctcccctcttgagaatttttgtaacatcttctacccgacatatatataaataaataaaatatataaaaatattaaacaaattcacatggataaaaggttcacctatcacattcacttcactattaccaaataaaacttattanaaatatatttggctcanaacaagggccgtcaaaattacaaaatattntgttaaatcagtgaggtaaaataanatagactaacatcatccaattaatata

SEQ ID NO: 280573 - DNA, 436 bp, Glycine max
agctttcttctttcatggcttattctctagtggatgacgcctcctctcacctcttctcttttatcttccgctgcaactccaaggctgaaaatcaccattgaaggaccttattgaagctcaaaaatccagcctccatagaagcttctcaagcaagcttccatctcctaaacacttaatcaatccaaggatccattccaagcaaggttgaatttgagttctaatttaatatttctaatccttgtgaatgtttatctttttcttcaatcctatttttgattttcatgaatatattatgcttaggattgaaaatggattaggttatggatttatttcctaatttcacaatttaatcacagaatgtatgaatgattcttcaacctaatttgtgatttcaaacaattaagggaatgattcgattgaactatatctaatgcat

SEQ ID NO: 280574 - DNA, 416 bp, Glycine max
  unsure (1)..(416): unsure at all n locations
agcttattcttatggcttgccttcggacttcactccccgtgccactctggaagatttaagccaagcccctacttctgaggggcaactcccgccttatgacgactatcccgggcaagacgatgaggaaggagatacccatctcggccccctgctccacctcanagatccgtccncacatgaactaccccaaccgaacatagtctgccatatcccggcctcacccacacccgtaaaagaatctgttcccttcgcggaagataagggaaagatagaggcgcttgaagagaggttaagagcagtcgtgggccttggcaattacccattcttagaattagcggatttatgtctcgtgcccaatatcggcattcctcccaagttcaaagtgccagactntgatacgtacaaagggacgacat

SEQ ID NO: 280575 - DNA, 428 bp, Glycine max
  unsure (1)..(428): unsure at all n locations
agcttcttattactcttggtcactaggtcacaagatcaactaggctctaataattcttctaacctagggtggtgactcactctttagaccgataattcttttaatcatactcttaaaagagcaaacaaatttctaatttataaaatatatctttaattctaaacaacatcctanaagtaagacaatatctttttttaaatctacataatattctagagatttaaaattataaatttaaattatttcctaaccgttatgacaagattatagattggctatttagccatggattgattgccaagacaatattactattgaaggagaaattttttttacaaaaatactatgattccacatcttaatcataataatttaatttaaatattctttaattnttaattcttgtttctcttctacacgaataaatc

SEQ ID NO: 280576 - DNA, 403 bp, Glycine max
agctttattgtctaacaagccaacttacaacagcaagccccaagagactcagcataaggatgcacagaccaaagttgcgtatgtaaaaaaattgtatgaccaagtgaaggtgcaaattgcaaagaagaatgaaagctatgccaagcaagcccaaaagaaaaggaaggaagtggtacttgaacccggtgatgatcttggacatttgaggacaaatgttttccaagaaggagggaatgatgagaatcatgaaacaggccaaatacagtctaaaggcccaagtggagaaggacgaaggcccaagtggagaaggacaaagcccccgagtggagaaggatgaaggcccaagtggagaaggatgaatgcccagaggcagagacactatcaagactattaattgatgctg

SEQ ID NO: 280577 - DNA, 384 bp, Glycine max
  unsure (1)..(384): unsure at all n locations
tagctttanatgtccttagtgattgaattgtgtgtgcttgaattttgttgaaattgcgaagtatagcataattgaatggtgcaatcccaatgtgtgattaagagacaaacacttgaatgcacttgtgagtgagtgaaacacttgattagtgaggagtgtgttcttcttgcatcaatgatgaattgccatgcttgttgttctccttgaattttgagcttgtgtatccttgctatggtctcctaaagaggacatccctgtgaataattgagtccttgtcccattcacttttttttatagaaaatacatgtgttggatatgttaggatggaatcgatctcaactcatgtcaatggtttaatcttagcactagtagttatcatttaac

SEQ ID NO: 280578 - DNA, 372 bp, Glycine max
  unsure (1)..(372): unsure at all n locations
agctttagtgtttgtgtacaaccatagattntacattgagtgtcctcattgataagttctatagttgattttgcatgaatttctaattatcataacatatgattcatggatatgatttangccgtctttctttctttacattttaagccattggccaaaaagctatcccgatgtatattgttttatcatttgcaaaccctttgagccaaacacttcataatttgttggaacactaacctangataagaatttcctaccttaccttangttgagagcaaaggtgttttgttaaggatttctatcatttggtggctaatgtgatgtaaatactatttttaaatgtgggtattaagggaaattaaatatttaaca

SEQ ID NO: 280579 - DNA, 429 bp, Glycine max
  unsure (1)..(429): unsure at all n locations
agcttgtagaattcttcccaattccagtgtcctatgctgacttgctcccatatctacttgataattcaatggtagccataaccctagccaaggttcatcaacctccatttctccgagaatacgactcgaacgcaacgtgtgcttgtcacggagaagccccggggcgttccattgagcatggtagggctctgaagcgtaaggtgcaaggtctaattgatgcgggctggctgaaatttgaggagaattgcgtgtaaatcctgacattgacaagagatgccacacatggggcaattttgaaagctgttgttaggtgtccctaatgactcatcagggtttccaagtttatgccattattgtaaaccacagctacaatgttaaatganatggataaagttgatatctntgtccctcatcctctcacaaacgcat

SEQ ID NO: 280580 - DNA, 431 bp, Glycine max
  unsure (1)..(431): unsure at all n locations
agcttgtgcgaatcttatcactcctgcattntatctctagcatgcattctttctttctttacccactcctcacgtttggttttttagggaaaaacaccataactaaacgcgccacaaggcatccctatcgcaccagatccaaatctagaacgatgggtgatcaagaggagacacaggaacagatgaaagccgacatgtcggctctgaaagaacagatggcttccatgatggaggccatgttaggaatgaggcagctcatggagaaaaacgtggccaccgctgccgctgtcagttcggctgccgaagcagacccaactctctcggcaaccgcgcaccatcctccctcanacatagtaggacggngaagggacacactngggcacgatggcaaccctcatctgggatacaaccgagcggcttacccttatgga

SEQ ID NO: 280581 - DNA, 441 bp, Glycine max
  unsure (1)..(441): unsure at all n locations
agcttgctaaaccatggaagttcctaatatctcccacattttttggggtgggccattcttggatggccttgattntcttagggtccacttggaccccatttttaccaactacaaacccaaagaaatacacaaaaggtacacttctctatatttgcatagagggtgtttttcctaaggactgaatgaacttgcctgagatgtcctaagtgatcatctangctcctgctgtacactaaaatatcatcaaaataaaaaactacaaatctacctatgaaatcccttaagacatgatgcataagcctcataaaggtgcttggtgcattagtgagcccaaaaggcatcactagccattcatacaaaccanacttggtcttgaaagcagttttccactcatcaccctttntcatcctgattnggtgataaccacttttaagatcaatt

SEQ ID NO: 280582 - DNA, 439 bp, Glycine max
  unsure (1)..(439): unsure at all n locations
agctntgtccttgttggtataggactgggaggaacaacctcggnggctcttcccaaaggaagctgggcttcaggcctggccaccttgtccagaaatttttccatggatactattggcctattgtgagctaactgttgttggttgtatacaatcaccagctgccccctgaataagctctgcaacataggaattatgggtggtgcatgttgggcatctggttccatggttgctgtcggaggaggtgggttggatgatgaagggatgtcttcagctcttgctctctttcttgaggccatctgtaagaaaagaatgtgaacatttacaaaaattaagacaacagaaagataaaggccgcttagtgaaatagcagttgcttagtggtcctcacaaaacaatatatatcgcttggcgaagtaaaagtcgcttagcgagttttcaa

SEQ ID NO: 280583 - DNA, 232 bp, Glycine max
agcttagaagtttatggagaacccatcacatgtgagactgagtggcggacggacgagtggcgcacaaaacatagctgacatgcgcgatgcacgcataaactcaccatgccctgttgacgagctgcaactgagctgacgtactcccacgtagcccatatgctagtaaatgaagctccgggtccccgtcactgcttacatgcttacactacgtggaagctgaacaacattccca

SEQ ID NO: 280584 - DNA, 421 bp, Glycine max
  unsure (1)..(421): unsure at all n locations
agcttgactatgcgagttgattntagccttagtttcactttagttattagtcgattcaattaagaatgagaaatcccaaagagaaaacatccgattgatttttcgctttattttactaaaagggtatttttttgattattatattattattttacctcttttttgatttccaacgtggttacggcacgaccgaacggtcggaattcattttaaccgaaattaacggatgatacaattcaaacgatcagtggaaatttattntatttttagattacgcgagaaatgacttatataaatgactaatgcatgtcataagggggtatagaaagcgaatgatcacgaaaataaaaatacatgaaacaaaatgtggaccaccacgggtacatagaatgaattgaatagctcggtttgaagtacttac

SEQ ID NO: 280585 - DNA, 581 bp, Glycine max
  unsure (1)..(581): unsure at all n locations
agacaccaccgtacaacaaactctagttacgtaatgcgatatgtattcctcagcgagagcgaggttgatgcaatcgtatccatcccggcgaatcngctcgtgcccgggatactatagaaataacctcgatgcatgcaagcctgctaattctgttatacaacatatgcacacactaagcgtgatacacatgcgcataaggcgcgaactacacgcactgagcgagggggtgtcaggctaaacgcgcctacgaatgtctaaaatccacatttacaactattaatataaaatcaatgcaaggggggaataccctacacaccacgaaagaaccccctcgtccaggagattcattaactcactatctgtattcaacacctcacatagaaagccctctatgcgcatgactggctcaacccttcactcaaggcatgcataacctaaacaacgaccaccatgtatgacggacattctactatttatcaaagcaaaaccatgctatgcaaatcgtaanatatatctcgatctaaaattgccaacacatacttaatattccgctacgggctataatccctggagaagctacg

SEQ ID NO: 280586 - DNA, 410 bp, Glycine max
  unsure (1)..(410): unsure at all n locations
agcttgctaattccgcgatacaacataagcacacactaagcctgcaacacgtgcgctaagggcgcgatctacacgcactgagcgagggggtgtcgcgctaagcgcgcctacgaaggcccaaagcccacttcaacagctataaatattgagtcaatccaagggggaatacgcaacacaccacgaaagaaccccctctcctaggagtttcatttactctctctctttctttcaccccttctcattgtaaagccctctatggtcatgagtggctaaacccttagttagggtctggcagacctagaagccaacgcaatgtatgatgtactcttcactatttatcaatgcnataccacgcatttctctcctatttacttctctgtgattatctagcatactcatctatatattct

SEQ ID NO: 280587 - DNA, 433 bp, Glycine max
  unsure (1)..(433): unsure at all n locations
agcttcttattcaaggcactctcttagtggtgaagcttctccttccatggcttattctctagtggatggcgtcttctctcacctcttctcctttatcttctgctgcaactccatggttgaaaatcaccattgaaagaccttattgaagctcaaagatctagcctccatagaagcttctcaagcaagcttccatcaccatacttnttatcaactttaacaccattntttgggtcanaccaatagcaacgcagaataatgactctgttttgatatccaagatatgacaattccaatatctcgtcaacaattccataatagtccagatcattgtcaccatatatatgtcccctaacacatatcccactattcatggtggctgtattttttccatatttcttagtatgaagcctgtccccttaactattaaaagata

SEQ ID NO: 280588 - DNA, 428 bp, Glycine max
  unsure (1)..(428): unsure at all n locations
agctntatcctctccaatttgggtactggccctagggattctaatcccttttagaggtggctaagaaggttgacttaggtttttcttttgatcgttctaccaatgcttgtctttatttcattatgactcatatgaaggcgacaaccactgccttgggtgcagaacacaatgtctttcttctatttcggttttgtaagtattttatttgttcttcttcaaaggttattgtttttgaatatcccccccatgtcactctactcaaatcggataaccctaaagccatatgagtgctattcttgttttctctctacaaatctatttttttccttttagaaagaataaggactaagcataatcattaatatctatnnttctatgtttgcgactgagcaaccaacatcaactaaatcacttgatcatcatgctaa

SEQ ID NO: 280589 - DNA, 399 bp, Glycine max
  unsure (1)..(399): unsure at all n locations
agctctatatgtgcgggtctgggagacgaaggtcaagtgttcgcgatatgtggagatgatgttccaagtacttcggatttggtccgaccatgccctcctgatttccagctgtgaaattggcgagtggaggaacgccccggcatttacgcaacaagcataatgtaaaccttcacggttttaaaagctctatagntgggcctatgctttagagttttctttttggtaaggctctgtgtcttatgtttttgaattgttaatacaaggatctctcttcatctgttcctgagctctacccattctcattcatttgcatgttacttcttgttttgacacgcatattcgataccagtcccccgatagactaatacctggacccgttattctctctagcagatatga

SEQ ID NO: 280590 - DNA, 429 bp, Glycine max
  unsure (1)..(429): unsure at all n locations
agctntgcctttagggcttgtacctcatcactttcttccgaagctttaacctcattgtctctcacagtctttagatttgggagccaatccaatccttgtgtccggactctcagccacttatgatagccgccgatgatcccattattgcttcccctaagctctttgtcctttcttcacgccgcatcccatgccttgcgaactccttggagtaccctcgcgttgtggtcactgaaaccccgtgcgatgaaaggcgtgatgctttcgtctgatggcactcctctcatggggtagccaagctgtcttatggcgaggacgggattataattaatacaaccccttgtcacatcaagagaacatttggacatccttcgcatgaagatagaatcctgattcttccttccttctagcaagggaaccaattaacagacg

SEQ ID NO: 280591 - DNA, 439 bp, Glycine max
ttaacaatatatttaacagacgtatacatcatgtgatcatgaattccgaaatatatggggagtaaacgcatgcactaaataactatatacaatcgctcgtcgtttgctcgaatcttgaatacatgcatagtattgccatcatcataaagggggagattgaatatgcaatagcctttgatgtgatgaatatgatcatgatgatgtgttgcaattgatgcaaatgggcgtttcaagattaaatgtcagacaataactcaagattaccacgtacaacatcaagatgatcactagaataatatgaagggaataactatatgcaatagcaaaggtttgtccaaatgatgtataattaaacaaagattcataaaagtattactctctggtgatatatcaccagaagatgtgaacgatcaccatggtccaatacgtcaatactgcg

SEQ ID NO: 280592 - DNA, 406 bp, Glycine max
agcttctacctcaattttctataaataggggaagaagtgaagtgaaaaagggttcagccccttacgcccttctctctctttcgaatttgcttggaaaaattgattccgtgaagaaaatccaagccgaggcgcttccgaaacgtttctgtaacgtttccgtgaggaaattctcgaaggttttgaccggtcttcgacgttcttcattcagtcttcaccgttcttcgatcttcaacgggtgagtacctcgaaccaagcttttcgatacattctatgtacccgtggtggtccacattgtgtatcgtgtattgttattctcgtatcatttactttttataccccactttgacgtgcttaagccatattatctaagtcattttcttgcttaacctaaaaataaaatatattt

SEQ ID NO: 280593 - DNA, 308 bp, Glycine max
agctttggtctctacagatcttcacacaccataatctctcagactctctggaactgggaccttactctctctagaatctctcacatgcagaagctccttgagaaaatggccaaactccctctctaaatctgatttcaggcttaaattggtggatttgttcgcgctcgtgcgcttagcgcaactctggtccgatcagtgcacattaatgaatatcgacttatcacgtggttttctcgcatcaacggatggactgaagcgatgcgcttagtgagatgaccctctgctcagcgaacatgcatagctcatcc

SEQ ID NO: 280594 - DNA, 437 bp, Glycine max
  unsure (1)..(437): unsure at all n locations
agcttcagatagcttgttgtaatcaattacgatatacctgtaattgattaaaacaaatagtttttgcctctgaagaaacttttctaacttagaaacttttcttctcactaaccatgatgatgaataattcaaaatagatatcaatgtactaagatgcaacatacaagataacaaccaatacaaatgtcactcaagggagttaggcatgtaaaagtcaaaacatcttcaagcttttccttgagcttcaagctttggcctttatgttgttcaccatgttgctcccctatctctagcatcttccatagacaataaatgactagcanatcatggttactcgcttcttggagtgtgccaactcaatgcaacacagagtggcatgcaattcagtgcacaattctcccaaagatgtcatgaattggattaaactctcatcatct

SEQ ID NO: 280595 - DNA, 349 bp, Glycine max
agctttttgtatttgaaacatgggaccaactcattgtatttctaaaaggaagtcgtatctagtcaaggtcttagagaccatacaagtttcctaccgatttctaattatgtgggccattaagtctatcatatgctgacaatagccgagaagttcgtggatctcttctggggcggagtaagtgactgccatcgccttggccttggctaacaatcggggaagatcttgactcccgctcaaggtaagaactaaccgatccattcacctggatgcctcttggtgtaaagagtctatcactcttcctctagcctatctgtccgatatacttgggcgtacatattcgcgattctat

SEQ ID NO: 280596 - DNA, 400 bp, Glycine max
  unsure (1)..(400): unsure at all n locations
agcttgttatgtccattcctaaggccacatacgttgttatatatttctttcatatataaatatattatatatatttaataatcatctaacaatcatttatatcactcatcataaatcatatttgatataattntaagaataattatcataaaaattaataaatctatcatacatgatataattaaataataatatataattattttacactatcaatacataatctattttatcatattatattatgcccccataatatctttatactcttttccagcgggcacacttaattctggttttcaatagacatgaggatcagtggacgtgcggaataagtgtcattcccttactctcaggaaacagccatatatatcgcgatgatccaaactatcatatctat

SEQ ID NO: 280597 - DNA, 423 bp, Glycine max
  unsure (1)..(423): unsure at all n locations
agcttgccactccagctcgcccaggcgagctcagctcgcccaggcgagcaaggttgcttcctccagaagcaatatccttctggaggaatcttctggagggcccaagtgagcctggttgctatttgcactcccatttttactaaatacacccccctgccctttntttggtgattctttnttcgtaaaattacggaaacttacgaatttcgtaacgatacttgttttctttccgtaatgttacggaaccttgcggattacataatcatcccctctttgacttacggaatgttacggaacctcactatttgtgcaacgatgctttcttttgatttccagtgtgtcacggaaccttacggatngtgcatcaatatattcttttgatatccggcacgtcacggaatttcacaaatggcctaatgatgg

SEQ ID NO: 280598 - DNA, 271 bp, Glycine max
  unsure (1)..(271): unsure at all n locations
agcttcggtattccatttcgagcgtctcgatatattacgagactcaattggacatccgagtaaaaatttattgtcgtttgaatttgatcagagcttcaacattcaatttcgagcatctcgatatattacgggactcaatcagacatccgagtaacaagttattgtcgttngaatttgctcagagcttctacattcaatttcgagcgtttcgatatattacgggactcaatcggacatccgagtaaatagttattgtcagttgaatttgctc

SEQ ID NO: 280599 - DNA, 409 bp, Glycine max
ttgctttgaatgttcatcattgtaacaaacctttattggttctgaggtttggagaaagtaaaattctttgaaagaatcgaaatgctggaagtaaattgacaagggataggtaaattgcagaatttaaaggctcaacgagttcattcgatcgaatgaaccatttaaaagacaggaattatataaaacgaaacgtaaattgcattgcattcgaaatataaagtttacagaattttaatatgggtcacaatcatacattctccttgtgtactcgttctctctgcgctgggtactttgagtgtataatgattcgtacaaatgatttgcgacctcgaaatctgactaaaaactgctttatatagacattctaaaataaactggcctaacggtcgaacactattctaatgcccag

SEQ ID NO: 280600 - DNA, 411 bp, Glycine max
  unsure (1)..(411): unsure at all n locations
agcttgcatgatttacatctccctctttctcaagcaaattcttcttgatatcatcaaaatcttcatgatttacaacggcaaccctcatctgggatacaaccgagcggcttacccttatggattgccgcccaactactcaccacccgtcctgcaagacgatgcgggcaatattgcttctcctgtccttgaaagagagcctcctcaacagcccgacgaggtccacgaagaccctcaagactatgctcgaagggatgtcgagttctatcccccgattcccgaagggccgacacccagcatgttgcctcagcccaacatcacgacacaaccaatagttntgtccatggaaggactgcccccggcaactgaagaaaggaggaagctcgatctcctcgaggagagattgagagcagt

SEQ ID NO: 280601 - DNA, 441 bp, Glycine max
  unsure (1)..(441): unsure at all n locations
agcttgcctttagttgtccaggaaggacaaggcagccgaaggaactagttccgctccggagtatgacagtcaccgctttaggagcgctgtacaccagcagcgcttcgaggccatcaagggatggtcgtttctccgggagcgacgcgtccagctcagggacgacgagtatactgatttccaggaggaaatagctctacggagttttaaaagattggctaagattttgttaaaacataagcacttagacaatgaaggaaagctggagttgctgcacatgatgtccaacgttatgtcaaggaataagatcgggctgcacaatgcacaaggcaagataaaatgtcaaatgaagaattgaagttgcaggatccacgatgtcggatacaatgtcctgacatcctgcccganaatactggagttgctgacaatgcataagtcaagata

SEQ ID NO: 280602 - DNA, 427 bp, Glycine max
  unsure (1)..(427): unsure at all n locations
agctntgcttctacacaaatgattaaatgcatganaaacaaactaagataacagaaattataattgggttgcctcccaggaagcacttctttaacgtcattagcttggcacttttacctcactgngtgatcttatgttttggttcgtactttcagaacctcttgacctcttaccattacctgtaagcaaacattgtgttttggagcaggcttatcttcaaaaaataaatcaaaatcaattttatgatcttcaaaacctagctccagcttcctcttccccatatcaactatgcagcttgcggtcaacatgaatggccttccaaatattacagggatgccagtatctntagagatatccattaccacaaagtctgccgggaagataaaatgttntactctgaccaacacatcttcaattactccatatg

SEQ ID NO: 280603 - DNA, 436 bp, Glycine max
  unsure (1)..(436): unsure at all n locations
agcttgtgcattattaatgtcaatgataaaaaacagaatatgaatcataccaatttcaaaaccttcatactcaataattgaatcatctggccttttattagccctgtcttcaaaatccattgtgtatgacataccagagcaccctccctgtttgacacctattcttaaacataaatcttgatttcgttcagacctcatcttattcaagtgcttcagcgcattatccgtaagtgaaactgcaggggccagagaaccagatgctggtgcagctganagatattgaggtgggggtgagtgaaagcaaagattaaaaaagtgctgagtgtggcagaaaaagtatttcacataacanacaagtatataacanaattcaaaatatactgtntagctgttgcaatctggttaatgatattaaaacagagtgaatgccaataac

SEQ ID NO: 280604 - DNA, 447 bp, Glycine max
agcttccttgtgaatcttctatggaggctggatctttgagcttcaatgaggtccttcaatggtgattttccaccatggagatgcagcggaagataaaggagaagaggtgagaggaggcgccatccactagggaataagccatggaagaaggagtttcaccaccaagagagtgtggaagcaaaacttcatgatgaatcaacaatgattcaaaggtgttttgatgataacaatgatgacaacaaaagatgatgacaaaagtgatgaacaaaaagctcaagtgaatcaaagaacatccatctcaagaatcaagattcaagattcaagttcaagaatcaagaagaattcaagactcaagaagaaagcctacaaacaaagattcaagatctcaagaatcaagatcaagattcaagatctcaagaatcaagatcaagaatcaagactcaagat

SEQ ID NO: 280605 - DNA, 431 bp, Glycine max
  unsure (1)..(431): unsure at all n locations
agcttgtttgttggttntgtaagtatgtatttgtagaagtaatgcagaagatgtaaattggtttgatgcttttcctctaagtcctctctaacttgctggatggttgtaatacgggattctattttgttatttaatttaacttgcattcttttgtattatatttatatcatcaatgtctgatcaatggcatgagctgagcatcattcaggatcttactgaccgtatatcactctttgttttttaggtcttggggactgnggagacagaggataactgaagcagcacttgatttttgtcactcttttntatattatggttagtcatatcgacagtctggagagtgaagtaaagataatagcangttagtcatatgttacaggatggctntctttangaacttttcanatgatacagtctcacatggtgtcatg

SEQ ID NO: 280606 - DNA, 432 bp, Glycine max
  unsure (1)..(432): unsure at all n locations
agcttttactttcaatatanaactaacgtgttctcaaacatgttatatggaattggatcaggctacttgtcagaacttacaatctaactctgattaggcagagatcatatttagaccagtctgttaaataaataagtcacgcaagacttttctttttttaacttagttagttttttctttgtacataaaagacttattcagtttaaaaaaagtcaaattttgaattataaaatcttttacttccaacaaattaatctattttagaaatacaaataatatagcaattagttaaaaaaaatacttcatcaattattaattctctttttccctactttgttttttgtttctttntattcttttctataaatgattcttggaagagagccctcaacgtaatccatataggagccttcatcaacgggaaactcactc

SEQ ID NO: 280607 - DNA, 430 bp, Glycine max
agcttatttataagagcttatatataaacctacaacaaatagtttcatctaacacttctctcaaaagtgctctattttttcattctgaggcaatttttcacagaaagaagagcacatttaattgtgaggagtcgatgcttcagatggactacttgaggagtcacctgaggatggattcaatggtgaaccagctgttagagaaccatttccaccctcactctcagccaccactggtatcttgacagtggctgctctttccatctctttctcgagttcttcctctttacgcaatgcagtaaactgggtatccaaggatttcgccgcagctagccaggcagatacaatcagcagaagtattcctcccaagtatggggttgaattagctagtgacccaaaagtcaagatcataaattgctggataagggcacct

SEQ ID NO: 280608 - DNA, 423 bp, Glycine max
agcttctgttttcaatttcgagcgtctcgatattttacggggctctatccgacatccgagttaaaagttattgtcgtttgatttttctaagagcttcccttttcaattacgagcgtctcgatatattacgggacacaatcggacacccgagttaaaagttactgtcgtttgaattttctcagagcttctattttcaattacgagcgtctcgatatattacgggactcaatcggacatccgggtaaaaagttattgtcgtttgaattttctcagagcttatgttttcaattacgagcgtcctgatatattacgggactcaatcggacatccgagtcaaaagtttttgtcgattgaatttgctcagagcttctggtttcaattacgagcgctctcatgtattacctggacttcatcggacatccg

SEQ ID NO: 280609 - DNA, 566 bp, Glycine max
  unsure (1)..(566): unsure at all n locations
ccgaagcgacaccactacanacgccacattagtaaggagcaaacattaacatacttnnnccannnnnaaatacaagggagggagntttgattgatatcgatngcaangcgaacncaanncnacannggacccggggagacagtagagncgaccggcaggcaggcaagcttttccatatcctgacactgaacaaccccaaaggcgagcaggaggccaccacacgaacgccaccaccacgcacaagacgcaaccgtcacctagcgaacagcgaaaaggaaaggcagcaaccagaaaacgcgaaaggaaacagtaacatacgaagacaagcagacaaacaatggaccaacggaaggataggaccaccgaaagaggaacggaccggatacgaaagacaacaagaaagacaaggcaggaacagagaaagaaccaccgaccgacaccggacgaggccccgataaaagaagcaaaaagagcggcccaaagcaccgcaaacggaccagaagaaaaaagacacgccccagaagcaagaacagcaaccaacacgaacaacacaaccgggcacgaac

SEQ ID NO: 280610 - DNA, 421 bp, Glycine max
agcttgacattcatataaaaccttataactaagctgattactatattttagatcgaacttagcgaaaagaatcaaaaagcgaagcagtgtatgtattgaatcggatccgggttacacccatgtcttcgatgatgcacctatcgcgaaagcgaattatctgctaatattaataatttggagctaaaagtcgacagtttgtggaaaaacgcaatagcaacaaacgccgaagatgaatcaaacaagcccaaaaccaaattctgagaaaaattcattcagacccaagctaagaacccaattctcaaaatattaaaatagactagaacccaacttgtaaaaaggggtgttgcgagaatcgaactcgcgacctctcgcacccgaagcgagaatcataccactagaccagacaccctatacaaattct

SEQ ID NO: 280611 - DNA, 424 bp, Glycine max
  unsure (1)..(424): unsure at all n locations
tctgcttgttattaacggaagaaaagaaaccgaaattgaacaaaataaagatgaaagccaaaaaacaagaaatgaattaaaaagtctcggatttggaaacttacccgttgaagaatgaagaacggacgaagaacggtaaagaacggaggaaaaccttcacggatttgcttacggaaacctctcggaagctttacggaagcacctcggcttggattttcttcacagaaacaatttttttttacccaaaacagctgaaatgcatagccagnggaatcaggcacccttagaacaacccccttttgcctttntataggaaaaagggggaggaggttgccgcccagctcgcttangcgagctgggttgcttccaccttaagcaagaaaatgcctagaaacctctagaagggcctagatttgaaaatact

SEQ ID NO: 280612 - DNA, 428 bp, Glycine max
  unsure (1)..(428): unsure at all n locations
agctntagtattatttttntatattaaaaaaaaatttcactacaaataaaacataatttagagactaaaacaatcgatcgctaaagtgataacttcagtcgctaaattgaaaattcagtcgctaaaattgttagcaatcgaaatgacgaccgaattctctgtgtcgcaaaaccctagtctctaagtccttaatcaccaaattcttattcatttccgtgcatgtttggttgctattttgtttgggaccagttcaacaaccgaaattatcggtcgctaataagtaataaaactttaaatataacataaattaanataatattccgtcactattgaataattaatttgtaagtaaaatttaagagaaattacattcgatcactaatttggtgactaagtttaaaataaaatgtattaacaaatataaattg

SEQ ID NO: 280613 - DNA, 432 bp, Glycine max
  unsure (1)..(432): unsure at all n locations
agctntgagttaaaatcctgactcaccataaaccttgacccagggtgagaatgtcaatccttaccctcggaagcaaaaaaagaatagaagggaaatttccaatcaaagaaaaagagaaggaaaatttccaatgaaagcaaaaaaagaaaggaagggaaatttccaatcaaagaaaaaaagaaggaaaattccccaatcaaagagcgggagaaagcaaaaagaaaagaaaggaaattcccaatcaaaagaatgggagaaagtaaaaaaggaagaagaagaaggaaagaaagcccctgatcggngatcgaagganaaacagaagaaatatgcagagaggtctttggaccggacaatatctgaacaatacagaattgtcaccaaatgaacaaaaaagaaggaaaggaaaccacgacctanaatggtcttctccct

SEQ ID NO: 280614 - DNA, 429 bp, Glycine max
  unsure (1)..(429): unsure at all n locations
agcttgaccattccctanctatcccgggcatagtcagtcagtgagaacctgtgatgtacctaaacaggcgagctcctggcagtcaacagataaaaggaacaaagaccacaaagcaaggaggcttgtgtggtggttggccagctgtgaaatttgagttatatatgggatatggcctctggtaatcgattaccaagggtgggtaatcgattacaaggcttaaaaatgaagacaggagactaagatggtctctggtaatcgattaccacggngtgtaatcgattaccagtcttganaacgaggtcaggaagctatgagggcttctggtaatcgattaccaagggggtgtaatcgattaccaggcttataaatgaatgtagcaagttgtggaggcccctgttaaccgattaccagtctgtgtaatcgattaca

SEQ ID NO: 280615 - DNA, 439 bp, Glycine max
  unsure (1)..(439): unsure at all n locations
agcttaattgttacttctggtgtggctaaaccaaataatacgctattctcctaaatattctttattgtcatgtaactgtcttaagtaagggatcaaataaattttgttagctgaaattctatgttgaggacaccaacagggaattggcagggaagattggagttgtgatattgggcataggctagcaatgaaaagtgttgcaggggcaagatggtggtgattcaaggcaaagagaatgaaaaaatctgttatggttcgcgacaaggtggcgcttatggttagcaagaaacaattgtttctttatagggaaggaggtaagtgttgagaatgttgttgataggaataaggttgtttcctgacaatggttttttgtataggaatgtcaccaactcgattntattctcctcatggtgcacgaattcgttcttgtgcgcatgat

SEQ ID NO: 280616 - DNA, 430 bp, Glycine max
  unsure (1)..(430): unsure at all n locations
agcttcaagattaattcaaatgacaataactttttccttatatgttcgattgagtctcgtaacatatcgagacactcgaaattgactacagaagctctgagcaaattcaaatgataataagtattgacttggattttcgattgaatcccgtaatatatcgagatggtcgaagttgaaaatggaagctcataaaaaatgaaaacaataataattgttaactctgatgtccgattgagtcccgtaatatatcgagacgctggtaatggaaaacagaagctcatagaaaatgcaaatcacaataacttttaactcggatgaccgattaagtcctgtgacatcctggaaatttctaacccggaattttgtaaatggtgcattntgaatggctatatatataagtattattcagtggatgtatataagtatatat

SEQ ID NO: 280617 - DNA, 419 bp, Glycine max
  unsure (1)..(419): unsure at all n locations
agctttctcatgttttaagttcttcctcanaactgtcctaagcaaagttcccaatgtcctattagcaacttccatttgcccatcggtttatgggtgacaagtggttgaaaataacaatttagtgcccaacttgccccacatagtcctccaaaaatgacttaggaacttaagtccctatcactaacaatgctccttggaaaaccatggagtctcacaatctccttgaaaaacaaatcagccacatgggaagcatcatcaactntnttacatggaataaaataagccattttagaaaacctatcatacgaccacaaaatggagtctctaccactgcttgtttttggcagccctataacaaaatccatggataaatcaatccanggatactccggaattggcaatggagtatacaatccatg

SEQ ID NO: 280618 - DNA, 384 bp, Glycine max
agcttctagatgagttatgtctgcgaatcggacatcctgtgaaaagttatgaccatttgaatttctcgagtgcttccgttgtttaatttcaagcgtctcgatattttatgtcctcaaatcagacatcggagcgaaatgttatgaccattcgaatttgccgagagcttccgttattcaatttcgagcgtctagatgagttatgtcaccgaatcagacatctgagtgaaatgttatgaccattcgaatgtgtcgagagcttccgttgttcaatttcgagcgtctagatgagttatgtcaccgaatcggacatccgtgtaaaaagttatgaccattcggctttgtcgagagcttccgatgttcaatttccagcgtctcgatatatta

SEQ ID NO: 280619 - DNA, 378 bp, Glycine max
  unsure (1)..(378): unsure at all n locations
agctttatagtttactgtcactcacgtgcccatacgtaatagaaccaaatatcttcaaatcagaaatagttacacgttataaccaggtcgtaccttgtgtagaatcttcatgtcaattgcatggagatctgtttgctaggtatgaagttatatggctcatctttgcccaaaatgatgtcgaaaatacaacattaattcacatacatcgtgcaccctacaacagaagtgttctagtcatctactttccaagtccatttttattgtaatgtcccacattcaaataaatgatgcctcataattaacatttctatagtactcctcanaatcttaatttcaaaatgttcccaacattgtcagttctcaatctcttgattaatc

SEQ ID NO: 280620 - DNA, 401 bp, Glycine max
  unsure (1)..(401): unsure at all n locations
agctttaactctgattattgagacactcataagagctcaagcttaagtccccattactacacatccattcctagacctgtgatagatgtgggattgtgcatgggctgggagaatgcactgttaatgatgagatacctacagccatgaatgagattaactttgtttggggaagcaactattcttataatcagtaccccaataatttcaatcaacgatagggcttcaagaagaatcacagaatgtttaggtcttaacctatgcaaaattagaggcctacaaaagaggagacaacccactcttcaagaaatcatgcttcaatatatgacccanaatgatcaaagaatgaagtaggttgagtcctaattgaccaacatacaatctctcttgtcacaaagacaact

SEQ ID NO: 280621 - DNA, 394 bp, Glycine max
  unsure (1)..(394): unsure at all n locations
agctttgtgtttgagatgttgatgttaagtgggaattgcaaccagaaattaataatgcaggggattattgtgtatttggagtgatgcaactttcaaaatggaaaagaaggtcaagggaaatggtttcatatatttggaaggtacttgggttggtgatggtggaaaagtgactataatcaatatttactctccttgtgacataacttctaaaagaattctttgggatgaagtcaaacaacttagaactgccaacaatgggggtttatggtgtattttangagacttcaatagcattagaaggaaatttgaaagagtangattgtgtcagaggattcagaatggaggcagcctgaaggaattcataataggattgttgacttggatgttgaggatg

SEQ ID NO: 280622 - DNA, 389 bp, Glycine max
  unsure (1)..(389): unsure at all n locations
agcttttactattaggttcatcaagtcaggttgaaatatggaagtaaccatcctgcaaacttggggcaaaagatgaatcgagtcacatcactgcttcgtctactgccaaacatatttaggattattgatgtccttgttacttccagtttcaccttgacaaagatgtcatggaccatgttgaaaatctaaattgattcaaccccatatcctgcgtaaaaattcgcaatacttcgactgtacatcattcgcatgcatccatgcttttcattggttgcattgctcattgcattctttccttgaaaaataaaataaaataaaatgaacttatcaaanagaaaaggaaacgctttacggcgcccttaccgaactcgtgctagagctagagtaat

SEQ ID NO: 280623 - DNA, 425 bp, Glycine max
  unsure (1)..(425): unsure at all n locations
agcttatcattatcaaacttggagaaagagttcttggggtcaagacatgagaagcaatcaagtataatgttacttccttcactaaagcggtgatccatctccacacatattttatcaatagcaacataaaaaatctctgcacggtaatgatgaagattagtgatagtcctcccttctgctcttgaacgaccccgaactggtatttcgtcatccatatttggtaccagaatacttttagcaacacaaaatccttggacatcggcaaaaaaattattccagccactctctctcattgtgcccaaccgagctntgacaacatcaactaattccatgacattcacaatattaagatcttttctttgcaatatatttgaaagctcgtttgtgataccaaacaactntaacattaacctcaaaataaaagc

SEQ ID NO: 280624 - DNA, 443 bp, Glycine max
  unsure (1)..(443): unsure at all n locations
agctntaagatgaacttctgtacaatgggggagtttctgtaatttggaaaaagtagaattgttaaaatggtaaaaatgtgtttaaagagattaagatatgaaagtcaggttaccaggggttcaggatcatccagcatttcctgagtaagttgaagagtccagatgtgctttctggatgaatgtctctgcctgccgcaagtttgccgctccagtggtggtatgaaatgtatgtcaaaaacagagtgatggtcacatgcaaaaaaattgatgttggttgactcgtagattntcaaatctttcctgaagttttggagtccatatgctaaatacactctgtctttgtgttgtctgactcgtatttcatagatggctccattgtatctgagatgaacaaactcangatagtgtggtgcccattgtgtatgatagaacactagaagttg

SEQ ID NO: 280625 - DNA, 438 bp, Glycine max
  unsure (1)..(438): unsure at all n locations
agctntgagctttgatcacccacgagtgtttcagcaccctagtaccaagactgtatgtagggttttcttcaagccacacttccaaaagcagtgtaggggcttttgtgggttcgagcaaagggtttctggcagtattgaaaacaatgtgggacaatgtgggtgtcgagggagcggtttccgatagatttcangcaggaggagaaagagaagagtgactgcaaggttttcgagcgcgcgggttatgaaatgccaatgttttaacttataaacataacaacatcggttgtttaaggataaccgatgttaactgaatatagttaacaaccgatttggaaaaattgatgttaacatcatataggttacatcggtttttcaaaaaatcgatgttaagatcaactccttaacatcagttntgagaaaactgatgttaactctatc

SEQ ID NO: 280626 - DNA, 434 bp, Glycine max
  unsure (1)..(434): unsure at all n locations
agcttttaatctttatacattattcccgctctgataccacttgttggaccttgtggcctcaataatcttaagagggataggcttagaatacagaagaaacaacaacaatcaatttaacaatgttctttanacatgcaagacacaattgattgcaacaaaataaataagataagggaagagagaatgcaaacacagttntatattggttcggccacaacccgtgcctacgtccagtactcaagcaacccacttgagagttccactaacttgtaaattccttttacaagttctaaacacacaaggacaacccttcctttgtgtttagagattctntacaacaagagactcacagtctcttaaccaatctcattgaataagaagaatggaagaagaattctctcttcaagagaagaatattacaatgaagatcatgt

SEQ ID NO: 280627 - DNA, 444 bp, Glycine max
  unsure (1)..(444): unsure at all n locations
agcttactctgtcatattccttgattacgtcatgcatctctccatggcatcgtaaataggcatatcattcctgcatcatatttgtgcattgcattttcataaatcactgcattatcatacgccttcatttagcatgcttttgttcggccaactacatatattctacttccatcattcgcatgtcatgttcactcgtgcatgatcctggcatcttcctctgcnnaaaaaaaaaaaaaaaaaaaaaccccngaacaaaaagaaagtcacaccacattcttagttacatgtgttgggtaccatgatgatggctataaaccaaccatgttgggattatacaccaatttatcaagaaaaaaatgattgaaaatcatgtgaaagggctacctaatgcatggttaactaggaaaatggtggtcctagggcatctcatgtcaatctcataat

SEQ ID NO: 280628 - DNA, 384 bp, Glycine max
  unsure (1)..(384): unsure at all n locations
ttatcttatgtttctaacatctacaatagacctcctcaacctcagtagcaaaatcagccacaacagaataattatgacctttccagcaacaggtacaatcccgagtggaggaatcatcccaaccttaaatggttgaatccttaacaacagcaacaacaacaaccttattttaaaaatgatgttggcctaagcagaccatacgttcctccaccaatctagcagcaacaacaacaacagcttcagaaacaacaaacagttgaggctccttcgcaccttcccttgaagaacttgngacgcacatgactatgcaaaacatgcagtttcaacaagagaccagagcctacattcagagctttactaatcagatgggacaattggctacac

SEQ ID NO: 280629 - DNA, 402 bp, Glycine max
  unsure (1)..(402): unsure at all n locations
agcttggttctaggtacttacccgttgaagatcgaagaacgatgaagaacgaatgaagaacgtcgaagaacggttgaaacccttgcgaaattcttcacggaaaacgttacggaaacgtttcggaagcgcctcggcttagattttcttcacggaaacgatttttccaagcaaattcgaaagagagagaagtgccaaaggggctgaacccttttcttcttcacttcctcccctatttatagcaaaataggggaggtggttgccgcccagctcgcccaggcgagctcagctcgcccaggcgagccaggttgcttcctccagaagcaaccgccttctggaggaatattctggagggcccaagtgggcctgggtgctatntgcaccaccatttttactaagtacacc

SEQ ID NO: 280630 - DNA, 439 bp, Glycine max
  unsure (1)..(439): unsure at all n locations
agctttggtgcattcataatatattgtaggtagcatagagcaatgtaaatgtccatccattttctaagctccccttgtgttatctttggctttgagctttgtcctcccttgcatagttactataatttccaagcaaacaagacaagaattagtcatcaggattaaagctaaggaaaacaaaaaagagagtgagaaggggtaggtggccgcaaagagaagagatgagagataggcaagaagagttgtgcaacatataatgaaaccctatagtgattagaatagcttttatacttaggcatttcttatgttatattgatataatgggccgggttcgggtacttatggataaaaaaaattaaactaagcccaactagatgtaccaattccttactctntcctttaatctaactacccgctcatctaatatagacgggctaca

SEQ ID NO: 280631 - DNA, 429 bp, Glycine max
agctttgcattctaaattgtttctcttgaacatagatgatttgtaatgagtgcttttttgtttggaatgagattcataatgaagaaatcaactacaattttgcataagccaaaggttaaagcagagagaatgttccaaaacagtagtcaaatgctaaaatctccctaggtcttcgcaagctcacaagattccttcatcaacgtctaaataatgtatccactaaaaaggaaaccgtcaactagtttctttccttccaaaagcgtacgtgtgcaatatatatctgatagtgacacaattggtgatgtttcacggcggctgtgcgaccaccctttctcaatacaactccacaccattcaaatatatgcatatgcaagacaaaaatgaaagtagatacgttacaattaacttatcatatcctcagatactacc

SEQ ID NO: 280632 - DNA, 432 bp, Glycine max
  unsure (1)..(432): unsure at all n locations
agcttctcatggaagctacctagtctataaatagaagcatgtgtaacacttgttgtaactttgatgaatgaaagtcttatgagatacacttcaaagttccacttctttccctattttattccttcaatttcgtgctccccccttctctctttcttttcctccattaaagcatcctcttcaagcttcttatccaaggcaattcttggtggtgaagctccttcttccttggcttattccctagtggatggtacctcccctctcctcttctcctttgccttccgctgcatctccatggtgaaaaatcaccattgaaggacctaattggagctcanagatccagcctccatagaatcttcacaagcaagcttccatcaagtggtaatcagagcacaagagcttcaagtaggtgctccttannacctccattaattt

SEQ ID NO: 280633 - DNA, 394 bp, Glycine max
  unsure (1)..(394): unsure at all n locations
agctntgtgttggagatgttgatgttaagtgggaattgcaaccagaaattaataatgcaggggattattgtgtatttggagtgatgcaactttcaaaatggaaaagaaggtcaagggaaatggtttcatatatttggaaggtacttgggttggtgatggtggaaaagtgactataatcaatatttactctccttgtgacataacttctaaaagaattctttgggatgaagtcaaacaacttagaactgccaacaatgggggtttatggtgtattttaagagacttcaatagcattagaaggaaatttgaaagagtangattgtgtcagaggattcagaatggaggcagcctgaaggaattcaataattggattgttgacttggatgttgaggat

SEQ ID NO: 280634 - DNA, 432 bp, Glycine max
  unsure (1)..(432): unsure at all n locations
agctttgagtttattcaaacgacaataactttttactcggatgtctaatcgagtccagtaatatatcgagacgctcgaaattgaatgttgaaactctgagctgattcaaacgacaataactttntactcggatgtccgattcagtgacgtaatatatcgagacgctcgaaattgaatgttgaacctctgagccaattcaaacgacaataactttttactcggatgtctgattgagtcccgaaatatatcgagacggtcgaaattgaatgttgaacctctgaggcaattcaaacgacaataactntttactcggatgtctgaatgagtcccgtaatatatcgagacgctcgaaattgaatgttgaagctatgagccaattcaaacgacaataactntntactcggatgtctgagtgagtaccgtattatattg

SEQ ID NO: 280635 - DNA, 659 bp, Glycine max
  unsure (1)..(659): unsure at all n locations
cctcatctcactccgctacatctcgtatctacaattctctcactancctgntntattatanaaaaaaannnnccgaggggcctgattcattcgaaaacactcaattaanatatactctacaatactcantnttgttattatatgttaggtagacattacactattatattttatatattctacacctcaccaatacgctgcggactgatctatgagctaactaactactcacgttattacaataacgatcaatatgcgtcgtcacctaatacaacatcacaatacctaacgacggacactgcattcgtcgacgaacatctccgcatactcgaatatctcactagtactgactgtttcagagctctatcatctatacatatcatgtcactacgactaataaccgtatacccactacactctacctacactttgacctcacgctctcatcatctaactcaaccacgtctcatgaatcttctgctatgcgatcatcatatcacacactatccgatatacagcgacaaataacactcacatacaacactcatacactactacatacagcttaagtacatcttccgtggttcctaactctcactccgtcccataatgtacctatgtcctcaatatccatatcgaccaagttctctacaacatcg

SEQ ID NO: 280636 - DNA, 376 bp, Glycine max
cacccccacccttcccggagataaacacgaaagtgaataatgacaaaaaggagttgacctgacacaaacaaagaaccaaggcctaaaaaaacgaaagcagcgcttttccaccggcggaacagggcggaagaacgaaccaagcacaacgaagaaagaacaataacgacaccaggagaagcaggacaacagaagacgcccgaccagacacaccccaaaagcagagcaacacagacaccaccaacgaacagaccgaagaagagaaaaacgcggaagggaccagatcaccccgaagaagatggacgacaaagagacaggcaagaaccaaagaggaaccacccccacaccggagcaacaaccgccccagggacacaacccc

SEQ ID NO: 280637 - DNA, 288 bp, Glycine max
  unsure (1)..(288): unsure at all n locations
tgctttactgattctcatatactaattntattactaacatcttgcagcattctctgctcgtcagttgataacaatggcgataatgcttttgctgaatgttgatttgtaatctgaacggcactcgccatcttgggactctaacgtagaccttgactctccggtctcgatgccacccttactttttactgccagcggtgattccttggacaattcacgaatataatttcttcatatctttatcgccatgggaatcgttccatactcacacttagcctttatggcttctta

SEQ ID NO: 280638 - DNA, 641 bp, Glycine max
  unsure (1)..(641): unsure at all n locations
tcccatatatcactactacanccccctctgaaaanccgacagtcaactacaccatantnttaagtacacacanacnnaaaananaaaaggtggntttgaattcgatccantangcgacactccannatactnatacttacgagatcgccagnctataacacactattagagcctccatgatacacttgtctatagtacactcatcacaggctccattgagcgtggccctttcttcatatctaaaggacctgcgtcgcgggagaagcaaatatataaatacacgagactcgactcacaataccaagcgttagggatggatggcttatcctaacatagaataacacaaaatcacggagcacgagaaacagaggcggatccgaagcgcaattctctcagtcaccacgtaacgcaacgcaccacacgcacaaagacacgacgacagaagccacacagcctccacgcaaagcgcacgacacccaccactagatccctcgcatcaacacatgacccacactctacgcccaccacgagcacacgttaccgcacacacgccaccatcatagtccacgcggacacgcacaacatcgacgacacactgagacgaccaaaacacacacccaaacacccatacacaattaccc

SEQ ID NO: 280639 - DNA, 525 bp, Glycine max
  unsure (1)..(525): unsure at all n locations
cccaccgccgggcacactcggagccagccggcacaaaattnnaagcagactgagactcgaatcgccaacacngaccggaccggagcaaagagacgcagctgaagaatttctcattaaccgcacaaagaacggggccaacgagtgtacacaccgaccgcaacccccacaccggacgacaggacacagcgcgcaccaagacacagcagtactcatatagcggacgcactcgcaagacgaaatatcagcgagcgcaacgagccgccgcaagcatgaaaccgaaaacaacgagccaagaactcgatgaccccacacaataagcagccatgaagcaggtgtacctcgggacagccaacgtctacacaggataaagaggaaaggcgggttggagcacaccgtcaccaaccatctctattctaaaaacgacaacaggaaagcccacgggcactaccttagaccaacaacgaggaaccgtcgccggcaggagaacatcctcggggagaggccgcccgacccgacaaaaccgcg

SEQ ID NO: 280640 - DNA, 596 bp, Glycine max
  unsure (1)..(596): unsure at all n locations
ccaccaacaccacaaacacgatagcgaatgtgaacgataaacggaacaccaccancanataacnaaaagggagnntttgaatcgatgcnactgcgaaacacanacnnaaaanacgcggaaaccaaagcaagggaaacaccaccacaccaagttgcttattttaagggacaagacctgatggaggcgtaatgaacagacccaaatcgaagcagcaccacaaagaccaaaggacgaacatccgcacccgtgaaacaaccgaaagagacccacactcgaagaccacgatcagccgggacggcgagatgcgacacaccagacacgcacaaatgcggacacgaaggagacaggagatccaaccgacgcccacgcaagccaaaccataaagccagaagctcgaggtcatgggaacagcacaagaaaccccaacatgcacaggtgcggcgagaatcgaacgaagaaggaactacactggcaatccattgcggcggcgaacacgaaaaccacgaaaggacacgaggagcccgagaggacaatacgacgcaatcaccacgcaacagaatcgaacgctacgatgacacacagtcacaacgaagacg

SEQ ID NO: 280641 - DNA, 337 bp, Glycine max
  unsure (1)..(337): unsure at all n locations
agcttctcgatatattatgctcctgaatcagacttccgtttcanaagttatgaccatatgaatttctccactgtattccgtgtcacaagtgatgaccatttgaatttctcgatagcattcgttgttcaatttcgagcgtctcgatatattatgcgcctgaatcggacttccgtgtgacaagttatgaccatttgaatttgtcgagagcatccgttgttagaattcgagcgtctcnatatattatgcgcctgaatcagacatccgtgtgacaagttatggccatatgaatntctcgagagcatatcgttgtcaatttcaagcgtctctatatagtctg

SEQ ID NO: 280642 - DNA, 359 bp, Glycine max
  unsure (1)..(359): unsure at all n locations
cccccataccacccaaggattgaagaaaaacacaaaaaaannnaacggggtatctgcatccacnaannancacgaaagatgggaaacaacccgcggtcttttcaagaaaccagggggaagaacccggacaagcacaacgcacagaaaaagcacagcgaagaagaaatacggaaccaaacggcagacagaggaaaaacgcaaaacacgaagaaacgagcacaggacaacaatcaaacaaaccggagcggcccacaaacccaccaccagcaagaacaagaaaggacaagggccccggacgcaagcaaagaccgaaagagcgaacaaaaaaaaacagacaaccaagcaccccaagacagccc

SEQ ID NO: 280643 - DNA, 424 bp, Glycine max
  unsure (1)..(424): unsure at all n locations
tgaggtagtgtataatggtgaaacttcctgcttttattcgttgaccacagagtggtacctggagatatgtctcggaggtcatgagaccttgtggacgtactgtggtgtgctattgtccataaccaagcttgtcccatatcgaccaagccggaatattcgtcagtggaacctgtgattcttatcaggcgactttgctgtctcagatagaggtactaacactagcagggggttgggggctgcccctgaaattgaggaatatggtgggcttgtgattataccaagtgggaatcgatatcaagttcaatacaatacagacgctatatggctctggtcacgataccacggcgacgaactcataactatgcttgacaactacgtctagaaactagtgcaaacatctggtaatatctatactcatgcgcgn

SEQ ID NO: 280644 - DNA, 559 bp, Glycine max
gagagcaattttgaatcatgtctaaagcgatctatgaatctgaaattgatgatagtgtggcatacagtcacataaggctatgtagtgagcggctgttcgattgtgtacaagcaggattgcacgtccagaatatgctgctgaaccaactatgccttgatggacacctaccagtgagatcacatgcacacacagagcccattgactcctgtctgctcgcaccggatgctcatacagacaacaaagcttcctctatatctatgcatgacatcgttgaatgagcacgtattgccacaccaccaacaccacatgcactatgctttagctctgacacaacaccacccgagaatgtgcaatgctcactcttacatcccgcgacaatgatcttgctgctcgtcaatgaccgacggacagactacaaacatatccgtgagtgagtagtcatgtgcataatggtgatcgatgcatcgagtgcagacaccaacactaaatatctccgttgttacatagctagcactcactgatattgtgtgtacagccgaatacagtggactattcttcg

SEQ ID NO: 280645 - DNA, 795 bp, Glycine max
  unsure (1)..(795): unsure at all n locations
cacaccgcatgctctngcanncnttanaccactcaccggctcgngcacgagagaaaaatntaagtagcntcgcgcaaaactcgcnnnncnaccccnnnnaaaagagagcggcgtggaagaccctccgatagnancnanccncnnanannnnannnaanaccccancgagnacacgccaacacacnngcgccggcaacacnagacaagcancacanacaattatattttatagnacgcnacaacgactagaacagtantcagtgaggcgcgcgcacagcacgaaacactatcactatgcacaaaccaatgcgacaatacagagacatacgcgtgcagaccgacacacacaacggaccacagactgaacacgagcatcacgcacaacaggtagcagcagaacagagacaccaccacagacgagaanagccactcgcgtgcgcaacatacacacaatacagagaagacacgcgtaacaccgataatgagcgcaacgaacaatcaacgtacaccacacanacacatacacaacacaacatgcacacgaacggaacagaacaacagcaagaagcacgatgacgcggaacgcgagcgaacgcgcgccaccgctgagagacgccacaatatctacaagggagacaaaacgcagacagtcatacgaaaccaccgcacgacacacactaccgaagggacaacgaaagcacgacacacatccacagccggcatgacgatcgcgcgcgacgcaagaacgcgacacacacatgcaagacgaacacaccgacgacgaccgccacaacg

SEQ ID NO: 280646 - DNA, 445 bp, Glycine max
  unsure (1)..(445): unsure at all n locations
cacccccgacctccgtcattcaatagaatacaatngagactaccgagccaaactaaaannanaagaggttgatcatgcatgcaanaccanaaaacccaaaccaaggacacgacacaaagaaaagcatttttatagaacaaacacaccagagcggcgcgcaaagacacaacaccccgaacacaaagcaaagcccaagcataacaccgaaggcacagcgaaaagccaaggaaagacgacactaaaggaagaacaaaagcaaccaacagaaaacgaaagaacgacaaagaaaccaaaacgcaagacaaaaacaaactaacaaccccacggaaaaagccgcaaaacaaggaaacaaaatcaaaagaatgcagcaaaagaacacacaacacacgaccacaaaagacgaaacgcaaccaccaaaagcaaaaaagacaagcaaaaaaaccac

SEQ ID NO: 280647 - DNA, 418 bp, Glycine max
  unsure (1)..(418): unsure at all n locations
agcntttcgcattgcttactgtaaaatctaggacctacccttggtagaagtctccacagaggccattgcctccctcgcccagtattatgatcagtcgttgaggtgcttcacctttggcgacttccagctatcacccatggtggaagaatttgaagagatcctaggatgtcctctacggggaaggacaccatacctcttctcagggttctatccctaattagctagaatttctaagatagtccaaatctctgcgcaggaattagaccacatacagcaagtcgtaaatggggtggttggaataccgagaaaatacttggaggacaaagcaagaatcttggcacgtaaaggcgaatgggccccgttcatagacattctcgcgctgttgatcttcggaggaagtctctttccanatgtggat

SEQ ID NO: 280648 - DNA, 385 bp, Glycine max
  unsure (1)..(385): unsure at all n locations
agctcgcccaggcgagcaaggttgcttcctccagaagcaactgtcttctggaggaatcttctggagggcccaagtgggtcttattgctatntacaccctttctntactaaatgcaccccccttttattgttttggtaattctttttccgtaacgttacgaaactttacaaatttcgtaacgatacttaatttccttccgcaaggttacgaatccttacggattatgtatttactctttnttagctttcgaagaagttatggaaactcacggattgcgcataaatacctcttttcgacttncgccatattacggaatttcacggatcgcgcaagcctgctgtcttttgagttctgagacgtatcacgacttcatttattgtgcaac

SEQ ID NO: 280649 - DNA, 284 bp, Glycine max
  unsure (1)..(284): unsure at all n locations
agcttcttcctttatattctctgcaacaacataaaagnntgctagtgtcgggagaataataaatacataagaatacacgttaggaaagaaggtcttnacatgaaagagatgtgaatagattttggaatctattcgtcatacagagttgtatattggaaatacaaattactaaggagaatgtataaacacaaaggataatggaaataacaatagccttacaagtatgcgttactaacagtactcatacctataatacacatcatnttcagagtagtagctaacat

SEQ ID NO: 280650 - DNA, 485 bp, Glycine max
  unsure (1)..(485): unsure at all n locations
gctaataaatctatatatggttaaacacagcccttgtcagtggttccttttttttcatgggnataattctttatgtggttgtaatgataaccccatggatcaatgcatataccacaaggtcagtaggagtaaaatatgttgtcttgttttatatgtagatgatattttacttgtagtcaatgatcggggtttgctacatgaggtgaaacaatttctctctaagaattttgacatgaaggatatangtgatgcatcttatgtcatcgacattaagattcatagagatagatctcgaggtattttgggtctatcacaagacacctatattaacaaaattctagagagatatcatatgaaagattgttcaccaagtgttgctatcattgtgaagggtgataggtttagtttgaactaatgatcaaagaatgactctgagagggacgagatgaaacatattcattatgcttcaattgtcgacagcctca

SEQ ID NO: 280651 - DNA, 731 bp, Glycine max
  unsure (1)..(731): unsure at all n locations
ccctcctccctcacaccatcgcantcantcgttcttgtgcgtatgtggntanaantanncacncagagtgacatttgtgacacactactacatcgacnaatctagctcgtactcgtggattctctagagtcaaacctgcaagccatgcaagacaacttaactattattcttgtatcactatctgaccacacacaatacagctaacgaggtggtatgtatgcgcgagtctacattagcgagactatactcgtaatgcctctaagctatctatagatctactctctacacaggacatacctcttaaacacaacacacagataccttacacaaggtgtaacgcctgacatacatgtgaggctaacacagtcacacagaaggtaccttctcgactacatatcattactgacgagtatcggcgccacgctatcatctgacatacgatnatctggaccgagacaatccaacttctataggatacgcatgctgcccacggacaaccaaccgctgtcggagagacgagagctacgagctctaccacacagtacattcggatgtaatgacactgactgaccacacggacagacgactactcgctcaatgcatatacatctcacgccaanatgcgaaccacacactgcacacagtgcgatgacgatgcatagtaccatatacagagaggacaatacagatgaattcgtgtacangcgctngtagagcgcacaataccacca

SEQ ID NO: 280652 - DNA, 566 bp, Glycine max
  unsure (1)..(566): unsure at all n locations
ccccccccgcccacctaggtgtgatccgcacgcaataaattnaaaaacnnnccaggggttgatcgtgcatcctacacctaaaatcaccnggctgggggcaaacggtctataactacataattcagctcttgtttattnatgacctcaaagaggaagctgtgtgctaagagcggaaatatatagcgcattcgcccaaaaaccacaagatatggagagaaaataggacaaacaaagaggaaccgcacctggtgcgatgtaggacgtacgatacatgacccacagggatagatatgctgagatccacgaccgtggccgaaaaagaaagtcattagacactgcaacaaatagaaccggcctcggaacggcgccgtttcactacgtcacgaaacacggcgtaagtcgaacagagagaaaggttctataggagttgttaacacacatacggctaccatacgccaaccgaacgaagataattggtgttacagggaaatacatcctcacacgtcatgaagcgaagtctcatgacaggctcccaccgggtcccatcattgacagactaaacgccc

SEQ ID NO: 280653 - DNA, 317 bp, Glycine max
agctcttattttctttgatgaagatgaatccatggccacctcatggactcctctaaggacaatagcatcatttcttgcactgaattgttgggagttagaagccatcttctcaatcaaattcctaacctcagcatgagtcatatcaccaagggctccaccactggcagcatcaatcatactcctctccatgttgctaagtccctcatagaaatattgaagaaggagttgctcaaaaatctggtgatgagggcaactcgcacacaatttcttgaatctccactatgttgcctgatgcctgaaatgtcttttctgatggt

SEQ ID NO: 280654 - DNA, 484 bp, Glycine max
  unsure (1)..(484): unsure at all n locations
cgcttctacaatctnccctttntggatgatgacaaccctgatatcaagatacacatacacattttnttcctagtcgatcactcacttaattctccatattctccccctttgtttttgagtttaagcttcacttgaaattaagttatttaattatgtgagttcttgatttaattcctattntctttccccctttggcagcaacaaaaagccaaagttcgtaacaattataaaacatacataaatgactaatcatacacaagacatttattgaataatctaaaccaatcatgaagcaaaaacatgaataacccatattaatatataaaccacatagtcatataacataattcataaaaacttagtcatactaagcaaatagtataagaagtactagatgttcanatttcataataatataggccaatacatgactagaaatctacagtctaataatattacacataatagacatctatgatgatgg

SEQ ID NO: 280655 - DNA, 275 bp, Glycine max
cttataattagttaggggtttctctctgtattgagctgactaaacacacctagttggggatttctaatgaacagctgatgtaaatacttaatatctaattgattatgttttctatgttcaatgcttccttcaatgcttaatgattggatgcttattggctgatcatccatttgtgtgcatagttaggcgactttagcattgggaaatgtactgtagccttagaactttattgaagcaggatcgaaacttagtcatacaagagtgatctgcggatt

SEQ ID NO: 280656 - DNA, 371 bp, Glycine max
  unsure (1)..(371): unsure at all n locations
acaccatatgagcatgatgatggatggctcanattctaacaaaggtcaactcatcactttcaaattgagctttcataactatcatgacatgtacatgaaaatcgaggatttcacatcacgatatttcatgaaacttttattatcaaaataattacccatttgttgaacatatactataattcaaagactaacatgcacagtcgtacactcacacagaattgacccacaatattaaactatatacccaacgaaactaacaacattaacacattaacacatctaacaaattaacacacaccgcatatctagcagaaccacagaacactgcccgcccatacttaaacaacacattgtcctcaatgtagcacaat

SEQ ID NO: 280657 - DNA, 110 bp, Glycine max
  unsure (1)..(110): unsure at all n locations
agctnggtcctcaatggctttatgaagactctnnccaaatctaaaggtagatctgggatctctatcagagactatactagaaggaacaccgtgtagtctaactatctcac

SEQ ID NO: 280658 - DNA, 485 bp, Glycine max
  unsure (1)..(485): unsure at all n locations
tgtgtggagcttcaatggagaatgaagaagaagagaatgacaacgtgttggagagagagggctgtctgaaatttctgtcttgctaagtgaggagagagataagctttttggtcttaaataaaagggtttcctttntttctattattntattcaagctctgccacatgtcccgatttgattggagcaaaaagggcccactttctctttntgactgtgacccatactcagtcacaaaagagagaanaatctgacctttgaaacgctaaaatcctgcctcggtttgcgtgccgtttctctgattccaatttctcgcgtttctctgcgtccgtcggggccagttttcgaaagcaagctatatatatatcataacgctcagactaaaaccccgagcgtggtcagaggttggttctgtaaatttaagtccacgaaaacgatgatctttactaataattaggaataacccttacctcgcagtatggattctc

SEQ ID NO: 280659 - DNA, 477 bp, Glycine max
  unsure (1)..(477): unsure at all n locations
agcttgcagacaatataatctatcgtcacgctaaaaatgagctacttttgtttgttaaagtaaactagaaaaaatatactccatgtgtatggttgatctttgtactaaccaatatttatgaacaatgatagacgttaacttctaagggtcacatgtaaaaaaaaaaaaaaatcaagggtctcaactaaatttttcatcttaagataggcctatatacaaagaanatgaatgtaggcagtaacatccttcatttccatcatgtatacaatgctatctcctatattttagtcgacttacacaaaaactctnttgatttgcttaaaaccatttctgtgacacccacacccatatcaatttcatatnttagtttaaaaaattgaaccgagaattacccttgattacataattacacatatgccctctctgtgtttntatacatattacaaatttaaatcccatgaattcaaacattacgta

SEQ ID NO: 280660 - DNA, 382 bp, Glycine max
  unsure (1)..(382): unsure at all n locations
atcaagatgcggtgacgatgaatggctatcctatatntaagttattccctttatgtgacctacttgtgttacacaatactcagcacttgtaatgctatatagttntataggtgctagtaatcttgtggttagattatatactatttctgctatgacaggttaaagagagaataactaccgtcattgttattaatntgtctttaattatactagcttgcaacccggattgttagattatattattcaacaagtattgatatttttattgtatgatccattggcctcttctcgtaaggataatcattgagtcataaaatgtttttcaccaatagtcataacacattaatttgccttattggtgaaatgatatgatgctgactca

SEQ ID NO: 280661 - DNA, 332 bp, Glycine max
agcttctagatgagttatgtctgctaatcggacatcctcgtgaaagttatgaccatttgaatctctcgagtgcttccgttgtttaatttcaagcgtctcgatattttatgtcctcaaatcagacatcggagcgaaatgttatgaccattcgaatttgtcgagagcttccgtttttcaatttcgagcgtctagatgagttatgtcaccgaatcagacatctgagtgaaatggtatgaccattcgaatttgtcgagagctatcgttgttcaatgtcgagcgtctagatgagttaggtcatcgaatcggacatccgtgtagaaaagttatgacca

SEQ ID NO: 280662 - DNA, 495 bp, Glycine max
  unsure (1)..(495): unsure at all n locations
tctatataagctgaaccatttatcaataaacacaagtnngagtttattcttaatattagagtttatctcttttatcttagtgagagtgattctcctaaattcttgagtgattcaagaacaccctggctgtatcaaaggactttcacaacctttgtgtgttgccctcgctggaaagagtgattctttccttcctatcatctccacccttgttctttcaaaccacaattccagaaaatccacctctgcccaaaattatctcgtgaccataactcccatttcacacactcaaattaagtgattcttgagcctaaattgaatgtcaaaacgagacctttcacctcgttttggaatcacctcatttggagccctgtagcttccgttattgccatttctatatttctgtccagccaccacttagacctacgtttaccatcccattcatccatgttatgccagaaaccaccttattaagacccacgagattaaccaccttat

SEQ ID NO: 280663 - DNA, 378 bp, Glycine max
  unsure (1)..(378): unsure at all n locations
caaagcttgcattggtaatttttttctcatccatcaagatttagtacttcgagttatccaccatatagccaagccaacgttgagactatgttatttgtcaagttccagataccagtgaggtttacattgacaagtccagcctcacaattctccaaaagggggagaagaccaacatcagttatgcatagagtccaatcagattaatatgctgaagttggagacacaatttgaacaatcatggctaggctagcactaccaaaaccagngcacttttgaatgactaaagattgaaagactcgcaagaaaagtataacacttcatatcatatctttgactccatgtacttacaagggaaaagatttcacttcatttgatgtt

SEQ ID NO: 280664 - DNA, 381 bp, Glycine max
  unsure (1)..(381): unsure at all n locations
gtgcgggttcgggagacataggtcaagcgttcgcgatatgcgatgatgatattccgagtactttggatttggtacgaccatgctctcttgatttccagctgggaaattggcgagtggaggaacgccccggcatttacgcaacaagcataatgtaaacctctacggctctaaaagctctatagttgggcctaggctgtagagttttcattntgttaaggctctgtgtcttttgtctttgaatttataatacaaggatctttcttcatctgttcctggtctctacccattctcattcatttgcatgtntacttctttntctaaaacggcagattcgatgacgagtccnccgaaggtactaatacctgngacccgtctatcaac

SEQ ID NO: 280665 - DNA, 450 bp, Glycine max
agctaggcactttcttgcttgagtgaaaatccatgttctcgcccaaccatggatcaagtgtctaagaagcttatgatagggaaatcacctttagcaaaccagttccctatgaatagacttggacaacttctctaaggactaaactaattcagtattttggttttcttgttttcttatttatacaccttttatcctttatcttttgttgtaagcttgtttgatttgtcattgtaatacaccatgtataagttactagaggtcgagagtagctagattatccggttcatatactatggcgattgggagaatgaattggtacattttcttttctggaaatccttggtgtagtgtgagcatgcatatgtacaagttgttggtttgaataaaagaaaagtaaaaatgattgacttataaattattgccatacaaagtatcccattttgggatgga

SEQ ID NO: 280666 - DNA, 415 bp, Glycine max
  unsure (1)..(415): unsure at all n locations
tgctaatgcgacatgtggagatgcgtaagtagaagctnttctacaaatttgtacgccttgntntaattttattnnttttggcacagaaaccaccttgtaatttaccagtataattattgaatatttgttctttatatgtatattgntgcatgcagtgcattntgcaagcctggaacacttgatcctgaaaaagtaaaagggaaaatagtgcgttgtagtagagatggaaaaataacatccgttgccgagggtcaggaagctctatctaatggcgccgtggcaatgcttttgggcaatcaaaatcaaaatgggagaacccttcttgcagagcctcatgtnttgtctactgtgaccgacagtgaaggcattcaaatcacaacgccacccagatcgcagaacccctacgtaatatatc

SEQ ID NO: 280667 - DNA, 391 bp, Glycine max
  unsure (1)..(391): unsure at all n locations
agctttgtctgatgagtactggctaatggcaatgcatgaagagctaaaccagtttaagagaaatggagtgtgggacttagtttctaaaccacctctataagtcaattaaacaaagggtgtttgaaacaacttgataattcacccatgtacggatacgaaatattgttgaagatgattcaaccgagaataaggaatcaactatgatgaaacatgcgctccaagtgcaaggttagatgctataagaatgctacttgcatttgcatgtattatggatttcaaactttttcagatggatgtaaaaagtgccttcctcaatggacgcgttgaagaagatatgtatgtagatcaaccactanggtttttggactatgaacatcctaaccatgtctac

SEQ ID NO: 280668 - DNA, 514 bp, Glycine max
  unsure (1)..(514): unsure at all n locations
gcgacactactagatactaagctanagtatgcccgagtcattcatccctatgagatgttgttgaagtattgtcaatcataatttccattccttggattacggagttgaaccaagctcaagctnttacaaaaaggttcatcaagtcaagttgaaatatggaagtaaccgtcctgcataattggngcaaaagatgaatcgagtcacatcactgcttcgtctactgccaaacatatataggattgttgatgtccttgttacttccagtttcaccttgacaaagatgtcatggaccatgttgaaaatctaaattgattcaaccccatatcctgcgtaaaaattcgcaatacttcgactgtacatcattcgcatgcagtccatgctttcattggttgcattgctcattgcattctttccttgaaaaataatataaaatgaaataaaatgaactcatcaaagagaaaaggacacgctttacngcgcccttaccgaactcgtactatagctagagtaatgg

SEQ ID NO: 280669 - DNA, 183 bp, Glycine max
agcttcaacctataggtgacgtgaccattccagtgttggagaagatcgacgactatgcctacaagattgactcgcctagtgagtataatgtaagcgccactttcaatgtgtctgatctatctctttatgatgcagatggaggagtcttggatttgaggacaaatccttttcaagaatgaggga

SEQ ID NO: 280670 - DNA, 638 bp, Glycine max
  unsure (1)..(638): unsure at all n locations
caccccgcactctnctatatccgncagaggagatcngagtantgtcgatatagcaanaaaacattanacntannnannnnaccagagtgggtttgaattcatagcantngcgacanncannanannnaaacncaagcgtcnntgagaancntgctcgagaagacagagcggagctacactctccnctctaataactaagctcacttccttgagaagcgtgcttgataagatatctagagaagctagagcacagccacacatacatctctagaagctaagcccccccaggatgcaacatgggaagcagaaacatgcactactcacggatactcggacagtgggcaaatacaaggcgcaaacgatcgataaaccaaatctaatagttaccaagataatcggtctcatacttaacacatgggcttgatagatactctaatgcgcatgagaaccctcacgccctccgttggatgtgacaacacaaatacggaggagccgatcaccccatgcccgcagcgggtatgaatgcatcanaagcgacatgacctgacgcattacatctcacgagagcatccaatgcccgaatccactgtatggaacacaagggccacaaccgacatccgtgcgaatgttatcacacc

SEQ ID NO: 280671 - DNA, 449 bp, Glycine max
  unsure (1)..(449): unsure at all n locations
agcttgncatatcttgntttatcctactaatcattggttagaaaaaggtgcaacagttactaaggaggataagttacaaagtgaactgatcagtcgtgatgctcattgtggaaccattgatcctaagtatgatgtaaaggatggattaatatttagaanacagtaaattgatgattcctgaaaattcagctctgagaaacaagaatttacaagaatttcatgacactataatagggggccatgcttgaagaacaaaaaccatggctagaatttgtagtcaattttattggcctaaactgcaagaagatattaagtcctatatcaaatgttgcagtatctatcaacacgctaaggtggatcaagcagtacctgcatgattgctgcagcattacccattccacaacatatctgagaggacattgctatggacttcatcactantctaccat

SEQ ID NO: 280672 - DNA, 484 bp, Glycine max
  unsure (1)..(484): unsure at all n locations
tactcagcttanacttgcacanaggagttgagcaggtaacanagaatcgtcttcattctcttagaggtgactntgagcgttcgtttatggaggagtccgagtcaatttctgattattgttctcgagtattggccgtagtcaatcaacttaaaagaaatggtgaagatgttgatgaggtgaaagtcatggaaaaaatacttcgaactttaaatccaagttttgacttcattgttaccaacattgaagaaaacaaggatttaaagaccatgactattgagcaactaatgggttccttacaagcatacgaagaataacaaacgagacaaattaaacaataggaggctacggagcaactactacaactcaacgtataggaagcaaactatgcaaattacaagagccaaacaggacgatgtcgctgccaatatcgtggacgtggacgaggacatggatgagaatgaagatgtggttacaacaaccactc

SEQ ID NO: 280673 - DNA, 420 bp, Glycine max
agcttgatagcacgcatatactaacgtcgtcttctgcgcccttcgtcaatcgcggccgacaagcccgttgacacgcggtgatttacgtcatcttccgcgctcacaagatctgtcatactgattcttgagtcacgctgactggcggaaatacccgagtggttatccgtataaacttgttgctatctgtaagacgaaaaacttgatagcacgcagagactaacgtcgtcttctgcgcccttcgtcaatcgcggccgacaagcccgttgacacgcggtgatttacgtcatcttccgcgctcacaagatctgtcatactgacttttgagtcacgctgacgggcagaaatacccgagtggttatacgtatcaactttttgcattctgtaagacgaatagcctgactacacgcagagactaacgtc

SEQ ID NO: 280674 - DNA, 369 bp, Glycine max
  unsure (1)..(369): unsure at all n locations
gttcgtcttacagtatgcanaaagttatacggataaccactcttgtattctcgcccgtcagcgagactcanaagtcagtatgaccgatcttgtgagcgcggaagataacgtaaatctccacgtgtcaacgggcttgtcggccgcgattgacgaagggcgcagaagacgacgttagactctgcgtgctatcaggcttttcgtcttacagacaacaaaatgtttatacggataaccactcgggtattgtcagccgtcagcgtgactcagaagtcagtatgacatatcttgtgagcgcggaagatgacgtatatctctgcgtgtcaacgggcttgtcggtcgcgattgacgaagggcgctgaacactacgtt

SEQ ID NO: 280675 - DNA, 417 bp, Glycine max
agcttccattgctcattttctagcatctcgatatattatgcgccttaataggacctccaagtgaaaatttatgaccatttgaattgctcaagagcttccattgttcaatttcgagcgtctcgatatattatgcacctgaatcgtacctccgagttaaaggttaagaccatctgaatatcttaagagcttccattgttcaatttcgagcgtcttgatatataatacgcctcaatcagacctccgagttaaaagttatgaccatttgaatttctagagagcttctgtgtgtcaatttcgagcgtctcgatatattatgtgcctgaatcggacatccgagtgaatagttatgaccatttgaattgctcaagagcttccgttgttcaatttcagcgtctcgatatattatgcgcctcaatc

SEQ ID NO: 280676 - DNA, 480 bp, Glycine max
  unsure (1)..(480): unsure at all n locations
tacagtatgcccgagtcattcatccctatgagatgttgttgaagtattgtcgatcagaattgccattccttggattatagggttgaaccaagctcatgcttttacaaaaaggttcatcangtcaagttgaaatatggaagtaaccgtcttgcaaaattggggcaaaagatgaatcaagtcacatcactgcttcgtctactgccaaacatatttaggaatattgatgtccttgttacttccagtttcaccttgacaaagatgtcatggaccatgttgaaaatctaaattgattcaaccccatatcctgcataaaaattcgcaatacttcaactgtacatcattcgcatacatccatgctnttcattggttgcattgctcattgcattnctttccttgaaaataaaatanaataaaatataatgaacttaatcattggtatcacaaagaaaaaacatgctntacggcgtcctcaccgaactt

SEQ ID NO: 280677 - DNA, 467 bp, Glycine max
  unsure (1)..(467): unsure at all n locations
agcttcaacattatactcacttccagggtgctggaactacttcacatggacttgatggggcctatgcaagttgaaagccttggaggaaagaggtatgcctatggtgttgtggatgatttctccagatctacctgngtcaactttatcagagaaaaatcagacacctttgaagtattcaaggagttgagtctaagacttcaaagagaaaaagactgtgtcatcaagagaatcangagtgaccatggcagagagtttgaaaacagcaggtctactgaattctgcacatctgaaggcatcactcatgagttctctgcaaccattacaccacaacagaatggcatagttgagaggaaaaacaggactttgcaagaggctgctacggtcatgcttcatgccaaagaacttncctataatctntgcgctgaagccatgaacacagcatgctacaatcacaacagagtcacact

SEQ ID NO: 280678 - DNA, 377 bp, Glycine max
  unsure (1)..(377): unsure at all n locations
nggagaggatgcttcaatggaggaaaagaaagagggagagaatgagagatgagggagaacgaaattgaaggaagaaaaagggagagaagttgaactntgagttgtgtctcacaagactctcattcatcaaagttacaaaaagtgttacacatgcttctatttatagactaggtatcttccttgagaagctttcttaagaaaacttccttgagaagcttctttgagaaaacttccttgagaagctagagcttagctacacacacccatctaaaaactaagctcacctccttgacaaaatacatgataatacaaaaaanagtccctactacaaagactactcanaatgccttgaaatacaaggctaaaaccctatacta

SEQ ID NO: 280679 - DNA, 447 bp, Glycine max
  unsure (1)..(447): unsure at all n locations
agcttgttcttgatttttcctaagttctataacaagcttagaacaataaacttggccttctcttaattgtctttgggcttggcgaccacgatcaacaaagtactttcgacacctactatatgttgacttgaccaacgctgttattggaatgctgcgacaatctctcaacaccttattcacacattctgataggttggttgtcctgtgaccatatcgtcatccagatgtatcgtaagccatgctccatttttcctttgaaatgcgatcaatccatcttgctatggctggactcagttgacgaaatatttctaagttttgatcaaacacatgcttgcaaggagtgtacgttgcatcanatttgttatcatcaaaatntgtacgtagacatcaaactcaaattaaattaatgtataaaataaaccttacccaatttcttgaacatctctt

SEQ ID NO: 280680 - DNA, 414 bp, Glycine max
  unsure (1)..(414): unsure at all n locations
ntaacanagtatccagtntgagtggtttggtcataatatcaaccacttgttcttgtgtcccacaatgcatcatcttgatagctccagtctttgtaagatctcgaacgaaatgaaatcggacatcaatatgtttataacgaccatgctttactggattcttcgaaagcttaatagcagagctactatcacaacaaattacagtagcctggttctgcattttacacaattttcccaacacccttttcaaccatatggcttgacaagcacacgatgctgcacctatgaactctgcctctgtagttgatagactcacaattggttgtttctttgatgaccaagagacagcagctgaacacaataagagaacataacccgaagtactttgtctatcatccaaatctcttgcataatcac

SEQ ID NO: 280681 - DNA, 193 bp, Glycine max
  unsure (1)..(193): unsure at all n locations
cgcttatttatcctttttnttatccacatctacacccangacaaagaattcatctcacataacatggtataatgcgtcctcacaattcactttcagatgtagctaaaattaatctctcacttttatcaaaggattcaagatttttgctccgctgatatccgacttcaatctttaacagaatttactattgatc

SEQ ID NO: 280682 - DNA, 453 bp, Glycine max
  unsure (1)..(453): unsure at all n locations
tcatctatctntccacacacacacattccctcaattatttccttgtatgttgtgacatcaggaagacagccactgctaatcatatgccctataagtttaaaacactcctccattctatcatgttgggcaagagccacaattataattgcataagtcttggcagtgggagaagatatagatgaaccttttgttctcatgaactcaaaaagatctacagcctctggtaccatacctgctttgcagtatgtatcaatggcagtgttgtacgcataattgtcatgcctatgacccagttcaaccatttcttccagtaatgtcatccctctagtcnggtgtctaaccctacaccacccataaacgaatatattatacgtctccgcattaggcttgactggtttactcattatcttatacagaagttcagcatcctcaaccaagcaacacttgcacagt

SEQ ID NO: 280683 - DNA, 412 bp, Glycine max
  unsure (1)..(412): unsure at all n locations
agctntgaatgctctattctatggagttgacaagaatatctgtagactgatcaacatatgcacagtggccaaggatgcatgggagatcctgaaaaccactcatgaaggaacctccaaagtgaagatgtccagattgcaactattggccacaaaattcgaaaatctgaagatgaaggaggaagagtgtattcatgacttccacatgaacattcttgatattgccaatgcttgcactgccttgggagaaagaatgacagatganaagctggtgagaaagatcctcagatctttgcctaagagacttgacatgatagtcactacaatagatgaggcccaagacatttgcaacatgagagtagaatgaactcattggtcccttcaaacctttgagctangactctcggataggact

SEQ ID NO: 280684 - DNA, 428 bp, Glycine max
  unsure (1)..(428): unsure at all n locations
tgctctnagntacattgatgtatatgggaggaggttgtatgccattcttgttntattagtagtgtcccactggtaaaactaactatccanatgttttccttcgcaaaaaatggccccaaggaagcttgcctcaaagaggtccaggaaggacaaggcagccgaaggaactagttccgctccggagtatgacagtcaccgctttaggagcgctgtacaccagcagcgcttcgaggccatcaagggatggtcgtttctccgggagcgacgcgtccagctcatggacgacgaatatactgatttccaagaggaaatatggcaccggcggtgggcatcactggttactcccatggccaagtttgatccagatatagtccttgagttttatgccaatgctttgccaacagacgagggcgtgcgtgacatgagat

SEQ ID NO: 280685 - DNA, 420 bp, Glycine max
  unsure (1)..(420): unsure at all n locations
agcttctacatagaactggcatgcctttaactgcacataagttatccatagtcaaatgttggtttaaagggacaccaattagtgctgctaaagcttcgtcataatactgcccaaaatattgcatctcaagtgaaagataccctctttgtcccttcttataagtatcttttcaagttgtttttgcattaattattttttaacccaaatacctttaattactttacaataaatgttatgcactaaaaagataaatgcatgatctctcttataaggattagataagaagactagtacacattaattaggcgggaaagtaattaagtgaataaagagagcttgagtcccaataattctaaggtagttntggttaaataaaacanattgttaacaaatataatgctactaactatattaactaac

SEQ ID NO: 280686 - DNA, 417 bp, Glycine max
  unsure (1)..(417): unsure at all n locations
acatgcttatggctatgaatctcttatttggttntagaattagaanaacatgacaattaggatttgcttgtgagagtttatgctcgaatttgggctgccccatgtttgatactttacatagaggtagtgtggaaaacaccttgcaatagtgtgtatacataggtaaatataaagagcatgaaattcctagcaaagtgtgaatgattgtcttcctaaatgaatgtatgatagtgtggaatacctttttgaatgcaaatatgtgcaggatgtaattagctttccaatatgcatataaataaatatgagtgaaacagtaaaaatttgtatggtgtacttcacatgtatgtaagtagtttgtgatagcaaatgtttangatataaattacgtgtaaaagttgacgcaacactttgagcatg

SEQ ID NO: 280687 - DNA, 467 bp, Glycine max
  unsure (1)..(467): unsure at all n locations
agcttcaccttctggtcctcctcatagttgttgcatgagaaaacatgctctattttcatctcccactccaagtaggcctccggatcattctttcctttaaatggaggaatgttgagtttaataccatcaattcggttttgtctaggaacaccatcattccctcttctcctcctttcttcttcattatgatctctattctccatttgatccaacctctcatggagcgcatcatctcgttgtttcattaacctctccaaatgttgcatcaaagcttgcatttggaattgcgaaagccccactccatcattaggattagtacctgacatctcanacaaacaaatcaaacgtaacaagacaattatagttgctgtttgaatacctcacccactcaagtgtatcacacaattatggctnttctctaatgaaacacttcttgcttntaccactctaattccncttgagttctt

SEQ ID NO: 280688 - DNA, 406 bp, Glycine max
  unsure (1)..(406): unsure at all n locations
gctctagatgagggttcactgtaatcaagcaagtcggagacctatcatgatcccagattcacctncgctccttatgttcccatgaacccgggtatagggccctttttcactcacagtgtgtgcaaatagtgttggtgtttgtgtgcatcaaatgaataaatatttaccctatgcatacattntaaaatgcactaacagcaacatagagtttatatacataagaacataatgaagggaaaccaacaaagggataagtcatggtaaaacattgcacaagattaaatggcctaactctctaaaaacaatccccagtggagtcgccaactgtcgcaacctacccttcggcgggagggcgacgcgagactcgcgggatgcgtgttccacgaaaggaatacgcgcggagtcg

SEQ ID NO: 280689 - DNA, 519 bp, Glycine max
  unsure (1)..(519): unsure at all n locations
gaactgtnntttgtgacggtcgtcgatacgccaaccagctcggacccgggatcctcagagtcacctgcggcatgcaacctgcactcattgttttggctaattatccattactgggccccgcctgtcttaataaaacattagttctcntccggagaaacaacacataattcggacttgtttacaccgttcattaatatacagatgcacatgcccactgtatacgagtatttttttgttccctgggccttcttatatcgtcaaacagtatactagaagaaagggtgcatctaccatattatataacgnggntatttatatcttgggatctaacggtcgatataagacgcactcacatattgcttcatccgtcccgctttttaaccaggaaacgtggcgactgttcaaaaacggtggcgactattttttccttataccaccatccagagaaatatcgtgaggagaacctcctctctcactaaactattgtcgcacaacaacctaaacgagattttggaaagg

SEQ ID NO: 280690 - DNA, 522 bp, Glycine max
  unsure (1)..(522): unsure at all n locations
nggtagattctttaatatcattgaagaatataatgatgtttatattagattcacatttaccaagttccatgcatacattngtaatatatatctttgtaatgttntatattttctgttggtcccttctaattattntaattgtttcttgattgtcagttgactgaacaaaaattaacacgaaaggaggaaggtatgtcagtggtttgttaaacttatatatatatatatatatatatatatatatatatatatatatatatatatatatatatatatatatatatatatatatatatatatatacatgtacttacgtgcatgtntattgttacatttagagagagatagagaactgatagaaatcatacttgtgttctcattattgatctgatgatcacaacanatgtctatatatagagcagagttcacaatgaggcctatctctgactctaacactcactatctgagtgtgtgagtcactcacagactcacagcatactatctaattaagaagagacagcn

SEQ ID NO: 280691 - DNA, 384 bp, Glycine max
  unsure (1)..(384): unsure at all n locations
agcttgttccattgttgtatcacagtgatagatcatgatcttttcattntgtagaacatccaacccctgatgttgatatggtttccaaaatagaatgtataaggagttttgcttcaatttttctgggtattatattattatttcccccttctggttcagttttatgtcatttaaagtttgggaaaatagtgggtatgaagcatatttatgctagagggtggtgtttggttgtgttatcttttgtatggcttctcctttatattgaacttcagactaagaagtatttgaagcatatgagtgatcttaaatntaacaattttnttcataattattatagccaagtctgcattggttttaattttttctaaactatactaatttact

SEQ ID NO: 280692 - DNA, 481 bp, Glycine max
  unsure (1)..(481): unsure at all n locations
tttgcaagctggaatcatttatcatacctctgatagccaatgggtgagttccgaagaanactggcctcccgtgataaanaatgagaaggaggagttgattcctacttgngtgcagaacagttggagagtctgcatcgactataggaggctgaaccaggttaccaaaaaggaccattntccactgcattcattgatcagatgcttgaacgcctggtaggtaaatctcactactgtttccttgatggttnttctggttatatgcaaatcactattgctcctgaggatcaggagaagaccgcattcacctgccccttcggcacttttgcctataagaggatgcctttcggtctgtgcaatgcccctggtaccttccagcggtgcatgatgtagtagtttagtgatattttagaaaattgcatagaggtgtttatggatgatttcactgtatatgaatnctcttttcatatttgtttggatagtc

SEQ ID NO: 280693 - DNA, 462 bp, Glycine max
  unsure (1)..(462): unsure at all n locations
agcttctaaactttgtacaagaatgaagctctgataccacttgttagacangtggcctcagatatcttaagaaggggggggttgaattaagatattcgaaactttttcccctaattaaaaatctatcttactttntacttaagttatgaattcccttaatgacaatcttcttaaatattaattcaaatgaagcaacttgaatatgaatataaagcaataataaataaaggagattaagggaagagaaaatgcaaactcagttttatactggttcggccacacccttgtgcctacgtccagtccccaagcaacccgcttgagagttccactaacttgtnaattccttttacaagttctaaacacacaaggactaccctatctttgtgtttagagattctttacaacaagagactcacagtctcttaatcccttanagaatgagaagaagaagaggaacaaatc

SEQ ID NO: 280694 - DNA, 497 bp, Glycine max
  unsure (1)..(497): unsure at all n locations
atgagaatcatganactggccaaatacaggctaaaggcccaagtggagaatgacaaagcccccgagtggagaatgatgaaggcccaagtggagaaggatgaangcccagaggcagagacactatcaagactatcaattgttgctaaagggcccaaactaattgaaggcccaagttaaataagttcttagttataatttatttttattgtaattntgacccaaactgtttagaaggcccatgtctatttttatctttttgttcagctacactataagtattggtttttgttntgaataagaaaacttttggcatttgataaagttgggtgagagtttctctctgggttccttgttgaaccaattatcagacttatcaaggtaatccttgtggtgtctacccagacttatcttccttcaccggaagtggcgtctaccctgacttatcttccttcaccggaagtggtgtctaccctgacttatcttccttcaccggaagt

SEQ ID NO: 280695 - DNA, 414 bp, Glycine max
  unsure (1)..(414): unsure at all n locations
agctntagagcttgtatatagtttatctttttacatgcctaactctctgaatggcatttatattaatggttgcatcttagtctctatcttttcatatgtacatcatgcatcatcatgtagaggtaggaagattgttcactgcataaaactctatgttttaatcaattataaggctgattgtaatcgattacacaagtgtttgtagctcgcaaagagattttagttgctgtttaatcaaataccagttaaccataattgattacatagttcagttgagaccatgtctggtttttcatcagtctctactctaatcgattaccaggggatcattatcgattacttcattcttgaaagtggtccagaagtgtcaataacacttaaccgactacatcaagaattaatcattacattgtc

SEQ ID NO: 280696 - DNA, 437 bp, Glycine max
  unsure (1)..(437): unsure at all n locations
gagatgaannaaattatactagatcaaatganattgattattttttataataaacatcaacacatatatctcaagaaagatatattatataacatcttatcagacacaatctctataacttggaagagaattccataaacccatagaaccatcacatatagacctctaanaaaaacaaaaatcaagactaaaaaatttcaagatagatgtanaactaatttttattntcatatgactatttgatacatgtaaattaaaatgtcattatatattaataatcaagacagtaatttaattacaataattagtacattntatggaaataaatattcaaaatgaanacaatatatntacaagtgttcaaatcgattggaatattntttcttttctaccgcctaatcntaattccgaatatttaattgatttgaatatttata

SEQ ID NO: 280697 - DNA, 381 bp, Glycine max
  unsure (1)..(381): unsure at all n locations
tgctgcagcttgtagtttattttctttggcanaaggatcgaagtgggtcagaaaagaggcaaatatgatcatcctgctttgacaaataaaaagcctatggcaaatagagaggatgataaggaggaaggaacccatgttgtgactgtcgtttctacatgtccaaatttcctagcaactcaacagtgtcattactcaaccaatatcagcctttctcattacccaccactcagtcatgcacaaaggtcattcctaaatcagcccaaagcttgcctttcgtgcactcaatgccaaacaccacccttaacacaaaccaaaacaccaaccatggagggaggtttccagtggaaaagtgatgcaatcctaccccgcaagggcattggc

SEQ ID NO: 280698 - DNA, 376 bp, Glycine max
  unsure (1)..(376): unsure at all n locations
gcgcgagaggagacaacatccttgctggacgggctggctgctcgctgagtgcacaaacctttgatntagtctcttctanggttntgcatccgctaagcgagttggctgcctcactaatgtgaatgtataaatacatgattctgatgatgtcaaagaagaatcaaacaaggtggttgcttcaaaggataagcattgcttcaagattaatacaaggttgcttcaacaaacaaagccttgcttcaagattaactcaagatcaagccttgcctcanaacaaagtgtttccaagacatccaaggctctggtaatcaattactangcagcgtaatcgattaccagaagagaattttgaaaaatagctggtaaaaagggtttt

SEQ ID NO: 280699 - DNA, 562 bp, Glycine max
  unsure (1)..(562): unsure at all n locations
ngcccatgtttttttgatgactttcgttctatacggccagcgagagctagctcggcgcgggtcgattctatagagtctacctgcatgcatgcattgcatctatgagtgtatcttctatatgtatcacatagaagttggtgccgatctctattagtgatgacattagagctcattcgtgagaaacactctctgatttcggacatgatgatctatcgactttaagaatgagatacagatgctcactttgtatcaggaacattttcttgctcgagacgtcttatgatgtcttaaagcatgactcaagattcatgggccttgcttacatgattctagatgaagattcatgactcatgatactagagtgcagagaagactcaatcaagatattgctgattaggtcctactttatatagcgtgacacatggatgcttctctactcatcgttgatgacgagtcattactctctggaatcgacactagatagtctaatcgtgtgcagtagctattgctcttactatgtntcgactgaactacaccgtccaattgatttangaagctcttn

SEQ ID NO: 280700 - DNA, 467 bp, Glycine max
  unsure (1)..(467): unsure at all n locations
acgcgacactatgaaactcagcttctcaggaggtgagcttagttattagaggggtgtgtgtagcttagctctagcttctcaaggaagttntgctcanagaagtttctcaaggaagttttctcaagaaagcttctcaaggaagctacctagtctataaatagaagcatgtgtaacacttgttgtaactttgatgaatgagagtcttgtgagacacaactcanagttcaacttctctccctttntcttccttcaatttcgtgctcccccctctctctttctctccctctttcttttcctccattgaagcatcctctccaagcttcttatccaaggctcatcttggtggtgaagctccttcttccatggcttattccttaatggatggcgcctcctctcacctctnttcctttgtcttctgctgcatctccatggtggaaaatcaccattaaaggatcccattgaagctc

SEQ ID NO: 280701 - DNA, 458 bp, Glycine max
  unsure (1)..(458): unsure at all n locations
agctntacaaagcatttatgaagctccaccgcatgagtgataagacctttaatcaagttgaaatcaaacctgagatgatttcacgtcatttacttttctatttcacaagaccactaaagtcttgcctccacattgacaaggtcttgcttnctacgctgtcaaagatttcacgctcaccatgatggcctattcatactaccacaagtaacagagcattgcatanacaaaggcaaacacataagacatacatactgtgcanaatntgtcaatgaaggaaaagcatgtgcattaaagagaaataataattgccaccattacaaggcctatgcagccaacatccaacaatgtagaaaagaaggaaataaagagagtgaagcctaaacttaagcgtcatttgccttgctctcggcaccctgcttctcatctgtaagcctactcttcacaacaacttcttcttt

SEQ ID NO: 280702 - DNA, 408 bp, Glycine max
  unsure (1)..(408): unsure at all n locations
tcttgacttcaagtttcatagattngctnttaactntgtgtggttattccatctaacgacactcaccaatattctagagtagatcaatatatacacacacatacataactactgatatttagtttcttctttgacacaatcttaacgtgaataatactgcaggaggtacaatgctagagatagtcaaaagttgcatacgtaccaaattcactagtcaatttgtggatctagttgctataagtaccctctactccatgggcaagattattaaatgtcaaatgtgtctttgttcttttatctttattctaagttgcgaaaattcattgcatgaggctcccacctacttngggttggngaagatggatgtacacaaccttaccctanataaataggcccaattcttttaat

SEQ ID NO: 280703 - DNA, 398 bp, Glycine max
agcttataatatatttatacgctcgaaattaaacatcggaaactctcggaaaattcaaatagtcataactattcacacggatgtccgattcaggcttataatatatcgatacgctcgaaattaaacatcggaaactctcgcgaaattcaaatggtcataacttttcacacggatatccgattcgggcacataatatgtcgagaagctcgatattgaacaacgaaagttctttagaaattcaaatggtcttaacttttcacacggatgtccgattcaggagaatcacatatcgagacgctcaaattgagcaacagaagctcttgagaaattcaaatggtcataacttttcacacggatgttagattaaggagcatcacatattgatacgctcgaaaatg

SEQ ID NO: 280704 - DNA, 419 bp, Glycine max
  unsure (1)..(419): unsure at all n locations
tctacttatgtggcagggcgggcttccttcactttcttgtctccaacgctagctctgaccactgtccttccttcccgttatgcttcttttcatgtccgcctgagtgggcttatagcctanaccatacttcccacgatttccttgggtttttatcaggctagttatgccgccattgtctttgcctaaacccatcccgggttcataaccgttccccaacataactcgggccatcattaccgccgcatcggacagacaaggttgcccaaagagggagtccacggaggaaatgctgaccacctcanaagactggaaagcggtttctaacgattcttctgcggcttccacataaggcatggaggatgggcagcttaccaagatatcttnctcgcctgacacgatgaccaagtgcccctccacta

SEQ ID NO: 280705 - DNA, 753 bp, Glycine max
  unsure (1)..(753): unsure at all n locations
actcaaagtatgtccactcancatngtcggggtgtantcagcancacntgagtcacnanantactattngtgttctagacgcannnnncntcnnnnnaagagagancggatggattgttgacgatctnttagaagagacccgccacgaataangaaataaatccattaactaacataatagagttaatagtnatattaagaatatgatttgttatttgnnaaatattagggagatagaagattagagcgagagatgaagacttagagaagtaatagtgaatagagtgataaagctaatgttctaatgagtgtatgcacaacgaggtatgatacaggtatagtgagaagaactaatgaatgtgcgtggtgtatcagaatagtggaagcatagtaagtacatgtgtcgatggaatattatatagatggaatataggaagtagcggagtgggaggatggacgagatgatagaagtacgagtaatatgttagaggtggacagtggttgtgacacatagcagatagagtactgtggattgagaatgatatagcgactatatgaggcgatatataatctgagagttatgagtatatagatatgaanagactgaacatgatgaagagaaatgagagataggaggacggctgagagtcaagcgtagtatctgagtatagaagacgaggtgcagggcgtaatatggtgcgtagaatcaactgtcgatgatagagtatattgtcgggagatgataatgcgtag

SEQ ID NO: 280706 - DNA, 401 bp, Glycine max
  unsure (1)..(401): unsure at all n locations
tctcccccaattntctataaataggtggagaagtgaagtagaanagggttcagcctcttatgcacttctctctctttcgaatatgcttaagaaaattgtttccgtgaagaagatccaagtcgaggcgcttccgtaacgtttccataacgtttccgtgagtgatttcgcgaaggttttcgaccgttcttcgacgttcttcattcgttcttcagtcttcaacgggtaagtacctcaaaccaagcttttcaattcattctatgtatccgtggtggtccacacttggtttcatgtattcctattctcgtttcattcactttntatacccccttttgacgtgcttaagccattttatttaagtcatctctcgcttaacctaataataatatagatgtccaccgatc

SEQ ID NO: 280707 - DNA, 396 bp, Glycine max
  unsure (1)..(396): unsure at all n locations
agcttgtgaagtatgttttttggatgagtcgtcttcaatcactgataatagtgaagttgacgctgaacagagggacaatctatgtatagagtgatgatgatgaggggaaaagattangatgccttttctcatgtttttatgtcgtgttttttgcttggaactggattgtcttcatttattgctatagagaccagtagaagagatacgcacataggttttgtgaaatgtgtttatgtctctcctactagaccatgccataatggagaggaagttaactctctttggtcgaatgtgtttcaacacacattttgggaagagataacacgagtaataggttgggtctcacagataaagtatttagcttatcctaatgagatgaattgagctatgtactcc

SEQ ID NO: 280708 - DNA, 393 bp, Glycine max
  unsure (1)..(393): unsure at all n locations
cttaaactactcaatatatntattaaaggtaaagaaaanagatattgaatggcatacacatgttcttgtgaagtaaccactaggcactaaccaacatagatgcaaacaacatcaccactgatatacatatatttctcgctttcttaatatatagtagctagccaacaattgtcaaattatgcaatcaagataaatggattcttgaatcacggaagtgcttgtgcttacacctatcaactccttgtatctcacgagcctctggtaaataaaggtgataaccacctgtanaacacataatctaaaccaatcaaagactttggattgaagcatatatgagcaaacattcagaatgtctgaacaatgacatacaacataaataatattgatatgcat

SEQ ID NO: 280709 - DNA, 450 bp, Glycine max
  unsure (1)..(450): unsure at all n locations
agcttcttacaagcctgtataatgataaacactgcatgaatcattnttgtttaacaccgcataaagtttattacatctatataaaanaagtaaggcctacagagtcatacaacgagatttaattttatttggagcttaagagcccataaagtctcagctaggctttctaaaacctagatggaatgatacattgatactagctgtcaaattgtctaatattaacctgttgctcanaaagtgaagcaactaatctggtagcaaatatgtttttttaaagttcttcacattgctgcagcattgtcaactgagacagacatgatttgcatattaaacttcanacaggcaacactaaccagaagcatgcatagcctcatacatatgtataaagtataatctaatcttgtcaaatctttcagcagcatatctaaaaattcaacaagatatatgaac

SEQ ID NO: 280710 - DNA, 353 bp, Glycine max
  unsure (1)..(353): unsure at all n locations
tgtggcgactgttaaggatagcaatatatttgatacacttccatttagcatactggtttctcattgagtgttgcatccccaccaacaaagatttccttactatcatcgttcgaggtatgtatgtgattctcacacttatgtgcttaagtattataggcaatggttgacatgttactgttctttagtagtacattgtaattcattgagtgagccatagttccccgtttgagattgaatacaacgattaatacagacagtntggatcaattggtgtattcaatcttgaattgtccgtttggacagtttgggaagacaaattgtttttacttcattntgacttataagttaagtat

SEQ ID NO: 280711 - DNA, 470 bp, Glycine max
  unsure (1)..(470): unsure at all n locations
agcttgtgcaagggcatgatgtattgaagaanattgaagaagtgggtgatgaagaaggacttccaagtgtaactgttaaaataattaattgtggtgaacataatgagggtgagaattcctcagccctttatggagaatactaagttctacccttaatatgaaatatgattatatgaataattaggagtgtaagcaggtgcgggtcacctgcgaacctgaattgatccaaaccaacccaaatagtttgggttgggtaattnttttgtttgggtcanacccaaactggaccaatcaaacctgttgagttntgggttgggtcacgggttttaatacttgaaaatgctgactcgctgacttggcccattgacccattaatttgtattanattattattattattattaatatatgtaatatataatatatanttttaaattttaagaaatcaaatactatngactattgattac

SEQ ID NO: 280712 - DNA, 347 bp, Glycine max
ttcgtcttcttgtttagtccagtcttcttctggctttctttcatcagtgggctttccttctgtgtgcagcatcttgggatgtacccagcctttgatgacagctttccaggttctgctatccagggatttgaggaacggcaccattcttgctttccagtattcatagttggttccatccaaaattggaggtctgttcactggtcctccttctttctccatcgtcatcagaatgcatctccctagatctcactctgtgatttcgagtgttggctctgataccaattgaaattctgataccaggggacagatgtcgtaccggatgtcacgacatcacgcttcagaacatg

SEQ ID NO: 280713 - DNA, 401 bp, Glycine max
  unsure (1)..(401): unsure at all n locations
agctntgagcaaatcgaaatgacaataactttatacacggatgtccggttgagtcccgtaagatatcgagacgctcaaaatttagatccgaagctctgagaaaattgaattgacaataactttatacacggatgtccggttgagtcctgtaatatatcgagacgctgcaaaatgaaaacggaagctcgtaggaaattcaaacgacaataactttttacttggatgtccgactgaatcgggtaatatatcgagacgctcaaaattgagactagaagctctgagcaaattgaaatgacaataactntatacacggatgtccggatgagtcccgtaatatatcgagacgctcaaaatntagatccgacgctctgagagaattgaatcgcaataactntatacac

SEQ ID NO: 280714 - DNA, 482 bp, Glycine max
  unsure (1)..(482): unsure at all n locations
tttcgaccatctcgatatattaccagactcatccggacttccgtatataaacttattgtcaattaaattgtctcagagctttggatcaaaattntgagcgtctcgatatattacgggattcattcagacatccgagtaaaaaattattgtcgttagaatttgatacgagcttccgttttcaatttggagcatctctcgctaaattgcgataggctatcgggcatccgaganaaaagttattgtcgtttcatatttctaagagtttccgttttcaatttggagtgtctcaatatattacgggactcaaccggacatccgtgtataaagttattgtcatttcaatttgctcagagcttctagtctcaattntgagcgtctcaatatattatcccgattcaatcggacatgcgagtaanaagttattgtcgtttgaatttcctacgagcttccgttntcaatttggagcgtctcgatatattaca

SEQ ID NO: 280715 - DNA, 404 bp, Glycine max
  unsure (1)..(404): unsure at all n locations
agcttggaaggtattcataccacacaaaatatatatatgtatgtttaggtagaaagataccttagatatgcatgtatgtaaacaaaaacacacttcacaaaatatatatatatgtatgtttaggtagcaagataccttagatatgcatgtatgtagcaaaaagatacctcacaaaatatatatatatatgtatggtagcaagataccttggatatgcatgtatgtagcaaaaagatacctcacaaaatatatatatgtatgtttaggtagcaagataccttggatatgcatgtatatagcaaaaatacctcacaaaaatatacacatgtttaggtagcanaatacctcatgaaaaaaaaaaaaaaccaacaagattaagaaataaacaaatgataatgataaaa

SEQ ID NO: 280716 - DNA, 395 bp, Glycine max
  unsure (1)..(395): unsure at all n locations
tatcatttcagcaaatattgtgaataatgttctagtagagtatttgtctgctattnttgtcactaattagctaagctctgtatgactaaatccaaaccaagtgacttgcatccatattgtcctaaggtagataggacatttcataggttgagtagaaataatacgagtgttatagctctgctagaaagtgtaatgcatagtcatttcatctctgattgtgtttgtgagcctagttatagttntagtgcttctgagtcagaaattagtgctgatacaattgcagataacaaccaaactcttaatgaattggctacgcttaatgttgtgtattaaccatggngtattcaatatcttgaggcagaggttagttatgagctaaagtctagactaatcca

SEQ ID NO: 280717 - DNA, 440 bp, Glycine max
  unsure (1)..(440): unsure at all n locations
agcttggaatatattatntgaattctagtcccccttatagactctgtgaagatgtttgctagttggtcattagaactatcaaattntgtaatgagttctttggaaaaaaccttttcctgaatgaaatgacaagtaaatttaatatgcatagttcatccatgaaacatcatattggtggctatatgaagagctttgcttgattgtcacaacataatttcacctattggatgtctctaaacttcaattcttgaaggagatatttaatccaaacgtgtgcacaagtagctgtacacatatccttatactctacttctgcacggtgcagtaacattttgctttttactcttncaagagacaatattccctccaataggtacacaataccccanaatacagcatttgtcaataggcgagcttgcccaacctatatcacaatatcc

SEQ ID NO: 280718 - DNA, 325 bp, Glycine max
taagacagccagtaaccaatagaaaagatcaagcctgtcctggttaatgtcgttgttgtgaagccagccagcagctgaagaagaagaagttgaagtgatcttattgaccaaagaaaccaaaagtgtgctcaagtaaaagccaaatgagtaagagcaatatgtgatggctgtaaagaatgcttgcatccctttcaaggactgtttataaaagaactcaaggaggccaatggctgtgaacatctctgacaagccaaatatcaagtattgtggggttatccaaaagatggacaaaactttgtgatggttcacagctgcgtcccttctc

SEQ ID NO: 280719 - DNA, 397 bp, Glycine max
  unsure (1)..(397): unsure at all n locations
agcttggcctcatactttcttataatangctgccatacagtccagcttttagcacttacccctactggaattccaagataagagaaaggaaatttcagttgactaccattgagaaattgagttgcatccctgcaccaaccctctgatttgcccaggcagccaaaatggcttntagaataatttatcttaagaccaaaaaccttctcaaaacaccttaggatacactttaagactctaacattatcctgagtggcacaaataactaaagcacagtgaatttgggtaattctctgttgcccttgtggcttgttgggcatggtctatangtttagtatttacctacctacaagaccttgatagaaaaactttntagaacattgaaaacttagtcagatga

SEQ ID NO: 280720 - DNA, 243 bp, Glycine max
tcctatgaatgtagataagcattttgtctctactctctaaccattactgtcactacattctgggggttcttaatcttgatcgactactctatgtgacaccaatactgaacttgtgaaatcactgaatcttttggactgactcacttattcttttgctaattcatcataagtctcttccaaaagtgaaagatttagtaaggggtaacaattatatactcacgtaattattatgcaatataatat

SEQ ID NO: 280721 - DNA, 466 bp, Glycine max
  unsure (1)..(466): unsure at all n locations
tgaagatattctcattgaacggcaagagagtctggtgtgggggaagtatctgctgctcatactatacacgactgaattgaaagggtgataactgtgccagtgtatccgaggacataataanatgatcagacaccgtgctatccaacacaagagatgtatatgacaaacgtaccgcatatactccagcgctgaacacttgcccacgacaagtgacacacactgataatgagtgggtgcatccttcatattatccattatcattaactcttggttgcaccagtctaacatgatgcactactggacacgatacacagctcaaactcaatacatacctcactcatctgcggtacgaagagacacctccctttcacaccaccatctaggccgttctaaacaatcaaccgcaccgcacgatccgatcactccagacacctctacgacaacggagctcttaccacatcgctcg

SEQ ID NO: 280722 - DNA, 429 bp, Glycine max
  unsure (1)..(429): unsure at all n locations
tattctgtgtaattgcttaattttcagaagttaattaataattaataatattntctcattagatcaacaatccaatttcacaactcattgtagaaaaataaggcctcgatattggcanatgtaggcccaaatttcagctgttatggacctagcctgttcatcagacttataacttgcatatctttatgcaatcatttttgcttgatgcaccccagattctgtaaagtctccatcttatcgaatcttcttgccacagccaataatccttgtccttgcacctctgcctaccanagtttgtgaataatgacaacatatcactaatgtttattaatatctaattgttgctaacataaatattggctaaatataatagaatctcttctcttaatcatactcttttatctataagatcanatatgacatcttact

SEQ ID NO: 280723 - DNA, 470 bp, Glycine max
  unsure (1)..(470): unsure at all n locations
agctntaaggaagggtaaaatggtcatttcatgaaggtttctaaccataaanttgcccagactagcatttggctcgcttgagctaaaaagaaaacttcagccataagcaaaccactcgcctgggcaagctgattccttcagacctaagtaaacaagctcgcctgggtgagttccccctgcactagatggctttttctataaatagccatgtaggagaagagaaaaaatatataccagcaacatgaaagtatagaaaaacatagaagaagaagaagaagaagaagaagaagaggataaatagagtcgaggcgctgcagagatgtgactgtggatcactctcttcgttatttctcctgggagtcttgtgttatgcacaatggtcgattatttnttctaaaggataggatgtaatctttgtacccttacgtatctcttttgatattatatatggacttaatctttctactcat

SEQ ID NO: 280724 - DNA, 453 bp, Glycine max
  unsure (1)..(453): unsure at all n locations
ctaagcttattagttgtgcatttaatattattgtctcttatggaagaacggtatgcatttcttgcattgcatacttgcttgattgttgtataactattgacattgtgttccttcaacgttagcagaatatttcttggtttcaccattgactttgtcatatcagcaataataattnttttatccttagtcaattgaccagcgtataaatgtccaactaatgacttggccaattcatgattgtgactctcacacattcacttcaccatccatccttcgcctccaaccactggtttcccacatagcttatagggacacccatattttctactatcagtaactgttcttacaaaatctttcttcctggtcctatactgactactcctttcacaaccaattaagacatatggcactccttctctcataccaggtattgtggttgacctcataatcact

SEQ ID NO: 280725 - DNA, 460 bp, Glycine max
  unsure (1)..(460): unsure at all n locations
agcttgtatgattatggtgtacccatcacatgtggtactaggtggtggtcgggcgatggtgcacaacatgttttccacatccacaatgcgcgcataaacccaccatcccctgttgcccacctccaactgagctcacgtactcccacgtagcccatatcctcgtttctctcaataccgggtccccatcaatcctcccattcttccacaacatccaagcaaaacaacattcanacagcacaagctatcacagccaagcaaaacagagcaaaggcagaaaactctgccaaaacaccaaccanatcacnagctttctcacttaaagaccncagtaacaattccttcgttcggttcattaaccgttggatcaactcgaaaatttactggaagtcttagtacataagcccacattntgaaccgtgggatctactagcaaacatccagaactcactctacattactc

SEQ ID NO: 280726 - DNA, 426 bp, Glycine max
  unsure (1)..(426): unsure at all n locations
tctacttatgtggcagggcgggcttccttcactttcttgtctccaatgcgagctctgaccactgttcttccttcccgcgatgctccttttcatgtccgcctgagtgggcttatagcctataccatacttcccacgatttccttgggttattatcaggctagttatgccgccattgtctttgcctagacccatcccgggttcataaccgttccccaacataactcgggccatcattaccgccgcatcggacagacaaggttgcccaaagagggagtccacggaggaaatgctgaccacctcanaagactgganagcggtttctaacgattcttccgcggcttcacgtaaggcatggaggatgggtagcttaccaagatatcttcctcgcctgacacgatgaccaagtgcccctccactacgaatttc

SEQ ID NO: 280727 - DNA, 401 bp, Glycine max
  unsure (1)..(401): unsure at all n locations
agcttctgacagtatgtcaaagaaggaaattcttcagattgtcggcgagtagtgaaggcaatttaaatctgacttgaccaggaaataggcacttgcagtcgacaaggacggtgtggatgacactgtctgtgagaaatacagcattagcaaggagaaatgggcccaattntgtcagaaccgcaaagacccctcgtaggaggtatgtactttgtcattntagttgttttctacacaaaaataacttcttataattcattntagtaatcattntctttattgttcgattnttgtaggatgtgcggaanaaggcacaggccatccagaagcaaaacactgccccccacgtgttgtctcgtgggggttatgaatatttagaacaaaagctaatggctgagaagata

SEQ ID NO: 280728 - DNA, 453 bp, Glycine max
  unsure (1)..(453): unsure at all n locations
ntgagaggacaagttctgaaccttggagctataannatttgtgatatacttttatgcttctcaacaatagaattttatgctagtgtattaaccatatactagcaaaaattgaaaacttgtagttgcagttttaagcctatgacatgatttttctaatgtagtctnttgtttgaacagtttgagttgaatctattattaagggatttgggctacgtatacnagtatttatatcaaatattttagttgaaatgcaaggganaaaggccaattttcagcatttgtagttcatagaagaaatttgtgtttaaactctacagatggttcattgatatccaaatcatgtattgagttctcatggcttattcaagtgttaaaataattntatggcttctttctttaatggatgttctagagtatctggtcaagtttaattgttcatttctgatcactgat

SEQ ID NO: 280729 - DNA, 314 bp, Glycine max
  unsure (1)..(314): unsure at all n locations
agcttctntgagagttctttcttgagaagctagagcttagctacgcacacccctctcataactaagctcacctcctagagaagattccttaagaagctagagcttagctacacatacctctctaatagctaagctcaactccttgagatgagaagctagagcttagctacacaccccctataatagctaagctcaccctcatgaagaaatacatgaaaaaacataaatgtccctactactaagactactcaaaatgcctcgaaatacaaggcctaaacgaaggataaacctattctaatatttacaaagataag

SEQ ID NO: 280730 - DNA, 393 bp, Glycine max
attgtgtatttaagagtctggagtcaatctagacactcaatcctatgccataattcataatatgtaagatcgatatgatgatagtcattggcacaaatattgacttctgtgactgctaactagcttgcaatggacgatattcgttatatagtaatgaactctccattcagtaacacaaatttgtgtaattagttcgctcaaatctattatcttgtgtgtgcaactataaatcttataattctatttgacatccttacatttggcattatgtaacaaaagatgcaagaaaaagttactaaacgttatatagagatggcattggatgttatatatagcttgtctgcacacgccaaatcttatttgattactctgtccgagatacaggtgtatata

SEQ ID NO: 280731 - DNA, 318 bp, Glycine max
  unsure (1)..(318): unsure at all n locations
agcttggatttactttgttgattatctttaagtcctttcaaagcactggtgaatacaaacatagatacttattgtacaattaanattttgatgtacctacgtaatgctaatgcaaattgtttgaaaaacaacactaacatgttaattatgcctttgaggtaattgtctaacctattatgcaacgaacaaaaccaaatgacaacattttccttaagcaaaatggcgaccatatttctatgtgcactgcattggagaccaacataggttattatactattatacattaattaaattcattttgtcagcttaacttaccca

SEQ ID NO: 280732 - DNA, 344 bp, Glycine max
  unsure (1)..(344): unsure at all n locations
ggctntagataatacattattattgatctaaagtatatccgggcatgtattactattatttatactgttaaanaaagtacaactcatactcgtggtgtgaataacagaggctcctcctacaaacactttgttagtggaccccactatctggaaacttaaagaaaggttgaagattgcacgacacttcactttcttataatctgttaaagctgtctgctnttccacatcatccacacacaacacaaccaacatcaacatgctttagattttgaattccaaatttgaatgtatagtgtaggcgcccacatacaaacggccacatacataaaacaaagtaaaatata

SEQ ID NO: 280733 - DNA, 463 bp, Glycine max
  unsure (1)..(463): unsure at all n locations
gcctcattctgtttatctattaaaggtcttgaacgaagctcatgtagcatcgaacatctacgtacaaagctangtgcgcgactcgtcaataacgatcacccgtcaactgactatcatngcctntagcagaagaagacatgctcgacgaagggagagggcataacagggcttaccatgtgccagccacacgcatggaccacgtcgtggccaatgtatctctcgctcacggcaccaagtaaaacgtgatgcaccaaagcacgttggagacagatccgtttaacgctccccaacaaacgccaacgaccatggtggacacggcactccacggaacgccgctagaggtgatgagacagaatgcctncctgtgcaaacaggcaccctactcgacaggatacgtccaagaatggatgtcacccagatacactgccatcggacccgcggcactccccgtcgcgactacccc

SEQ ID NO: 280734 - DNA, 249 bp, Glycine max
  unsure (1)..(249): unsure at all n locations
ctcttgaggatcaatcctcatcctcgtgaatttgaaataggtangcaatgtctcaccctcctctaaaactattggagtctctaagaacgtattcatgctatcaacatcaatcttgattaaatgtcctcttaccctcacttgcttaaggctctggtcttccgggctatataagttagcataaaactccttcaccatagctacatctatgcttccatcttggagattggcgagacgtttgtgtaagttatt

SEQ ID NO: 280735 - DNA, 455 bp, Glycine max
ttatactatgttcttcgattattacactgtatttcgcattaatgccatctataactactcactgcgcacgtgacatatatataataaacaaaacatcacgttgtgcaaaatcaatatacatctaagacattcgattttgctagccaaacacaagcgcatatatgattcatcagtgtgcatctcatttaacaagtatttgaatatgtcaccactatattcgatatctgctaccataattaactatgaaatgccacatataacataatccaatcactataaacaaatgcctgtctataataccccgtatttactatcccataagatcaacatacgaaacactctaatatatctgcggctcccacattattggcgcactgtgaccctcattcacacaacacgtacgttcttacttcttctcctacaaacaccaccactatcacgctaacacgactccg

SEQ ID NO: 280736 - DNA, 212 bp, Glycine max
attacatgcatctttagagtcgatgttcctattctatcttgttgaacaagacaccagtgtgtactgtcttgtcaaagcttgtcaagctgtctctctcctatttcgatatatatatgtcatttgaatgacatataagctctgcaagtgagtgaaaagtttctcctctcacatattcaaatgcttaagtctttttacatgcactatccattata

SEQ ID NO: 280737 - DNA, 193 bp, Glycine max
  unsure (1)..(193): unsure at all n locations
agcttagcccatctgctatctattgaattcataacatagcattntttccccttaaaatgcacagatttcatcattaaatccaatggaaatgttctagagatagcgttaaccataaaataagatttattttcaaaaatcactacaaaataaccattaaatggggaactatacaagctttggaaaatgatttatg

SEQ ID NO: 280738 - DNA, 371 bp, Glycine max
  unsure (1)..(371): unsure at all n locations
tctatagaaggttcgttcctaatttctctacaatggcatcacctctcattgagctagtgaagaagaatgtggcatttacctgcggtgaaaaacaagagcaagcatctgctttgctcanagaaaagcttactaaggcacctgttctagctcttcctgacttttctaaaacttttgagctagaatgtgatgcctctggagtgggagttggagctgttttgttgcaaggtgggcaccctattgcttattttagtgaacaacttcatggtgccacccttaactaccccacctatgataaagagctctatgccttaataagagcactccgaactcgcgaacattaccttgtttccaaggaattagccattcatagt

SEQ ID NO: 280739 - DNA, 572 bp, Glycine max
  unsure (1)..(572): unsure at all n locations
ccaacgcgctccntcnctaccgcaagcccngactaccaacgcatgtgttgaaattnnntaccttaggaacgtgctgtctacctactataacgccattccactcgtcccgagacctctcagtcgactgcagcatgcagcttgtttactttttttttttcataggcatacacttggggagcctttctttcttctttaacactgcttactaccgatgtaaggaacttcttcgaaagatgatccacccgtgatcacgtcatcagaaaatgtaccttccagaatcagcatcgacgaatcccttgcttcattgcggaaatagatctcttaatcgcttaggagtattcttctctcttaccttaatgcaaaagcgcatcataactcaacaacggaagaattaattctagacttgaaagagaaatgactacacaccacgcttgcatcgcaaacgatgaactaaacgacattatcaccttaccttccactgtaataagccacccaccttaccagctgtgaaccgtaatatatgtgtgcaactgaaccaacaatgactactgggtaagaacacacgcatatcc

SEQ ID NO: 280740 - DNA, 653 bp, Glycine max
  unsure (1)..(653): unsure at all n locations
cctacctcactantaccattactcacaccccctcnntggccnatcnctcatcgaattcttgntcanctatcgaattctacacnananaanngaaacnnnnnnaagagagcancttgatttcgatggcattcgcatatangcgacactatacaatactcatactcgacacaacaaggtctaacatactcattctcacactaagctgtgtttattggtttagaattcgtcttgtgcatcgttatatgcagacactctattatgtaggcagcataatgcttggccttaactcacactctctcttattgctatatctgtagaactacactctgggatccctgatcattaaatncttatctatgagcctatggcccatcatcgtacagatgctacatccttcttggccctctattattcgtatataacatagttgcgggtgtatcaattttctaggtttattagaacgttatatcgctagctctcttcgataatagaaagataatatgattctctggagctgcctctctgatgcgtaagatccatactcaatgtcgcacactataaaggatgttctggacgttataacccatcgtctcgaagatattaattaacactcaattgcgatctctccacctcgttgctcatgctatcatccg

SEQ ID NO: 280741 - DNA, 437 bp, Glycine max
agcttaagaattattttctatcaactacttgtttccgagggaaattctataaataaacctcccatctttaatggagtgggtaccactactggaaaacccgcatgcaaatctttatagaggcaatagatttaaatatttgggaagccatagaacaaggaccttatgttccctctataatggccggaagtgcaacaatatgaaaacctatagcagattggactgaggaagaaagaagattagtacaatataatttacaggccaataatattattacatctgccctatgaatagatgaatactttagggtttctaattgtaaaagtgctaaagatatgtgggatacactacaagtaacacatgaatgcacaacagatgttaacagatctatgataaacactctaactcgcgaatatgaactctttacgatgaaataaatg

SEQ ID NO: 280742 - DNA, 385 bp, Glycine max
  unsure (1)..(385): unsure at all n locations
acttctttactctcctcgcgaattgtagcctctttcccattcactctttatagctntgagagccaagttatcccttgcgttctatactacaaccatttgtgatagctgccaatgacgccattgctacttcccctaagctccttatcttttctttacactctatttcatgctctctggattctctaaagtatcttcacattagctctattgaaacctcgcacaatgaaaggcgcaatgatttcctccgacggtgcacctctcattgagtaacctaactgtcttatggccagcacatgtatataattaatacaagccctcatgcctatcaaagggatattggggaatccttacatgagcataacactactgtcttctcttctttcac

SEQ ID NO: 280743 - DNA, 308 bp, Glycine max
agctatgtaagtatattatttctaatgcatttgaaaggaattatataaagatttaaccaatataattaatattctaatgttaatacaatattttattttagataaacaaaaataatgtatgatattaacattcgaaagcatacacaatattcagaccaaaatacaatcaacttattaaaggagaatttcatggatgattcaatctaataaactatgtgaactaaaaattattaatgtgttctgtatgtaataattaatctatatataatataattaaattatatgatatgggttgagttgagtctagt

SEQ ID NO: 280744 - DNA, 367 bp, Glycine max
atcacccccattctcaattatagagctgcaattgaagtcttagttctagagtcacacgctggaaagtgagaaattgaatccattccacaaggcatataccagttgtctgctgttatttctccggaggaaaaagagaacattgtaatcttataacatacttatagcgcttggtacttacggatgttaattaagactgaatgatcatttcatgatacatacaatacctaccacgatattaataatgatacagctcttcaatttcatagataacataaactcattgaaacaaaatatacgatacataactgactatacaacaatatgactacccttctgccgatattggcacaccttcttactttgtctt

SEQ ID NO: 280745 - DNA, 158 bp, Glycine max
acaggaagatgacatgccttgccaaagacaacccgatatggtgacatccctatgggtgccttatgggcagtcctatgcgcgcatagagcatcatctagcctggcgctccaatcctttctgttaggctacactatcttctgcaggacccttttatctcc

SEQ ID NO: 280746 - DNA, 299 bp, Glycine max
tgaccaatcccgacccaacccgtgcatagtcagtcagtgagaacctgtgatgtacctaaacaggcgagctcctggcagtcaacagataaaaggaacaaagaccacaaagcaaggaggcttgtgtggtggctggccagctgtgaactttgtgtgatatattgattatggcctctggtaatcgattaccaagggtgggtaatcgattacaaggcttaaaaatgaagacaggaggctaagatggtctctggtaatcgattaccaagaggtgtaatcgattaccaggcttgaaaacgagatca

SEQ ID NO: 280747 - DNA, 434 bp, Glycine max
  unsure (1)..(434): unsure at all n locations
ngctctataaattctttctcacttgatacactccatggatgaacagcagggacttttgccgaataaagagtggtggaatttgcaggaggattatgcttgtagatcattgtatcaagaacggggtcaaaattctgaggagaatctatggagacacagaacataggaattgcaaccttctgatggatttctacgtcgcccacaaggttaacaagctcaacaaaatcactgataaggcgctgaggaacatagaacacctcagaactgcatattatgagggttttatcggtgtcgcttgtttctttgtaactgactcgaaagtgcgctggcatcgtgctaacaaccttctgtaccattcttgcttgttgtgaaacccatctgagtcctcaccatttgtaatatagaagaccgagactcngatacctgaatcccagtaa

SEQ ID NO: 280748 - DNA, 310 bp, Glycine max
  unsure (1)..(310): unsure at all n locations
cgtcagagcnatgatanaattagtggcaatgtgacagataagagccatttatagtgtgaattgagtgttgagaggtcngattntgaataggtggagattctaccttaatattagcttgagcaagtctaattcaatgttatatacttgatgaagatgagagtttaccccacaattacccaattttcattgtcactgtttaaaccttgaaaattcactatatttggcgggttatggatacctataattcgctctaccttgttttggagtttgattatggcttgaacatgatttatacacggtttaggacctg

SEQ ID NO: 280749 - DNA, 448 bp, Glycine max
  unsure (1)..(448): unsure at all n locations
agcttcttttggactctgaacaagcaatgaactcctctttcagaaccatgctatgtgctcgcgactggtccctttcttcccttcgcaacttgagttcactattgctaccccatagagctccgcgaaatttgttccggccatactcttccttgcgagccctcttggtctcttgttcaagggctcttgcggtaattgcattctcttcccgtaacccggcacactccttccgaacgtgtgtagcagccaacttgaacttctccttggcgagttttgcctttcctaactcgctcttgagagctnggacttcttcgtcctcttccggtgcttcataattctcttcgctgacgacttttaacttggcgagccaatctaaacctcgtatgcgaactttcagccattcgtggtacccaccaatgatgccattacgaatgcctctaagctcttgatc

SEQ ID NO: 280750 - DNA, 450 bp, Glycine max
  unsure (1)..(450): unsure at all n locations
ctgagacgcatgtgaaactctggcatcatcaatacattcatctttattctttgtccacaatctccncctatttgatgatgacaatccctgaaatcaagacaagctatatacaagatgatagcacgttcacacaacccttactctccctatcttttggcatgtatgcataactgtacttaatgataaatttctaatagataattgatttctaacccaagttctcctctcaagttctctctccctctggcaacatcacaaagaactaacgcacatatatctatatccaaacagagccaacaataaaccacaataaactcatacattgtcataaccaaccaaatcacagccaagaattataacataagtgcatgactacgataactaacgcctaagaagccaaatacacggcgataaaccaaagtactactaatacttaattactaataatac

SEQ ID NO: 280751 - DNA, 511 bp, Glycine max
  unsure (1)..(511): unsure at all n locations
ccctccgcctcgacgtcaacctattcaacaaatcacacgtggaacgaactcatnagggntcncnaagcggggctggtgtgactccatgacaaacnaaangacgcagacccatgatcaacgaagctaacagcataataaataccatttatatactcgaaccgtccacgaggagcggatgagctaggaacgacaacgcgctcggtaagcaggaacattacctcacgcatgtgcccaccaataggctggaagacacggagaagagaagaaacagggacaacgcggacagccatgcgcgaaagcaccactaggaagcaaccaaaaaaatgcgcgaagcacgcgtggaaaaaccacgcgatgagtggcgaggaccatagcaaaacggagtattaacagggagacgaccaaacaagactaacggaaaaccagcgcgaaacgggagcgaacgacgcgaacagccgggaaacgaaccgagcaacacccaggcaatacacgggaacaatcgggcgggacc

SEQ ID NO: 280752 - DNA, 450 bp, Glycine max
  unsure (1)..(450): unsure at all n locations
agcttctttttagacctcgatcggtcatctntcctggccgacgccgactgttantttttcgatcaatatcggtgaataatattgttttgccgaggtgggctaatgttctcctggctgaataaatgagaacatgccattttcggccgaaacgaaacatcggttgagctcgcacgataaaacctagccgacctacattgtaagttgtttatgcaacaccgaaacaagaaaacttcccctgccgtaagaaaaataattatgggccagccagcgtttttttaaaataaataattgcgcagtgtcggctgaaaaatatcagtccgggccatttcacgaccgatgtcggctattgagtcttctattcaatccctgaatgataatgcatgatgtcgattangaaatggttgatcggcgtcatccggtgatgcttcttttttagacctcgatcggtca

SEQ ID NO: 280753 - DNA, 474 bp, Glycine max
  unsure (1)..(474): unsure at all n locations
agcttgcttgcggatctttatggaggatggatctttgagcttcaatgtggtccttcaatggtgatttttcaccatggagatgcagcggaaggcaaaggagaataggagaggggaggcaccatccactatggaataagccaaggaagaaggagcttcaccaccaagaattgccttggataagaagcttgaagaggatgctntaatggaggaaaagatagagagaaggggggagcacgaaattgaaggaataaaagagggagagaagtggaactttgaagtgtgtctcataagactctcattcatcanagttacaacaagtgttacacatgcttctatttatagactangtagctttcttgagaagctttcttgagagaacttccttgagaagcttctntgagaanacttccttgagaagctagagcttagctacacacacncctctcataactaagctcacctccttgagaagca

SEQ ID NO: 280754 - DNA, 408 bp, Glycine max
  unsure (1)..(408): unsure at all n locations
cagatttagtaatgacccactaacctagaataaaataacttattgccattaacctanggaattaanacaaactaaatggctgagtgtaactganattgttggcaaccaaaagtcaccctcaacagccaacaagtcagccaccatttggtctcccaaaaggctgatgcctaggttgccaattgggcccttattacaacttgaactaaagcccttttagttgattaacccaaaacatattattggtcagccaactttacaaggattgggccattatttagacaaactaaacactctagacatgaaataaagtggtgtcatttagtcctccatttgcgccatgatacaactcacaaccttggacttttctccttgaaacttgtgcttgtattcaaatagtatggacagcac

SEQ ID NO: 280755 - DNA, 331 bp, Glycine max
  unsure (1)..(331): unsure at all n locations
agcttgcttctacaggttccctgttcccaattatggtatcaaaagctggtaacaaacaataaactaccctcacctatctatatctctctcttagctccttgcagagttgttctaagatatcttaggttcacgtccgttcattcaaacgcagaactctatatagaagcaaaaactttgatgttntggtgatgccaaaggatcatgcgcttcttaagtttaattcgaaggatcatgcgcttctcaagtttaattcaagaggatcatgcgcttctcaaggttaattcaagacaagaatccaagaaattccagatatatgatcaagataatctct

SEQ ID NO: 280756 - DNA, 626 bp, Glycine max
  unsure (1)..(626): unsure at all n locations
ctctctacactctcctgtccanctttcagantaccacatatcgttctcactacattgtctcannnncancaacaaannntacagtggaattganttcattgccctgcgacacgcacactactcactctgacctacacacgtngataatggaatcctgagtgcctggatgacatcgattcatcgtctgttgggtcttatatgaaatggtggcacagatgatgatgcgctacgaatgattgaataataactattttgcacagaatgtaatgcatgaatatactgccagtcagacagaacacactctgttgataattgttagccggacaccccaatcttctgaacacacggtgtttgcacccttcttggacgagcacacatagcagataagccatcgccctctttactgccaatgagcaaagaccaccctgcatatgataacccaccctagacccaaacacaatatatcaatccttgatcggaaccctcaaacatcacaatttnaaccttcgacctgtatgcacagagttaccaagtgcatactttacccctcagatgtacacaattttcttcggacgaacaaccaagttcgcatgcattatgctcaacctttgacaagcatgaatccc

SEQ ID NO: 280757 - DNA, 473 bp, Glycine max
  unsure (1)..(473): unsure at all n locations
agctntgagctntgagcacttacgagtgtttcagcaccctagtaccaagagtgtatgtaaagtttcttcgagccacacttccaagagcagtgtanggggttctgtatgttcgagcgaggggtttccggcagtattgaaaacaatgtgggacaatgtgggtgtcgagggagcggtttctggcagatttcacgcgggaggagaaagagaacagcgactgcaatgttttcgagcgcacgggttgtgaaatgccaatgttntaacttataaacataacaacatcnggtttttaaggataaccgatgttaactaaatataagttaacatcggtttggaaatcatataggttatatcggttncttaaanatcgatattaagatcaattccttaacatcggttctcaacatncgatttgagagaaccgatgtttactctatcaagttaacatcggttctgccaaaaccgatgtatcatat

SEQ ID NO: 280758 - DNA, 337 bp, Glycine max
  unsure (1)..(337): unsure at all n locations
gaaagcacaccccaaggtatagatgcantaatttttcaagagtgtgagacagactcatgactatggatctggccttttcctcagcagcagacacaacttctaatttagactttgctctcaaaatcttggaatctccattttgaactattgagtctagtttcccttccttctccttcaacctatctgtctcaacagtgacatgcttcaactaatttatgatgacatccaaagaggccataaactagaaaccttcttctctaaccaaagctaattctttcctagctggcctcaattcttctgttatagttnggaacactatagagtcttctgattcctc

SEQ ID NO: 280759 - DNA, 374 bp, Glycine max
  unsure (1)..(374): unsure at all n locations
agctcgaggattgtgtaccttccacattggatggttatcgttctcaatgacttagtctctacgcatttcgtccttggaggttgtgtaccctatgcgttggatcattcccaatccatagcttatcccttccgattcgtgccttgagtcgaaccttgcctcatgatatctatgtctaatctaattatctctagagggctaaacgcaccataaaatcgtgatatacacaattaatcacacctcgacaatcttgagatatgggagaatattntgaaatgtcataatgcattgactcatgaatataagagaggatacgcatagtcaatgatgataaatagacatctctctgacctaagaagacatgctgagcaatacaa

SEQ ID NO: 280760 - DNA, 475 bp, Glycine max
  unsure (1)..(475): unsure at all n locations
tactaagcttgaacagatgatttgagacagcatgtacaanaacaacaggagataagtgtattttacatgaaagatcaccatgttcttccataccagaggcgcaaggaggagcaagaagtgtgagccatgtangtgtgtgttggtttagatgatggaaatagagaagatggaaataaaagagaattnttttaattaaaatagagtgtaaacagtatgggtcccacaaaaaaggtacaaagtttcacctcaatattatttatctccacctacccgtagtgatggtagtgtaacagagcaggaggtggagtaacaattgactggatatataaattgcacaaattaacttatggcaaagtttgtcanagaattcatttcttatggtaagtagatataaacaaacattataatcagatntcatataatttcaatgtttcaagagtattngttagttgggtgaagttgaaaaaatgaactg

SEQ ID NO: 280761 - DNA, 456 bp, Glycine max
  unsure (1)..(456): unsure at all n locations
agcttgtaaagctcattcacagaagcagctgcaacctgcgctagcaccatcaacatggcaggcttcaactcttgcactcctttccatgtgtatttcatctttattgcctagctgctgtaatatactggtttgaatttgaataaggaanaagagaaatataaggatatatagaacatgcatatcattgccaaaagccaacacagcaatgcatatatataggaaattaataatactcgatcagattatttctaggttaaaaaagcttgcatttcgttttagtntactatatataaactaaggacaaaacttatagtgacgcatctcaagagaattaatttgtcttattcttcaataaaaagtagagtnttatggcgatttacatattttctcgttgagttatatggngatctaaatatattctcgtcgagtaatgtaataagttatatcattattatt

SEQ ID NO: 280762 - DNA, 658 bp, Glycine max
  unsure (1)..(658): unsure at all n locations
cgctcgcgcgcantcccncaacgtanncngactggtnaacttgtagtgtacggtctcttacctacgctctanacgnanantnancaanacagcgtgggtttgatttgatagcacttcataagcgcactataaaaactccagcttgactaccgagttgatccaactgtcagctaagcatccacctttttctagtccacacaaggccaaataatgtcgatatcatccagctgttagccacaacactaaagatcgcattacccttaacgataaaatagaaaagtcgatccaacaagggtacttgcagacgtttgtcacagacctatcacgtgataggaagtgagatagaagccaagaatgtatgaagagtcgcgaaacaatagaaacacttttgtcacgataagaatcccccacccgaaactcgacttccagcgataataaatgcactaaacaaatgctgtgcgaggggaggacagtgacactcgacacacacaggctatatctgtagctttatgtccggcgacacatcgcctacacgaaacgaatgtcacaacgagcatatcgcctatctcctgtaccgacgacgtatctgacgcgaatcaacgaggcctcaatgatctaacgtgaaccacgactaaggtcgtaactctaatcatgcacg

SEQ ID NO: 280763 - DNA, 423 bp, Glycine max
  unsure (1)..(423): unsure at all n locations
tnttttatcngtaatgcacgcacaagacgcacaagtgaggggggatgagtatattcctacaacaatgtaatctatccatgacccacaggcacaaagaggtggttgagcattctntcgtgacaatataatagacgataagtgaagtgtgcacaactatttacattaacaagaatctatggggataatagtatacgccttacatcgaacgaaaacgtgaacctcctgattgtggacaagcccaacaaagcggatcttactccgcctctaggagatctctgagttatagcttagccagttatggagactcattaccatcatagtagaatcgtagtaactaatttgcactacatactatagttttacttctcaaatcgagttaacccattgaatctaaattgggcaataaatttctccatattttcc

SEQ ID NO: 280764 - DNA, 392 bp, Glycine max
acccgtatatgtggactaggtggcgatcgggtgatggtgcaagtcgactctccacatccacagatcacacataaatccaccatccgcagttgcccaccttcaactgagctcatgtactcccacgtagctcttatcatcgttcctctcaacaccgggtccccatcaatgcctccaagcttgcacaacatccaggcaattcaacatccaaacatcatgaactatccgaaaccaagataacagggcagaggcagagtactctggccaaaacacataccaataccacagctttccttactcagataccctagtaacattctctgtgatccaattcgttcaccgctggagtggactcacaatattactgggggtccctagtacataagtctacattt

SEQ ID NO: 280765 - DNA, 469 bp, Glycine max
  unsure (1)..(469): unsure at all n locations
aggtagtcttacctcacanaatatatatatatatatatatatatatatatatatatatatatatatatacatatatatatatatatatatatatatatatatgtttaggtagaaagataccttggatatgcatgtgtgtagcacaaaaaatttcacaaaatatatatatgtatgtgtaggtagcaagataccttggatatgcatgtatatagcacagatatctcacaaaacatatatacgtatgtttaggtagcaagatacctgtgacacacatgtatatagcacaatacctcacanaaatatacgtatgtgtaggtagaaaaatacctcatgagaaaagagagagcgagcgagacacgattatgatcaaaataataatagagagacaaattatactacgatatcaaaaatattagcggttgtctagctagaacacaacatgcttgtgaagagagatgactttcagctg

SEQ ID NO: 280766 - DNA, 376 bp, Glycine max
  unsure (1)..(376): unsure at all n locations
actctcatctcaaacaagtctataacattaatttaaacttgctcaaactgggtntncnaggaaaactccaccgattcaaaatttgacccctcaacacccaattgnncntagaaatggctcttgttttcacctctgtcactcatntttttctcatttgctctgcccaagctntcctacnngngctaattgacattgtaaactaggatcaactcactttagactgcgngnacggtaaacccaaatctagtttctctaaccctcacaatctcacactgttctacctacaacattgtcatcctcacatttaacccctaagttaactttccccgtcatgcataccagttgtctatcaacaatttcagcacacacacatcac

SEQ ID NO: 280767 - DNA, 413 bp, Glycine max
  unsure (1)..(413): unsure at all n locations
agcttgccacccagctctctcaggcgagctaggttgcttcctccagaaggcaccgccttttgggaaacttcctggaaggtccaagtgggcctggttgctatttgcaccctcctgtttactaaatacacccctttccttntttttgctgattcttttttcgtaacgttatggaaccttacgaattacgtaacgatactttgtttctttccgtaatgtcacgaaaccttacggattatgcaatcatcccttctttggcttccggaatgttatggaactttacggattgcgcattaacacttccttttgacttccgagatgtcatggaacttcacagattgtgcaagaatgcttcctattgacttcangcatgtcacggaacttcacgaattgcctaacgatgggtgccaagtacc

SEQ ID NO: 280768 - DNA, 181 bp, Glycine max
tcatacaattaatatagaacctatatcctaatatcacatcctatcagagtcgtgtgttcccgtgtcttctaacatgaggttcttcatagtcatccacctattcatctgctcccccgaacacaagttcaagatcatcacaggatccatacacaacaacacacatggagtgagttatcacatt

SEQ ID NO: 280769 - DNA, 441 bp, Glycine max
  unsure (1)..(441): unsure at all n locations
ctcccctagtttgctatanatagggggaagaagtgaagaataatagggtttcatccccagaagtacctttctctctttcttcaaatagctcgggaaaattacattcatggagaaaaattcagccgaggcgctctcgtaacggttcccgagagaatacaccaataatcttgaccccgtttcaagagataatggtccgctttcgtttctttcggctctaaagggggaaagcctctaaccaaacgtttaaattaatttatgtgcacgcggggggcacacattgggtccgtggnttatactcgggttacatcaatttatacccccctttgcgcgcgttgacccctttttatancgtattcgcgctatatataaaaaaaataactccccacgggcgtgggagttgatcaaccataatggggagaaaagattcccgcgttgtgagcg

SEQ ID NO: 280770 - DNA, 423 bp, Glycine max
  unsure (1)..(423): unsure at all n locations
agctgtgtaatgaagtatacaggctatgtttatttagtggcattgtttataactcgtccaagagttcttcctctttaattacctgttatatattcttttgattctatattttcaagcatggaattaaattgtatatacaggatcaatttgacactatgcgtaaaactttaacacttgcatcacttaataatttacacgaaattaactaattccaccattgattaagtttaaacaattccatacaaaacaaaaactaattgatacttaatcaatatgctntattttgatagataatatattatgtcttttatgtgaaataagtaaaatatttagttagatgaaatttcaggaatatgtttaatttatgtgatatttgatatacatgatagagaaagtaaatattatattaattcgcttaatctt

SEQ ID NO: 280771 - DNA, 402 bp, Glycine max
  unsure (1)..(402): unsure at all n locations
agcttgtctcagcgtttatgcaagacagagaccaacatgttagccatcatcagcaattaccaagaagaattaaatctagccatgacccacaagcacaaagtggcggacgactatgcccgagtgtacacggaaaaggaggctaggggaagggtgatcgactcgttacatcaagaggcatcaatgtggataaacctatttgctcttactttgaatgagagccaagaacttccccgattgctggccaaggccaaagcaatggcggacacctactccgcccncgaggagatccacagacttctcagctattgtcagcatatgatagacttaatgacccatataattaggaaccgctaggaagtttgtattgtcactcagatcttgactagttataactntctgaat

SEQ ID NO: 280772 - DNA, 510 bp, Glycine max
  unsure (1)..(510): unsure at all n locations
ngcggactataccttcgaccaaacacggtcgtgtttctgtctcggcccggatttaaggcgggctgcagcaccggctccgcttccctaaccgtactggaggcggttgccgtggccttatcctctatagttntctggagttttaacatgacctccgagatggaagccatttgatcttttaaagccaatagatcggccttcatctgttcctgcacaccctcttcatcatccattnttctggatcgagtgttataggggtgccttggtgttttcttagttatgatgaaattcctaaagagataaacaatggggagtatgccaccaaaacatgaatatgcaaatgaatgattggaacacttggatccaccctaagggttntttagataacatgatgagttcagaacttctcattntatagaaagaacanagctntcatctagccaagattatacaaaggtgttataagagaacctaacggnttctaattatgtgggccatcaaatctatcatgtg

SEQ ID NO: 280773 - DNA, 382 bp, Glycine max
  unsure (1)..(382): unsure at all n locations
agcttgccatccatctctcccaggcgagctatgttgctttctccagaaggcaccgccttctggagaacttcctggaaggcccaagtgggcctggttgctatttgcacccccctttttactaaatacacctgttgcctttnttgctgattctttttccctaacgttacgaaactttatgaatttcgtaacgatacttgntttctttctgtaatgttacgaaaccttacggatcacgtaatcatccctctttttggctttcgggatgttatggaactatacagattgggctctatacacttcttttgacttctggcatgtctctggaacttcacgggtcgtgcacaatgctattttaaacttcctgatgtcacggaactcatga

SEQ ID NO: 280774 - DNA, 422 bp, Glycine max
  unsure (1)..(422): unsure at all n locations
ggttacaactagtattctttgtcataccaagtcactaatagctctaatacaaataaaaagattcatttgtttgtttacacattgaccaactntcaatcgtcttataaacagatatacaatcccaacacgtagtcttttctctcaagatattcaaagtgttttcaagctattcaaaactttataagcatttatagacaacttatttacaaaaagaaattgaatttgagcgtttcaattggttcttcatgtcttcaaagcttttggtatttatagaccttcttcaacaaatgtttgttgtctctaaataacaagatttcttttctttatcttgcggctgaagaatatggccattggagcatttaatgtttgcattanatacacatacttcttcatactagaactcgactcttcttggatatcat

SEQ ID NO: 280775 - DNA, 456 bp, Glycine max
  unsure (1)..(456): unsure at all n locations
agcttaattctgagaattctttgaaaaataagcattctagagtcttttatatgcaactagttggtaacccgtgcatacgcacgggtcacttgtaatttattntgtatgaatatttatttattctataatacagtattaaaatgaaaaatagtacgaaaataaaaaaatatgtaacattaataataattagattgtttgcataaacaaaaaaaaagcaagattactcattgaccaaggtaatgttaataaacaaaacaaacaacataaacttaatttagtcactatcactggtcgtccaatccttttgacttctaataataatttcccaaatttgttcatgacgcttgtagtagaatgagatttcatcaccataagaaaaattactttctttaaggaatntatatcaaggttgcacaacatanntttttccaattttaatatcaagaacgataacat

SEQ ID NO: 280776 - DNA, 440 bp, Glycine max
  unsure (1)..(440): unsure at all n locations
gcttaatgcaagaaaacatactcatgactaggaacccaaagtttggttntaggattagaaaagcatgagaatagggacttgtttgtaagaatttgggctgccccatgattggcactntgcgcctaagtaacgtgggagatgcttttcaatggtgtgtagatatgtgtgtgtcataccctaatttcgtccggggaccttngcttgatgacatgcgacctttctttggtccttgtgaggtgcttggcatccatcattgggcaatttgtgaaattccaggacatgccgaataaccaaaaaaaatatattgatgcacaatccgtaagtttccgtgacacaccggatatcaaatggaagcatcattgcataattaagtgaggttccgtaacattctgtaagtcataaggcggatgattatgtaatccgcaaggtttcgtaacatt

SEQ ID NO: 280777 - DNA, 277 bp, Glycine max
agcttgggaggattgtttagttttccggtgttgagagaaatgacgatatgggctacttgggagtacgtgagctcagttggaggcgggcaacatgggatggtgggtttatgcgcgatttgtggatgtggaaaacttggtgtgcaccatcgcccgaccgccacctattaccacatgtgatgggtaccccataatcctacaagctagatatgaggaagtgtacaatggtgaaaacttcttcttttattcgttgaccacagagtggtacctggagatatgt

SEQ ID NO: 280778 - DNA, 344 bp, Glycine max
aatggcttctcaacctgtgtgtggagaatgtcatcgtcgagtctaactgcatttaggtatccaacagcatacattaaggggccaatgatctctttgaatttggctgcaccatatggatatgctgctggaacctcttgctctttagatctgacatcaaagtcaacttcattcgtcgtggtgcaaactcggtggctcacggattagtatgatcttttggacactctgctgatcctcgttcttcttatctgttcatgctcgattctttatcaatatcccgtgactaaataaatgagtatatatatatatataaatcacacttttaattcgacaagaagaatattcta

SEQ ID NO: 280779 - DNA, 103 bp, Glycine max
  unsure (1)..(103): unsure at all n locations
agctntaatcttttgatcctactatgtgactaatcattgatcttggacttagtcaaacttaaagttcatctctcgtttgtaatagtgtattatgttgggatga

SEQ ID NO: 280780 - DNA, 432 bp, Glycine max
  unsure (1)..(432): unsure at all n locations
gatattcaagatggatgatcaagatagtctgtatagtcttagaaagggtatattaaataggaagggaattccaattgaagtagcaaaaggtttggccaagaaaattaagttaaaaagtcttttacaagaaatttactctctggtaatcgattaccagaggatgtaatcgattaccagtggccaaaactgatttacaacagctattaaaatttgaattcaaaatttgccctgtgtaatcgattacacatatatggtaatcgattaccagcagtttctgaaccgtttaattcaaattntacagcttgtaatcgattacacatatactgtaatcgattaccagatcagattntcagaaaatattctcaatagtcacatctttgtatgtggttcttgaatggctatcanaggcctatatatatgtgacttgagaca

SEQ ID NO: 280781 - DNA, 465 bp, Glycine max
  unsure (1)..(465): unsure at all n locations
agcttaacaaacttagaaatcatgtggtcataaattccgaaatatagggggagtaaacgcacattntatctatatacaattgtttgttgcttgcttgaatcttgatttcaggtattgtattgtcatcatcaaaaagggggagattgtagatgcaaatgcctttggtgttttgatgatgatcatgatgatatgatgcaattgatgcaaatgggcttttcaagattaaattcaagacaatgcttcaagattacaagtcacaacatcaagatgatcactagtaaattaggaagggaattcctaattgaattagcaaaaggtttggccaagtaattntaattaanaagtgtttttcataggttntactctctggtaatcgattaccagaggatgtaatcgattaccagtgtgcaaatattatttataacagctactganatttgaattcgaaaatttagactgtgtaat

SEQ ID NO: 280782 - DNA, 305 bp, Glycine max
  unsure (1)..(305): unsure at all n locations
aatctcttccacacncaagtttggaccaattagtaaaagggtgacaaaagagttaactacaattccaattcttcattaccagtcaaacaaactattgttttcttcgatagaccaaaatcattntatatgttggatacaactgttggtcacaaaagctgattctctccacaagatgaacaacaataaggaaaacatactatctcaccaacccactaggagagaaccaatcattgtcaatcaagttgctagggatgcatcatgctctatttaccttccactatagacatatatacatgcatgctaat

SEQ ID NO: 280783 - DNA, 353 bp, Glycine max
  unsure (1)..(353): unsure at all n locations
agcttaagctgttatgtgtttacttatgaatgatataaataattgaatataatgtctaacatgcgatatgagccttttgggctttgagcaaaggctgagccaccttaccttgtgctaaaatttatcttgttttattgtgaataatggagatataatgtgtcaaattctctgtcctgaacacttggtcaagagtctctaataccatgtcagcaaccttcgctattgaaaagtcaagttgttagttaaaactcatgaatggctcgagctgaattaattatatatgatatttattatattcttanaaattataattaaacctaattgtataattatagtttaatatacttaaatta

SEQ ID NO: 280784 - DNA, 505 bp, Glycine max
  unsure (1)..(505): unsure at all n locations
taatactattgtggcatgaactctgatatttgattctgtgtctcttgactgtcatttanatctgaggcattagactcctctctcataccattattcatcannaccatttgattcttgtacaatgttatctgtttggcaagtgtaccaaatgtccaagtaataaagtctcggaagcccgagtgtcgaattccattggaattntgtgttgtacttatcttggatacttttcaatttataagtggaaaataataaaagagaggggtagaagagagaataggaacaataataggaaattataagtaatggaaagcaaatgaattanaagcagagtaatcaaaaagggaattcaatggaatgtaagtgttangacctaacatgccctatntgcctaggatgtatgattntatgaattttctttaccaattcaagtgaatttatcctacccacatctattcatttacttgtccctgatgcctcacgatgaacangcctatttatntatcta

SEQ ID NO: 280785 - DNA, 454 bp, Glycine max
  unsure (1)..(454): unsure at all n locations
agcttgcttctacaatctccccattntgatgatgtcaacttctgaaatcaagaaacacacacacacacacacacacacacacactttttcctagtcgatcacacacttctacaatctccccattntgatgatgtcaagaaacgcattcatacaacattcatggaaaaatataaaccaaatcatgaagcaagaaccatgaatataaaaaccacatagtcaaataacataattaatatttgttcaaacatatcatgcaaataaagaaatagtaaattgttcaaatgtcataataatatagattatntggataagtcactaacatctatcagtcctaattctcttctaatggtgtaaaaggtatctttacttagtggttntttaaaatgtctgcaagttgaattttagtatctacaaattctaaaacaacatcaccttntagaacatgatgtctaat

SEQ ID NO: 280786 - DNA, 422 bp, Glycine max
  unsure (1)..(422): unsure at all n locations
ngagctcactggtgctgccnctacanagccnctcggaacttgtttcggtctcatgcttcctttcangccctctntgtttcctgttccaatgcttcggctgtggccacattgacgtctctcaactcattgcattctttntggaccttgatggccattgtcttgaacctttccttgactgcttgtgcctattcaagtttggcattcaaggcttgcacctcttcactctccttaagggtttcagcctcttcctcacttgaaacctttagctttgggagccaatctaactcttgcatccgagccttcagccacttgtgatagccaccgacgatctcattgctgcttcccctaagctcattatcctttctttgcaccatgctccatgcctttcgaaccctttgaaatatccttgcattgngatcact

SEQ ID NO: 280787 - DNA, 457 bp, Glycine max
  unsure (1)..(457): unsure at all n locations
agctnttaactgtatttgcagcgttccaattgttntttaaatggtgtaatcgattacaatatattggtaatcgattactagagtatctaaatgttgaaattcaaattcaattgtgaagagtcacatcttttcataaaatgctttgtgtaatcgattacatggttttggtaatcgattaccagtgacaagttttgaataaaaatcaaaagatgtaactcttccaatggttttctcaagattttctcaaggttataactcttccaatgttttcttgaccagacatgaagagtctataaaagcaagaccttgacttgcattntaagtacttgatataacttttcatatatacttttacaacctttgaatctctntgaaccatcatttgaacttcttcttcttcttcttcctttgtcanaagctntctgagttntctgatttccaaaccttgttatttcac

SEQ ID NO: 280788 - DNA, 440 bp, Glycine max
  unsure (1)..(440): unsure at all n locations
acattgaaacagttaaatctattaggattcctgaaactcgntatgaccaaacacggngaggtaaaggtacataaggatacaatgttgtcacaatgactcaacaggaggtctcacaagcacattttatatattaaacaacacaacatgatattttccgtacatagaaacccacagacaagttcttagagttacacacccaaaaatgaacatgatgagggtgttgcaagagcacaataaaactttcattaaatnggttagagaaacaatattagcttatgacaatgcttcgaaaactttaagattgttagttgttgcgccaaatctcaatgtctctacttggaagggatatgatatcaacaattattccttctacacanaatcacaagatgataaaattgtcgtgcggaacagcgtggtcagtggtcatgcttaattttatc

SEQ ID NO: 280789 - DNA, 454 bp, Glycine max
gcttgtgcttgacttgcctgtgtgggagttttacatatatgagaaaggggcaacgcgttatggttgaaaataagaatttgggtcttaaaaaaaatataaatttattaaatctggagtacagttaaacaagttaaagttttaaaaaataggtgaggtggaccaatcgggaagaatgtattagcggaatctaatgatatttactcctattatattctttcttttggcttgactctgctaattattaagtttcttttaaagatgtcaccggattgtttgatgggagagaagagaaaggtgtaaaactcacaaaaatttgaaaatttcttcatcttttcttcctatttgatctcaaccaaagactctgatctaaaccagatcaaggccacctgatccacacatcctctagataagggaaaaacgaaagagaagagaaaatgagaaatgcatgtgaatg

SEQ ID NO: 280790 - DNA, 489 bp, Glycine max
tagtaacgtgaataagaaaataataagtggatgccaacatattaattgttcatttgaaatcttcatcacaattcactgacagacctcaactaataggaatatataaatatgaataatctctttattattaattaataggccatagacaagcgcctaactggccttgccttaacaagcctggtgtcttttacagtaaatatataactcctattttatacaacaacaaggttttaaactacccaaacttttcagaatataaatacatgtatataaagaaaactacccagactttgcaagatataaacacatgtatataaagaacactacccacgagcaaaactaataatataatcacaacttatgtattggatgggtcacacacgaaccataacataacgtacacaagcacacatgcaccaggctattcttacaaataatactacacctcttcgttcggcggcctgcattctataattggcatctcatgat

SEQ ID NO: 280791 - DNA, 440 bp, Glycine max
  unsure (1)..(440): unsure at all n locations
acgctttaagtggaagaatattctccgtattcctacgtgatattggcttcatcgtgagatgtttcaataaactcatagttttgtctgctactcttctcaatcaaatgaaatagttaagtttgttcgcttaaaaaaaactcatacttttgtcttattattaattttcgtattagaagttgatataaaagtatgttggaaaataaaataaaatatttaaatttgcaatgatagatagtttttaacgatcaaattataattatatttaattaattatttggtctttataattctataatttatacattctagtttctatagttcgaaattaatctttctaagttttataatttatatcttaattctctggttagttttatagtctaaaattgatttatctagttcttggaattcatattctaattctnttttagctcttatga

SEQ ID NO: 280792 - DNA, 372 bp, Glycine max
  unsure (1)..(372): unsure at all n locations
attgcgaaagccccactccatcattaggattagtacctgacatctcaaacaaacaaatcaaacgtaacaagacaattatagttgttgtttgaatacctcacccactcaagtgtatcacacaattatggctnttctctaatgaaacactcttgccttttaccactctaattccccttgagttcttaggcaattcaagagattatggccacaacaaagaacaattcaccaatatgtgtaaggtaaggctagagagacaaggaaaaggttaaccaagaaaaaggctaacaatgtttttaggcacaaatgaaggaaataaaattcagaatttaggaattcaagtaacaatccttcatgcaaccaatatattacctt

SEQ ID NO: 280793 - DNA, 463 bp, Glycine max
  unsure (1)..(463): unsure at all n locations
agcttgcttatgtctttacctattcctaagcatgtatggcaacacatcaccatggacttcattgaaggtcttcctttctcttttggtaaacaagtcatttatatagtagtagataggcttagtaaggcaactcatttcatggccttatcacatccttatactgttgcggatgtggcccaatgcttccttgataatgtctttaaattgcatgggtttcctgacaccattaccagtgatagggatcctgtttttgttagtcacttttggaaggaatntatgtcctttcaagggattcaggtatagctttctatagcttatcacccacaaactgatggtcaatcagaagtggtgaataggtgccttgaaacatatctcaggtgcatgtgtagtgactcttcaacacagtggtcccaaatggtgcctcttgcggaatggtggacaattccacttaccacacattatt

SEQ ID NO: 280794 - DNA, 507 bp, Glycine max
  unsure (1)..(507): unsure at all n locations
gtagctntagttngttccatgttgttgcttcccttatctctaacatattgttccaacagatcttggtcgagttaaaggtgatcctggtgcctcatctctaacacaatcaaatcctaagattgngtccaataatggaaatgaaatgacaaaggataaatataagccatatttgaaacacattgtgaatgggtctagttctaccaatggtatagttgttgttaacgtangcccacctaaggttaggaaaacggttgtaactaactctaaaggaaaccttccatagcctcaacaaggcatacacccctaatcaggagttaattctaaaaatattatttagataaggtcaaataaagtctttggtaagactaattacatggagattgaanaggtgtttgtcccaacctctaatanggaacttcttgcccatatgatcgcctctaaggagaaatgattcggtcccaagatatgagggttcgacttatctacaccccacgtttctcatggata

SEQ ID NO: 280795 - DNA, 460 bp, Glycine max
  unsure (1)..(460): unsure at all n locations
agcttcgatcttgctatagagcaatcagcagaaaaccagacaagcttcatccatctctaagcccaaagaaaaggaaaaaggggactgggaaccatgctcaaagcaatacaaggggcanaggtagagagagaataaaaatctaacgtgccccggtgccagaatgcttcttgctatgtgaaggtatgggggagggtcattatacgcagccttagccttgcatatgcaaagagactgtttccggattctaacccatgaccaaccagtcactaaggtgcaactttaccattatgccagggctcttcctcaaaggtagagggagaataatcagaagaaaatcactcaagtttactccacctctaagccaaaagaacagaggaggaanaaataaaccatgctcanagaagtgcangtggcaacggaagattataaaaggaaacatattttagacagtaagtagata

SEQ ID NO: 280796 - DNA, 390 bp, Glycine max
  unsure (1)..(390): unsure at all n locations
ntccctctntgaacanatacccctcagccaaatagcattcatcttgtgcctttntcccacaactctcgtaaatgggagaaaaatgttcatctaaagcatacaagtccctaatattatcaattcctaaaatttaagctcctagggagcaaaacaatgtgtgtctcctagagagggcatcagctaccacatttgtttttccctttntgtatttgataacatatggaaatttctctaggtactctacccattntgcatgcctcttgtttaacttgctttgccctctaatgtacttaagtgattgatgatcactatgaatgacaaattccttggaaacaaggtaatattcccaagtttggagggctcttattaaggcataaagctctttatcat

SEQ ID NO: 280797 - DNA, 617 bp, Glycine max
  unsure (1)..(617): unsure at all n locations
tcaccacacaacntncacttcgctnantatactctcatcgncgntngntgantgtgcgacgcataggacatataacgtccccacgctgagcaactggttgtgtcgacgctacgaacggcgaacngngctcggacgcggcgatcggtatagatgactgcaggctgccagcctggaattactcttatttatatcctctccatgctcaacaataccccctccatagtgagcaacaccatcaccatcataccgtcaattagcactattctcggggaaggtagtcctataaatcgttgagcaggcaagaatggggacaggggctgatcgcagaagaaccgggtaatcactggaggaactaccaccgctgctacaggtagaaantgggatcattctgctaaaccaggcctaatgaaggataatacaacttcgccgaaggtgacaatacgntccctatgcttgggcgatacgggacatcccgacacagctgatgggtagacataggggcgctaccaatcaaaagaattgaggctacaacacgcacgccgatgagacgacgagcagcatgtctgtgactccttacattcatcattgctacggcttaattccgcatcggacaggcc

SEQ ID NO: 280798 - DNA, 463 bp, Glycine max
  unsure (1)..(463): unsure at all n locations
tttcgcacaagcacgatcaatatcgaggtgatgggaggtttcaaaagtggagcagcatatgctacaccaagagatgacagtgcatcccctcttaatacgatgttcatcattaggcattcaggtatgaataatcctccacgtgagaaaggactaagaacggggaagggcagcactccgaatcttggaaccccgtgaagcattatatcgaatgagagcacattatattcatttacaacgagtggtaggatcaacctgatccaaactcagattccagatttcaaaactaagccaagattntcaagctntagaaggctattctcagctcaaggcttcaccatacatatataggctgggctatattcaactcaatangcctttcaaatatgctcgatacttgattgaagcatcatttgaagatgcaactaataattttatacaaagtagaatttatataaacatgtta

SEQ ID NO: 280799 - DNA, 463 bp, Glycine max
  unsure (1)..(463): unsure at all n locations
agctntgcagcccaatcctttctttaagtaggtacggtgttttctagtatcctcttgatctccctagtctaaactccaacttttccatttgtttacggatgataaggtgatgctactttgtgtcaaacatcatagtgttgaaagacctttgagaattgagcaatacaaaagtgtgtaccttcatcactaatcaagagtctaggcaatcaaaacctaacaaaaatgtttctctttaagatattaatcatcatctttacatcattggttggactagaaatttcttccacccactttaagacatagtccactactaccaagatatatctgttgccacgtgaggatggtaaggggaccaaaaaatcaattccctaacaatcaaacacttctacctcctgcatgttctgtaatggcatttcatgtcgtctagatatgttgccgattcgttgaccaatattgcatgatc

SEQ ID NO: 280800 - DNA, 472 bp, Glycine max
  unsure (1)..(472): unsure at all n locations
gcgacactatgatactcagctctccccatttcttataataggaggagaagtgaagaggaatttcgttcaaccctcttggtaattcagaatcacttanaactagagaaaaaaattggtttcgtgaagaacatccaagccgaggttcttctgtaacgtttccgtgggtgatttcacgaagactctcaaccgttcttcgacgttcttcattcgttcttcgtcattcttcggtcttgaactggtaagttccctanatcgaactnttcaattcattntatgtacccttagtggtcctcatttgttttcacgtgcttttatttacgtttcatttacttttcgtacccccttttgacgtgctttagtcatttgcttaagttattttctcgcctaatcaagaaataaaatanatgtcaacctatcatttgaattgtaatacccgttagtttctgtaaaataaaatccaaccgttcggtcg

SEQ ID NO: 280801 - DNA, 419 bp, Glycine max
  unsure (1)..(419): unsure at all n locations
agctntagctntagttatacattatggtaattaggggtatgcaaaaattaattcagtaaaaaaacagaactagattcatttcaaattgttttaacggttagattttatatccaagtaatcaaattgattcaaaatcgaattagttttaaaaaacaaaactggtttagagataaactagattatgtattggaggtgattccagtatttgtggcaaagcagggagaaacatgtccttccaatacattattagtgattatgttgctcataatatgttgcgctagctaaatttgagggatatataacaacctttgcttcaaccattntgaacaagccacggaaacgatgtccaagtccttggagagtttanagttgaacgttgagtgagtctgcaaccattgctagctnttaataatgcacag

SEQ ID NO: 280802 - DNA, 491 bp, Glycine max
  unsure (1)..(491): unsure at all n locations
tcctctgaggcaactccggtataaactggataaaccctntcttcaacacacctaatggaaccgtgcacaatgccatatcaccctcaaacacctgactccctgcagtcacctgcactccatcgccactatacctaatcatatgcacagtcttctcatacaaaatcggcacattctctgacaaagcctgaaccagcttcccatttcccccaggcaaaaagcaatggtctccccccatatcatatggatcatcctggtcccaaaacgcaagcgaaagatttgacaacaaccccgcattcgcatactccaaatttgcgagatgccaattaaacaaattcatttcctcatcactcactgcgtccttataaacctgactgaatgtctncagcgcagccncgagcgacacantccaccgaaacctccncatcagctgcctcagcctactcgccttatcaagcaaccgattaaacgcagactccaccttcacatccata

SEQ ID NO: 280803 - DNA, 473 bp, Glycine max
  unsure (1)..(473): unsure at all n locations
agcttgtcataccgctccacccagtgaaacttcagttgactggccccataaaatgacaacgctactagcgaagtcatcacagttattgtgctgtaaatgcaatgtgtgaagcttggttagtaatgaatatctaaacaatttttatttgcaaacttaattggcatctaaaccagagtagcatcaacccagattaagaaactcagggcctttaagattgtgaatcttttagtgcagaacagcattcaaaattcaaatacaagacagaaataaggattcctatatgttccatcaaccaacctgaatttcaaaanagtagtcaagggatctagctgaattgttaaccatctttgtttagcttggatggcatctcanaattcaagtagtttgtggtaccaaagagaggtttgtcagacagacatgatgtcttattagaagtcttagcataagttgtcatgaaaaaggtatacatgatg

SEQ ID NO: 280804 - DNA, 487 bp, Glycine max
  unsure (1)..(487): unsure at all n locations
atcacaagtaacatgattaatgcattgtgacgtctcctacgtacataaaacgctgtanactatagcgtcttggtcttggatgtgatgtgatattgcgtgctcattgcttcttaactttcttttcgagttataaatagaagttagtaaattgaattgggtgtatccatatcaaatcctctctatttttgttcttctgtttaaaaggatgaatatctataataacaatctttgctggttctactcccatactntatcttcctttnttctcttccttattcttccttctctttctacaaccaacctgactgcactgttttgctatttntcanaaactcactaacactcctttcanactagaaacttgganaaatggcaccgattggtgtaagtggcatggngtcgcgtgcaacaccatctcaggtcatgtgattggtcttgatgtngacatttctccacaatcttttggtgatatttcctctataatctc

SEQ ID NO: 280805 - DNA, 426 bp, Glycine max
agcttctacattcaatttcgagcttttcgatatattacgggactcaatcggacatccgagtaaaaagttattgtagtttgaatttgctcagggcttcggtattccatttcgagcgtctcgatatattacgggactcaatcggacatcagagtaaaaagttattgttgtttgaatttgctcagagcttcggtattccatttcgagcatctcgatatattacgggactcaatcagacatccgagtaaaaagttattgtagtttcaatttgctcagggcttcggtattccatttcgagcgtctcgatgtattacgggactcaatcagacatccgagtaaaaagttattgtcgtttgaatttgctcagagcttctacattcaatttcgagcttttcgatatattacgggactcaatcagacattcgagta

SEQ ID NO: 280806 - DNA, 480 bp, Glycine max
  unsure (1)..(480): unsure at all n locations
ntgagcanattcaaacgacaataactntntactcggatgtctgattgagtcccgtaatatatcgagacgctcgaaatggaataccgaagctctgagcaaattcaaacgacaataactntntactcggatgtctgattgagtcccgtaatatatcgagacgctcgaaattgaataccgaagctctgagcaaattcaaacgacaataaacttttactcggatgtctgattgagtcccgtaatatatcgagacgctcgaaattgaataccgaagcgctgagcaaattcaaacgacaataactttttactcggatgtctgattgagtcccgtaatatatcgaaacgctcgaaattgaatgttgaagctctgagcaaattcaaacgacaataactntntactcggatgtctgattgagtcccgtaatatatcgagatgctcgaaatggaataccgaagctctgagcaaattcaaacgacaataac

SEQ ID NO: 280807 - DNA, 460 bp, Glycine max
  unsure (1)..(460): unsure at all n locations
agcttggaatcactctcatcattntcctctccatcctcatcactaccccctccatagttagcaacaccatcaccatcaaaccttcaattagcactattcttggggagtttagtcctataaatctttgaccagtcaagaatgttgacaggtgctgattgttgaagaaccgtatattcattggaggaactagcactgctgctattgctagatcttgggatcattctgcctaaactaggcctagtgaagtatattacaacttccacaaagttgtaatatacttccctcatgcttgggctatcgaggactatccttatacttctgatgggctagagatatgggatgctatcaagtctaaaggatattgaacctacaaactagttagtcaggatgatgacanagatgcangcattntctctgcacttctttagtattcatcaattgcctacaactctaatataca

SEQ ID NO: 280808 - DNA, 489 bp, Glycine max
  unsure (1)..(489): unsure at all n locations
tacacaggcagttntaaagacataaagggaatgatatnntgagtttgaaatgcttgagtgcattcgaaactctcatcaganaagaaatccatatctatgaacttagggtcaatgataaaatgagaggagaagaggtttgtctaccgtatacgtttttcttccgatgagaacaatgaggaggagaaaatggaggaaggaattggagtatcctgaacctcggagtgccgttggcttctacttgaagaacccttgtgcttcttcaatggtttcgctatttgagagacttattcaaaatttcaatcggttgaaatgaaagaggatgaanaaagatngaatttgggctctgtgggatgtgatatggataagaaatgagtaagttatggctganatacgaattgngaatgagggttcgcgagaggaatgagagggttcagaattcagaatttgaatctgaattataagaganggatgcgttgaatcgatacaaca

SEQ ID NO: 280809 - DNA, 451 bp, Glycine max
  unsure (1)..(451): unsure at all n locations
agcttgcagcaatttgttattgctcatgtgtgatgtagaaaggtttagttagtgacatgtcttgcatgggctaaaataggtaggacaacttattaggcatatgaagtatagattctcatattctaagcgccaaattttggtaaccaattattcttgacatacgcgtactccaaatacttctatttttgaataaattattttttattattaacacatcgttaaatcatgagtatgataaatagtacttaatctaaagntacttgggattcatgaaagatatgtaccttattttgattgaactcatttgctcctgttatagttagtttcttggtaacagccattagctntccatatntatcaacacatggatcttntttgaagtagtaatacatagcatctacaacatcagttaatttgataggatatctcaatgaagatccaatatggtaca

SEQ ID NO: 280810 - DNA, 446 bp, Glycine max
  unsure (1)..(446): unsure at all n locations
ctctnttctctctntntctctcaaccattcttcattcttcttcctctnttcactnttgntcttcctttntcttgcacanattntgtggctcgtccactagtgatgatcatggaaggttaaatactcaatcagtccaaggattcattccaagccaggttgaatttgagttatggnttagtatttcaattgtgtgaatgctcatctttntctttaatcctaatttcaattntcatgattataaataagtttaggattgaaaatgaattangttatgaatttatttcctaattntgaaatttaatcacaggttatctggatgatattctaacctaatttgcgatctcaatgaattttgggattaattcaattgaaataactctaatgacattgattgaactcccacaatgatcattctntgcaaaactgtgataattcatttgcattga

SEQ ID NO: 280811 - DNA, 436 bp, Glycine max
  unsure (1)..(436): unsure at all n locations
agcttaagaaatatatatttatagtataatcccttcatagagtgcagaagcatcaagtatgcaagacatcatattatctgagatttatgaaacaaataataattcacgatggttagaaaaaattcaaaagacaaaaaagggcaaaagttgcacgaaagtgtgtcattntcccatccccgtgaagtcaattgcatgaggattacttcccgagggagcaacaaagtttgtctaatacatcatgtattaccatcagtttacagcacaatcatttttcccataatagcattcccttaattatctatgtagcatgtgattgtgagtatatcaaatgcatacacaagtcgagtatacaggacatggaacactccattaaccaacatagggaaccaaatacctgcagagagacattatgttcccttatgccagtataataatg

SEQ ID NO: 280812 - DNA, 327 bp, Glycine max
  unsure (1)..(327): unsure at all n locations
ggaccggcgaaagcaagtcgtaaatggagtggttggagtaccaagaaaatgtctggaagcataggtgataaccttggcaagtcacgaagaatgggccccgatcatggatgtccttgcgctcttgatcttcagagtggtcctttttccaaatgtggatgggttggtggactgcgcaatgattgatgcttttctcgccttttacaccacaaggaaagcccggttgtcgctatcttatccaatctatatgacacattcgaccgaagatgcgagaagaactgngcatggatcgtttgctatacaccggccctctacgtatggctggttcac

SEQ ID NO: 280813 - DNA, 456 bp, Glycine max
  unsure (1)..(456): unsure at all n locations
agcttttcgattcattctatgcacccatggtggtccacattgcgtttcgtgcatttttactctcgttttggttacttttcataccccctcttgtcgtgcttaagccgttntacttaagtcatttctcgcttaacttaaaaataaaataaatttccaccgaacgtttgaattatattatccgttaacttcggttaaaatcaattccgaccgttcggtcgtgccgtaaccacgttggaaatcataaagaggtaaaaaaataatataataatcataaaatatcttttttagtaaaataaagcggaaaatcaatcggacgttttctctntgggatttctcattcttaattgaattgattaataactaaagtgaaactaagggctaaatcaactcgcctagtcaagctcgtccacaataatagggctttgaagttcgcatttcaatttctcactaagtaaa

SEQ ID NO: 280814 - DNA, 379 bp, Glycine max
  unsure (1)..(379): unsure at all n locations
ntgagccanaatcctgactcaccatanaccttgacccagggtgagaatgtctatccttaccctcggaagcggaaagaatagaagggaaatttccaatcaaagaaaaggaaagaaggaagatttccaatcaaagagaaagcaaaaaaagaaaagaaggaanattccccaatcaaagagtgggagaaagcaaaaagaaaagaaagaaaattcccaatcaaagaatgggagaaagtaaaaaaggaagaagaagaaggaaagaaagctcctgatcagggatcgaagganaacagaagatatgtgcagaaaggtctttgaaccggacaatatctgaacaatacagaattgtcaccaaatgaacaaaaagaaggagaggaaacca

SEQ ID NO: 280815 - DNA, 469 bp, Glycine max
  unsure (1)..(469): unsure at all n locations
gcactgcnntttgatgtgtcntacatcgactaacggcgaatgcagctcggacccgggatgctaacagacgacctgcngcatgcacgcaggttttgctatatatacagaagatgacccgcgctgcttaatacaacacgagatagtgccacgatataaaagcccattgtgcagacttgtgcgccacacgacaattatctacccaggcgctcgcacactttatgtgaggttatatttcttctccggaaccctttaaatatccaaagggaactacaaccaacgagcggtaagaggtgtaagagggggaattattaacaaccatactggcgttaaggaacatagattgcgcaaccggggcttgttaaacgaaggttggggttcaccacgagcgagttaatttctataaaccacctagaaattgtggggaatgcctcccccttcatattgccgggaataatgaaattagagggag

SEQ ID NO: 280816 - DNA, 443 bp, Glycine max
  unsure (1)..(443): unsure at all n locations
tcacaattccacaattcctataataggcctaactcacaattaggtccncagtggagtcgccaactgtcgcaacgtgccctttcgcgggcgagcgagggcgaggctcacgggtgcgctttccaaatgaggaaaggtgcgcggagtcgccaccaacgatcatttgtggaaaacgtcgggaaaaccgaatgacaccggtcaaaatgaaaattctaagttcgggagttgtatttacgttcgaggaaggtattagcacctctcacgtttgtctcaaaggataacagcctattntttagaattgtgaaattgtgttatgttaccttttatttcttttttatttgtgaggtcgacaaaagcggngctnttgctcctacgtaccctgctttggagaggaaatcagaccgacgtagttcttacttangcacgaatcaagtgattctttttac

SEQ ID NO: 280817 - DNA, 390 bp, Glycine max
  unsure (1)..(390): unsure at all n locations
agcttgagtagataattgatttgccttctatttgatatctttgataaatgaggcaactgcatttgtaagttgaaaattttcaccattggattggatggaaattttgtctttatatttccagctggcaggagtcatattgggagctcaattgctcattgaaataaagtggcactatgagccgtaatatctaaatcaaaaccaaaatgctaagacttgtattaccttttacttcatgctttcttgatgctgttgttccctgtgtctgtccctgttttatcttggattaaaatgaaaatggctgtctgctactacgctgttcgcttattctttntttttttaaataaagtaaaatagtagaatttatgctgtgtattttactttatcatctac

SEQ ID NO: 280818 - DNA, 470 bp, Glycine max
  unsure (1)..(470): unsure at all n locations
aagcttcacaatgctaatctgaactcagcctttntctccacattaattaagcttttatcgttccttgcttttttgcaggattntgcatataaatggaattactgtttattaaagtttataatgcatgcactcgatcggtatgtattatatcagcaaagcgtaccttaggtttgattcttatgggagccttgactaattgactttntcagcatatataagaagatattntatatgtaaataattnttgtatcagaatgtggcattagttgaattaaaacataattcgctgacatataattntatctagaactgaaataactcaacattaacttcggcagttgggttgatgtattggcgaattgatttgaaactggatattagatttgtgtgtcactcagaananaaaaattaacagaagttngaaattccacaatntacaatcatnnttggtgtatntacttattntctta

SEQ ID NO: 280819 - DNA, 354 bp, Glycine max
agcttgccacccttctctgccaagtgagccagctattttgcaccccctgtttactaaatacacccccttgctctttcttggtgtttctttttccgctatgttacgaaactttacgcaattcgtaacgatacttgttttctttctgtaatgttacagaaccttacggatcacataatcatccccttttttggcttctgggatgttacggagcttacggattgcgcactaacacttccttttgacttctggcatgtcacggaacttcacgggttgtgcaacaatgctttcttttgacttcccgcatgtcacagaacttcacgaattacctaacgatgggtgccaagtacctcgaag

SEQ ID NO: 280820 - DNA, 446 bp, Glycine max
  unsure (1)..(446): unsure at all n locations
tctttgggaccttgaacaggcaactaactcctctntcagaaccatgctatgtgctcgcgactggtccctctcttcccttcgcagcttgagttcactattgctaccccacagagctccgcgaaatttattccagccatactcttccttgcgagccctcttggtctcttgttcaagggctcttgcggtagttgcattctcttcccgtaacccggcacactccttccgaatgtgtgtagtggccaacttgaacttctccttggcaagtttcgcctttcctaactcgcttttgagagcttggacttcttcgtcctgttccggtgcttcaaaactctcttcgctgacgactnttaacttggtgagccaatctaaacctcgtatatgaactntcaaccattcatggtacccaccaatgatgccattacgaatgcccctaagttcttgatctt

SEQ ID NO: 280821 - DNA, 414 bp, Glycine max
  unsure (1)..(414): unsure at all n locations
agcttcttatccaaggcacattcttggtggtgaaactccttcttccatggcttattcccttgtggatggtgcctcccctctcctcttctcctttgccttccgctgcatctccatggtggaaaataaccattgaaggacctcattgaagctcaaagatgcagcgttcatagaagctccaaaagcaagcttccctcaccatattcatgcattgcattttgcataagtcatttcatcaccatgcatatgcatctaataggttttttgcataccatttgttttcatgtttagtcatgcatgatccttgcattntcctctngcaaacanaagcaaaaaaggaagcatgaaaattcatgctgcattcttagttgcatatgttcggtaccatgaaccaaccatgttgggatcataaaccta

SEQ ID NO: 280822 - DNA, 320 bp, Glycine max
  unsure (1)..(320): unsure at all n locations
cggttatctccttcttcactacatcaagaatcaccgggttgtgtcttctctgtggctatcttactggtttagctccatcctctaaatttattcgatgcatacatttggatgggctaatgccaggaatgtccaccagggtccagcctatagccttcttatgattcttgagaatagacaacaacttctcctcttgctcatcagcaagggaggcaaatataatcactggaaaagttctgctatcatccacataagcgtattttaaatntgatggcagaggcttcaattctggtgtggcccgctggatagtggtagaaagagat

SEQ ID NO: 280823 - DNA, 363 bp, Glycine max
  unsure (1)..(363): unsure at all n locations
agcttgaattatttgttgtttaatttgcctgttccattangcttttaatgtctctagaggttacttcctcgttgacatcttttgtcttgaatggaattgccatgacaggtatgttgttactgtctttgatatttggtagttgatattgtgttgtgggaggtaattccgactggattaactcaccatccttcacttgccaatttgttatgacatttgttgttggattacctatgatgtcttgtttccaagggtagtctatatcctttctgatggcataagcatgacaccaatcaaagaaaaggacattaattntgactctttcgacaaattcgtagaacttgtcttggatctgttttctgtttg

SEQ ID NO: 280824 - DNA, 477 bp, Glycine max
  unsure (1)..(477): unsure at all n locations
ntagattctanaatgaatcanatcattattgttctaacttttatttgtgaaatgttgtcaaaatgttaaacaactaagaagcaaattaaagcagacctcacattttcaaaaaaaagattcgaaagaattgaaagttttgaagaggcaatatgcggcactaccaaaacaagaaaaatgtagcatttaccagcagtaattcttattagctnttgtttatttgatttgggtaatatagatagctaccaagataagcagaattttattacaaaagatttatctattgaagttctatttatttttctttacataattatgcatcatctttcttgtttttcgtactttagaatttcataccgtatagcagtatttttatgagaaaacatattaacatctgaattgttaaacattaaaaacatgtacacatgtatgaactntntgcgtgaaagtattttgatatttgaattgctaagatatata

SEQ ID NO: 280825 - DNA, 424 bp, Glycine max
agctttagccttaggttgtttcatgttgctgctccccttatctttaacagtaacaagcacatttccattcacaggtttagcgacatcaacatcatcacttgagccctcactttcaatgtttccattatccagtaatatcatgcctcttttatttggacattgagaagcaatatgaccaactccttgatacctgaaacatttgatatcatgggatctagaagatgaattaatttccattttacctttaggtgcagcacatgaatttttggacttagcttcatcttttgactttgtcatagaatttctgttttgccaatttgacttccatgaataagtggaatcaaatttggaagtactcttagctatcaattgcctctccacttgaatagatttatgcagcaagtcctctatctccacataatga

SEQ ID NO: 280826 - DNA, 475 bp, Glycine max
  unsure (1)..(475): unsure at all n locations
tgtagactggctagacatgatacatgtcagggtttggtttgtttcaaggataaaatttatgccccacattatttccatgacacaaatgcaaaaatgatgatttggaaattttatgcaaaactggtcatgcatgcacctatgtggacgctcaagtgtcaaatttttatggtcatgtgatgctagggctcaagattcatttcctctattttaaatcaacccaatgtttccaaaatatgttcttttatcaatttgtgcattcatccgagtccatttcgggcgtccggagaaatttcacagcattcacccttcaggtgtagacacattttccaaaaattggttatgatcaatgaattcttttcaaagaaaagttggaaatcatctcttttcaaaagcatgtcggttnttcagctagacaacttattattctttcntctctcttttttttatcattatcatgtggttatttctttctctt

SEQ ID NO: 280827 - DNA, 389 bp, Glycine max
  unsure (1)..(389): unsure at all n locations
agcttatttttatatttatatagcttgataaaatagcttcactttctaccacacattaaatttaacaaccttctggttcagggtttcaacttttcacctcattaaaactcgtcctttttgcttttctcctacttgatagatttaatcctatagattgngattagttgcttggtttttaatttcttccaaaacctttaaaattctggattgatgtctaggagacaaccattttagttatttcaagggcaacttatattgtacatgccaatatcagtcttcttacatccagggtcttaagtagcacattatagtgctgttatagtggctttacggcccatggctgctgccatagcatagcangtaagtgtattggcccctgcagacagtat

SEQ ID NO: 280828 - DNA, 472 bp, Glycine max
  unsure (1)..(472): unsure at all n locations
gcttcttcaggttgtgttcccacgaccaaccaaattgtantttttagtcgtaagggatagggactaatttatgtagccaaaagatttactttttaatatatacagagaataagattacatcaaaacttttctgcaaaaaatccacataaaattcagcaaaactgcacatgaattatcttggtttttagccatttcataaacaaaatgtgctagcaaaggtcatctaccaagctttgggtgtgtaaagactaaagaaaatagatctatttcattacttaattcagagttcccaaacaatttcaagcctcagcaataatcaagtaatcaactataactagtatacatagtttaaaatatgcggccatgtgataccataattgtgtcacatacttatccactttggatacttagtatctaatactctntaaatactnttaattgcttctttgtttcctagctcctaattaagtgt

SEQ ID NO: 280829 - DNA, 388 bp, Glycine max
  unsure (1)..(388): unsure at all n locations
tcaagctntgatattctcccacctaatggactagtcttctcaagtagtttattctactcaatgtgagacttctaacagtatattacttttctagtgtataatttacaataacatgcatgtaagaagttttattcatgctcaaataaaaagtagaaaactaaaacttcttggatgtggtatcatcagccaagaaataaagtcttttaaagtcttgttttttatggaaactattatgcaactcaaatatgaagtaatctatagctgttatggtcttccttgcataatctgcctcccacagttgttattcaagagccagacaatgtactcattttctgtaaattcttcacgtggtgattggatttggtctttctgactgtcgaccttattc

SEQ ID NO: 280830 - DNA, 361 bp, Glycine max
  unsure (1)..(361): unsure at all n locations
taagtgggagaaagatcttatattggacctaaagtcttcttctttcattattccttcttttcaaagctagtttattgagtttggataggtaagagaagctctactttgattgaattctttgtttaagtgggtgctacttgaaatgcttgttttgtgtgtgcaatgatttgtatgtatggtatatgatgtgtaatttaaattgggttaatttagaagtcatttgacgtcttaagaaaattgaagttatgcaaatgtttacacttaagccaagagtgattntcgcttaaacgaacatgtctattaagaaatatggttgttggattcaagcttaacgtagatgaatataggcttaacatgggtg

SEQ ID NO: 280831 - DNA, 414 bp, Glycine max
  unsure (1)..(414): unsure at all n locations
agctttaggatcaaactctcttctctctttttctctcaactgttcttcattcttcttcctctcttcaattttgttcttccttcttcttgcacaaatttcatcgctcttccaatggtgatgatcatggaaggctaaacacttaatcaatccaaggatccattccaagcaaggctaaatttgagttctggtttagtatttcaattttgtgtgaatgttcatcttgttcttcaatcctatttttgattttaatgattatgaatatgcttangattgaaaatgaattangctatggattcatttcctaatttcaaaatctaatcacagatngtttggatgatattccaacctaaattgcaatctcaatgaatntaaggatcaatttgattaaactatttctaatgacattgactaaac

SEQ ID NO: 280832 - DNA, 462 bp, Glycine max
  unsure (1)..(462): unsure at all n locations
ntagggttgaggatctatataacaacttcaaagttntagtataaggagactgttaatagaggagagaatattctagggttttgcattttcagtttcgtgttactgttcacgtagcaatcataatttcattttttgcttcaaattgcaatttcgttttctacttctgcctttgaattcgttttcatttctgctgattaatggaaggctgagtttccagtgttgttttctcttgaggatcaagcacaactctctttgagggtttgctattactattgaattctgatcagtttttccccttcaccaattgctctgtatttgttgctgttaattcatgcatgcttaatgcttcattaattgtctctgcgcttaatttacgttcatgcttaatgatcagtttcgttcatgcttaatggacatgtgagacggattaattggtggatgtgttacttactcacataatga

SEQ ID NO: 280833 - DNA, 418 bp, Glycine max
  unsure (1)..(418): unsure at all n locations
agctnttctaatgggtaaaaggctcacattcactttcttctacatcatattcaaacttgtccaaataaataataaagtcatctcgactcanagaaagtcatataagtctcatacaattaatatagaacctatatcctaatgtcacatcctatcagagcgtggtgttcccgtgtcctctagcatgaggttcttcatagtcatccacctattcatctgctcccccgaacacaagttcaagatcatcacaggatccaaacacaacaacacacagggagtgagttatcacattcctagctaatagagaaacaagacaattaaatatacatattatataaatgagataccactngcttaaacatagctcacgtaacttcaccacttcgtcattcanaattcactgttcaattatcaatcacat

SEQ ID NO: 280834 - DNA, 460 bp, Glycine max
  unsure (1)..(460): unsure at all n locations
tcacctgcaactccaacccgctttatatcctaacaacaggttatctttatgtttaactntaatgtttgtccgacccataaaatatgaattatgtacaacaaaaatgttaagaatcttttatagtgttcaccattgaaaatgctcttaaaagtgaacatatttagcatatataattatgttaccaaaatataaattttttacaaattaaaggtttactcataattctttaagacaattgtgggaagggttttgtcatgcttttctcccttgcaaatccaatacatataagatctctttcgatataaagtagaagtgtttttgagagtttttttaataaaataatttatatttataatagagaaactttcaaaagcatgtatgaattgtatccaaacaaattcctaatgggttctagagtgcacaaggttgtaatgtcaagcacggtacacaagttttctta

SEQ ID NO: 280835 - DNA, 415 bp, Glycine max
  unsure (1)..(415): unsure at all n locations
agctntgctgatttggtcttcgccggcaaaaggatcgaaacgggtctgaaaagaggcaaatttgatcatcctgctttgatgaatgagaaaactggggcaaatgaagaggatgagaatgaggaaggaaaccatgttgaggttgtcattcctacatggccaaacttcgcaccagcccaacaatgtcattactcagccaatattagttgttctcattacccaccacctagtcacccacaaaggtcatccctatatcaaccacaaagcctgctcgccgcacatccggtgcctaaacaccacctttagcccaaaccaaaaatgaattttgcagcaaatagcctgtaggattcaccccanattccggtgtcatatgctaacttgctcccatatctactcgataattcaatggttgctataa

SEQ ID NO: 280836 - DNA, 451 bp, Glycine max
  unsure (1)..(451): unsure at all n locations
tctccgaagggcatggttatttccagtttcctgaaaatatctaagaatctctccaaatggtggtccttctccttcttggaaggtaccacaggatatggtacttccacaccttcattcacagctntttctttnttcttctctctagcctgttcacttctactcctctcgtcattcttatttttttcattntttttcaatttttttattttctttttctttttctacttctttntctttntctttttcttggtcattaaattctgttttcttgaccattatttgtttttctttttcttgattactttcacatatcacataatctttcttttcatcagtgcctttcttttcagcagctntcttcttgggcacaacactntcctcatcctccgcctccacaaacctcttactccttgtcatcacagctntgcatttctccttgggaattttttct

SEQ ID NO: 280837 - DNA, 372 bp, Glycine max
  unsure (1)..(372): unsure at all n locations
agcttgtataaagtttccacttccccgtgttaccggcaaagagatatatttagttagcggtcaaccacattgcaattataagtgtatttttggaagaagaaaaaatgtttttttaaataaaaatattatttctcatacacgagtgagaaataacacaagttcttgttcccctttttatttatattgcgtgactgtgacttagccgcacatgcaacagataaggaagagcaacgtcatgccttcacttttcaatactgcttggattcagaaaaaaaaaagagtgcanatattcctgttttggagggagtggaggtttcacctgattagcagtttaggttcggcgaaacagccagaaatgaaacacagtgaaag

SEQ ID NO: 280838 - DNA, 417 bp, Glycine max
  unsure (1)..(417): unsure at all n locations
tgtctcttgtgatgtgaagacacataggaagtccattgngtatttgtaaacattccagcataatccattgactctagatcactttcagaatagtctacttgtattgcatttaaatggtttgcagcctccaagctccctgcactagctgagcttctcaattgagagggtgcatcagacgatgtgcatgttagcattgcatgccacctgcttgcaacggaaacaatattttgagctctgtgagaaattcttgtcgcagcatgcagacaaataatgatgcccaccacctgaacaagtgtggatacctaaaagaaacaacagtacaaaaagaaatggtgaaatgaaaggaattagttccttcaatctaaatgcgtattaatactttgaacataaagagttggacttacagcanaatctcca

SEQ ID NO: 280839 - DNA, 348 bp, Glycine max
  unsure (1)..(348): unsure at all n locations
agcttagccaactaatccaaacttttgtttccatataagaagtgcataaggatgaacatgagggactccttcattgatgagtaacaatgcattttgagaatccgactcaagatgatggaagtgtagccagtatcatacgcgatgcaaagcctatgataaatagcaaacaatttttcattcaaattaatatttaatgtanatccacgattatcattactagttaatcactattggtgatgctatatgagttataagattaacgtgatgatggttgaaggaagaaagagacaaaaattgtcggttaaatacattttttaactaaactatcaattaacaactatattaata

SEQ ID NO: 280840 - DNA, 458 bp, Glycine max
  unsure (1)..(458): unsure at all n locations
tctcttttccaccacatgtcgtcctcaaaccgatggtcaatctgggcataagaatgctcaggctaaagttgagtatgagaaaagattgcatgagcaagtgaagatacaaagaagaatgaaagttatgccaagcaagccaacaagaacaagaaaaaattggtacttgaaccaggcgatgattatgaacatttgagggcaaatgttttccaagaaggagggaatgatgaaaatcctaaaatggcacaaatacagggacctatgaccacgagtaggaccaaacagtcagtgaatataccctccaataattggtatcagacatacttaacaaggcccaaatggganaagatgaaggcctagaggcaaagacactaccaagaatattaattggtgctaaagacccaaactaatntgaaagcccatgtcaaatatgttcttttttaattatatttttttcattt

SEQ ID NO: 280841 - DNA, 421 bp, Glycine max
  unsure (1)..(421): unsure at all n locations
agctntctcccaagtcctaaatgacatttcaagctagtattaactcactntaacctccatttaccacagaattcagacttaaccttccaactctcaaagcctcactctttntccactcataacaccacattctcactntccaaccctaggttaactctacatttcatctctaacagttttccatgggcaatttcagcatacaaacatcataaacatcatcacaaaaccctaaaacagaatgggtatgtctaactcatccaaacatggcaatttcaacaagctttcaacaagtttcttcacaaataactatcatgaagcagaaaactagcaagactacccatcatatctnccanagccccatacnccacgaaattaagagagaaagaagtncacccaaacctgaattttcgaagtcccactc

SEQ ID NO: 280842 - DNA, 461 bp, Glycine max
  unsure (1)..(461): unsure at all n locations
tcgattacacaagtcttgtaatcgattaccagaggagattntcagaaaataatttccaagagtcacatctattcaaatggtttatgaatggccatcaaaggtgacttggaaacacgaatttaaagagagttttcattgcccaaaaagttttatcctctcaaaagattaagagtttttctgaactgaaatgtcttatcctctcaaaaagattccttggtcaaccacttgcatattcaataaggaattttgattgatcttcattgtacaatctatcttttttaagagagatttcttcttctcttcttcttacttctgaaaagggattaagagactgagagtctcttattgtagaggattcttgaacacaagggaagggttgtccctgtcgtggtcagactttgtaaaagntgttttacaaagagagtggancatctcaagtgggtttcttgaggactggacgt

SEQ ID NO: 280843 - DNA, 416 bp, Glycine max
  unsure (1)..(416): unsure at all n locations
agcttgtatatgaacaaaattataatcggaagctngaagttaaaacacaagttgaaccaaaatacacctagagcatattcgtgatagatagattatgtggggtatttcagttaaattttaatttttttattagttgaaaattttatttaattgtttaataaataaattctttttaataattcttaatatgttttagaatgttaattcaactaacatttttttattagctctttatattttcttcactcttatcttttatgtatttattcatttttcttattactttgtttaaatacatcataattttattattttacgtgtttcaactactttaaccgctagtgtaattaaacacttttaattttataagctagcgttataacattgccgttattaacttttaagtaccacttgac

SEQ ID NO: 280844 - DNA, 445 bp, Glycine max
  unsure (1)..(445): unsure at all n locations
acaatttattgtgaattttgttaagtacatgatgtatagtatanttttattttgtattntcaaaacaaaaattaaatacataactaanatatgattctactgtgatctttgttgaaacataatcatattntggttataattaaaaagagtaataaaaaagataatgtgtgtcgttattaatataatttatatcaaaattaatttaactagaaaaaataatttaattctacagctaattttttgtgaaaaaatatctaacgggaagacgttttcatggtataaaaaaagtgcaaaaaaactacacaatgaanatttgtttccattttggatttatacacagaaacatgtttttgcaaaatatatttcctcatgtatttttttggacctccttcttatacaacgganacatgtattcattgttatgtttgagactgacnaaatatac

SEQ ID NO: 280845 - DNA, 405 bp, Glycine max
agcttttactcttttctcttgcatacttgttacataattgtgggacattgcttttcttgtcagttgtaacattgacatatatatatatataaaagatgtaacaagttaggcttttatcaaccctatgattggaagaatagttgtgcatcatattatattatatctactacttccactttatccttactagttatgactactaatagtaaacgtgatattgccaaattcaactgatataagcattgctcagatctgagtaacttttcatccctgcgttcagtctgagcccaataatgaatcaaatatgagagcacattgaaattcgactgaatatgaagcatccgtattcggtgcagtggtttacagagactgaaatgccacgaatagctggatattttattccac

SEQ ID NO: 280846 - DNA, 458 bp, Glycine max
atgccttgccttgtctttgcgaatcatctatcttatctaataacaagaatattacaattgtcactgcgtatgttgtccttttcggaaaaatcatgacctgatgcatggttgatgccgtaaatactatgcttaacataaacttatgtgcaaactttctagctaagaagggtgtgtctcaatatgttaatttcatttcttgaaactctctacacagagtgtgagattgaggcttgcggtcattattgttggtaacttttcggggttgttgcagttcctctaaatggcatagctaatactactattttctagtaggaactgctaattcatgcttattatggaaaacaattaaacagtactactatgaatctatgatgtagtggagaccttaagaactaagttgcggttcttgacgttgctgaatgtcataaattcagtttataatgatatatgagatgtta

SEQ ID NO: 280847 - DNA, 401 bp, Glycine max
agctatgtgttcgatggttctataacatctatcccccacatggaaaaaggccaaggtgcagacataacattcagaggatgtggcggaacattgacattgtccgcgtatgcttgacatttatgacatttgcttacatgggcacaacaatcgctttccatagtgagccagtaataaccggctctaaggatcttcctggccatagcatgcccattggcatgtgtaccaaatgaacccccgtggattacctcaatcatgtagttcacctttttggcatctacgcattgtacgacggtcatgtcggggttccgtttgtaaacgatggtaccactcacatagaccgcctggttcttacgtaataacttgaaaatgggctcacatgtaggggtgagtagtgagataaa

SEQ ID NO: 280848 - DNA, 478 bp, Glycine max
  unsure (1)..(478): unsure at all n locations
nttcanatgggtaaaaggctcacattcactttcttctacattatattcaaacttgtccaaataaataataaagtcatctcgactcaaagaaagtcatataagtctcatacaattaatatagaacctatatcctaatgtcacatcctatcagagcatggtgttcacgtgtcctctagcatgaggttcttcatagtcatccacctattcatctgctcccccgaacacaaagttcaagatcatcacaggatccaaacacaaacagcaaactgggagtgagttatcacattgctaactactagagagaaacaacacaacatatagtagccaaatacaatttacttagcatatctcacattatttcatcactttgtcattcatcaatcacacttttcatccatcaatcacacctttcaatcatcaatcattatacacaggaatcacacactccgatcaagacataataacacatcaatttcat

SEQ ID NO: 280849 - DNA, 377 bp, Glycine max
  unsure (1)..(377): unsure at all n locations
agcttgtaataagctttaaatgccttcatgtcatctgtaacctttacaagttcaacagttggcttctccctcacaataggcaagaaagcaccctggacttgtgttgcatttgcaagctcctcgggagtagaatcaccagcctacaataaaacaacagtttcacatgacacacaaacatctttcatttcgaccttcatcagaaatgaaaatgcctaccacaatcaaaatagataatggaacatctgaattaccttaaccttgtgtgcccgtcttgggaacacaaccaatttggccttgtatgttttcagcctctgcacattagctggcagactntccaaagaacggttcttgcgacgatgatcaacagcaatacctat

SEQ ID NO: 280850 - DNA, 479 bp, Glycine max
  unsure (1)..(479): unsure at all n locations
atgaaacgtatagattctaaggtttttaataatattacaatatttggatgcattagacttgtactgtcctctggacaaatggaattagtaatatatagcatgagtgcatgaggtgacagttttgatatataaataataaaacctaaagggtacatcatataaaacaaaacaacaaaaaagcccccctcanagtggacacatgcatgccaaatatatatatatatatatatatatatatatatatatatatatatatatatatatatatatatatatatatatatatatataattgtcacatagatattagttaatattatagacatgaatctatctaataatctctccgtanagttcagaagacagatggtanagaagagatacaactaacattttatttntactgtctgcacataagtaacagagaacaattgtatattataagttaacaattatgtttttctctatataaccacaag

SEQ ID NO: 280851 - DNA, 644 bp, Glycine max
  unsure (1)..(644): unsure at all n locations
cacaaccccaagcaaccacattcgcgacgcgagacaacgtgaaacacnacaaccgacacaaacacattgaacatgtgaaccgtgaaaccacgcgaacacgggtacgtccagaggagacttgagcgcagacctgcttgcatgtcaaactactattcaaagcgaccccaacgagcgagaacatcacgcgagacacctcacgcgcaaccgaacacatacactacaccagacggccgcaaccaaccggacacactagcgcaaacagacgcgtcaggtcaatcaacacaatggcacatcctacgaagcatggcaagggagccaaccgtgcgtcccgtacacattgcaccgatagctcacagtncgagcagtagcacacgctcgtgagcacagtcgtacacgaagtctctaggaacgtgagagggggcctcctaacatccaacaagcccgcggacgcagaanacaaagcacatgagcgngcaccgccgcacccaacacagcggacactccacacagaaataccgaggcactcaaccgcacactcacaaaccaacccatacgccgncatccacaaggatcgacgaacgacaagcagacggaaccgcccagtcagcgagacaataacacgagatcctaagcgacgcaaaccg

SEQ ID NO: 280852 - DNA, 391 bp, Glycine max
  unsure (1)..(391): unsure at all n locations
agcttcttatatcagttntgatctattntgtagtttccatttaatctaatcatatatatttgtcaatttatgatttatacacttgagtcttggaatttatctgctgctgtaacatgtggtcatttttgttcatgtctttttcagatttttgagaaatatgttaagaattgggttgcaatttgtgcgccattccagggtaagtaattcttttctatatttataagaagtatggaattataattaagggtatttgatgaatgattcttttagcatttcaatgatgggtctatntaattttttttccatgtntaatatattggaagaacgcattgtcatcttttcttcataggctaaagtagttgatggacaaaaaaatgtgcaaaagcatgat

SEQ ID NO: 280853 - DNA, 465 bp, Glycine max
  unsure (1)..(465): unsure at all n locations
tcaagttggcaacaacaatccattaagtcaccanaatacacttattagaacatatttcanaataatcaagttccctattctttctatgatagtatgtatgatgcaatatgaaactggcttttattctcttctagaagggtacattactccaaatcaaatctcatttgtacagcatcacttcaatcacatgtctctttattctcttgttaagttacagacagaatggagaanattaagagactctttctttagtcagaaatgggggttaccaagagaaattatcttggtaattgggataaattntgcaagcctaaaatggcagggcctacatcgcctggctctcttggaantaatttagttggatcttactagttataagtgaatattgatcacgatcgcatgctnttattaattttatgattattgctttaatttattttggtacattatcaccatttaatatct

SEQ ID NO: 280854 - DNA, 385 bp, Glycine max
  unsure (1)..(385): unsure at all n locations
tagcttgtgtcagataatgctgggatggattctcgacatgttagatggctgctacacgaagaagtctgttctgtgtagaacatcggtgatgtgctggtgatcatgattagtgaggtccttactgagctgcgtccactgcctgngtctgagtccaagctgcagctagatgagctcttcattgggctttaggcctctatccgaagtgtcatcatgcggatctgtactgaattcattgtcctgacttgcttggtagacgatcagggcttgtattggaggcctttcatccacgctcatgacttgagtgccttcatccacagtgggatgaggcttggctggctccctgttgggacgacagggtgctacctctatgctttctgcatagcgt

SEQ ID NO: 280855 - DNA, 429 bp, Glycine max
  unsure (1)..(429): unsure at all n locations
tctaaactntatacaagaatgaagctctgataccacttgttatacaagtggtctcagatatcttaagaaggggggttgaattaagatattacaaactatttccccaattaaaattctatttcactttctattcaagttacaaattcccttaacaatgaacttcttaaatattgattcaaatagatcaatctgaatataaatataaaacaataataaataaaagagtttaagggaagagaaagtgcaaactcggatttatactggttcggccacacccttgtgcctacgtccagtccccaagcaacccgcttgagagttccactatcttgtaaaatccttttacaagttctgaacacacaagaacaatccttcctttgtgttcagaattcttttacaacaagagaccctcggtctcttaatcccttagag

SEQ ID NO: 280856 - DNA, 414 bp, Glycine max
agcttgattaacattctgtttcaacccatctgatggatctccatccctattcctatctgctacaaatttaaaaaattagtcaaacttgtgcacaaattgatgggccaatattgtgacattcgtgtcagatacataacttacatgcatttctctctattttaatcaatttaattggttacttcttaattcctattgttacttccttcggcggtcgtagattattgtggtcttaattaatctttatatgacatgtaattgttattaactattttcaaaatttacaagcttaaatacatcatttaaaaattggccaagaccaagaatacatgctatgggatgtctgcatgtcaagaccatgaatacaatactgaacttaaccatctctttatactcttctaagatatttctctatgc

SEQ ID NO: 280857 - DNA, 444 bp, Glycine max
  unsure (1)..(444): unsure at all n locations
gtgtacatgtaaaagcaaattgaagaacttcacattgcatatcatgctaattctgacttacctattttcgtataggtgttagatagcttcgatctatacttggaatgaaaatagcaagcaatctgcaggtagtcatatatatcttgttttaaaataagcatagtcaaagaaaacaaacttgaaggtgtattcagttgcattagaagtagatcataaaccaacatgttggtttaagtggaactgaacttaatctcctttaagtaaggtctcaagttcgagttttgtaaatgaaaaaaacatagttaggaagggagatcccactanaggtaacaagtcatgtttctagcagagattaatcatcaataaaattgacggatactctatactaatgtcatgacgacaaacaaaaataaaataaaacagatcataaactatataacttac

SEQ ID NO: 280858 - DNA, 340 bp, Glycine max
  unsure (1)..(340): unsure at all n locations
agcttagctcaagacccactaaaacctattttatgaataagcctattttaagttttttttcaataacactaatccaccaaggaatatgatttgtttcagttttgatatagaccatggacccaaagcagttgagtatatccagatatgctgtattatttcccatcacttggtttcacaatgcctttctgcttgttacacctccagttnttatgcagccaanattcaacaaaacatcaattctttaatatttaagcgcaaataactgttacataattatttttanagacaatgttgccttattctctattatcagaatacaattatttagcagttatcactg

SEQ ID NO: 280859 - DNA, 449 bp, Glycine max
  unsure (1)..(449): unsure at all n locations
tattaaactcaatannaaaggcaacgtataattcatgcggtaaatactttttttcttttgtaccaaaagcaaacaaaagtaataatttgatataatgaaatagtacattgcctaatgatgtctcgaccatctgagaggattgttccacagactgcaagaacctcaaaactcgcttccaatttcctccacatctatcatacagctccctctgagaattcaaacccatccttgcaaaggtaacatgggaggcacacaattgaaatgcagcaaagtcaaccaaggacttgaacttgaaagggtgcaaaccatgactaccaccaaaagttttggaagtcaattctaaacanacaaggtccattgcactgagcctgcccgagcacagaatttctaataccaaatgtgatggcaattcctcaatggaaaaatggtctgcaacggtctccatcctc

SEQ ID NO: 280860 - DNA, 586 bp, Glycine max
  unsure (1)..(586): unsure at all n locations
cccacagccaaggcgatcggtgaaccggacggcaaagcgaatgcaaacacacacccaaaccaaaccacgacccgttgatccantgtagaaccntnntgaanaccntcggcacacncaagggacgaancagacgcggaaccgcgagagccacgagagacgttcagcaggcatgtaagcccagcaatagaccagagcagcaaggaggcataggaaggcaacaacagcacccgcagtgcacacacgcgataacagcacgacatgcgagcattgaacatagcgacacccgacagacaggaaagccagactatacaccgcaagaacaatcccccgaaagacacaaccaagacgagccacatacaggagaaaacccacgcaaggcacgaagatcaaccgcgcgagagacaacagacgacagggtgacaaacgaaccaagctaccacaccaagcgcaaaaagaaaggcgattacgcccagggagccaaccaccgaaagcaacaaagcatacacgtgatacagctgggacgaggcgcaaaaaaaggagagtcatagcctgaaaaccaaaccacccaccatgaacgaagcaaccg

SEQ ID NO: 280861 - DNA, 329 bp, Glycine max
  unsure (1)..(329): unsure at all n locations
tggtacaataatgattgatacgaaaccgacattgttcgaaattatgatgaaagccacaaaaacacgaattgaatcaatagtctcggatctggaaacttacctgctgaggaacgaagaacggatgaagaacagtcattaacggaagacaaccttcacggattcgcttacgataacatctcagaagcgttactgaagctcctcagcttggattttcttcacggaaactatttttttcacctccaacagttgaaatgcatagccacggggatcatggacccttagaacaggccccttttttgcttcttatanagaaaaagtgtgaggaggtt

SEQ ID NO: 280862 - DNA, 275 bp, Glycine max
cgcgttctagcttgttttaagtataacaatataggagattgttcttggttgattgataaagacttacattttaatcatgggttaacgagttatacaactgatggagatatattacacttagttagggatgcttttgaaaatgagaacgagataaatgtttattctcatcatgaagtcaatatccaattttaaaagaagtcccacagatgttgtacttggaatgtgattcaattccagatactgttgagaatgaggataacttatatgatgtacct

SEQ ID NO: 280863 - DNA, 452 bp, Glycine max
gtacatatattaaaggcattcgctggttaatcctgctatagtactctcgcaatgcgattcacagtttcaggaacatattcaagtacaagattcaagtaaacttcttctttgtcagtcgttgaaaagaaacaatgccttagggcaacaatatttggatgatccagcatttgcataatttgtaactctctattcttgtatcgcttgtcctggagaactttcttgatggccacaatttctcctgtttctctacattttgcctaataaaagcattgataaaacgaagaaggtatcatcagtatgtcatacatcaacagcatggtgtttagaagagatatgaaaagcaaactcacctgaaaaacaacaccaaaagagcctgtccccactacatgctctgcaatataactaacattctgtcaactcacaaataaaaattatgtcagaggaagtattag

SEQ ID NO: 280864 - DNA, 419 bp, Glycine max
  unsure (1)..(419): unsure at all n locations
agctntcttcatttgtcgatatggatgataatgtttgagaaatcttcggtgccttgtgtatactatcttctttccatgttttagttggaagaagctcatatttttctcacatataggacatgtatgatggcctttgacactataaccacttaaatttccatatgttggatagtcattaagggtgcaaaaaaccattgcacgcaacctaaaggtctgctgcagattcccatgccacacatctaccccatcttcccacaattntgtcaagtcttcgatcaacgaaatcaaatagacctcaatatcattccctggctgtcttggagccactatcatcatgcanagcattatgtacttttgcttcatgcacaatcaaggagggaagttgtaaatcattagcanaacagactatgaactgtgat

SEQ ID NO: 280865 - DNA, 474 bp, Glycine max
atctacatagagtagaagatagatcattgatccatcctccaccttgttgcgataacacaacaatcatagagacttctctagaatccttggctggtgataaagctatcaaacctcatgtaccattgccttggagattgtttcaaaccatacaaggacctttgcagctgacaaacatacctttcttttacttgaacttcaaacccttcaggctgtttcattagaatattttcttccaatcttccatggagaaaagcagtcttgacatcaagttgttcaagttccagatcttggtttgccactatagcaagcagaaccctgatggatgtatgcctaaccataagagataaaatttcgttgaaatctattccttctttctagctgaatcccttggcaactaacctagccttgtatcttatcccttccttttctaaaagaccacgtttcctcttgaatatccacttgcaacctaccaca

SEQ ID NO: 280866 - DNA, 408 bp, Glycine max
  unsure (1)..(408): unsure at all n locations
cataacctatgaaaacacatttgatagcccgaggatctaactttccccaatggggaccatgaacatgaacaaagacagaacatccaaagacatgactctgaagattggtcataatgggaacagacagataaaatgtggtcatgagttgagtaggactaacaccatttaaaacacaagaagttaacctatttatcaagtaagtagcggttagaacaactttccccagtaagatttaggaatagacatttggaagagtaaaactctagcaacctcaaagagatgtcgatntttcctttctgtaacccaattttgttgaggggtgtccacacaagttaactcatgaacaataccattatctttgaggaaattggaaagggttttattcacatactctctcccattattagn

SEQ ID NO: 280867 - DNA, 408 bp, Glycine max
  unsure (1)..(408): unsure at all n locations
tgtcattntggaattcaactggactataaagattctttctatttcatatgctggatttcacctgagaggactgcagaattgttatttaccaacttctgcttgattgctctggcaacatccttggagggatgaggagtgatttcaacattgtaatgatatatcttctgtgatggatcaaattgcaccaaaaagtggttggcaagaagagagatcacagagccttctctgccaccagagtctggcctacttgcaacaagtactgcatgtggcttccttgctggaatgagtttcttcccatcatctcctttcaaggatgcctttgattgctgctgaagttcttttggagctgaatcagtataagaaacaagatggttcatcaatttcccaatttactttgatgcctatcga

SEQ ID NO: 280868 - DNA, 429 bp, Glycine max
  unsure (1)..(429): unsure at all n locations
agcttctatggagactgaatctttgagcttcaatgaggtccttcaatgatgatttttcaccatggagatgcagcagaagataaaggaaaagagatgagaggaggcgatatccattaagaaataagccatggaagaaggagtttcgtcaccaagaatgtgccttggataaaaagcttggagagaatgtttcaatggaggaaaataaagagagagagagagagagaaaaagagagaaggggagcacgaaattgaaggaggaaaagggggaaagaagttgaactttgagttgtgtctcacatgactctcattcatcanagttacaacaagtgttacacatgtttttatttataagcctatgtagtttcttgaaaaacttccttgagtaagttctttgancagctagagtntagttataaacacccttctaat

SEQ ID NO: 280869 - DNA, 464 bp, Glycine max
ctctcttccatggcttattccttaatggatggtgcctcctctcacctcttttcctttgtcttcttctgcatctccatggtggaaaatcaccattaaaggaccccattgaagctcaaagatccagcctccatagaatccctctttgtaaacaaccaaaatttctcaattgattatttttccttgtttgttgattgttgcaattctcttagtgtagtactagttgaatgaaatagtgtgttaatctctcctctccatttctctagtttttattttcgacttgaatcctttacgaaccctattctacaagttgttgaactatattccaaatttctaccttgtgcaactatggaacataaaattattaaagggattttagaattgttaatgcattctgtgtcaatttatgattgcaatttgagtgtttaaccatatagcctgctaccgacgcaagatagacggacaca

SEQ ID NO: 280870 - DNA, 417 bp, Glycine max
  unsure (1)..(417): unsure at all n locations
agcttgacatgctgccattttatcaacaatatattctgcttcacatgttgacaaagcaactacactctgattcattgagcaccaagagattagtgatgttccagaattgaaaacatacccagcagtgcttttcctatcatccttatcaccacaccaatctgaatcactataaccaaacacttctccttttatattcttctgactgtaaggatataaaatgccaagatccaatgttcctttcacatacctcagaatcctctntgctgccaagaagtgaggtgcctttggtttctccataaacctacttatcaacccaacacaatatgcaatatcaggtctagtgttacatacgtatctcaatgagcctacaatttgcttgtacaaggtaggatcaacttctttctcatccccatctat

SEQ ID NO: 280871 - DNA, 472 bp, Glycine max
  unsure (1)..(472): unsure at all n locations
ntacattcaaatgcaaggataaaaagacttgattgaatggacctctcatggtctcaagtgtgtttacaactcaataatcatataaccttcagataaactttgcttaagaaacaaaaactgaggtttgtaagttgtaaaagttcattcaaacatttattggatctgagaacacaaggtgggtatatatagagaaaatagttataaccatctgtaattgattaaattggcaatgtaattgattattacgtgaaagtaatcaattatattttccaattaatcgattaaagtgttcttccccaattctagaaaatataattgattattttcacataataattgattacattgccaatttaattgattaaagtgttcttccccaattntggaaaacattcaagaacaatgtaattggttaaagttttcttaatcacttctaggaacactttcaagaatgatgtaatcaattactata

SEQ ID NO: 280872 - DNA, 403 bp, Glycine max
agcttcaccggatgacgcttatcgaacatttcctaaccgacgtcatgcaaatttcgttcacggattgaattgaaaactcgttaggcgacatctgtcgtgaagtagcgaccgatatttttcaaccgacattgcacaattcttttgataaaaactagctgggcgataatggtctttttacggcagagtaagttttcttgttttggtgttgcataaaaaagctacaatgtacttcggctaggtttttcgtgcgagttcaaccgacattttgtttcggccaggataacattatcccacctctgcaaaaaaatatttgctaaccgtgtgcatgcatatgtcattcaacgattgaatagaatactcaatagccgacaacggtcgtgaaatagtcccgactgatattttt

SEQ ID NO: 280873 - DNA, 446 bp, Glycine max
  unsure (1)..(446): unsure at all n locations
ntgatgcaacatttggagaggttaatgaaacaacgagatgatgcgctccatgagatgttggatcttatggagaatagagatcataatgaagaagaaaggaggagaagagggaatgatggtgttcctagacaaaaccgaattgatggtattaaactcaacattcctccatttaaaggaaagaatgatccggaggcctacttggagtgggagatgaaaatagagcatgttttctcatgcaacaactatgaggaggaccaaaaggtgaagcttgccgccacggagttttccgactatgctcttgtgtggtggaacaagctacaaaaggagagagcaagaaatgaagagccaatggttgatacatggacggagatganaaagatcatgaggaagcggtatgtgccggctagttactcaagggacttganattcaagcttcanaaactaac

SEQ ID NO: 280874 - DNA, 417 bp, Glycine max
  unsure (1)..(417): unsure at all n locations
agctntctgttctttaaggtaaaggcaagttaaaatgggctacaaaacaaacactttcaatgaatggcaagaaaatcaaatgcttgtttgactacttcaaatagcaaacccctttggtaagtcaagggatgcctgagttgtaaatcccttcaccctttgattctcacggataaaaaaaaaatcctttggtaactntggtcgatttgttttatctaattatctctctttgttagtagtggtgcttgttcagagttacacttgaagctaaagtcatgcttaacaagacgtgcgacccaacaaaaagatactgctatatctgataagtttatattntgtattaattnggtaatggttaccgtccaatggaagttatttcgtgcgaaaaataatccagaaagggacaagagcatcgctacg

SEQ ID NO: 280875 - DNA, 466 bp, Glycine max
  unsure (1)..(466): unsure at all n locations
taagtaaatntagtactaataaactttactggcatggccaatttaacccncaacaagagctaggggtctatgggaaaatgctacaaaaagaagtgaatccagtatgttttatttctagaatctctggcttgaactaagcaaaattcattaaaattccagaaaggagtaagcacataaataatttttagaaaggaacctacaaactcaactagctctaatcaaggaaacatgaaaccgcactatggggatattttaagaaagaatttcctgttaagaaatttgcacactcaagtcaaagcaatgtcaaacttgtaaaagggtagtggagctgatacctggaagaagtttanaaaacctcatccttaaaccaattcctatatggnagttcacaaagccttacagacatggtgattaanaaaactgcctttccactttatatagtagtttctcatcanacatttacaat

SEQ ID NO: 280876 - DNA, 411 bp, Glycine max
  unsure (1)..(411): unsure at all n locations
agctntgtgtatcacactgctttcgatggtgttgcattgggaattgtaagctgtttctaccctttaacatcatctatacttgtttcatttttattttctttcattatgaataaatatacacaagattaaataatttcttcttggtataaggttagacatattgagtgaaaacaggattttggaatataacactcaattagagtcatagacctaaagatgtccttggctgttttagttttgtaattgaccagctctagacattctagtactggcagcaccagatcagaatttaaaatctgagtgctattggggctatatctgatcgggcttgaatgttgacttcactgagttggatttgtattcactttaactagcttacaactaacattctttcctttgttgcatatagta

SEQ ID NO: 280877 - DNA, 464 bp, Glycine max
  unsure (1)..(464): unsure at all n locations
agtcaactgtcatttatctatcaatcttcattccactntgtttcttcttcttttacaatatctaaatcaatttcccgagtttgataagtaatgaatgaataacgtcaacctgcaaatgaagaactgatacaaatgtaacatattgtgaaataatatcaaagtagtttacgttgcatcaggctaaaaaaatatataaccaatttctttaaattatattaaatgaaagctgaaatataataaaaatatagaattcttattaaaattctattattatgaatttttcgcttgagaaattactgatacaattcaaaagttatagcacanatagctaagaaagatacttgactacaatctccaatgaaaagctacacgtacacaccatgaaattgacatttatatatacttataaattcccacgaactacttataccnggctaaaattacacagactaattaattaacct

SEQ ID NO: 280878 - DNA, 414 bp, Glycine max
  unsure (1)..(414): unsure at all n locations
agcttataatatatcgatacgctcaaaattaaacatcgaanactctcgagaaattcaaatggccgtaacttttcacacggatgtccgattcgggcgcataatatgtcgagaggctcgaaattgaacaacggaagctcttgagacattcaaatggtcataactcttcacacggatgtccgattcaggcaaatcacaaatcgagacgctcaaaattgaacaacggaagctcttgagaaattcaaatggtcataacatttaactcggatgtccaattcaggcgcatcacatatagtgacactcgaaattgaacaacggaagctctcgagacattaaaatggtcataacttttcacactgatgtccgattaaggcttataatatatcgattcgctcgaaaataaacatcggaagctct

SEQ ID NO: 280879 - DNA, 437 bp, Glycine max
  unsure (1)..(437): unsure at all n locations
tgaatcggacatccgtgtganaagttatgaccatttgaatttcacgagagcttncggtgctcaatttcgagtgtcactatatgtgatgcgccacaattggacattcgagttaaatgttatgaccatttgaatttctcaagagcttccgttgcacaattctgagcgtctcgttatgtgattcgtctgaatcggacatccgtgtganaagttatgaccatatagatttctcaagagcttccgatgttcaatttcgagcctctcgacatattatgcgcctgaatcggacatccgtgtgaagagctatgaccatcttgatttctccagagcttccgatgctcaatttcaagcctatagacatattatgcgcctgaatcggacatccgtgtgaaaagtatgacctttgaatatctccacaacttccatagtaatttcaacgt

SEQ ID NO: 280880 - DNA, 406 bp, Glycine max
  unsure (1)..(406): unsure at all n locations
agctttgatggtgcgtagcccaccatcttttcatagtagagtatcgataatgtgtctaccatcacgatcatcgtctccctttccatcattgggggtaccacctgngccgccagatccctccaccttttgggcgtgttctttgaaagatccgtccccctttntgcaaatgttctgtagttgcatcctatccagaaccatatcaaaattgtactgatactgcctaacaaaggcaaccattangtccttccaagaatggactcgggaagattccaagttagtgtaccatgtaacagctaccccagtaagactntcttggaaggaatgtattagcaattcctcatcttttgcgtattcccccatcttctgacaatacatctttagatggttcttgggacaagtagtcccc

SEQ ID NO: 280881 - DNA, 455 bp, Glycine max
  unsure (1)..(455): unsure at all n locations
tgcaatgaaagatattgtgtatttaggagtctggtgtcaatctagacacacaaaccaaggccataattcaaaataggtaagatagaaatgatgatagtcattggcacaaatattgacttctgtaactgctactaagcttgcaatggaagatattgtatatatagtaatgaactttccattcagtaacacaaatttgtttaatttgtacgctcaaatctattagcttgtgtgttcaacttgaaatcttaaatttctattttacatcttttatttggcattatgtaacaaaagatgcaaaaaaaagtttactaaacgtttatatcagagatgggcattggttgtttatatattgcttgtctggcacaccccanattcttttttgatntcctttgtccgtagattagagttgttntatatagttctagtttgttgaggtaaaatcaatattatacttg

SEQ ID NO: 280882 - DNA, 378 bp, Glycine max
  unsure (1)..(378): unsure at all n locations
agcttaatctcaccagctcgcctgngcgagttgggcggcaagctcctcctccatttttcctataaaatggcattgggggcttaggggaaggggttcatcccctttggcaatcagatttcacttaaaagtagtgaggataagaagaaagaaggagaaaatcaaggccgaggcgcttccgtaatgcttccatgacattntcgtaatcaattacgtgaacgttcttcgtcattcttcattcgttcttcgtcgttcgtcaatcttcaaccggttagttntttatttcgaagctttgaattcattctatgcacccttagggggccattcgtgcattatatggtttcatcttcatctcgtctactttcagtattctttttcttt

SEQ ID NO: 280883 - DNA, 399 bp, Glycine max
  unsure (1)..(399): unsure at all n locations
tgagtatctcanataggggaaaccttctttctatatccattatccccttctcctcctttatccatctctcctcttcttctatccccatcaacccgtaaagtgtaaagcctttcacagttgtgagaggctaaaccccattgtttgaagcctagtggccaaactcttctaatgtaatactttcctattatctatttaatgcaattatggnttttattggtcttttttgtgctttattgttgctgattgtggtttgatcacccatactcatgcattgtttaagaagtaatgcattggaaaatggttattntctaaagaactgggaaatggcatctaaatgaaatcatgtctaggaatagagtgatgctttgttagcctatttcttgcatctttaatcttaat

SEQ ID NO: 280884 - DNA, 377 bp, Glycine max
tagctttgttgctgaggacctatataacatgcaccgggttgtagtatatggagtctgttaacggaagagagaaaatcttacggttttgcatttttcagtttggtgttactattcacgtgcactgttcacgtagcaataaaaatttgttttctgcttcaaattgcaatttcattttctacttctgcccttgaattcgttatcttttctgctgattaatggaaggctgagtctccagtgttgctttctcttggtatacgactaacttttgatagaaatccttttccaagcttgtatagttcccaatttatggtcattgtgaagtaaatttggtaaataaatcttggtttatggttaatgttgtctctagaacatttcca

SEQ ID NO: 280885 - DNA, 457 bp, Glycine max
  unsure (1)..(457): unsure at all n locations
tcgtgtccaaggatgacaaggtgcagtacatgcaaagagatattacattccgctaaaacttaaatagtgtatgggcaggatatccagaaatcatgcatattgcattgtacataaagtcacaaacaagggtactcaagcatgttaatatctgcaatgtccatcacattntaaacagatcaaggaataaagtcaagagggttacagcatccacagaggcttcagctgcgcctttgaaatagccaatagatccctcaataagtcttctatatccttgctctggagcaattagatgtggctgataaccatccgcttccataacaactttttcgacattctttaacgaaagatggcgattaaatgggagctctcttaatgcagctggtaattggtggtcaaaaacaccatatattctatccccgccaggacgtctaatatacaagttggtacttagtcaaat

SEQ ID NO: 280886 - DNA, 377 bp, Glycine max
  unsure (1)..(377): unsure at all n locations
agcttctccttccatggattattctctagtggatgacgcctcctctcacctcttctcctttatcttccactataactccatggttgaaaatcaccattgaaagacctcattgaagctcanagatccagcctccatagaagcttctcaaggaagcttccataattntatttcttacataaaattacctttntgtccatgagaatcatntgtaattggtgaccatgaagatctttgtatgcttaaaatatttatgattctcacaacanattttcaagtttctttggagttctcaatctccttaatggaaattagtttaaaaaccatccttagttgttccaaaactggtaaaaaaagacaaaattcaccatgtgagacta

SEQ ID NO: 280887 - DNA, 391 bp, Glycine max
  unsure (1)..(391): unsure at all n locations
tcatgtagtgtcagtcgtgtcaattaggaaaacatgttatgtcctcttttccaaatagaactgaaacaagatgtaattatgttctttacactattcactcttatatttggggtccaagccgagtcacatcttttggtttcaagtattttgttacctttattgatgaatactctagatgtacctgngtttatttaatgaaagatcaatatgaacatttacctatattcatgtctttctttaatgaaatcaagacccagtttggaaaagtaattaagattcttgcgagtgataatgccaaagaatatttctcctctaatctctctttggtttaaccacacaaggcattttacatcaggccacatgtcctcatacaccacaacaaanatagtat

SEQ ID NO: 280888 - DNA, 427 bp, Glycine max
  unsure (1)..(427): unsure at all n locations
agcttattatcatgtagcatgtgagatccgaanactataatccctaataaaatcaagtggctgtgagtttgttggaggacttaaattccattcgcacacaaaacaaatttagaaaggaatgaagaactttaagtgagactaaactcatagtcgacctaaaaaaaatcaaagatcaagggatcttaatggaaagccaaaagatagttacagaaacctacacacaacacatttttagaaagggataaagaacttgtgagactaaactcatatganagattagcctcataagtgacctanaataccanagctcttgngatctcacccgagagccaaaagatagttaccaaaaccttcgcgctacaagcttagcacgtaacagtgagatcctaanactataatcccaaagaaaatcaagcagacgtgactc

SEQ ID NO: 280889 - DNA, 452 bp, Glycine max
  unsure (1)..(452): unsure at all n locations
agtatcntttatgatgaagcagctatgaagtattnttcactatgtgaggctagctgcataaatcanaagacaccattgttttctatcttcaactaaaccctttgctagtccatttagataaaatataaacataaaaaaaaaatccaggttttcatgtctactctagtcatgatgatcaggttttgggtaatgaaacacaaataactctgaaattttttgagagaactaaataagaaaaatcctaacaataaggggaaaaaaataattaagaaaatcaagagatgtacacattacagatgtacaagaaagcaggatagtgagacccctagatcaaccaaaaaaaggatatttagatttccaaatgtttttattatagggtttaggagactcagatttccaaatggttgtgcccctgatgttattcctattgagtaccatggtcaagtttacaa

SEQ ID NO: 280890 - DNA, 414 bp, Glycine max
  unsure (1)..(414): unsure at all n locations
agcttgtaaagtaaaatacttcttagatagaagtgtgatattgtaatagaaactgcaagacacacactaaaggggggggggttgagtagggtgtttaccgaagataaaagctttttgcaataacacagatagtatgaatcatacaaagataaacattggtcgtccactgaaaataaaaaattatgtagtgaagaacacagtaattgtctagtgacaagtaaaaagatctttaaagagtttcaaaataagcacttggtgtaaagtgatgttagaaaatataataagaatactcgataaaacaatatggagagaagtaaaaacacttggcttatactgatttgctcaacctgagctacatccagntctcatttactcactagtaaagggtgcactattcaagaactgataacaaac

SEQ ID NO: 280891 - DNA, 476 bp, Glycine max
  unsure (1)..(476): unsure at all n locations
tgtggaagataatgcttgngtggatttcgggcatgtcagatggctgccaagcgaacatgtccgtgttcctgtgtaggacatcagcgatacacctatgctcatggctggtgtcgcaacctacccttcgacgagagggcgaaggcaaaatagataagccaaatagttcgtctcccagggagaatacgagcgaagtcaccaccaacgtttattcgaggaaaatgttagaaaaactaaaaaaaggtccgcaaattttgaaaagaagggttcagaagttgtttacgcatagggaaggtattagcaccccacacacccatcacaagggacgacaaccttttaattgagtgtgcaaaaacgtgacttcaatattatttagtttcccttntatanttttattnttttagggttgacaagggtgtttcccttgctcctacgtatcttcaggtgcgatgagaaattcanacctatgtagctcttta

SEQ ID NO: 280892 - DNA, 422 bp, Glycine max
  unsure (1)..(422): unsure at all n locations
agcttgatttgtgagttgattctagccttagtttcacttggttatttctcaactcatttaaagggaattttcaatgtaagtgtccggttgaaacttgcctttntttatgattaaccgaggtcacggcatgaacaatcggttgaattttactttaaaggagattatacaagattacaacacaaatgatcgattgaaattcatttaaacattgattaagtgagccttaaaggatgtcccctccattatgctcagtgtaacaccaagtggatgtacgctccacttgaactaatccacaagagatgtactctctcttgttctcagtattacaacccaagtagatgtacgctctacttgtaccacaaaggatgtacgctccaatgtgttaagacaaagatatctcanngcggtagtcctttgaaatc

SEQ ID NO: 280893 - DNA, 471 bp, Glycine max
  unsure (1)..(471): unsure at all n locations
tgacttccatctacaggtaacagggatcatgaatacttgtgtatttcctcacgaaacaccttaacatgactggaaaaggtaaaagtctctctattagtgacaaaacaatgacatgatgcatttacggagcagtttaacgaggcgtgagtggaagataaccagcccacaataagactaacacttgattaactaggaggcaataattttgaatcaagaaggatcactaattcagaatcaacaacaaatattccaaatgaattctagaaaaaaaaacatgaccacaatgtacacacatatggagacgtcaaanatcgcttgattgggatagaaacatcagtaatcaaactgtttgacgtaggctctcaacacagagaatgaattatactcgggcttgcaagtataattgagttacttgactttagaacgcaacacaaagaaatgggttgaccagaactggaaggttagtcaaaa

SEQ ID NO: 280894 - DNA, 427 bp, Glycine max
  unsure (1)..(427): unsure at all n locations
agcttgcacttcaggatgtgtaatgctggtaaaaaattatgatactgaactacttgaataatcctcaagggtaatcctctggtcattctcttctgccatggtaatggctttaggtaattgagtggcagattcccttgatgatggtgaatcangtgataataagtcggaggaatgagtctcctcaagaatggatgcaactgttctatcttgcagaagtttccttctcctctcggtcctgttccttcgcaatgtagcttcaatttctaagtccaaaggaactaaattgtgtgtgggagatctatgcatatacaatactaacagaactgtggaacagacaaatagaaattatgagcgaatattcacaaaaacaatcaaagaataacaaataaagaatagacacctataaacgagctaacttcccaaataa

SEQ ID NO: 280895 - DNA, 473 bp, Glycine max
  unsure (1)..(473): unsure at all n locations
tgtgcatataggctntaatttactgctaatttggctttgttttttttgaaacaagatcaagtggaggaggagaaacatatatacatatcctttaaaaatggttaccatgcttgtcaaaaatacatatccttcatacacactacattttgtcaaattataacctgaccatacaccattttttgagaaagcaacttgaggctattgtggttcaagtgccctagtattttgcatgtgccacattcaaacagtcgttaaattcctttttttgtcatcaacatgaattttttctcataattaaaggatagaggaaatctcatggtctttgatattgttgccatagtaattcatttcaacaaggattgctgttagggatagtttggtgcttgaagaactgngtattgttgaatttgatttatttcctttttccctcattgccacactatcatnntttgttatgtactgtcttgtaacct

SEQ ID NO: 280896 - DNA, 413 bp, Glycine max
  unsure (1)..(413): unsure at all n locations
agcttctgctaccaganaagtgaccctgtttaagcattaaatgtacacatgaaactcaaagattcaatgtgagttgtcgggaccaagaagcttaacatgaataaagacataaaaaccacatattgtagagtaaaaaaatatttttaagctggttacctttgaccatatttataggcaaaaggatgaggggttatgtacgttataaatcaaacaattacaccgttagagatggggcatatgatgaaatctccaatgattagtttcactagagtaacaaaagcatacatttgaagcatataatattcctaatcctaccacaatattttagcttcttcaatatcagctgctaagacaaaatagatattctcgggtaagaattaagaattcttaccaagaagatagaaatatataat

SEQ ID NO: 280897 - DNA, 425 bp, Glycine max
  unsure (1)..(425): unsure at all n locations
nggattgattcagtctaactagggatcaaggtttagtaatttatgctacaacatacaacacatatgcatgattgagtagagaaacatctttatatgcatcagttggtttgttagaaagacccaacacctttacctactgctgtcaatcctacttacttgcatttttactgtttttagcctagacttagtttaattttattttaaaccatcaattatcaatgtttctttcaacaatgccttatttttgaatttaaccctgtctaatactagttccctgagttcgatactcagattcatctgtcttaattttaaatacttgacgatccagtgtgctttccagcaaaccgaattttccttanacatatttgtataaagaaaaattggaccataaagtaactgtaggggacatccaacacagtacttat

SEQ ID NO: 280898 - DNA, 408 bp, Glycine max
  unsure (1)..(408): unsure at all n locations
agctttcatcaaattcaaacgacaataactttnttcctcagatgtctgattgagacccgtaatatatcgagacgatcgaaattgaattctgaagctctgagctaattcaaacgacaataatgatttgctcggatgtctgattgagtcccgtaatacatcgagacgctcgaaattgaatgttgaagctctcagcaaattcaaacgacaataactntttactcggatgtctgattgagtcccgtaaaatatcgagacgctcagaattgaatgttgaagctctcagcaaattcaaacgacaataacttttttcctcagatgtctgattgagactcgtaatatatcgagacgatcgaaattgaattctgaagctctgagctaattcaaacgacaataatgatttgctcggat

SEQ ID NO: 280899 - DNA, 340 bp, Glycine max
tcagaattcaatttcgagcgtctcaatagattacgggactctatcagacatccgagcaaaacgttattgtcgtttggattagttcacagcttcagaattcaatttcgatcgtctcgatatattacgggtctcaatcagacatctgaggaaaaaagttattgtcgttggaatttgctgagagctcaacattcaattttgagcgtctcgatgtattaccggacttaatccgacattcgagttaaaaggtattggtggttgaatttgctgagagcttcaacattcaatttcgagccgctcgatattttaccggactcaatcagacctccgagtaaaaagttat

SEQ ID NO: 280900 - DNA, 381 bp, Glycine max
  unsure (1)..(381): unsure at all n locations
agcttcatgttgctcattgactccaaattgctgcanagaaggacaaagatttgtatggcgatttacagaagaacatagaccacagactcttgcaacaagtgcagatttctaattcatggaaaactgagtgactaggttgaccgaggcatcaattnttcccttaagccttttattttcagtagatgaagatgaatctgtggccacctcatggactcctctaaggacaatagcatcatttcttgcactgaattgttaggagttggaagctatcttctcaatcaaattcctggcctcagcaggggtcatatcaccaagagctccaccactggcagcatcaatcatactcttatccatgttgctaagtccctcatagaaatattg

SEQ ID NO: 280901 - DNA, 420 bp, Glycine max
  unsure (1)..(420): unsure at all n locations
tgaagtgagacagtgtggaagagtctgtcttcctacttttattcgttgaccacagagtggtacctggagatatgtcgcggnggtcaagagaccttgaggacgtcaggtggggtgctatttcccaaaacgaagcttgaccaatcccggcccaacccgggcatagtcagtcagtgagaacctgtgacgtacctaaacaggcgagctcctggcagtcaaccgataaaagaacaaagaccacaaagcaaggaggcttgtgtggtggctggccagctatggattttgagtgatatatggaatatggcctctggtaatcgattaccaagggtgtgtaatcgattacaaggcttataaatgaagacaggaagttaatatggtctctggtaatcgattaccaatggtgtgtaatcgattaccaggcct

SEQ ID NO: 280902 - DNA, 403 bp, Glycine max
  unsure (1)..(403): unsure at all n locations
agctntataagcgcgggtctgggagacaaaggtcaagtggtcgcgatatgcgaagatgatgttccgagtacattggatttggtacgaccatgccctcctgatttccagctgggaaattggcgagtggaggaacgccccggcatttacgcaatgagcataatgtaaacctttacggtttttaaaagctctatagttgggcctaggctntagagtttttccttttgttaaggctctgtgtcttttgtttttgaatttctaatacgaggacctttcttcatctgttcctgcgtctctacccattctcattcatttgcatgttcacttctttttttgaaacggcagatccgatgacgagtcccccgaaggtactantacctgggacccgcttatcgacttcgagcaa

SEQ ID NO: 280903 - DNA, 384 bp, Glycine max
  unsure (1)..(384): unsure at all n locations
tgagatgaggaagtgtcgaaaggtgtaacttcctgctcttattgttgaccacagagtggtacctggagatatgtcgtgggggtcatgagaccttgtggacgtcaggtggngtgctattgcccaaaaccaagcttgaccaatcccgacccaacccgggcatagtcggtcagagagaacctgtgatgtacctaaacaggcgagctcctggcagtcaacagataaaaggaacaaagaccacaaagcaaggaggcttgtggaggctggccagctgtgaactttgtgtaatatgtggattatggcctctggtaatcgattaccaagggtgcgtaatcgattacaaggcttaaaattgaagacaggaggctaagatggtctctggtaatc

SEQ ID NO: 280904 - DNA, 420 bp, Glycine max
  unsure (1)..(420): unsure at all n locations
agcttgcttctacactcaggaagcattatttgccatcaacatgttgtggtaggttttcaattccttgcgtcttctcctctttttcgatgcctctatccttcttcgtttgcctcgttttcattgcaggagaaattccttgagcaattcatgcaggaagcttatgctttttgtgttcgggaccgcaagaaatgcctcangtatgatcacctaggtaatgttntatccataagtgagttcaatgatatttaaaattgggtcgatactgtagtctagtagtgtttgttgtaatgtagtgtataattgtgaaccctagaaagaacataattgttgcctgggggtgattttgtanattagtgtgtatatatattntgctgcaatcaanttaatgctntataatgtatcattctttttacatctgat

SEQ ID NO: 280905 - DNA, 447 bp, Glycine max
  unsure (1)..(447): unsure at all n locations
ntgatgcaacatttggagaggttaatgaaacaacgagatgatgcgctccatgagaggttggatcaaatggagaatagagatcataatgaagaagaaaggaggagaagagggaatgatggtgttcctagacaaaaccaaattgatggtattaaactcaacattcctccctttaaaggaaagaatgatccggaggcctacttggagtgggagatgaaaatagagcatgttttctcatgcaacaactatgaggaggaccaaaaggtgaagcttgtcgccatggagttttccgacgatgctcttgtgtggtggaacaaactacaaaaggagagagcaaganataaagagccaatggttgatacatgggtagatatganaaggatcatgaggaagcggtatgtgccggctagttactcaagggatttgaaattcaagctccaaaaactaacc

SEQ ID NO: 280906 - DNA, 253 bp, Glycine max
acgcatgtagctttgttattgaagttggtttctgagtcaccaactaatattttaatgacaaccacagaatataacttcgatctgatccaattaagtcaattattagtaacaaatttgctttcaactccagataaatacgtattatatatcatacggtgaaatgtgtagtctctgctgctaaatcaactaattaataccacttacgtgtatggacgtaaagaataattatataataatctatatggaaactatg

SEQ ID NO: 280907 - DNA, 435 bp, Glycine max
  unsure (1)..(435): unsure at all n locations
tgttgacaccttccncggccaatctataggtatgtttcctattgggaactcaagaatcctttgctttgcaaatgatctatatgtttcacaccccaaacatttgggtaactcattgatatttaatacaaacttttattatgcagattagcagggtgaagctccaattatgattaaaaaacagcatgaaaaaacatttaagacactacatttaagttttgtccatgtaattaaactttcatatttgtcccttacattataagcaacaatcactttaatcctgattctttttaagggtaataatatgtggacacctttacagactatttctctttatatctcttatcctatcacatcatatatctcagctatcatgcctacacttttctctaggtgtcatttagctcttagatgtccttacattacaataagactaat

SEQ ID NO: 280908 - DNA, 402 bp, Glycine max
  unsure (1)..(402): unsure at all n locations
acttgttttaagatgaatatataaatcttacttatcaaccttaaaatttgtcatgttgattntatatatatatatatatatatatatatatatatatatatatatatatatatatatatatatatatatatatatgtcgtgtctttgtgtcctttgttttgaaattttgttgcgctctggtttatccgcgctcgtttcgtgttgtgtctgagacaatgcattttgttacaaaatcatccacatacaaaatacaggaaaccatctgtccactctcccattcacacacacacacacacacacttactntatagccatganattcggaagagagtgagaattgacgctcgcttcacagctccctgtgatggcgcttgagtgatgacactcatagaggtgactagg

SEQ ID NO: 280909 - DNA, 424 bp, Glycine max
tatagaatatataatattaataacaatgacaattgaagaatctatacatgtttcctttggtgagtctaattccattcttccaaggaaggattttttagatgatatttcagattccttagaagatacacatattcatggaaatgactctaaagaaaaagatgaaggaagcactgaagattctcaagataatgaagttagagcacataatgaacttccaagagaatggaaagcctcaagagatcatcccctcgacaacattattggtgatatatcaaaaggtgtaacaactagacattctcttaaagattatgccatgatatggcttttgtatctatgattgaacctaaaaatatacagcacttggttcgtcagcaagcggccaaccaccgggggcaggtgcagatacatgactgtctctaccagc

SEQ ID NO: 280910 - DNA, 428 bp, Glycine max
  unsure (1)..(428): unsure at all n locations
agcttgaggtttcaattgctggaacacaaagctaccactctcctcaagaaaaagatgtagaatctataaccaaagactcagaaaaagggggtcattccgaaacatctcctgtggttcttcaaaaaggtgagaaattagaagattccaatgcaaatgtgtctcatttagctactgaacctgatcctccacagctcaattctagaatcaatcagagaccaaaaagggtcactaaacctcctgaaaaatatggttttgaagacatggctgcctatgcattacatgcagctgaagaaatagattcaaatgaacctgccacctacaaagaagctatcaatcatcctgaagctganaattggttgttagctatganagagganatggaatctttatataagaatcatacttggaaacttgttgaactacctaaa

SEQ ID NO: 280911 - DNA, 478 bp, Glycine max
  unsure (1)..(478): unsure at all n locations
tgtaggattatggagtgcccgtcacatgtggtactaggtggcgatcgggcgatggtgcaagttgactctccacatccacaaatcacacataaatccaccatccccagttgcccaccttcaactgagctcacgtactcccacgtagcccttatcctcattcctctcagcaccgggtccccatcaacccctccaagcttcctcaatatccaagcaattcaatatccaaacatcatgaactaccctaaaccaagaaaacagggtagaggcaganaactctgcccaaaaacacattccaataccacagctntccttactcaaataccccagtaacattctctttgttccgattcgttaaccgttggatcgacttgaaaatnttactggaggtccctagtatataagtctacattntgaccgtttgatctgctagaaaatgtccagaacccaatatgtactacccttttcacaaccagcaata

SEQ ID NO: 280912 - DNA, 427 bp, Glycine max
  unsure (1)..(427): unsure at all n locations
agctttcaaaaatattaaatacattntaaaacattccaataagcattntggccactggtaattgattacagtcactggtaattgattaccagagagtaaatatctcttttaaaagcttttgagaaaaacctttggccataacttatgcatcatcaatttggaaacttctttcaaagactctagagactaacttcatcatttatcttggatttcttggagtcttgttttggatcaaacttgagaagtccgtttctttggcatcatcaaaacatcaagatatctttgcttctacaccttgctttgatttataagtggatggaagttggaacctaattggattgtgtctctgagtcgaccttggttattcctatactacaaaattgttgaaattcacgtttgttntgagacgattcagcattgtcatcac

SEQ ID NO: 280913 - DNA, 447 bp, Glycine max
tgccgcccagctcacccaagcgagcaaggttgcttcctccataagcaacagccttctggaggaatcttctggagggcccaagttggcctggttgctatttgcacccccctttttactaaatgcacctccttctattttttttggtaattctttttccgtaacgttacgaaactttacgaatttcgtaacgatacttattttccttccgcaaggttacgaatccttacggattatgtatttactcttttttagctttcgaagaagttacgaaaacttacggattgcgcaaaacacctcttttcgatttccgtcacattacggaatttcacggattgcgcaagcctgcttccttttgatttctgacacgtctcgggacttcattcattgtgcaaccaaggatgccaagtgtcccgaagcgaccaatcaaaggttgtatatcatcaaata

SEQ ID NO: 280914 - DNA, 294 bp, Glycine max
agcttccatctctattcactcagaggtcagattcgggcacataatatgtcgagatgctcggaattgaaccactgaagctctcaagtaattcaaatggtcataactttacacacagatgtccgatcttggcgcatactatgtcgagtagctcgaaattgaacatcagaagctgtcgagaaattcaaatggacatagtatttcacacggatgtcatattcgggcacataacatgctgagatgctcgtaattgtaccacgaaagctctccagtaacttcaaatggtcataacttttt

SEQ ID NO: 280915 - DNA, 419 bp, Glycine max
tgaatcggacctcagtgtgaaatgttatgaccattttaatttcacgagagcttccgttgttcattttcgaacgtctctatatgtgatgcgccttaatctaacatccgtgtgaaaagttatgaccatttgaatttctcaagagcttacgttgttcaattatgagcctctcgacatattatgcgcccgaatcggacatccgtttaaaaagttaagaccatttgtatttctcgaaagctatcttggttcaattccgagcatctcgacatattatttgcccgattctgaccttcgtgtgaaaagttatgaccatttgaatttctcgagagcttccaatgtttaatttcgagcgactcgatatattataagcatgaatcggaccttagtgtgaaaagttatgaccatttgaatttgtcaagagc

SEQ ID NO: 280916 - DNA, 427 bp, Glycine max
  unsure (1)..(427): unsure at all n locations
agcttaggctaaattaggctaaacttttgtaagctacttgagctgagtttagtcttacatgagggatctgcggaagaaactcagtttaagttagtctaaacctaagagggctatctaaatcaggtcgagtcttacatgagggatctgcggatgaagctttgatattcagcctgacgagggatcgaaggtttagtaatttatgctatagcatagaacacaagagcacgattgattagagaaatatatttccatgcatcagcttgtttgttataaagacccaacatttctacctattgttgtcattntatttaccttgcattntatagtttttagcataatagtttattttaaattntgtttgaaattatcatttatacatgttctctcaacaatgctttgattctgaacttaattcaggctaacatta

SEQ ID NO: 280917 - DNA, 471 bp, Glycine max
tagggatggaacacttacttgttggtgatgaacaaaagcgcataacggaatcaaaaaatgcgaaaaatgatgaccctagggctgcaaactcgtcaatcccgtgggtatggcttttgaaaggggggaaaagaagtttttgaatgcaaaaacgtcccccctttcatcattcttataatttggtgtaggggtggctcgcccaggcaagctcagctcgcccaggcgagctaacctgcattttttttttttttgagaggaacattaaccatgtcccctccttccttatggtttagcgtcttgcttaacttgaacttacttaagttagagttaggcgttgattacttatttttaaaaaaaacaaatagtaagacaactgcgaatacaaaggatacggggctgccttgcagcgacgttctctgcttgtctagcgcagagaatagggcaacgatcagtcggtcgtgacctcatccccac

SEQ ID NO: 280918 - DNA, 426 bp, Glycine max
  unsure (1)..(426): unsure at all n locations
agcttctgtccctgagaatctggttcccagaagacaacagggagtgaagattgctgaaaaccctagccttgcaacaagttctagggaagtagacacggagatggacaagaaaatccgcggtattgtgagtagcattttgaaagaagcttctgtgcctgatgctgagaaagatgttccaacatcttccaccccgaatgtttctgtgcctgatgttgagaaagatgttccaacatcttccggcccaaatgctgaagccctcccttcacccagtgaagaggaatcaacagaagaagaggatcaagcctcanaggagactcctgcaccacgggcaccagaacctgctccaggtgacctcattgacctggaagaagtagaatctgatgaagaacccattgccaacaggttggcacctggcattgcggaaag

SEQ ID NO: 280919 - DNA, 476 bp, Glycine max
  unsure (1)..(476): unsure at all n locations
gcgagcttgtagagaggctaggctacaacaatttattggttattctaggattcaaatgtttatattntaagagagcacaaatcatagacttatcccaatgatcttgtatcatacaagtagctttctcactatcttttcctcttaagttgcttttgaccttattgtaacaacacaatttattctttttttttaacatacaacttatttgttgtgtgtgctgatgcttaacctttatcttttcattctaattgacttccctcccccaaatttagagtaactttgccttgaaccatatgctctcctaaaatctaaacaaggtattaggagataattatttaagtttagggttcaattcatgacaaaatcatttagcttatacagggagcaaaggatgcaattatcattcaaggtaagctctttggtcaaaaggcttgtgtatgtacaatcatggccttcatcatgtcctcatttataca

SEQ ID NO: 280920 - DNA, 404 bp, Glycine max
  unsure (1)..(404): unsure at all n locations
agcttagataagtgttgattttcaccttctcgctaagccaatctgctggcttagcgagcgtccgctaagcacaacactcatgggctaagcgcgaggaagactctggaagaagatgagttgtacaggtttgctaagcgcaccgcttcatctcactaagtgcaccgcttcagtccatccgctaagcgagaaaggcacacgctaagccaaaattcactaatatgcgctaagcggtccataattgcgctaagcgcacgagcacgaacaaggccacctatttaagctagaaatcagattttgtgaagatagtttgngctgggattcagagctntgcatgtctagagattctagagagagaaaggtccaagttccagagagttttgggagattttgttgtgtgaagatct

SEQ ID NO: 280921 - DNA, 327 bp, Glycine max
tctcaaggaagttgtctcaatatagcttctcaaggaagctatttactctataaatagaagcatgtgtaacactcgttgtaactctgatgaatgacagtcttgcgagacacaactcatagttcaacttctctcccttttttcttccttcaatttcgagctcccctttctctctttctctccctctttcttttcctccattgaagcatcctctccaagcttcttatccaaggcacatcttggtggtgaagctccttcttccatggcgtattccctagcggatggcgccgcctcttacctcttctcctttggcttgcgctgcatctccat

SEQ ID NO: 280922 - DNA, 404 bp, Glycine max
  unsure (1)..(404): unsure at all n locations
agcttatcttacctatttatctcccagntgtctttgcaaagattcaatagataaaaaacatgaagttctaattcaagatgttntctttgttgcatgggcataatgcaatcactctatgtctagcaatgattntattaagatgtccctacctttgagttctactaaaaattatcctctctcgagcgactaatctctaaaactgatgcatataaaaccttcaatgtatttctactaaggattaccctttttcaagcgccaaacccctaaagatgatgcaaggatgaagcatataatacatttgttggcattntgggcctgccaagccctaactaaaggggtttagcctttcattgtcatgagagactcttacactttacgnggttgatatggatggaagaagatgg

SEQ ID NO: 280923 - DNA, 438 bp, Glycine max
  unsure (1)..(438): unsure at all n locations
ntacttgtgatgagcaagtttccnctagccatcgntgtccttataagcaacattttgttctacagtgggaagaagaggatgatcctgcattacaaccagatccaccagacgaggttgagacagttggtgaccccagttttcaaattcatcatttgtcttataatgctttanaaggctcatcaggtcttggaataatgaagtgcagattgcgagtgcagattctactagatagtgggagttcagataacttcctccagcctatactaactcaatgcctgatgttacctgtagaaccaattcctaatttgcaagttttgggtggaaatggaaatgccttgactgctgaaggattaattcaagacttggaggtgaacatccaaggtcatacactgaagctaccagtttacctactttcagcttctggtgctgatctagtgc

SEQ ID NO: 280924 - DNA, 412 bp, Glycine max
  unsure (1)..(412): unsure at all n locations
agcttgttattcttcttctcttcatgtttgttgtgagcaaggaggttcatcttctcaacaacttttgttgtaggtccattcaaatcacattttagattttgaaatggttccttctcaagtgacattgttttcaacttcacggcttcttccaaaacaacaccagtggctttttccattccacagggaaacttttatccctcattntaatggacataagctcacagccggaaggatcanatatagtgtagctcatattnttaaaaaacaatgaataattcctttctagcatttgtccaacactcanaagattntgttttatctcagacactaataacacatttganatatantttgtacctgctggagtntcaacagcgacaactncttttcctttacatcaacacattcttcg

SEQ ID NO: 280925 - DNA, 367 bp, Glycine max
  unsure (1)..(367): unsure at all n locations
agcttgtgtaaatcaaatcactcccgcattttatctctagcatgcattgtatgtgggtctcgtcctttgtcacgggaagccggaaggtccatatcaccttcttaattgtacacatggngcactgcgcccccaaatgcgcaagtaagaagagataattttccgggctctcgtgtccgtaaaatgcattcatatcatgcatcgcataagcatctcttcataacatcataatggacatatcctgcatttgtccgttatcatattccggcctcacattttgcatgagtcatggcatcatcatgcatatgcgttcaacaaacattttgatctgcaaaattgcataccatttgttntcatgtttgctcatcct

SEQ ID NO: 280926 - DNA, 400 bp, Glycine max
actcgggtcatgcggtgaacgcctctagttcaacacccgtgttgtctaaagtacccacccagagggaaactgcccaagtgtcaactccgaacgcgactcgaccggacggaattccaacgcgacaaggaacttccctccgaggccgttgccggaattcaccccgctcccaatgacgtacaaagatcttctaccatccctcatcgccaatcatttggcccgggtaactcccggaagggtcctcgaaccccctttcccgaaggggtatgaccctaatgcaacttgcaagtaccatggaggtgcccccgggcattccatcagaaaatgctcgcgccttaaataccaaggccaacatctaatggatggcagatggctgactctccaagaagatcggccaatgtga

SEQ ID NO: 280927 - DNA, 338 bp, Glycine max
  unsure (1)..(338): unsure at all n locations
agctntgccgatttagtgtttgctggcgaaaggatcgaagtgggtctgagaagaggcaaatttgaatatcctactttgatgaataggaagcctatggcaaatggagagaataagaaggagggaggaacccatgctatgactgtcattccttcatggccaaatttcccaccagctcaacaataccaatactaagccaatatcagccattctcattacccaccaccctatcagccaagaacacccaatcatccacanaggccacccttaaattatccacaaaacccgcctgctgcatatccaataccaaacaccacccttaacatgaaccaaaataccga

SEQ ID NO: 280928 - DNA, 462 bp, Glycine max
  unsure (1)..(462): unsure at all n locations
gttcgattcattctatgtacccgtagtggtccatattgtgtttcgtgcactttntttctcgttntgtttactttttataccccctgttgacgtgcttaagccattttacttaagtcatttctcgcttaacttaaaaataaaataaatttccaccgaacgtttgaattgtactatccattaacttcggttaaaataaattccgaccgttcggtcatgccgtaaccacgttggaaatcaaaaagaggtaaaaaataatataataatcaaaaagatatcttttagtaaaataaagcggaaaatcaagtggacattgtctctttgggatttctcattcttaatcgaattgattaataactaaagtgaaactaaaggctaaaaacaattcgtctagtcgagctcgtccataaaaaataggcttttgaaagttggcatttcattttctcactaagtagaatggatcat

SEQ ID NO: 280929 - DNA, 624 bp, Glycine max
  unsure (1)..(624): unsure at all n locations
tgngaaaaccgtctttggananccccntttttgganngcccatttcgagtncatctactatgagcnggcatcgtcgagtctacgagtacctgcgttggattcctactacgaggtcgatcactgccacagtcatagacgcatgcattagcttgtagtanagtaagcatacgtcacaatatatgctagcactgtagcatatagctgctcgntcggtcagactgactcttaatgngatctatagcgacatcttcacgacataatactgaggcacctagaatactctgcggtcttacaaggaaaacagatgaatcatatgtcatcatactacatgtcacaagtcgcgccacgatacaccgtggatccaacagtggatgtggatttagatatcatctcactcggctcttctanacactgagacatgaaatactgagcatcagcatgctggacgctttgcttgtacactggatttagctaatatcgtcacacgaagctgacatgatacacaaacaggcatctcatctagcacccctctgttcccgtgcgctttcataatatttgacagtctttaccgtctaccgtgctatttcgccgagacagagggcatatcgacgacgccaccactan

SEQ ID NO: 280930 - DNA, 453 bp, Glycine max
  unsure (1)..(453): unsure at all n locations
actcagctatctgctcaaatttcaagcncttatgattgctgagcatatgttagcacctaatttcaggaaaatacacaaaagtaaaatcaggtcataattttcatgcaacaatctaggtatgagtcattgatagccaccatcatcaaatattaaagagattacttcagaggtgatcattataaaataaaactgtcaaagagaacattttgtagtgtcacaatgtataaaaatgctcatacataacatgccccagatcacatagaagaacccacagcatagaacaagcaagaaaatggtagagctatacagtcctactaaagatagtgcaagagatatctaagagaaaggttaagcacattttgaccttaaaactcgtcttacacgatacgttcctttatttccttttcaagagatagagcaacttcttaatgtgcgagagacaattgtttgtac

SEQ ID NO: 280931 - DNA, 336 bp, Glycine max
  unsure (1)..(336): unsure at all n locations
agcttatctaattgtcactgtgagcacctttntaagactatgaatctacgagctacatctctccctctctttagtgaaaggaacaaaagaaattatgtgtctattgtctaacatgctaccctttttcagaaacatggcaatgtctgcttgggaattctagatggcactganataggactaggaaatactaacataattggaggtgagaaaatttcaaacaccactaaattttgaggaagacttgttttctctctttctatttgataattgattgtaatacattntgttttgctcttgacagatatctctttacaagataagttagtgatctatgac

SEQ ID NO: 280932 - DNA, 419 bp, Glycine max
  unsure (1)..(419): unsure at all n locations
tcatattanataatatataataaatcgttgtagtagcatttctcctaacaaatatagtaatttgacaacgttgatttaatggtgccctgtgggacaagattcccatatcttgagtgttttaagaattatggaatttttttttacttaaattatcaaagctatactaagaaaggatcattgttttttttttttttactgcacaaaagggtcattattaaacgtagggagtgtgtgattttttaaaactaaaaactaaattcatatatttttttaaaataaatataaaaatgttttaaacacgagttccattttgggtgaacaaattgatacatataaaaaaaaaaatcagaggtaactgcactctatatctaagagtgcatttggatagagaattctaactaaagaaagtaatttatcaa

SEQ ID NO: 280933 - DNA, 372 bp, Glycine max
agcttatgataaacgggaccatagagtgacacgtaagcctaatcggctacgctgaatatatgaccgtcccaaattcgcaatcattgatcgaaacatctactacaatggcctgactaatacgaacactcgcaccgatgcgtgaactgatactacgatgtaaaactatcgagctcatgtgcccgtgcattcctagcgtatcagagacataataccacttccattctcaaattgtattatgtatggacaacacatatgtgtagcttgctagaaatccagggtcactgaaccatcagttaagcctgcggagatgtatgggcagcaacgtttcacaaatgcctgtgttgcccttacatagtccaagctatgataccg

SEQ ID NO: 280934 - DNA, 229 bp, Glycine max
tgcggtgtgagattgccaagttgcttgacactgggcacgaagccacggatcgcattaagggctacatgatttccatacactcaaggagacaattagcggacgccgccacatcagcgatactagatatcgagctcgcattgcgaccgacgaccgtaatacgatctggcctttgattccagactcagggatgcctgccgatcttgaaacctcgcttatgatgtacagtgct

SEQ ID NO: 280935 - DNA, 399 bp, Glycine max
  unsure (1)..(399): unsure at all n locations
agcttgaatggagaagacacctttntgacaatgaggtgcaagcggcagccagtttcctggatgatatctcgcggngtcatattgatcggtggacatcagactgctgggtttggaaaccagaacctaatggccagttttctacaaggagcgcataccgtatgctactagaaggagcagctgatcagactgtggatgatgctttagaggacctatggcagctcataatccctttataagcatcaacatttgcttggcgattgatcaaagagagactcccaactaaagggaatttgtggagaagacgggttcagctgaacgatttgatgtgccccttctgcagtagacaagaggaggaagcctcccaccttgtttttaactgtccaagaattctccccttat

SEQ ID NO: 280936 - DNA, 476 bp, Glycine max
  unsure (1)..(476): unsure at all n locations
tggatgcaagagttagcttggctcccgaagattaagacattttgtgaggaagaggttgaaacccctgaggagagtaaggtggtgcaagccttgaaggaggaacttgaaagagtgcaagtgtcgcaacgtgcccttttgcgggcgagcgaggcgaggctcacgggtgcgttttccaaaggaggaaagatgcgcggagtcgccaccgacgtttatttgtggaaaacgtcggaaaaaccgaaggaagccgatcaaaatgaaaattctaagtttgggagttgtatttacgcttgaggaaggtattagcacctctcacgtttgtctcanaggacaacagcctattntttagaattgtggaattgtgttatcttaactcttatttctttatatttnttgaggtcgacaaaagcggggctcttgctcctacgtaccctccatcagagaggaaatcagacctacgtagttcttccttatgcgtg

SEQ ID NO: 280937 - DNA, 427 bp, Glycine max
  unsure (1)..(427): unsure at all n locations
agctntaggagaaaccattaaaactaaagtagttcctaaacaaaaatcaattgagggagcctcgccaagtgtccccatcgaaattgaaaaacctttattcaaacctttcaaagttagtgagaaggctaaacggaaaattagggaacttagaaaaactaaatccttaactgaaggcgtaggtgacaatcatagtgaattactaaacaagattggtagtttacttaaggtcattccagatactccccaagcctcggaaaatacttctaaaatggtaacaagaagtacctccaaattaattaatgttattaatgaagatagtgaccaaaactcagataacacaactgagataggatcagtatcagagaagaatataaatccaattaattccaaaaactggaaaacaccctccaaattatattatcaacgt

SEQ ID NO: 280938 - DNA, 465 bp, Glycine max
  unsure (1)..(465): unsure at all n locations
tctcgagagtctgccttaaccgaaggtagtcattaggtctttgtagcctctggtttccactctttctcctacaaagccgaggagttatccacagtgtggttggactatatcagatgagactttgagcctctcgaatgtcctctagtaaagtatatccatggaactaccttggtcgataaggaccttggacaccatgaaattggcgatcatgatggagacaactgtcgcaacctacccttcgacgggaggacaaggcgagatcgaaaaaggcgtcttctcatgaagaaaacgtgcgggagtcgccaccaatgtttattcgaggaaaacgttagaaaaaccaaaaagaggtctgcaaattntgaaaataagggttctggagttgtttatgcatagggaaggtattagcaccccacacgccccgtcacaagggacgacagcctntaatcgagtgtgcataaatgtgac

SEQ ID NO: 280939 - DNA, 424 bp, Glycine max
  unsure (1)..(424): unsure at all n locations
agcttgcctttggtttagatgtggtttatacatgatttaggacttgtaggatccaatttgggcaaaattggatgagggcaacagtgatttcgaaatctgcccaatttgtgcagcaaaaagctgtcaaattttgtgcaacagaaaattgtgtttgtgcagaaaatgttgtgtattgctggttgtggaaagggtagtacatattcggttctggacattntctagcaaatcccaacggtcaaaatgtagacttatgtactagggacctccagtaaaattttcgagtcgatccaacggtgaacgaattggaacaaagagaatgttattgnggtatttgagtaaggaaagctgtggtattggtttgtgttttgggcagagttttctgcctctgccctgttntcttggttctgataatncatgaatgttg

SEQ ID NO: 280940 - DNA, 491 bp, Glycine max
  unsure (1)..(491): unsure at all n locations
ggcctataatactcagcttctaaggagtgagcttagttatgagaggggtgtgtgtagctaagctctagcttcttaaggaagttttctcaaagaagcttctcaaggaagttttctcaagaaagcttctcaaggaagctacctagtgtataaatagaagcatgtgtaacactttttgtaactttgatgaatgagagtcttgtgagacacaactcaaagtttaacttctctccctttttcttccttcaatttcgtgctcccccctctctctttatctctctctttcttttcctccattgaagcatcctctccaagcttcttatccaaggttcatcttggtggtgaagctccttcttccatgcttattccttaatggatggcgccgcctcttacctcttctcctttgtattccgctgcatctccatggtggaaaatcaccattaaaggacctcattgaagctcanagatccagcctncatagaagctccacaagc

SEQ ID NO: 280941 - DNA, 427 bp, Glycine max
  unsure (1)..(427): unsure at all n locations
agctttaatctataaaactagtgaaataaagcattcatcatataatagttagatgataaggttattattgaaaattaaatttgtaacatatactacttcattaatcaccgataaccgttatggcttctttatatatagaactagctatatatgggcttgggtttacagatcatttgtttaacccgttagttatacgggtttgagtccgtgggttaatgggccagttagtagacaaactactttttgtttaaaaaatattaattgctattttatacttttattctttaattaagtatttgcataattattatttggtgtttggtaatatacgtcgacctccttggtagtacttgaatatttatgatttcttgttgaaaaagttaaagatattgagttcttaatgctntatttgatttgacacttgatt

SEQ ID NO: 280942 - DNA, 420 bp, Glycine max
  unsure (1)..(420): unsure at all n locations
tgtatctgttgcacganaaagcaagcagaaaaatacgaacctgtgtcagttataccgaagtatgcaagaagcatatgatcaaatgcagactccattagcccgccaaataccacctgccttggtaagtataatcctatgattcccaattgacttgaatttgtgatctctctctcctttatcctatatcttgttcttcaagcaggggctaaaggagctgaaggaatccaccatccaactggcttcaagtcatggatacattgattcccctgttgatgagactgttttcgatgtggataacgatgttgatgaccttctgccagttgaagttaaagaacagcgcctcagcaatctgctgcaggcattgatggttgcggcttgtgttgctgctatgcctcttttgaagaagataccaacttcagt

SEQ ID NO: 280943 - DNA, 405 bp, Glycine max
  unsure (1)..(405): unsure at all n locations
agctntaacttgagtcatcaaatgattataaatatgtgaccatggcacgaatttcaagagactgatttccttttatgcataacaaatttctttcattcaattctcttcatctttctaaaagtttttgttcaatactttctctttcaagaaaagttccttgaccaaaaacttgtgctattctttntctttattccttctctcttgtcaaaagattgaaaggactaaccgcctgagaattcttttgtttcttcctttctccctcttaacaaaagatttcaaatgactaaccacttgaaatatcttttgtttcttacaaaagatttcaaaggaataaccatctgagatatctttnttccttttcccttanacaaaagatttcanaggactaaccgcttgagatatctt

SEQ ID NO: 280944 - DNA, 465 bp, Glycine max
  unsure (1)..(465): unsure at all n locations
tgaagtgagaaagtatggaagagtcatatttcctacttttattcgttgaccacagtggtacctggagatatgtcgcgagggtcaggagaccttgnggacgtcaggtggggtgctattgcccaaaaccaagcttgaccaatcccgaccgaacccgggcatagtcagtcagtgagaacctgtgacgtacctaaacaggcgagctcctggcagtcaaccaataaaagaataaagaccacaaagcaagaaggcttgtgtggtggctggccagctatggatcttgagtgatatttggaatatggcctctggtaatcaattaccaagggtgtgtaatcgattacaaggcttanaaatgaagacaagaagttaagatggcctctagtaatcgattacaagggtgtgtaatcgattacaaggcttagaaatggatacagggagttgagatgacctctggtaatcgattaccaa

SEQ ID NO: 280945 - DNA, 416 bp, Glycine max
  unsure (1)..(416): unsure at all n locations
agcttgctgtatatccacgtangaacaaaatcttaaataagatcggtccttatacaaaaaatatgatcttaaaaaatttgtggatcaacatgtttgtatttatctgacaaagtgataaaatgtaatggtgtgtagttatttgtagaactcatttaatacaatttgtaaagttaccggattagaaagataatgttcttagattattactcaagtattatatacaataaacataatacaaataatcaagatcaagaaaaatggtcaaattgaatgttatagattaatactattcaataaatttaaattttgtttctcaaatgttcttacatctaaatgttgtaaatgatatggtgatattaattttgacactcaaattcaatgcttgagtgaatacttaataaatagagttgataata

SEQ ID NO: 280946 - DNA, 453 bp, Glycine max
  unsure (1)..(453): unsure at all n locations
tctatgtaagataaataactacaaatatgattttctttatatatgttgccctattaagtactggaactgtgagaaagctaccaaactatgaaggtataatcaatggtctctctctatgttctccttgngattttgngattcttttcatctgtctagtcttggttgtggctacccaagaaattgggtggagctcatggctcttgtggaatggtgctggcagtctccatccaaaaccgtctccatcctgaagaatctctgtcacatttaatggctcagcctcagaanaaaaaaaaaaccatatatgatgatattttcctactcaaagacaataaattgaatgatgagaggtaactttacacaactgatttttcgttttcaaagaagatattcttatttgtattaacagacacaggttaatatttgacactataataggttaaatgtcattttaat

SEQ ID NO: 280947 - DNA, 419 bp, Glycine max
ttaagctcattatctccagcagaagaagaggagaccatggccaccgcatggacccctccaaggacaacaaccaaatttattgcaccgaaatgacgggagttacaagccatctacacaaccaaatgcctagcctcggcacgaggcatatcaccaagggctccaccactggcaggatccaacaaacagcgactcaatgacgcaaagtcccacataacatatggagaaagagaagctcacaaacctggagatgagggcaactagcgcacaacttcaggaacctccactaaggggacggaagccagaaatagcatgtccgatggtaggagccccacacgcagagaagaactgctcacaaacaccctctaaggacatcccagcagaacatggacctgcgaccaaagcagataatcaaccgtcag

SEQ ID NO: 280948 - DNA, 446 bp, Glycine max
tgtgcggatgtaacagacatcgcctttgaccttggtgatccttgaatccatctcatcgaatcgcatgtcagcttgtaactccaaagcatcaaacctttcaccaacaaaagtttgaagaccatcgaacctgaccaaaatcttttgaagaagagaggaatcttctccaactaggaagtgcccttcttcatcaatgggttgtgcaccttttttcacccaagagccatcatgctctgtacggtaaccaaaagattcaatcacaacggcgccaattaagaaggatctcttgattggaagataatgttcagaatcaagagggatgctaaagtgtcgaacgaagagagtgactaagtgcggatatggaaatggagcatgtaatcgcaatgccttatgcatgcgacatccgactaagagcgccgaatcaatttgttggagcataccctaatttc

SEQ ID NO: 280949 - DNA, 401 bp, Glycine max
  unsure (1)..(401): unsure at all n locations
agcttggatattcagcctgacgagggatcgagggtttagtaatttaggctacaacatagaacacaagagcatgatttattagagaaatatatttctatgcatcagcttatttgttagaaagacccaacatatctacctactgctgtcattntatttaccttgcattntatagtttttagcacacaagtttagtttaaattctgtttgaaattatcacttatacatgttctctcaacaatgcttcgattctgaacttaattcaggctaacattangtccctgtgttcgatactcggattcatccgttntaattntaaatacttgacgaaccagtgcgctttccggtgaaaactccccaatgaaatttcctcgagacatanatgcacaaaaagtaactgaagt

SEQ ID NO: 280950 - DNA, 453 bp, Glycine max
  unsure (1)..(453): unsure at all n locations
tcttatccaaggctcatcttggtggtgaagctccttcttctatggcttattccctagaggatggcgcctcctctcacctcttctcctttgtcttccgctacatctccatggtggaaagtcaccattaaaggacctcattgaagctcanagatccagcctccatagaagccccacaagtaagcttccatcaagtggtaatcagagcacaagagcttcaagtaggtgctccttanacctccattaattntttttctttaccttctcttccattgttgtttcttcatttttctccatgtatctcctcacatgtcttgttctaaatgctgttaacatgattctttagagtttccaccgattaaacttgctatagaagctagatttgattntctatnggtgaaatttcttgttcttgttcttgaaccatgaattgtgttgagtttaagttcctttgag

SEQ ID NO: 280951 - DNA, 348 bp, Glycine max
  unsure (1)..(348): unsure at all n locations
gaccgtgtgagcattgaacatgaaacgcnnntcagggaaccaggagcatgagacgtcgccgttttaccttttagagcggccaaggaataggggccgcgggaagtgacaaaacacgaggcgagacaaacaacgtacaacggaagaagcacgtcgttaatgagaagaagcgacggcatcgcacgagggatacgaacggagaaagggcagaagactccctgcagaccggtggaaagaacttgaaaggcccgtatggtgaggaggtagaccagaacagaaacatgaatggcctttgcactagcgtcgcgccgggcgacccagcagcagccccccctcaccccgaagaaaacc

SEQ ID NO: 280952 - DNA, 96 bp, Glycine max
ggacccagccacggacccaggaagagagaaacaaagcgggagcgagcagacaaggagggactaggggcagaagagcggaaaaaagcgaaggggaag

SEQ ID NO: 280953 - DNA, 247 bp, Glycine max
ggctgaccttgactgaacaagatactgcggaccaactttggctacaatttgggtagaactccggcttacagctcccgaccagcgggttcggtcgatctttggctaagtgcacccgcaaaaacgggcaggcaaatatgaatgagagacggtcatgctcgcttttaaggtatgaacatttaaattcagggaggccactaagcgaaaggaggcggaggacataaagcgcttataaagagactgatggccc

SEQ ID NO: 280954 - DNA, 390 bp, Glycine max
  unsure (1)..(390): unsure at all n locations
tagggaacggtaatttatacgaactcgcacccaatacggggtattaaggacttggtgaagactganaagctctgtgcttagatgattaaaaaacacaccatcattcgtcagttcacgctgatctatggcaagataataatgacattcgctaagttatagcacggcactagaactcaaaaactttttaagttccttcatataatattcatgtatgattataaattgtccttgaagttcaaaatatatttaaaaaagtgaattcactatattaatattgtcctcacaagacttattcttatatagccttgttctttgagtcacacattcttaagatatttccttttacacatgttcttctaattagacatttttaatacattctctcttatt

SEQ ID NO: 280955 - DNA, 178 bp, Glycine max
cgaatccgagctcagtacccagagatcctctgaggcatctgcagcgtcttctgctcaaaagaccccggagaaatcttactactcatagaccggaaagcggtgactaatgactcctatgcagctttcacataaagcatatatgatgggcagatcaccaagatgtctccctctcctgaca

SEQ ID NO: 280956 - DNA, 444 bp, Glycine max
  unsure (1)..(444): unsure at all n locations
tgaggcctggtggtgttcgtggcggnggaagtaggcttatttctcactcgncctcctcttcctctctctccgccgatctccctctctcgcgccctcatgcctctttctctctcaaggtcagatctcgttttgattatttgaatctcgttacctatgattatcctgtttgatggatacgctattacttattattattatcattattataggaatggactgtgagtggagtgttgagagtttgaaacttgcaatgtcctgattctaggtggtggcactcggttatgtgttcttcgctgcagatatggacagaaagtcacaacgtgtgggctctatgtgggctcgggagagttctagattgcccatcaaggacccacacacattcctgcccgtttgcctttcaactatggtatcatttatacgggacgggagagatctcagctacat

SEQ ID NO: 280957 - DNA, 424 bp, Glycine max
  unsure (1)..(424): unsure at all n locations
agctntagtatggcctccgtgatagaagccatttgatcttttaaggccgataggtcggccttcatctgttcttgcactccctcttcgttatccatccttctggatcgagtgttataggggtgcctttgtgcctttttagttatggcgagttccctgaagaaacaaacagtggtgagtatgccaccaaaacatgaatatgctaatgaatgatcagagcacttggatccacctcaaggccttttttagataacatgattagtttcagaacttctttttataaaaaggaacaaagctnttatctagccaagatcgtacaaaaggtgttacaacagaacctaacggtttctaattatatgggccatcaaatctatctgtgttggcagtaattaattagctcgtgaatttcctttggggctgaacacac

SEQ ID NO: 280958 - DNA, 475 bp, Glycine max
  unsure (1)..(475): unsure at all n locations
tgcttgtggagcttctatgaaggctggatctttgagcttctatgaggtcctttaatggtgattntccaccatgaagatgcagcggaagacaaaggagaagaggtaagaggcggtgccatccactagggaataagccatggaagaaggagcttcaccaccaagatgagccttggataagaagcttggagaggatgcttcaatggaggaaaagaaagagggagagaaagagagaggggggagcacgaaattgaaggaagaaaaagggagagaagttgaactttgagttgtgtctcacaagactctcattcatcanagttacaacaagtgttacacatgcttctatttatagactangtagcttccttgagaagctntcttaagaaaacttcctttagaaacttctttgagaaaacttccttgagaagctagagattagttacacacacccctctcataactaggctcacctccttga

SEQ ID NO: 280959 - DNA, 421 bp, Glycine max
  unsure (1)..(421): unsure at all n locations
agcttctatataagctgaaccattntatcaataaacacaagttgagttntattcagaaaattagagtttatctcttttatcttagtgagagtgattctcctaaattcttgagtgattcaagaacaccctggctgtatcaaaggactttcacaacctttgtgtgttgccctcgctggaaagagtgattctttccttcctttcatcttcacccttgttctttcaaaccacaattccagaaaattcacctctgcccagaattatctcgtggccataactcccattttacgcactcaaattaagtgattcttgagcctaaattgaatttcaaaaccagacctttcaccgcgttttggaatcacctcatttggagccctgtagcttcagttattgccaattctatatttctgtccagccaccactt

SEQ ID NO: 280960 - DNA, 471 bp, Glycine max
  unsure (1)..(471): unsure at all n locations
ntcactcgaatgtccgattcatgcgcatcacaattcgagacttctcgaaattgaacaacggaagctcttgatatattcaaatggtcataacttttcacttgagtgttcgattcaggcacatcacatttccagacgctcgatattgaacaacgaaagctctcgtatattcatatggtcataacttttcactcggatgtgcgattcaggcgcatcgcatttcgagacgctcaaatttgaacaacagaagctctcgagaaattcaaatggtcataacttttcactcggatgtgcgatttaggcgcatcacatttcgtgatgcttgaaattgaacaacggaagctctcgagaaattcaaatggtcataacgtttaactcggatgtctgactcangcgcatcacatttcaagatgctcaaaattgaacaacggaagctctcgaaaaattcanatggtcataactnttcacttgagt

SEQ ID NO: 280961 - DNA, 426 bp, Glycine max
  unsure (1)..(426): unsure at all n locations
agcttgctcagtcaaaacacaatccttgtgaagttgatgcacaagagaaattgacaaattgagaaagagacacatgaacctggtaagctgaagttgatgcaccaaacacaaaaccaggaagtacgaagatcatatctaatccaatgtatcctaattacacgatactaggaatgaaatctttacaataacatcaaatgacatgcatcctacataagtccatgcaaattgaatacccttttttttctaagagtaaaaaaattgaagttactacagtatatataaaacatcagaaaattgcaaatgaattaatgatcctctaatgtatccaacatacaaagttgctgccataattgttctaattctttgatgaaaccacaggagaaatgtacttgtacataatgtaaatcanatntagcaactgcttta

SEQ ID NO: 280962 - DNA, 467 bp, Glycine max
taatgttaacaatggtgggcgtgcataaacgtctttgttaatcacaatttctaccacgatgattccaaatacaccgatgtagataacctacgttgtatcctactaagacggtccgccaaataaacgttgttgtatcagtcacatgccatgcacatgacttttaaaagtgtcaaatatttacgacaatgccaccggttaccctactacgacgggtttattacgaccaatgtaaaatgcgcgtcgtaaaaggctttttttttagtagtggcaagttcggttaggctctcaagtggttgacaagtctcgtttaggtagtctttttggccttggttaacaagaaaatcgagtgttaggtacaaaaattggaaagctccactacacataatagtggtattatttatttcaatattggtttctgcattcatggttagtttgcttattttgaccgtgtggctctctccatttat

SEQ ID NO: 280963 - DNA, 415 bp, Glycine max
agcttcaccggatgacgcttatcgaacatttcctaaccgacgtcatgcagatttcgttcagggattgaattgagaactcgttaggcgacatctgtcgtgaagtagcgaccgatatttttcagccgacattgcacaattctttttagaaaagctcgctggtcgataatggtctttttacggcagagtaagttttcttgttttggtgttgcataaaaaagttacaatgtacttcggctaggtttttcgtgcgagttcaaccgacattctgtttcggtcaggaaaacattagcccacctctgcaataaaaatatttgctatccgtcttcatgcatatttcattcaacgattgaatagataactcaatagccgacaacggtcgtgaaatagtcccgactgatatctttcagcccgcatt

SEQ ID NO: 280964 - DNA, 460 bp, Glycine max
tcatcagatgacgccgatcgaacctttcctaaccgacattatgcaaatttcgttctcggattgaattgaaaactcattagccgacatcggtcgtgaagtagccccgactgatatttttcagccgacattgagaataattttttaaaaaaactctcactggcagataatgttgatttttacggcagaagaagttttcttgttttggtgtttcataaaaaatttacaatgtatctcggctaggtttttttctgcgagctgaaccgaccttttgtttcggccgaaactggcatgttccaattaattcggccaggaaaacattagcccacctcggcaaaaaaatatttgccaaccgacttcatgcatatttcattcagggattgaatagaaaactcaatagccgaaaacggtcgtcaaatagccccgactgatatttttcagccgacattgcgcaatatttatt

SEQ ID NO: 280965 - DNA, 241 bp, Glycine max
actaggaaaagacagtaagtctgtcgtgcgtggaaactgataaaggctaaagagacttcagtttaatactcacaccctacattcttaacgatgacaattattcacgtgtgattaatctttaaaatcacagactaatcctatcatggatctatgagagaatctacacaaaaatatatgccttacattcttaatccatagtcaaaaatctacattactatgttagctacttataattaacaaa

SEQ ID NO: 280966 - DNA, 205 bp, Glycine max
  unsure (1)..(205): unsure at all n locations
ctcctatcacacatactgcgtgagaacggctcttcctagagggtaattatgtgtctttttgttccttgggacgatgcgtcgagggagcctatgatgtagcagctgaagcacacgattgtctcacatatagagtgtacgaatagcaccagcctttgttnttgtggcggattgagtgatgggactctcgagtaccattgtattataa

SEQ ID NO: 280967 - DNA, 374 bp, Glycine max
tagcttagtttcataggatcatagtgcatgctaactgtgtgtacttcgttaactccagtctccactcggactttcagaatagcagagtttcagtatgataaataactagaaagatccacaaatcaatattgaagggtcatagttattacaaccaaagtggggaaaattcagattcatcatagatagattagtaggctaattttgcatatctgacctgctgatgagactggaacatgataatggtgtagaactccagttgctggaagataccctttttgaacattatcagcatagattcgagcttcataagcatgacctgccatcacatacagagttataatatactgaaacttcaaggcctctaatagatggat

SEQ ID NO: 280968 - DNA, 409 bp, Glycine max
tagattgcatgctctggagcgcctcattatataaggctccatttcttcaaaaccatatgcatttttcgcccttcatccctcaaaaaagataaagtgtcgagaacaaagaatttcttggaatttggttaatgctctagtcaataaatgtggcaagccccaacattcccaaagttgcccaaaccgtagctggtttaggaatttgcaatcttagtccgaaaaggaatgaaatacataaataaatcttgcaatgaatgcatacatgcatgtttgtgtaaatgctatatttcttgactagtctgttcagaattgctagctcgaacgttttaactctaggtctcgctaactggtgtgtattttaattcttacgatattggttatagatataaaataaataactatttattaaaat

SEQ ID NO: 280969 - DNA, 405 bp, Glycine max
  unsure (1)..(405): unsure at all n locations
agcttggatttccttttagtagggaatctatccttcctaagatggagccaaacccagtcaccctcattaagaactagctcttttcttcctctattgcctttagttgaatacacctttgtttggttctctatttggttcttaaccctctcatgcatcttctttacaaattctgacctagattccccttctttatgtataaaagaagtgtccagtgggaggggaatgaggtctaacggtgttaggggattgaacccatagacaacctcaaaaggggactgcttggtggttctatgaacccccctgttgtaggcaaattctacatgaggaagatactcatcccaagacttatggttgcctttcagaagagcccttannagggtggataaagacctattcactacctct

SEQ ID NO: 280970 - DNA, 368 bp, Glycine max
  unsure (1)..(368): unsure at all n locations
tgcacagnttttattaggtattaattgttctgcatatctaacaatcgtggttntaaattgctgttgtcgttgcgatccttgacattgcgtgaaaatgtgtttgtcatgatttggttgcagagaatcgtaaaatctttatgttgcggtcgcaattgtggttatatatggatcatgatttaaaaccatactaacaattttgcgctttgtgtttatcaatcgattaattgatgattgaatgtgaaaattaatagaagtttttggcaatgtanggcaatgagaggctccaacaactcaagaaggggcttatcaaaccaatacgatggtccatgcaaggcgacaaaccccattgacaaatgttggagatgtga

SEQ ID NO: 280971 - DNA, 365 bp, Glycine max
  unsure (1)..(365): unsure at all n locations
agcttagttggcgggcaatataaggaatcccatttccagtccagaatatgaagagactcaatgatgggatggttcttagtgctagacggaggaaggactacaaattgagtgggtggcggtccgtgatggagtttcaatagtgaaatatgaaacgtgggatgaatcttagaagaagatggtaactggagtttgtacaggacagggcccacgcgttcgagtatttggaatggaccgtanaatcatttggccaacttggtgtaagctggcgcanatgatgtttggcgatatggtctaagacatacatacacccagttgcctactgtgaattcaagactacgacaatgagtggttgcacagttttatgt

SEQ ID NO: 280972 - DNA, 462 bp, Glycine max
  unsure (1)..(462): unsure at all n locations
ctttcaaatgggtaaaaggctcacgtttactttcttctacattatattcaaacttgtccaaataaataataaagtcatctcgactcaaagaaagtcatataagtctcatacaattaatataaaacctatatcctaatgtcacatcctatcagagcgtggtgttcccgtgtcctctagcatgaggttcttcatagtcatccacctattcatctgctcccccgaacacaagttcaagatcatcacaggatccaaacacaacaacacacagggagtgagttatcacattcctaactaatagagaaacaagacaattaaatatacatattatataaatgagataccacttgcttaaacatagctcacgtaacttcaccacttcgtcattcanaattcacttttcaattatcaatcacattacacaagaatcccacacttcgatcaagatataataacacatcaatt

SEQ ID NO: 280973 - DNA, 402 bp, Glycine max
  unsure (1)..(402): unsure at all n locations
agcttcatacgacacgtgaccccccacccatggccaaaagtagatcactatattacttcttctttaggcataaagatggttgtaaccaatcatacatatagagtggtgtcattntttcgttttacataccaaccaagactaggacctgactcttgccatctctcanaccaattcgctctttanagatttgcactanacaacatatagtttctttatagccctatactcaagaccatagtaaactagacagatttccatttaacattccctgctanggagtgcaaaaaccggttcataaaaaaaataatcgaactgttntaacanatttgattttatatctaaatagtcaaactatnttagaaaattgttccaaactagattgatttaaaaaattgattctga

SEQ ID NO: 280974 - DNA, 421 bp, Glycine max
  unsure (1)..(421): unsure at all n locations
nttagtattcacacacacacagagactcacacacacacacattcaaacacacacacaagcctaaaacgcagaagctgtccaaagctaattagtagtatggattgccttaaggtttgtctttggtggtactccatttttttttcttcttaggctgaacttgttctagtaccccactaattagtttttagataatcattaataaaactggttttgtttatgttggttagaacattntaaattgtgtactagcaagtcattttcaattgtaacattatctaagtccactaaaaaacataactcgtctggtagctagagttttgtcaattaaattgagtaacatggctcgaatttcctcgtacatgctagaaaattcttagcctgcatcataaacacaagtcactctgtactctagtctatacat

SEQ ID NO: 280975 - DNA, 302 bp, Glycine max
  unsure (1)..(302): unsure at all n locations
agcttatggtaaaatctgngacctagccatggtagaagtctccacagaggccattgcctccctcgcccagtattatgatcagccactgaggtgcttcacctttggggacttccaacaatcacccatggtagaagaatttgaagagatcctacgatgtcctctatggggaaggagaccatacctcttctcagggttctatcccttattagctagaatttctaaagatagtccaaatctcggtgcgggaatcagaccacagacagcaagttgataatggtgtggttggaataccaagataatat

SEQ ID NO: 280976 - DNA, 435 bp, Glycine max
  unsure (1)..(435): unsure at all n locations
ntggcagatcaaggatattggacttcattcattgatatattagcattgttggggctcgggaccatactctttccaaatgtagacggcctagtggatttagcaacgatcgacgcttttcttgcttatcaccacaataaggaaagcccggtcattactgatgcaatcctccctaggaagggacaagtcactagagccatgagcaaaaggctccaagaggattgggcaagagctgctgataaaggccctacggttcttatgaacctcagggtagatttctgagcccatgggccaaggttgggtccaattatctttgtacatattatactaggatgtcattatatgtgatccttgtatttaggagtccataatgtaagtagggtaccctagaaatatacgagtttntagcccttgtattttacggcacttagactactt

SEQ ID NO: 280977 - DNA, 391 bp, Glycine max
tagcttcttttggacctcgaacaagcaactaactcctctttcagaaccatgctatgtgctcgcgactggttcctctcttgccttcgcagcttgagttcactattgctaccccacagagctccatgaaatttattccggccatactcttccttgcgagccctcttggtctcttgttcaagggctcttgcagtagatgcattctcttcccgtaacccggcacactccttacgaatgtgtgtagcggccaacttgaacttctccttggcaagtgtcgcctttcctaactcgctcttgagagcttggacttcttcgtcctcttacggtgctctcaaactttcttcgatgacgacttttaactatgtgagaccatctagacctcgatatgaacttt

SEQ ID NO: 280978 - DNA, 455 bp, Glycine max
  unsure (1)..(455): unsure at all n locations
tgagctatcggaagacttgcttattcatttagtgttgatttctcttccttcacagtagtttaatgagatcatttcatattgtgtgcaagaagaggaaaggttgaagcaagaaaggactgaaagtgttcatgttgtgagtacctctaaagacaagggcaaaagaaaaaggactgaggagcccaagaatgaagctgctaatatcatgcttggcgtgaaaaaaggtatgtttcttactttggtctgttctgatgtcaatttaactttagtacctagaaacacctggtggttagattctagtgtcactactaactaataacatcagtgtttcaatgcanggttgcctaagctatcggaagccaatcgattctgaaagatggatctatgttgaagatggtaaatcagtggaagtggaagctatagggcactctacattattattatgtactgcgttttat

SEQ ID NO: 280979 - DNA, 349 bp, Glycine max
agcttgtgtgaatcacatcactcctgcattttatctctagcatgcattactttttctttacccactcctcacgtttggttttttagggaaaaacaccataactaaacgcgccacaaggcatccctatcgcaccagatccatatttagaacgatgggtgatcaagaggagacacaggaacagatgacagccgacatgtcgactctgaaagaacagatggcttccatgatggaggccatgttaggaatgatgcagctcatggagaaaaacgtggccaccgctgccgctgtcagttcagctgccgaagcagacccaactctcttggaaccgtgtgccatcctccctcaacat

SEQ ID NO: 280980 - DNA, 454 bp, Glycine max
  unsure (1)..(454): unsure at all n locations
tatgcgcatatttccttacgaacgttcacttgcacaagactattctatcaactaagacaaatgcacccatatacaatcaaggtagcttcattacctagattatgtacttccaaggtgtatttgttatttacatcacacacgcctccttggctgaatttacatacatgcatactcaaagcattttggggtaccaaaaactgcacatgcgctcatcttggtatttctaatacccatacatatacaaacttcacgatgaatcttgactacctacacaataaggtgctacctttcatgtttttttttcaagtntttgctacctaaagccacatgcaaattcaagcatattttcctttgctgactaaaattgtattcaaattagaaggtatatatttttttgtaatatgttctcttcacataacatgcaacatatctatatatattttttgtgagacat

SEQ ID NO: 280981 - DNA, 423 bp, Glycine max
  unsure (1)..(423): unsure at all n locations
agctntacagcagattntagtaatgacccactaacctagaattaaaataacttaatgccattaacctagggaattaaaaaaaacttaatggctgagtgtaactgaaattgtggcaaccaaaagtcacccccaacagccaacaagtcagccaccatttggtctcccaaaaggctgatgcctatgttgccaattgggcccttattacaacttgaactaaacctaactaaagcccttttagttgattaacccaaaacatatttttggtcagccaactttacaaggattgggccattatttagacagactaaacactctaaaattgaaacaaagtggtgtcatttagtcctcctccatttgggccatgatacaactcacaaccttggacttttctccttgaaacttgngcttgtattcaaatagtat

SEQ ID NO: 280982 - DNA, 463 bp, Glycine max
  unsure (1)..(463): unsure at all n locations
tcctctgccgtannaaaaacattgtaagccaacaagcgttttttaaaaaaattgcgcaatgtcagctgaaaaatatcagtcgggcctatttcacgaccggtgtcagctattgagttttctattcaatccctgaatgaaatatgcatgaagtcggatagcaaatatttttttgccgaggtgggctaatgttttcctggccgaataaatgggaaaatgccagtttcggccgaaacaaaacgtcggttgagctcgcccaaaaaaacctaggcgacctacattgtacattttttatgcaacacctaaacaagaaaacttcctctgccgtaaaaaaaaaacattgtaagccagcaagcgtttttaaaaaaaattgcgcaatgtcagctgaaaaatatcagtcgggcctatttcacgaccgttgtcagctatcgagttttctattcaatccctgaatgaaatatgcatg

SEQ ID NO: 280983 - DNA, 417 bp, Glycine max
  unsure (1)..(417): unsure at all n locations
agctttgatttcctttgttccgganacctttcttttctcatgtgcacccaaacccaatctccgggttcgaagacaaccttctttctccctttgttggcttgtttagcatagcttttatttttcctctcaatttgatctttgactctctcatgaagcttcttcacatagtccgcctttgcttgaccttctttatgcttaaaaacagaaacattaggcataggcaaaagatcaagaggagttagtgggttaaaaccataaacaacttcaaaaggagaacaattagtggtgctatgaacagctctattgtaagcaaattcaacatggggtaaacaagcttcccaagtttttaagttcttcctcanaactgtcctaagcaaagttcccaaagtcctattaacaacttccgtttgcccatcg

SEQ ID NO: 280984 - DNA, 477 bp, Glycine max
  unsure (1)..(477): unsure at all n locations
ntgagcacattcaaatgacaataactnttgactcggttgtcttattgagtcccgttatatatccagacgctcgaaattcagaacataagctattagaaaaatcaaacgataatcacttttaactcgggtgtccgattgtgtcccgtagtatatcgagacgctcgaaattgaaaactgaatctctaagaaaaatcaaacgacaataactttttactcggatgtccaattgagtcccgtaatatatcaagacgctcgtatttgaaaatagaagctcttagcaaattcaaacgacaataactttttactcggatgtccgattgagtcccgtaatatatcgagacgctcgtaattganaagggaagctctaagaaaaatcaaacgacaatgacttttaactcggatgtcggatagagccccgcanaatatcgagatgctcgaaattganaacagaagctctgagcaaattcaaacgacaat

SEQ ID NO: 280985 - DNA, 432 bp, Glycine max
  unsure (1)..(432): unsure at all n locations
agcttgcttgtgtaatcgaactacttgacttaagcacgcaacacaaagaataggttgtactagaatcagaaggtatggtcaggagtattctttatgaaatatatctcgatatgagtcatcgaactatagagtatcatcatcgctaagaacaagaaatcacaaacaaccatactatctatgcaattaaggcagaacaccattctacaagcatacctagaattataaggttcctataacaagtatataacgtacatataagaagtaagaattaaacggttaataaggatgtattaaggaatcacaaacttcaacaactacacacaaaataaagggagttaagtattcatgtgtttacacatgaagaaagacacactcatccaaggcatatatatacggttcanaaggttntcacaacactaatccacacatcaa

SEQ ID NO: 280986 - DNA, 480 bp, Glycine max
  unsure (1)..(480): unsure at all n locations
tatgagtntgtggatgatgtgaggcttgtgttgtcttatgtattgcaataccctccaaggagtgaggttcacagaactgcaacaaggatcaccgagggttttgaggtcaattggaaaactatgaaggagaagtggatgcgtgaggccgaagagacgaacaagatttgcaagagggaattacatgtgtgtccaaatgaaagaagtcaagtgagtaatcatctcacaaaaaggagcaatatttttatgtgctgattcaaaatagcttctcaccacaagtcaagaaagctatgccaataagggtcattatgagcagcatggacattacccctcttcaagagtttcatttaattacctgggttattcatttttatgtataaagtatctattgagtttcacgtaagaagtttctactgtttctattttgagttgtaagattactcctcaataacaagaataacaagaaagttctgctatattatg

SEQ ID NO: 280987 - DNA, 417 bp, Glycine max
  unsure (1)..(417): unsure at all n locations
agcttccacttcaagaaaaatgactataatatttaatgtgcaattctaccaactccatacactcgtattcgagattgattgctaaaaccagggtattggtgatatctgttttggtaatcccgtttacttagtggaagaaacattttcttaaataaattgcacagaataactattttaggaaatcattggagagcccagcaatgatgaataacttcttttggaaatattccaattaatgctaactattttatgtttctgaatgcattntttcattaatctttaagagacatccccatgtgcattaaacccatagtttgtgctccatgttgcaaggcctgaatgaatatgacggcacgtggggcagaagcagtatgttaaatagcactctcagctagatgatcaaagtgcacagtgagt

SEQ ID NO: 280988 - DNA, 469 bp, Glycine max
  unsure (1)..(469): unsure at all n locations
tcctcctcaagctgtccaaaatcccaaaaatgtcagtgccatttcattgaggtcggtaaagcagtgtcaaggacctcaacccgtagcaccttcctcatctgcaaatgaacctgcccaacttgtctctaacccagaaaaaggtaatgacaaaaatttacctaacaatttctatgcagatgaatcttccactggcaattctgatttgcagaagcagcacatccctcctcttccattccctccaagagcggtttccaacaaaaaaatggaagatgcagagaaagagatcttggaaacatttagaaaagtagaggtaaacatacctctgctggatgcaatanagcanattccaagatatggtaaattcttgaaggagctgtgcactaataaacggaagcttaaaggaagtgaacaaattagcatgggcagaaatgtctccgcattgattggtaaatctgttccccaaattcct

SEQ ID NO: 280989 - DNA, 394 bp, Glycine max
  unsure (1)..(394): unsure at all n locations
agcttcgatgaaaatattgagtaaaaaataaactaattagaacaagtaggagaaatatgaataaaaatcaaagaagtattatttttaaaaaattattgataaaaagcataaatagaaagttatttaatttaaatgtataaattaattcaaacgttcatttcctaatgggtgaataggtacttctgaaatatattgnggccggtaatatagtccactttcattacagtcaattgctagctgttaattaattataatttttcttttatctttttactttgatttattcaataatttttattggttaacaatttcaaatgaattctttaaaaaaaattgtcattaatattactcatcttgactcctgagttntgataattacattcctactcttgac

SEQ ID NO: 280990 - DNA, 423 bp, Glycine max
  unsure (1)..(423): unsure at all n locations
taacgatctttntacaaatttaatattttaaaaaaatatatttgaattcctaattaattcataatcttcttaattcaaaacctaagaaatactatggtgatactttcaaactcattacttgtttatcagttttacaggttcatctattttgtagtttttgttaaccattgttctctagtctccacaagagcaccaagatactttttttctttntttctgtctctcatactctcgcacttcaagttttttttccgtcacactaggaattgtgagctntatttcccccacacttaaatttcccaaattccccactcactggttaaagatattgtaagccctttttcactcttttggccggcaatggcacattacttgacaccaaatggaatttccgtagcagacattgaacgcatccaaccactg

SEQ ID NO: 280991 - DNA, 236 bp, Glycine max
tcaagcttgacttacaattcataagggaaaaaactctgcaacaaatataaatgtaagggaacagtatttgtcttttaaagcacaaaagaacgcaaaaaagatttgttccagaagaaccttgtcattacgtcttccagcatgatcactcccaacaactaatggaaagtgctttgacagaattgatcctctaaactgatcaacaactttcaaaacagatgttttcaagccactcttag

SEQ ID NO: 280992 - DNA, 421 bp, Glycine max
  unsure (1)..(421): unsure at all n locations
tggatgtccctgaaaagaaagagatcgctttgagagctttacattcggcttgaagtgtcaaaaagaattatgcgtccataacacaccatgtaccaaagaaggaaaatgggtgagcaaataggataaaacctacagcatgtaggacattatgtaagtagaatgaaaaattatcattacaaactacttgattttagactntagcttacgcattctaggataggaattactaatgatttttctgacccagcattgtttaatcattaatggctgccaactcttatgtgtcttgacttctttccccaaaatcagttgtataaaattaacaacataatataccaggaaaccactgccaccaccacagccacagctgtcatttctttcactagacatgactatagccatgattgcaccatcttcagag

SEQ ID NO: 280993 - DNA, 387 bp, Glycine max
  unsure (1)..(387): unsure at all n locations
agcttctttagaagcacttctaggataaaaaaaataagagaatgaaatgagctttctatttcgtttttttacttgtgatggatttttaacttattacactgactgatgataattgataacagctgctgatgttcattgatgcttattattcttactatgtaatatttattaagatccaagaagcccagatacataatatgatatggttatgatacagaattacagatagagataccgacattntaaaaaattcaagttaggacaaaaccatgatacattaccaaaaatgcatagcaatagcaacttggagaacacagaccagcacccagcgaaggagagagaaccaaaagatgagctagaaccaccagcaacttcagcaatgcagat

SEQ ID NO: 280994 - DNA, 465 bp, Glycine max
  unsure (1)..(465): unsure at all n locations
agatctgtttacaaagttgacaaattatttagcccncttctttgtacaagtttactcactttgtgtagcgttntagatttgttattttccattttatacaccaaaaagtatcatggggactttatctctctaaattaatcaatacaacttgactgaaattaatttaggtttaatatggttttttgacatagaagattttagaaaaggaaaaagaaatctttcagaaattcttataagtgcagtctaaaaaatgctattcatttgcatccttagttaacctgtacgtcattaataaataataaataattattntaatttaatcagtcaacgtaaagacattggatatgcgttgaaacttttccagggctaagtaaattattagttatatatcatctaattagttgaattaatgtatttctagaacatgcttcacaatctaagccaataaatatttctcttaaaact

SEQ ID NO: 280995 - DNA, 333 bp, Glycine max
agcttgacaggctgccatagcagcaacaatatattctgcttcacatgtggacaaagcaactacactctgatacattgagcaccaagagattagtgatgctccaaaattgaaaacatacccagcagtgcttttcctatcatccttatcaccacaccaatctgaatcactataaccaaacacttctccttctatattcttctgactgtgaggatataaaatgccaagatccaatgttcctttcacatacctcagaatgctctgtgctgccaagaagtgaggagcctttggtttctccataaacctacttatcaacccaacacaataggcaatatc

SEQ ID NO: 280996 - DNA, 462 bp, Glycine max
  unsure (1)..(462): unsure at all n locations
ntacattcaaacgcaaggataactatacttgattgactggtcctctcatggtctcaagtgtgtttacaactcaataatcatatagccttcagataaactctgcttaacaaacaacaactgaggtttgtaagttgtaaaagttcattcaaacatttattgcatctgagaacacaaggtgggtatatatagagaaaatagctataaccatctgtaattgattaaattggcactgtgatcgattattacgcgaaagtgatcaatcatatcttccaattaatcgattaaagagttcttccccaatgctagactatataattgattattttcacataataatcgattacattgtcaattcaattgattacagtgtccttctccaattatggaaaacattcaagaacaattgaactgggatagctctcttaatcacttctaggaacactctctagactgatgtaatca

SEQ ID NO: 280997 - DNA, 416 bp, Glycine max
  unsure (1)..(416): unsure at all n locations
agcttgctaatcacagggcatttgcaaatggcaatgtggagactcattttattgataactacaaagaagacctctttgttgatgctaacaattcagtgtctgtgaaagaagcatatgaagctgctagacttaatgcatccctggtggccgcatgcctcattgaaaaagagcatttcatattggctagaaatccacctggtaaattgtcccattcttgctgtgtaatgttgagttgtttttgtaattttccttggtatttacataagcatgttcagggggcagcagcttgctccctatatggtattcttctccacctttcagaatccatcatcangctaagcgtagaatggaacttgagtgggataatgaatatggtagtggtagctcanagatcatgaagcttaccatcacttatc

SEQ ID NO: 280998 - DNA, 440 bp, Glycine max
tccaagcctttcccagcgtttcatgttgatctgatccttctctttgatttctctttaacgacctgctttttgtgacgaaggctttggtttgaatgtgttttgcttcgactgcactgtacctgtaagttttttttttttgtttggttagaatggactcggtgttttatgcgtttggttttttctttcggtttgccctaactatacgtttttttttgtagaattagggttccgtgaaaaatgagagaggggctgagatcgcggacccgattggggacggcttctggtggtgaaggagttgatcacaagaaaacggttgctgtgaagagtgaggctgttgatttgggtgatgagggtttggaggtacagaagtcaacgattgagaagaagggtgaagttgaatgcggtgtgaaacaagaatgtggctttgatttgaatgtgag

SEQ ID NO: 280999 - DNA, 390 bp, Glycine max
  unsure (1)..(390): unsure at all n locations
agcttccatcaccattactttccttaactntttaaatagtgatcaagggctttccatggaccctaagagaataaaggtcattcctgagtggcctactccatcaagtataagggaaatttggggtttcaatgatttaacaaacttttacaaaaggtttgtcccatatttttctatacttgtagcaccactcattgagttggtgaggaactatgttctctcatggaaagatggtcaagaaaggcgttttcagtccttaccctactctaacatacccaacatcactaattcaatgttntaattcttttaacaggtgttgagaaaagaatccctgagtttcaagaacctctggatttgaggtcaaatcctttnttacgcattaagatcaataga

SEQ ID NO: 281000 - DNA, 428 bp, Glycine max
  unsure (1)..(428): unsure at all n locations
tgtagccattagaagagaatgagcgtgtgattgtaattattattgaaaatgttagtcagtttgccagattgattgtgaaggaatgcattgaccgtatcccggtgagagtgtgatccttaaattttgagagaaacgactatcatttagtactgatttttgcgtgaatctctgaagtatggactgaatgcatgaaattgaggatgatgaaggccatgtttgattgtgatagccatttaaccacaaatctaaccatgtgcttgaatgatttatcgcttacacctagttgagcagaatgaattattgattgattgaaccctgagcttatatagtgttatctcttgctaccttgactcangttgtaggagagcatcatccataggaagtgtggttcanagcaaatttgtcccanatttgcgggagtaattatc

SEQ ID NO: 281001 - DNA, 384 bp, Glycine max
agcttggacagtcctcacactataagccggtattgtggggttaagttaggccctaagcccaaattctaagcaacatggctagttaaaactggtaaatacaattctagttgcatagggaaaaaggtttacaagttaagaacaaataggttaatagtacttaattgcctatagtatcacataaagacccaaacttaccagtccgagcaggtctgaagcttgaaatatatttcctgtaatgaaagtataaaaaatgagtaaggtgagtcggaaagcctttaatatatttactatagaaggatattgaaagggggcaaacaaacaacataaaaaacataattaatagcacaccatttagtagagttgcggtgttcataattctttatc

SEQ ID NO: 281002 - DNA, 479 bp, Glycine max
  unsure (1)..(479): unsure at all n locations
gtgaccttagatactcaagcttaggggacttgtgtactcgtacgagacccactagtaatcattactagttaaccgactaccatgacttacacgtcatccttagtggacattaaggacagttaccaacttaattattgtcctcacttataagacgagaagaataatgggaaaaggtaagtcacattntattcaccatatacaaatactttaccatcggattgtcccctcattggaaaaagaggtcggtagaagaagaaaaaaactatttcacgtacgatataggaagattctagtaagaataataactaaattcaaaattatgggtcaaccaaagtttacaaatgcctatccacataaagttatatttattagaaccaaatattntttaacacanaagcattaatgtatattaatttatcacaatttgtgaatttattgataataacattagaaattntacattatctagataaaaacat

SEQ ID NO: 281003 - DNA, 344 bp, Glycine max
tcaagcttgtatggagaagacacctctttgaatggacaagccagtttctgtgtgtgtgtgtatgcggaagcttgaatcaagaatctgtctaagtttaatgcagcatccctaggctgcattaaatctcattacaggagcatcactacatccaacatatgggaagtcacatagacaatgggtgggattggagctttatttgtagaacgccattgtcttgacaatgaaattgatacggctggtgttcctctcaatgaggttcaagatatggcgattcaacaacatggacctgatgtgtgggaatggactgctgaccctacacgtcagtataccacaaacaatgcata

SEQ ID NO: 281004 - DNA, 454 bp, Glycine max
  unsure (1)..(454): unsure at all n locations
tgaaggtaaactagatgccttggttaacctgttaacccatctggccatgaataaaanatctgcacctgtcgccagactctgtggtttatgctcctctgccgaccaccacatagaccttttcccttctgtgcaacaatctgaagtaattgaacagcctgaagcttatgctgcaaacatctacaatagacctcctcaacctcagcagcaaaatcagccacaacagaacaattatgacctctccagcaacaggtacaatcccgggtggaggaatcatcccaaccttagatggtcgaatccttcacaacagcaacaacaacaacaacaaccttattttcaaaatgttgctggcccaagcagaccatacgttcctccaccaatccaacaacaaactgtngaggctcctccacaaccttcccttanagaacttgtgaggcanatgactatgcanaacatg

SEQ ID NO: 281005 - DNA, 415 bp, Glycine max
  unsure (1)..(415): unsure at all n locations
agcttccctccttcacatataatgaaaacctcaagctttcctctctcaccaaaagaccaaattcaatctcaagcttccctccaatactgctttgaaacaatggatcagaagattcaaagtatattgcatttggatcttatgggtagaacccatacagtatgccatacaagtagagaatagtacgaactatatatggtgtcaattgtttcatagcagtatgtgtgagaagcttagatgtaatttggtcttttgggaaaagaggaaagctagagatnttctttttatgtgaaagagggaagctcgacattttgttttttctggtcgaggagggaattatatacatgaggtanataattgaaaattccatacttaaagactttccaaatcgataattattattttttatatatttaca

SEQ ID NO: 281006 - DNA, 283 bp, Glycine max
  unsure (1)..(283): unsure at all n locations
ttacccacaaaaaatctattgatatcaatttatcaacgtttgtctctttgaagaaatagctnttgcaagaatttaattattaaaaaactgcatatggagaaggatacagtgccctttaanagatgatataagataataaaanaatctttaaattgcaatttatcttttaatatatattaacattattaattaaggttattgaattcaagaatttaagtaaagttgtaaaagttttgtaaatttgatttgtaagagtttactttgaaaaagatgatggaattta

SEQ ID NO: 281007 - DNA, 226 bp, Glycine max
  unsure (1)..(226): unsure at all n locations
agcttcnctctttcacatttattgaaaacctcaagctttcctctgtcaccaaaagaccacgttcaatctcaagcttccctgcaatactgctgtgatacaatggagcagaagagtcaaagtgtattgcatttggatcttatgggtagaacccatgcagcatgccctacacggagagaacaggtggaactatatttggtgtcaattgtttcataacagtatgtgtgag

SEQ ID NO: 281008 - DNA, 617 bp, Glycine max
  unsure (1)..(617): unsure at all n locations
acacacccgccnccgtcnctcatacactagtcgtatgctctctgtcgcctanatactatatcaaatctcanccaccgcacgaccgttgaacccctgatgaacccatctgaaatccgacagccaataagcacacgatcggaaatgaccacttgactcggaattcgcatgaaccctcttatactgcacagacattttacnttaccacactccatagatcacatgcgatattcgagtatatccaacgccagtgctctcatttgacagaagctagtcctatagcaaggaactataatcaagttgatcaaactcgccttatcggaaaatcgttactacggtcacttntacaaagaacgaaatccgcgataatataacgacgatcttctaaagatggcactctagtcatttatatatagcattaaacattaattaactgaggcgttatctgaagctcgagattatcaagtcaaggatgtcagaacatcttcgcaaatacttgttatagcaagagtctactctcgacacaatgatgatgggcaatatacacaatacatgtagaggtggtggaggccgatccgtgtattcggaatcaacatcaaacttcaaaatacagtctgccn

SEQ ID NO: 281009 - DNA, 200 bp, Glycine max
agcttatgtgtgataagatgtgactcttcacattagaatccgaagttcacacgtcaaaatgcactggtaatcgataaccataacattgtaatcgattacagctctttgaaattaattggaacgttgtaaattcaacttgcaaactttttctaatccattatagtactggtaatccattacaacaatcgggtaattgatta

SEQ ID NO: 281010 - DNA, 402 bp, Glycine max
  unsure (1)..(402): unsure at all n locations
atgtgacanaacgtggaagagccagtcttcctacttttgtntgttgatcacagagtggtacctggagatatgtcgcgagggtcangagaaccttgggacgtcatgtagggtgctgttgcccaaaaccaagcttggataatcccgacccaacccgagctagtcagtctgtgagaacttgtgacgtacctaagcaggcgagctcctgtcagtcaaccaataaaagaacaaagtccactaagcaaggaggcttgtgtggcggctgaccagctatatatcttgggtgttatctgaaaattaccctctggtaatcgattaccattcatgggtaatcgattacagggtttatatatggagacaggatgttaagtagcttctggaatcgattaccatttgtgtgtaatc

SEQ ID NO: 281011 - DNA, 424 bp, Glycine max
ctgcaagcttgatgtgtgtcgagaataaatcacatgtttgtcatcatcaaacagggggagaatgtgaatgtatgtatacatgattttgatgatgtcaaagaagaatctaacaaggctgcttcaaatgataagcatttgcttcaagaattattcaagattgcttcaacaaacaaagccttgcctttaaacaaagtgctttcaagacatgcaaggctctggtaatcgattaccatgaagtgttatcgattaccagaagacagggttgagaaatagctattgacaaatgttttgaacttgaatcttcaacatgtaatcgattaccatatgtttgtaatcgattaccaccaacgaaactttggaaattcaaattcacaagtcataacccttcaaattattactgtgtaattgattacacaaacattgt

SEQ ID NO: 281012 - DNA, 398 bp, Glycine max
  unsure (1)..(398): unsure at all n locations
ggggtgatgttgcgcgtactgatgggtaccatgaggtgtntgctggngtttgacccacgcgggtgttgaagagacggcatgggcatctccttccttcctttntgcccctgttgccccgattcttttggcgttcacgtttgtggaggaaacgtaatcaaactttcctctttttaatccaacctcgattctttccccggcaaacaccagatccgcaaagctggacggcatgtaacccactagcttctcatagtagaacactggcagagtgtctaccatcatggtgatcatctctctctcaaccatgggaggagctacttgtgccgccaaatccctccatcgctgcgcatattctntataggtatcaccctctntcttaaacatattctgcagttgagtac

SEQ ID NO: 281013 - DNA, 424 bp, Glycine max
  unsure (1)..(424): unsure at all n locations
ttataattctaacctttgttgcttaccctagaactaataaccaacctaatattaggcgttttttctcttctcatttaaactcgtacatcataacttcctttaatcaacgtgtgtgtttttctaccattaagtgacttattatacgattaatatatcacttcagaatggcatatacaccgcatatcttgtgattgtacagaccctctatgtacttgtctatctaaggtgatcgatatacatcttggctcatatccctgtggctttgtctcgatcatctgccaggacctctacattattttatgcagctacttatgcatccacttcctatgtctagaataggtagctatggntagacctaacacacctccacttttagtttcaaggagcatggagctatattgtgcacatccatttcattgtcggn

SEQ ID NO: 281014 - DNA, 379 bp, Glycine max
tgagctggccgctgagcgaggcaacgcgctaagcctgtcttgtgcgctaatcgagatgtcccattcttcaactctttcttcaaagctttatcttcaagttattgtatcaatcttcctccagagcactagtatatctcattcttttgaatactactggtcaagaattaaaatgatattaacatcctcattattccattaaagacaatagtaaagtacaggacttgtaatcattcttagtcagatatgactatcaattaaatgccaatatcacagctatcatacccattagagcttgagtcatattaaatgacgatgaatctctcactcttagcatcaagtccttctcttctcctgtctaggacatgaacatgagctatac

SEQ ID NO: 281015 - DNA, 409 bp, Glycine max
  unsure (1)..(409): unsure at all n locations
ttcttccncttcatcaaagtaaatcaacattcatacagcacaaattaccacagccaagataacagggcaaaggcagaaaactctgcccaaaacaccaaccaaaatcacagcttttctcacttaaagaccccagtaacaattccttcgatccaattcgttaaccgttggatcgactccaaaattttactggaagtctatagtacataagcctacattttgaccgttgggatctactancaaacatccagaactcattctgcactactctttccacaggcaaccacacacagagcattttctgcacaaagcccaaatcctgctgcacctcatttgacagcaaaattctgcataagtgcagatttcgaaaatcacccttcctctcatccaatcttgcccaaatcaaatccta

SEQ ID NO: 281016 - DNA, 372 bp, Glycine max
  unsure (1)..(372): unsure at all n locations
tcattaagaagctttcttcagaagcttcattangagacttctagcacactctagacatctttcganagatcccaacggtgagatcatggaccagtgtcttgtgaagttgcagacacaaattcgagaagatccaacggttaatgaaggcttgaaagcggttgtaccgacgaagcttcatgtagctttttctagaagcttcattaagaggctgtctccagaagcttcctcgtggcttctttgagaaagcttcttaagaggcttctttgagaagctagatccttatctatncacacccctctattaactaaattaactttcttaaaataattaccgatggaataacgcacagatattcaacctcaaacataatac

SEQ ID NO: 281017 - DNA, 348 bp, Glycine max
  unsure (1)..(348): unsure at all n locations
ttcttcatgttagagtcaatgatcaaattgagaggaanaataatagctatgctaaacaagccaacaaagggagaaagaaggttgtcttcgaacccggagattgggtttgggtgcacatgataaaagaaaggtttccggaacaaaggaaatcatagcttcaaccaaggggagatggaccatttcaagtgcttgaaagaatcaatgacaatgcttacaaagttgagctgcccggtgagtataatgttagttccaccttcaatgtctctgatttatctctctttgatgcagatggagaatccagattgaggacanatccttctcaagagggagagaatgatgangacatga

SEQ ID NO: 281018 - DNA, 280 bp, Glycine max
  unsure (1)..(280): unsure at all n locations
tactcagcttgaaaaatcaatggtctaactntcacacggatctccaattcatacgcatcacatattgagacgcttgaaattgaacagcggaagctcttgagaaatagtaatggtcataacttctaactcggatgtccgattcangcgactcacatatagagacgcacgagaatttaatggtcataactgttcacactaaagtcctattcaggcttataatatatcgagatactcgaaattaaacatctgaagctcttacgaaattcaatcggcataattt

SEQ ID NO: 281019 - DNA, 401 bp, Glycine max
  unsure (1)..(401): unsure at all n locations
agcttataagatcaaaattgtcttaatcatttccaaatatgcatgtgaattatgacgcatncacaagaatcaagccaaggctattgtgcaagcaatcaatggggccaaacacaccaaatgattataatgatggatggctcaaattctcacaaagggtaaatcatcactttcaaattgagctttcataactatcatgacatgtagagaagaatcaaggatttcaagtcacacaatgtcaagaactcttattttcaaaacatttacgcatttcttgaacatatcctataattcaaagaataacatgcaaagtcgtacgtgcacacaaaattgacccaaaatattaaactgaaaatccgacgaaactaacaacattaacaaattaacacaactaacagattaac

SEQ ID NO: 281020 - DNA, 295 bp, Glycine max
  unsure (1)..(295): unsure at all n locations
aatgctactcttaagacaaanatggcgtacaacctccttcaataaacacaaacatcaatgttaatttagagcaaacttatgcacatatttccttacgaacattcactcgcacaagatattcttctaactaagaaaaatgcacccatgcacaatcaaagcaccttcgttacctagattatttgtatgtacttccaaggtggactacctacatcacatgcattttcttggctaaatntacatacatgcatactcaaagcatcttggctaccaaaattgcacacgtcacattctggta

SEQ ID NO: 281021 - DNA, 382 bp, Glycine max
ttcttggaatggatgcttcaatggaggaaaaaaaagagagagagaaagagagaggggggaagcatgaaattgaaggaagaaaaagggagagaagttgaattgtgagttgtgtctcacaagactctcattcatcaaagttacaacaagtgttacacatgcttctatttatagactaagtagcttccttgagaagctttcttgagaaaacttccttgagaaacttctttgagaaaacttccttgagaagctagagcttatctacacacacccctctcataactaagctcacctccttgagaagcttccttgagaaaattcctaaagaagctagagcttatctacacacacctctctaatagctaagctcaccttcttgagatga

SEQ ID NO: 281022 - DNA, 361 bp, Glycine max
  unsure (1)..(361): unsure at all n locations
cttcgattcattctatgtacccgtagtggtccacattgtgtttcgtgcatttatattctcgttntggttactatttatacccccctcttgacgtgcttaagccattttacttaagtcatttctcgcttaacttaaaaataagataaatttccaccgaatgtttgaattgtattatccattaacttcggttaaaatcaatttcgaccgttcggtcatgccgtaaccacgttggaaatcaaaaagagggtaaaaataatataataatcaaaaaaatatctttttagtgaaatataagcggaaatcattcngacgttttctctttgggagttctcattcttaatcgaattaattaataactaaa

SEQ ID NO: 281023 - DNA, 399 bp, Glycine max
  unsure (1)..(399): unsure at all n locations
tagcttcttgtattgaacattgaaagaaattccattcctaaaggacactgttctatctactaaatgattcttgcccttgcttcttaccgcaagcataagttatgcttgttttttccttggcctttttctaatttaagagttatttatggacttttaaaaaagaagtagatccgtgtggtccttgacacttttggccttcttggggggagtagccaaaaaaaggtgccacccgatgctattgaactaacaggccttattctacatccaaaattgatacatntttgtacctactcatccttttctttctcatcatcattttccacatacctcaaccaatcatgaaggtttttttttaagttttctcttctcacaggcttccttgatgaagttccctactct

SEQ ID NO: 281024 - DNA, 382 bp, Glycine max
  unsure (1)..(382): unsure at all n locations
tatntattatcataccttatataattatcatactctcgaatagtagacgtttacgaccacatgttaaggtacattatgaatctgcgaatattattatttcataaccgaaagccagtncttgtgcaacggtaaagttgtgtcttggtgaattggttgtcatgggttcgaatccggagacagcctctttgcatatgcaaggatnaagctgcgtacaatatcccttctccatatctttgcctaacgaagagcctcttggcaatggggtacgacagntttttattattccataacaatattgcagccacttaatttgatcacatatttatctttatgagaacaactaattaagtgataactcttaacattgtagttattaattatg

SEQ ID NO: 281025 - DNA, 330 bp, Glycine max
  unsure (1)..(330): unsure at all n locations
agctntgatcttttcaaaggagatgaagaanacttctctgaggggaagttcaatgttgctgatagtgttgtttttcagattacacagaacaagttggtacttagaattattccccagcaacaggacatcattgtttgcagacatgcacaanggatgaggaaagtaactgcgacagaattcaaaatgcttgtaactaactttaatcaatagagtccaagacttttgaactccaaacttcttcatttgccatataacaagatgtgttccgtcttcattgtgagaaaaacagaagcaacccctcaaaaccctaacttctggcaaccaaaccga

SEQ ID NO: 281026 - DNA, 533 bp, Glycine max
  unsure (1)..(533): unsure at all n locations
ctcaccctacatacntactcactagagtatgtctaccgtttggatacgtattatattctctctctctcaccnccctcagcactaaccgttganaccattaatgacccctccntattgaggcccttctattagtgacctatagatactcaagcttatanggttgagctcggctttgagtgaatatgccaagtatgagttttgctcattacctggcgtaagcctttttctcttattacaggctcggctcggcttacataaaagtctgacttggcctaagagcttatttaacaagtttgcttaaagacgtctttgaccaattaattggttaatacctagtggaatactaactacaaaaaacttaataaattttggataagtaatgtacacatccaaaaataatttgttatacaaaatcatatatgaataaaggttgttaaacacaaacgattatcaaagaatatgagaaataatatacttaaaaatatatggattagagatgattatactaatatagccaataaaaatattaaatn

SEQ ID NO: 281027 - DNA, 330 bp, Glycine max
  unsure (1)..(330): unsure at all n locations
agcttgaagatctagcctctatagaagcttctcaagcaagcttccatcaacttatgaaaaaagatagactttgcatccccttctctcaaccatttgagcctagattgctgccacaataaactacacttcatacctagaggttagggatttaggggttggaggtggtggatgttttggttcaaggtgtggtggtgaattggaggatttgaatttggttggtattgagttgattggttatgttctaggttctcttttatctacggngggatgctggtgttggtgattntgagagattggttttttaatctgatatgatttccccccctcaat

SEQ ID NO: 281028 - DNA, 342 bp, Glycine max
  unsure (1)..(342): unsure at all n locations
gaatcacatattctaacacatagagagtgtgtttacaataaggtatagttagataaccttggtaagaaaaggattgactctataagtacaatgtttctctcttattttcttatgctttggacttaagtattggtagtgttctatgttaattngttagttttcagaaaagacttgatgccccttttatgcttacagtatgagcgaatcaatgtggggtcttgattaatcagaatatgactgttgacaatctttgattctttgattcctactaatgatagatgatgcatgtctggattgatccagaatcaatactttgtaaatttgtccttcatatatcaattc

SEQ ID NO: 281029 - DNA, 319 bp, Glycine max
  unsure (1)..(319): unsure at all n locations
agctttctagattttcgaatggtcataagttntcacacggatgtccgattcaggaaaataatatatcgagaccctcgatattgaacaacggaagccttcgagaaattcgaatggttataagtttgcacacggatgttcgattcggggacataatatatcgagacgctcaaaattgaacaacggaagctctcgagaaattcgaatggtcataacatttcactcggatgttcgattcaggtacataacttatctagacgctcgaaattgaacaacggaagctctcgacaaattttaatggtcataaattttcacacggatg

SEQ ID NO: 281030 - DNA, 386 bp, Glycine max
  unsure (1)..(386): unsure at all n locations
agcgtctcgatatattatgtccccgaatcggacatttgtgtgattacttatgaccattcgaatntctcgagagggtttcgtgttcaatttcgagcatctagatgagttatgtccctgagtcgaaaatccgtgtgaaaagttatgaccattcgtaattctcgagagctttcgcagttcaatttcgagcgtctcgatatattatgtccccgaatcggacatctgtgtgaaaacttatgaccattcaatattctcgacagcttctgttgttcaatntcgagcgtctcgatatattgtgtctccgaatcggacatccgtgtgaaaacttatgaccactaaaatttgtcgagagcttgcgttgttcaatttcgagcatctccatatataat

SEQ ID NO: 281031 - DNA, 417 bp, Glycine max
agcttctattctgaatttttagcatctcgatatactgcgggacacaatcgaacatccgagcaaaaagttattgtcgtttgattttgctcggagcttctgttctgtatttcgagcgtctcgatatattacgggattcattcggacattcgagtaaaaagttattgtcatttgattctgctcagagcttctgttctgaatttcgagcgtctagatatactacgggacacaatcagaaatccaagtaaaaagttattgtcgttagattttgcttagagcttctattctgaatatcgaacttctcgatatacaacgggatacaatcggacagccgagtaaaagttattgtcaatttattttgctcaaagcttctgttctgaatatcgagcgtctcgatatactacgagacacaatcggaca

SEQ ID NO: 281032 - DNA, 346 bp, Glycine max
  unsure (1)..(346): unsure at all n locations
actcgaatgtccgattgtctcccattgtatatcgagacgttaaatattcagaatagaagctctgagcaaaatctaacgacaataactttntactcggatgtccgattgtgtcctgtagtatatcaagactctcgaaattcagaactgaagctctgagcaaaatcaaatgacaaaaaaattttactcggatgttcgaatgaatcccgtgatatatggagacgctctgatttgaaaactgaagctctgagcaatatcaaacgacaataactntntactcggatgtccgattgtgtcccatagtatatcgagactctcgaaattcagaacagaagctctgagcaaaatc

SEQ ID NO: 281033 - DNA, 414 bp, Glycine max
agcttgccgtctcagctcgttcaggcgagcaaggttgcttcctccagaagcaacagccttctggaggaatcttctggagggcccaagtgggcctggttgctatttacaccccctttttactaaatgcaccccccttctattattttgtaattcttttccgtaacgttacgaaactttacgaatttcataacgatacttattttccttccgcaaggttacgaatccttacggattatgtatttactcttttttagctttcgaagaagttacggaaactcacggattgcgcaaaaacacatcttttcggtttccgccacattacagaatttcacggatcgtgcaagcctgcttccttttaattactgagacgtctcgggacttcttttattgcatgtcatcaagtaataatccccg

SEQ ID NO: 281034 - DNA, 372 bp, Glycine max
  unsure (1)..(372): unsure at all n locations
acccctcagccaaatagtatccatcttgggctcttttcccacaattcttgtaaatgggagagaaatgttcatctaaagcatacaagtccctaatgttatcaaatcctanaatttgagctcctanggagcaaaacaatgtgtgtctcctagagagggcatcagctaccacaattgtttttccctttntgtatttgataacatatggaaattgctctangtactctacccattntgcatgccttttgtttaacttgctttgccctctaatgaacttaagtgattgatgatcactatgaatgacaaattccttggaaacaaggtaatgttcccaagttcggagtgctcttattaaggcataaagctctttatcat

SEQ ID NO: 281035 - DNA, 413 bp, Glycine max
atcttcaatttctcctagacactcatcataccgagggtttgtctcacatactttccaaattcttcccacttcatccacctttcctaggtttgcatagaggggaagcacaattcggcatatccaccgattctgtttataagtttccccttccatctcctttaataaagtttcagccttatcttgaagcccataagagatgtaaagcctaatcaaaacaacctgcgtagtgatgtctggttcaatgcctcgagccttcatcctatcaacaatttgatccattccatcaataacttttggactggccttctgtgtctattaagatcgaataagtatgagaagaacggttgatattctcattttccatatcaataacacatcagctatttccttcctgtcattccttctatacagaa

SEQ ID NO: 281036 - DNA, 546 bp, Glycine max
  unsure (1)..(546): unsure at all n locations
tagaactgcattntagantcactagngatattatcattatgatctagaattgtntttgttcttnctnnctttnnnnnnnaanagaagggcgnattgaaaccattgttgagcctantngtaanangcgacactatgnnaaactcaagctatacanagagggatganagannttatantatgaattatttgggatatatttgagcattttgacataatgctgagactgatgtgacagcacctcttctggcacatttactatattatttggataatagttaaacatactcaacaagttttttacatgagaagcttgttatgattatgagggagattaacgtgacacatattggtaaaagtcaatattatcttctgtagagctaggattgagctcatgcaaatgtgaatctataacactaaattaagaatcatgcttaaaattgttgatattagaaagcattgaaggggtagcatgacttctaagattgtcccttgcacatacagtgcatagcatatatgcacataaatatgatgctaattgatattttg

SEQ ID NO: 281037 - DNA, 414 bp, Glycine max
  unsure (1)..(414): unsure at all n locations
tgcttccatctaaaacctcctattgtaactgaaaggtgataacttgccatggaaggctaaagctttggttgggaatttctgttgatccttgatgcaaatattctttactatctatttaatgttgttttgatgtgttcactgcttctatctgcacttaattcttgcatgcttttggtctgatcatccatttgggtgtaaagtttggattcttagcattgggaaatgttttgaatccttcaaactggatagagcagggctagataactgtattgtctggacacggagtgtanggactctagcttttaatttggtgtgaccttaatgttagatgagttgagttccatcaagttatggaaagaaaaataagagagacaagacaaaggacaacaagagtggaagatataagtcaagatg

SEQ ID NO: 281038 - DNA, 377 bp, Glycine max
  unsure (1)..(377): unsure at all n locations
tagcaccccacctgacgtccncaatgtctcctgacctccgcgacatatctncaggtaccactctgtggtcaacaataaaagcaggaagtttcacccttcaacacttcctcatctcaagcttgtaggattatggngtacccatcacatgtggtactangtggcggtcgggcgatggtgcacaacaagtttttcacatccacaaagcgcgcataaacccaccatcccctgttgcccacctccatctgagctcacgtactcccacgtagcccatatcctcgtttctctcaacaccgggtccccatcaatcctctcaagcttncacaacatccaagcaaaacaacattcanacagcacaatctatcacagccaagaaaaca

SEQ ID NO: 281039 - DNA, 351 bp, Glycine max
tatcttaactctattcgcattcttatctctcttgctgctacatatcgttaacctttatttcaattggatgtgaagaatgctttcttgcttggtgacttacattaagcggtgtatatagagcaatcacctgtgtttgttgcttatggggagttaggcaacgtgtgccgcttaaagaaagtgttaatggcttgatgcaatcacctagatcttggtttggagattaaggggtgtggccttgcttttgactgaagctgagtcaaagagatcatactgtaatttataacaatactaaccttggcagcatcttacttgtggatatgttatgatattgtgaaacaagaagtgatataa

SEQ ID NO: 281040 - DNA, 378 bp, Glycine max
  unsure (1)..(378): unsure at all n locations
tactaagcttagcacatgggnaaagtattagtaanatcaactccataagtntgagcttaccccttggcaatgatgcgagcctttaaatgagccacagacccattagaatccattttgatactataaacccacttgcgaccaatatccctcttccctgcanggagagaaatcaaatcccatgtttcaaattttctcaagagctatcatttcctccttcattgcttgtctctagccaccatgactaagggcatctaanagagatttatggatagaaacanaatctagatagcaacaaaggactttgaggtggatgacaaatgagcaatagacacatgtgagganataggataagtatgtgtacaggtgtgnttaccttta

SEQ ID NO: 281041 - DNA, 400 bp, Glycine max
  unsure (1)..(400): unsure at all n locations
ttctagcttctataactggcccacacatggagagacttctcttactccaacctagctcccacatgccacacctcagatctgaatatggacagagctaagttggtctatggcttggtaaccaacatggacatgaatattggagcccttatctcaggtcagatttcttctattgctcagagtaactcatctaagctctgatttctagccttgaatacttccctatgtagagctagaggagttacctctgacagtctgacctatgagagcctgagcctggctattaactnggcctacattaagaacaactattggaatgtggatgatcttatagttaacttcagaggggcaaggataccaagagtccgaccagctgatgtcccttcttttcactctaccagct

SEQ ID NO: 281042 - DNA, 364 bp, Glycine max
  unsure (1)..(364): unsure at all n locations
gaacaggaacattagttatctgttatttcatagcaataaaagccttctcttgttgatccctccattcaaaaacaacatttttcttaacaatttcatttagatgtgcagccaangtgctaaaatctctaacaaacctcctatagaaacttgctaagtcatgaaagctccttacctcacttatattttatggggttggccaatcatgaatggctntcaccttctctagatcaacctgcattccttgcgagctaacaataaatccaagagaaatgacatggttcatacaaaacacacatctatgcacgttaacatacaatttctcacacctaagtggcttcaagatacacctcaaatgcacaacatg

SEQ ID NO: 281043 - DNA, 359 bp, Glycine max
  unsure (1)..(359): unsure at all n locations
ttcttgtatttttaacaaaaaagggtacggaaagtaaacgaaatgaaagtgaaagtacacaaaacaagtagggaccactaagggtgcatggaatgaattgaaagattcgattttgggaacttaccgattgaagaccgaagaacgacgaagaacgacgaagaacgaacgaagaacggtgaagaacaatgaagaaccatcacgaaatcacttacagaaacgtcttggaaacattacggaaatgcctcggcttggattttcttcacgggaaacaattttctctctaattntgagtgatttctcaataccagaagggctgaaccttttccttcttccctccttcccctatntataggagaaaa

SEQ ID NO: 281044 - DNA, 285 bp, Glycine max
gctggccttgaatcagaaatctgaccaccatacagacctttgcccttccatgcagcaacctggagcaattgagcagcctgaagcttatgctgcaaatatttacaatagacctcctcaacctcagcagcaaaatcaaccacagcagagcaattatgacctctccagcaacagatacaaccctggatggaggaatcaccctaacctcagatggtccagccctcagcaacaacaacagcagtctgctccttcctttccaaatgctgctggcccaaacagaccatacat

SEQ ID NO: 281045 - DNA, 398 bp, Glycine max
  unsure (1)..(398): unsure at all n locations
tagcttcacattttgaagttctaacagggatgtgatctgataataagttatgggaacacatagtttcagggtatcccaaacgaacgataggcctaatcgactgatgccacaagtaaatacttgcgtccatttttgtctgtttctatggatcaatgcatggtgaatgtagctctggcctacacttgaaatcactccactattgtaaagtcccccatctcttagtaccatcgcccaatgatctccttcgtgagaatatcctgaagaaaacagaaagatggataaattagcacaacacagttcaagtcctttgtaacttgactcacagacaacaacttatgagatanggagggaacaagtagtgtattcgaaagcacaagggatggtgataacatcacaat

SEQ ID NO: 281046 - DNA, 210 bp, Glycine max
ctactcctctgcaaatctggatgcgtctaagtcctctactagactctcaaatccctgtatacattgctagacctatctactagaagggtcatatactaggccataatatagagaacctattctcatatttacactataaagtggatccaaccttgacccatgggctcatagatctaccctaatgttcatgagaacccttgagccttcttt

SEQ ID NO: 281047 - DNA, 327 bp, Glycine max
tttgcatgctaacattgtccatctgtgttgattggtggaagatgatgaatatacttttttttgcgtcacacacacgtgccaaatatgactaccttgattgatgtccttacttcaccagtttactgtgacattcacttaccatatgagtgattgaatcgtaaatcattattgctatgattctagagattgttattataaaatactcaattcatcatatcgtgatctctgattcgatgacattgctaaattctcttacattatcgttatatacctttgcctctctgactttacctcttaatgcacaaatggacagaatatatcaatatc

SEQ ID NO: 281048 - DNA, 237 bp, Glycine max
  unsure (1)..(237): unsure at all n locations
aattactattagataccgctaatatataagaatttctgcattcangaacctaatttcgtttgattctttaatattatataaggaacaagaatcctccttcttttcaccacatattgggctagtttatgagctatccctagatggctacaatgtcttaatactcaatacccaaagggagaaaccaggaattccttaatagattgtagaagcaagccttttctatagcgcgcacacaca

SEQ ID NO: 281049 - DNA, 423 bp, Glycine max
  unsure (1)..(423): unsure at all n locations
agcttttagctgcttcaattgttcccacaattctctcttcccagcaatatcacatggggcatagacatttacaatgtacagcttcatattttccttaatccatctccctacaaacattaggaaattcgtgcctttcaccctcctatctacctcaaaggatagattattccacatgcatagaagacctccagcagtgtgaattgaaggagcactgtcccaagacacattagcatctccccatatattctgacaagcaagcttagtgataatttctttctttgtttcctgtaaacaaactaagtccaccttatgctttaagttgagctttcgaatagcagcccacttcacccnctacccaagcctctgcagttatatgaaagaattatcattaatacctttatcatcntccttctctgcttccat

SEQ ID NO: 281050 - DNA, 237 bp, Glycine max
  unsure (1)..(237): unsure at all n locations
gattggagaggttaatgaaacaacgagatgatgcgctccatgagagggtggatcanatggaanatagaaatcataatgaagaagaaaggaggagaagagggaatgatggtgttcctagaccaaaccgaattgatggtattaaactcaacattccttcctttaaaggaaagaatgatccggaggcctacttggagtgggagatgaaaatagagcatgttttctcatgcaacaactatg

SEQ ID NO: 281051 - DNA, 425 bp, Glycine max
  unsure (1)..(425): unsure at all n locations
agcttgcggactataccttcgaccaaacacggccgtgtttctgtctcggcccggatttaaagcgggttgcagtaccggctccgcttccctaaccgtactggaggcggttgccgtggctttatcctctatggttttctggagttttaacatgacctccgagatggaagccatttgatcttttaaggccgatagatcggccttcatctgttcctgcacgccctcttcattatccatttttctggatcgagtgttataggggtgccttggtgttttcttagttatgatgaaattcctaaagaaataaacaatggtgagtatgccaccaaaacatgagtatgcaaatggatgatcggagcactnggatccaccccaaggtttttagataacgtgatgagtccagaacttctcattntataagtagaaca

SEQ ID NO: 281052 - DNA, 332 bp, Glycine max
  unsure (1)..(332): unsure at all n locations
tcgtcttacagatagcananaggtttatacggataaccactcgtgtatttccgcccgactgtgtgactcanaagtcagtatgacagatcttgtgagcacggaagatgacgtaaatctccgcgtctcaacgggcttgtcggccgcgattgacgaatggcgcangagacgacgttagtctctgcgtgctatcaggcttttcgtcttacagatagcaaaaaggtttatacggataaccactcgggtatctccgcccgtcagcgtgactcaaaagtcagtatgacagagcttgttagcgcggaagatgacgtatatctccgcgtgtcaacgggctt

SEQ ID NO: 281053 - DNA, 416 bp, Glycine max
  unsure (1)..(416): unsure at all n locations
agcttagcacattggttcgttaagcgacatgccttgagaaaccaaacgtctctgagttcgcttaaggcgacatttcgctaagcgagagagtcgaatatagcttagtgaagtgtaacatcaatacactcacacgtgcccatagcatttcacataaacattcccttttatctctcttattcaaaatctctcaatcttacatctgcacgcccaagcattttcttaccgcattatctcagtcaaaccanagcttcaacgatacaagtaagttccctactacgctttttctgctatttttctgaactntaggttagacaaccttaaatctagctctaagaattataggatattaatatttttagaagtagttagagtttaggactctgtgtaggttgtcttgtgtaaaatatgttgagaac

SEQ ID NO: 281054 - DNA, 372 bp, Glycine max
  unsure (1)..(372): unsure at all n locations
tactatccgtttcagacattcttctgataaattcataagcaagatccagtcttccacactttgcatacatgtctgtgatggcagatcccacattaactatattctccaatggtttctttagaatatcacaatgcaactccttccctaatttcagagcagccaaagcagcacaagctggcaaaacactagccatggttagggaattaggcaccattccctcttgaattaaccacctaaaagtggttatagcatcgatattcagcccatgaagcacataacctgagatcatagctgtgcanactgcaacatcaaccaaagtattctgctgaaaatcttgcgtgccatctccacatctcctcccttgaagtatat

SEQ ID NO: 281055 - DNA, 403 bp, Glycine max
  unsure (1)..(403): unsure at all n locations
agctttgggagtttgtcttgccttgatttttttttctttatcattaggttcttgtttttgttctgggtttgaactcactttgcaatgcgacggtgctagttaaaaaaaatgtaaatctgttgaagagctaattgaaaatcaaaattgaaaaacaaataaaaatatttattatattaaaaaaacataaatcatttaataaaaaaaacctatatttatcgtccttttcgaaagagtttacgtagggatagttggacagtctaaataagttaataataataaatgatagaatagattcaagttgtgaccatgaccgtgagaaatgtcaagtttgactgctctagcatttaataaaagtaagatgccttanaatttgngctgaatattcaacacanaccaataatag

SEQ ID NO: 281056 - DNA, 396 bp, Glycine max
  unsure (1)..(396): unsure at all n locations
gccgagttgagaacaacttaatgtgttccattagcttctcaggacgatatcttgcatacagaactcccaactcagtanagatacccatatgtgcacgctccaatcctaacccactctccattagagatatgagttcattgaagcatcctctgttctgatagtactcgctaacctcctccanatcatccaccttcaatataaaacagatagtaagtattcagacaaggtcaaaaggttagacaaagcaatcaaaagttnttctggcacttggttttagtattttgctactagctacatcctttaacttgcatttaaaggatntccaacatgggaagaattgtgtagtaattttggagtgaggagggggcaatcattcctgcaagtacaaaatccaca

SEQ ID NO: 281057 - DNA, 420 bp, Glycine max
  unsure (1)..(420): unsure at all n locations
agcttgaaatgtgtgcattctattgagggaggctctactggcacaagattctcgagattttctttatcaacaaaatccataacagagagtttctcctgaaatataaattaactattgtagaatataattaaaaaacaacagattaataactatgctatatattatgaagtttttgtcacacaaattatgtgcaaatctagtcggactaatataattgaaaggaaggaatcatcagtgaccaaatagcacaagatgtggatagtgaagaaaatgatcgaaggagaagcattcttgcacaatatgtgaaatgtgtttctagcacaagaacattaatccagaattacgataatccaattgaaaccaaacaagatagcattagccanattatgaaagattcttgttaagcacatacacaggtga

SEQ ID NO: 281058 - DNA, 400 bp, Glycine max
  unsure (1)..(400): unsure at all n locations
tctaagattggaactaccaggcaagcaggtaagccttntatttccttcatgtgttccttttcactttagtaatgtgttatttcaattctgtggccttccatcatgtgatatacaggacagagatatcatgcgggttcttgtggagtgttgcttgcaagagaaagcttttaacaagtattataccgtgttggcttccaagttatgcgagcatgacaaaaatcataagtttactctacaggtattgattttctctccctgttgtaggatttagatgagaactaaatngtggaattgtgtactatttgcctcatgagtcanaacagttacattttttaactactcacagagagggaaaatatgactagaggaacacttattatgaaatatatgagtgcatcat

SEQ ID NO: 281059 - DNA, 401 bp, Glycine max
ttcttctaaatcgcacttgtcaatctttatgccccgtgaatgcatttcaatcccctttccctctcacgtacctttcaagggtcaaagctacccctcgatgttctacgcatgtgcgtgctggaataaataatgatgttggctaaaatttattttggcttaagtctttcaactttcatcagttaattcactgatcttggttgttatacttttaaaacaatgattttagttcttgcatgtatctttttaatatatgaattagatttatgtgccctgtcaatctaaaagacatatttgagtgcattcccgtttaccttccttcaaggatcaaaaactataatgtttcttgtaacaacagcaccccttgtgcatatttatatattatatcattgctgattaaaaat

SEQ ID NO: 281060 - DNA, 151 bp, Glycine max
ttactcgcatgtgcgtcacctggaaatatctaagagaagaaagctctataagattatttatgtttgattattaatatgtgtgcagatttcaaacatacatattactggtgatgacatacttattggtgaatatatcaatgtatattggtct

SEQ ID NO: 281061 - DNA, 412 bp, Glycine max
agcttgttcttagcttcctgaacctgaagcattgcaacaaaaccaatcttaacatcaatctacctcaaagactaaaatgaagtgacaacttgttgaaaataacaataaaatatatgaagatgtcaatgtaatagtaataggcaccatccatatccctcaaccctttatagcaaaactagagtgttattacacacggaaacaactcgagtgaacaagaaacatttgatggtaaattattggtttattaacaatcagcaatagtggttatttttctctactggaatttgatcaaagcttcctccttgaatggaacacaggtgacatggttgacatctgttcatttcctactcgattttgtagtatgcctatgctttttgggcatgttttaagaacgagaaccagtctacttatg

SEQ ID NO: 281062 - DNA, 301 bp, Glycine max
  unsure (1)..(301): unsure at all n locations
ntcatgtttatcacacattcaatcttactatagcagannactctaaatataaattctattaaaaggtagcaacagatcttagaccctataagcctatgagttggacagctgtatntgacatatacggctcttctgggccgccctagcagtcagagttcatagaatttctattgtactgttcatacttcctagactcctccacctccactgtggactaaatgtaatgtggacagatctatcattngaaatattatgatggctgcttgtgctggtgtgttttgggatgagtttgggaattgga

SEQ ID NO: 281063 - DNA, 411 bp, Glycine max
  unsure (1)..(411): unsure at all n locations
tgcttatgctcacacttctttacgaacgttcacttgcacaagacattcttataactaagaaaaatgcacccatatacaatcaatgcaccttcgttacctagattattcacgtgtacttccaaggtgtatttgttacctacatcacacacatttcctttgctaaattcacatacatgcatactctaagcactttggctatcaaaaattgcatacgtgcacatcttggtatttctaatacctatacatacacaaacttcatgatgaatcttgactatctacacaataaggtgctacatttcatgcttttttcaagggttnttactacctaaagccgcatgcaaattcaagtatattctcttttgcttactaaaattgtattcacattaaaaggtatttttgtaatgtattttc

SEQ ID NO: 281064 - DNA, 371 bp, Glycine max
  unsure (1)..(371): unsure at all n locations
atgatgacatctctgaaatcaagaaacacacacacacacactntntnctagtcgatcactcacatanatttccattcttcccctttgtttttgagtttatgcttcatttgaaatttagctaattacttatgtgagttcttgatttattccctatatctctccccctttggcatcaacaaaaagccaaagtgtgtaacaaggtattgacacacatatactattaatcattcacaaggcatacattgaagaatataaaccaatcatgaagcatgatacatgaatagatcaaatatataacaaccacatagtcatataatataatgcataattgttcattcaaaccatgcatataaagaaatactatattatcc

SEQ ID NO: 281065 - DNA, 384 bp, Glycine max
ttcttctagattgagatcaacttgatgttctatgcttcttgaaggtggcagtccatgaggaatctccttgggaaagacatctttaaattcctgcaataagggttgaacactaggagaaacataaatagttaactgattagaattatcactctctctctcttgtgtatcactcttttcctcgggtgtatcactcttctttttcatattcctttgtggtgcctcactattttctttctcttggtctctcttttctctcattctgatttggtcatcacacacttttctatgtgatagaggcttaagagtaaacgacgaagatttggctattcgtctgtaaggctcttctttgttacggtttaacaaacgttgcatttgtgtagtcca

SEQ ID NO: 281066 - DNA, 181 bp, Glycine max
atggagaatagagatcatactgaagaacaaaggacgagaatagggaatgatggtgttcctagacaaaaccgaattgatggtattatactcaacattcctccatttaaaggaaagaatgatccggaggcctacttggagtgggagatgaaaatagagcatgttttctcatgctacaactatg

SEQ ID NO: 281067 - DNA, 386 bp, Glycine max
atcttgcatttggaattgcgaaagccccactccatcattaggattagtacctgacatctcaaacaaacaaatcaaacgtaataagacaattatagttgttgtttgaatacctcacccactcaagtgtatcacacaattatggcttttctctaatgaaacactcttgccttttaccactctaattccccttgagttcttaggcaattcaagagattatggccacaacaaagaacaattcaccaatatgtgtaaggtaaggctagagagacaaggaaaaggttaaccaagaaaaaggctaacaatgtttttaggcacagatgaaggaaataaaattcagaatttaggaattcaagtaacaatccttcatgcaaccaatatattacctt

SEQ ID NO: 281068 - DNA, 368 bp, Glycine max
cgaaattgatcaacagaagctctcgagaaattcatatggtcataatttgttacacggaagtccgattcatgcgcataatatgccgagacgctcataaatgagcaacggaagctctcgagaaattcaaatggtcataacatatcacacggaggtccgattccggcggatagtatatcgagaagctcggaattgcacgacgaaagctctcgagaaattcaaatggtcataacttttaaaacggaagtaagattcaggtgcataatatatccagaaagttgaaattgaaccacggaagctgtcgatatattcaaatggtcataacttatcacacggaagatcgattcatgcgcataatatatcgagacgct

SEQ ID NO: 281069 - DNA, 406 bp, Glycine max
  unsure (1)..(406): unsure at all n locations
agctntgagataattcaaacaacaataactgtttacacggatatctgattgagtcatgtaatatttcgagacgctcganattgaattcngaagctctgagcaaattcaaacgacaataactttntactcggatgtcttattgaatcccataatatatcgacaagctcgaaatagaatcttgatgctctgagcaaattcaaacgacaataactntgtactcggatgtctgattgagtcctgtaatatatccacacgctccaaattgaataccgaagctctgagcaaattcaaacgacaataacttttaactcggatgtctgaatgagtcctgtaatatattgagacgctcaaaattgaatcccagagctctgagcanattcaaacgacaataactttttactcggat

SEQ ID NO: 281070 - DNA, 244 bp, Glycine max
  unsure (1)..(244): unsure at all n locations
aatattgtagccgatgctctntctcggcgtcatgcattactttctatgcttgaaacaaaattgattggtcttgaatgtttgagaagcatgtatgataatgatgaaacttttggagaaattcttaagaattgtgaaaaattctcagataatggtttctttatacatgaaggctttcttttcaaagaaaacaaaatgtgtgtgcctaaatgttctactagaaatgttcttgtttgtgaagcacatg

SEQ ID NO: 281071 - DNA, 401 bp, Glycine max
  unsure (1)..(401): unsure at all n locations
tagcttgtgctttgaaaattatgtgtatggaatatntttgagtttagaatgctgaactgggatcatccatttctattttctagtttagttattaattcatgtggctgcggtaaaattggtttaccttacagtttacattgttggttaaaaaaagacaatgacatttatattatgggttatttaaggcttatttaaagttaagcatagggtttggttatctactgaaataatgctctactgaaataatgctctgttgctagtgacaatattgtgaagcttgtgctttgaaaattatgtgtatggaatatatttgagtttagaatgctgaactgngatcatccatttctattttctagtttagttattaattcatgaggctgtggtaaaactgggttacctta

SEQ ID NO: 281072 - DNA, 283 bp, Glycine max
gatgcccctccgacagaaaaattgcttatattgagacatcattctgctactggtatgccttggatgaaaaccagggcactaccaagctatggccggtctccaacaaaaataggatgaaatatcgaggtctatgttgatgacatggctgtcaagtcttatagcatgacccaacacatcacagtcttggaatatgtgttcagagagattcgcaagtataacatgcgcctcaacactaataaatacacatttttgggttgaagggcaaaaagtttctaagcttcat

SEQ ID NO: 281073 - DNA, 393 bp, Glycine max
  unsure (1)..(393): unsure at all n locations
agctttgaatgcactattcaatggagttgacaagaacatcttcagactgatcaacacttgcacagtggccaaagatgcatgggagatcctgaaaatcactcatgaaggaacctccaaagtaaagatgtccagattgcaactcctggctacaaaattcgaaaatctgaagatgaaggaggaagagtgtattcatgacttccacatgaacattcttgaaattgccaatgcttgcactgccttgggagagaggataacagatganaagctggtgagaaagatcctcagatccttgcctaagagatttgacatgaaagtcactgcaatagaggaggcccaagacatttgcaacatgagagttgatgaactcattggttctcttcaaacctttgagct

SEQ ID NO: 281074 - DNA, 403 bp, Glycine max
  unsure (1)..(403): unsure at all n locations
tgctaatccatggaaactcctaatatctcccacactntnntgggtgggccattctttgatggccttgattntctcaaggtccacttggaccccatttctaccaactacaaaccctaagaaaactatattatctacacaaaaggtacacttctctatatttgcatagagggtgtttttcctaaggactgaaagaacttgcctgagatgtcctaagtgatcatctangctcctactctacactaaaatatcatcaaaataaataactacaaatctacctatgaaatcccttaagacatgatgcataagcctcataaaggtgcttggtgcattagtgagcccaaaaggcatcactagccattcatacaaaccaatcttggtcttgaaagcggttntccactcatca

SEQ ID NO: 281075 - DNA, 421 bp, Glycine max
  unsure (1)..(421): unsure at all n locations
agcttttgatttaataacagatgaaatagttgctctgatgaatttgtggacctcatggtcccaatttctagatgagtgcatttaccatatttcctgccagtcccagcaatattttgcctataataaactctgtattgcttcctaaanttggaccactgtatatcattntatctccaaaaaccttgtaatctgttacctttgaccagtttatatttaaaattaaaataaatttggtattagttgcaattgcaaccattgcttggctagaggtctgcatttcactcgacctttaattacttggatgtgttttctactgctggttcttattntaaattagtgcttgttggtgtatgtttaagaatgcttcgcttatttattggtgtttgaatatgaacaggagcaacctctttccttttcactg

SEQ ID NO: 281076 - DNA, 391 bp, Glycine max
  unsure (1)..(391): unsure at all n locations
tctccaaagcatttctagcataagaaaataaattaaataagcttctccgtaggctaaaattagcttatgcataagttaaaagtgtttgtgaacatcanagaggaggtcatcaatattatggagttattctgtcttttcaaaagcattcttttgcaatttctctacctgacttaatctccttactccctgngtttctttnttctgtattttctccctgcttctctgtccctaatgtccagaanattgccatgatagatacttttgttgtgctcatggaatcacacttattttacaggtgaaaaatccaaccgcaagaattgaacatgaagctagtacatccaaaattggagaagaatcaattgtttattttcaacanaggggaatagactat

SEQ ID NO: 281077 - DNA, 405 bp, Glycine max
agcttctcattgtagctacctattctatttgtagaagcatgtgtaatacttgttgtaactttgatgaatgaaagtattatgagacacacttcataggtccacttctctccctctcttattccttcaatttagagctcccccttctctctttctttgtctgcattaaagcatcctttttaagcttcttatccaaggcatattcttggtggtgaagctccttcttccatggcttattccctagtggatgacgcctcctctcacctcttctgctttatctaccggtgcatctccatggtggaaaatcaccattgaaggacctcattgatgctcatagatccagcctccatagaagctccacaagcaagcttccatcaagtggttatctgagcacaggagcgtcaagta

SEQ ID NO: 281078 - DNA, 359 bp, Glycine max
  unsure (1)..(359): unsure at all n locations
tcacataccagatcaacagctttctttacaatagcctcaagttccacagaccnctctcccattgtctgaagctgcttaatcttctgctctcttgccagcaaagacaatatgcacttttgagctgagcacaattagaacccttataatgtagattgattagcaacaaaatacaagatatgccaatgccccacaacatattgtagctaagataataaaacaactaatatctaaaactaaagatagagataaacattggcactntcctagttacatagtgactctaaaccattggttatgttatgagcatacaagaaattacctctcagacgtacataatgtctccaaacctcaaacactct

SEQ ID NO: 281079 - DNA, 400 bp, Glycine max
  unsure (1)..(400): unsure at all n locations
agcttcatgatgatgaaccaagcaattttgatgatgtcaaaagcccaagtaattgattcaagattgattcaagacttcaaaatcaagcatcaagaatccaatccaagattcaagagaagaaatcaagaagcaacaagtcaagacttcatataggatatgtattaaaagatttttttcaaaaaccaaatagcatagttttgtgttacaaaagaattttctcaaattttctaagttaccagagtgattactctctggtaatcgattaccagttatcagtaatcaattagcagtgaccagtttggttttcaaaatgttttcaaatgatttataatgttccaaaatgattttcanatagtgtaatcgattacactatattagtaatcaattacaagtgaatatg

SEQ ID NO: 281080 - DNA, 372 bp, Glycine max
  unsure (1)..(372): unsure at all n locations
tgcatctataattatatcgaactaattaaagtaatggttntaatcatggttaaataggtattagttaagtaatattattttaattntttaatattatatgcaatattaagtgaaaaatatgtttgaacctatttctacttccaactaatgtttaatactattatcacttgttntttataaaaaaatattagagataatattatttaaaaaatatatattttgttaccgagtcaccaaatggttggaaatgagtgatgtgaagttcttcanaaggacccaaattgtgagtccaaaacaatgtttttttttcttgttntttaataaaataaaaaagaagaanaaagtctctttcaacaagctgctctgaattta

SEQ ID NO: 281081 - DNA, 349 bp, Glycine max
agcgtcctatttgcctactctggatacatttatgtttagacgcaccctccaacgatgagtaactatttcgtcctgaggataacaacgtggcgctatacggtggtgtacttctgcatcaaacatgtaggctcttcataccagagattgatggaccacatgttcatatagcacatcaaacgaaacatcgaggtctatgtcaacgacatggttgtcaagtcccaagcatagttcaacacatggcagacctagaagaggtcttcaaagaacttccgaaatatgacatgtgccaatgatgtgccatcattgtctcctatttcttaaccctttttgtcaccattctaattaccta

SEQ ID NO: 281082 - DNA, 310 bp, Glycine max
agaccctcgtggaggtacagcatcaagaagaacgtggaacatcattctacaagctacgagtggtgatgtaagcatactataggctgttaggattgttagttagctgttacgtaactaactacatgtataaaagccatgcacgaacccgtgaaagggattatggaaataatattgtcattctgcgcttagactttccttccttctctctctcttcacctatctctcttagagtattcagtctcgatgaaagctacctctaacagaaaatctcaaacatattattacgtttccaacattagatgttactacc

SEQ ID NO: 281083 - DNA, 184 bp, Glycine max
agctttcgatttaatatcttatgaaatagtcgctctgatgaattcgtggacctcatggtccccatatccccacaacagctggtacaatctttcctgccagacccaccgatatttcggctataatacaccctgagttgcttcctaaatttggaccactgtatattcatttatctccaaaaacctt

SEQ ID NO: 281084 - DNA, 591 bp, Glycine max
  unsure (1)..(591): unsure at all n locations
gcacactcacagcactcgtctttactctctgttgtttatcctgtgcgaaagtcagacngcaacgnacttatactcgcttctccctcgtncnncnacgcaagccgtgcgccattgaagcccatcgtttgagcgcattatagatactacagctcgctaaacacgggaacataccaaatancccacactattatggcgagggcctattccttgatggttcttgaatgtctcatggagcactatggacccgcactctctatcaacatacaacacctctatagaatgacgtaatatcatcctacacacaaacaggaccactcttctctaatatattgcgctaagagcggcggatctcccttaacgactcgagaagagcttgctctgactatgttcttaagagatcaatctaggctcctgactgtacactaaaatttcatcaaaacaaataactacagatctacctatgagaacccttaagacacgatgcataatcctcacagaggtgcttggagcactcatgagaccacaagggatcactaagcattcatagaccctatacgtggtctgagagcggcttagcactggtaccgctcg

SEQ ID NO: 281085 - DNA, 386 bp, Glycine max
agcttctagataaaactacatgaagctgcctcggtaaaaatgctgcgcagcctttgttcaccgttggatcttctcgaaatttggtttgcaacttcacaagacacttgtccatgatctgaccgttgggatctttgagaagatgtctgaagtgttctagaagcctcttaatgaagcttctagaggaagcctcttaatgaagcttctagagaaaactacatggagttgcctcggtaaaaatactgcccagccttcgttcaccgttggatcttctctacatttggtttgcaacttcacaagacacttgtccatgatctgaccgttgggatctttgagaagatgtctggattgtgctagaagcttccgttcccgagagcatctcttattta

SEQ ID NO: 281086 - DNA, 358 bp, Glycine max
  unsure (1)..(358): unsure at all n locations
tcatcaactacttgtttccaagggaaattctataaacagacctcccatctttaatggagtgggttaccactactggagaacccgcatgcaaatctttatagaggcaatagatttaaatatttgggaagccatagaacaaggaccttatgttccctctataatagccggaagtgcaacaatagaaaaacctatagcagattggactgaggaagaaagaagattagtacaatataatttaaaggccaaaaatattattacatctgccttaggaatagatgaatactttannggttcaaattgtanaagtgctaacgatatgtgggatacactacaagtaacacatgaaggcacaacatat

SEQ ID NO: 281087 - DNA, 100 bp, Glycine max
tcacacgattatatcacttaatcaggcgtactaacaggcgatcaatggcaccattatctgccgtaatagaatacaccacgccctgtcctcattgattatg

SEQ ID NO: 281088 - DNA, 405 bp, Glycine max
  unsure (1)..(405): unsure at all n locations
atcttgcctttttaacctgaaattgagaganaatgattattaaacacataaaatgagaatacttaatatttattacctatactcaacagaaaatacttataacactacaaaataaccataaattacgagagtttgatacaatttatacaagttttatacataaaagttagtcattttcaccaactaatagagaccaaccacacataaagagcaagtgtgcaatagacaattcttacatttctcttcttgcatctcaagctgaacgtatcatatgcatcgaccagaacaacgatggtcacgctttccttgcggtgatgataagcaagataggcattgatggcatctaagtccactagcccgtttacatttggaaatagtatagtcccaacaccaacaagctaatat

SEQ ID NO: 281089 - DNA, 382 bp, Glycine max
  unsure (1)..(382): unsure at all n locations
ctagagaatgtgagccanacatgcctaagttagtttaggcttatgatgggataggttaaaagtgatggtaatttctttagagaattgttaagagatggtaaattgtaagtcgagttataaccttccagctaaggaaattatgcactatctattggcgggctggcattgtctaaaataagaccgtttactctaaggaggggagtctatattaagatggtgtgatccgtgtataacccaggataaccaagatgtaccaattctcaactaactactaagcttttgtattacatcgtgtaactagttcacttatgcattcgtaatgtctaatgttngacttctagtgtttccttgattttggggtgtcagcatgatgttgtgatgt

SEQ ID NO: 281090 - DNA, 389 bp, Glycine max
  unsure (1)..(389): unsure at all n locations
ttctttgatgtatctntgtccagaatccctttgaaggagtctctagccaccctgtcattgatgcataagaactcccaaatattttccctaagttatgcaccctgccaaaactgaattcagtgctaatctgatctctaattctccagtaaacatacttggagaaaaaaagatctttatcttatccctgctaatcacttgaccccagctagagcagaaactgctacatctctctaatgtgactcccaagttacttgttgccttgctatagattcttttttgttcttttggggcctttaatgtttgatagtatgatggaattctctagaactcttggttgaaacttgaaatctatacctgcccttatgagaatgctaagaacatatttactt

SEQ ID NO: 281091 - DNA, 343 bp, Glycine max
  unsure (1)..(343): unsure at all n locations
gcatatatcctggaccagaattcatatcactgaatatgtacttttgcatctctttccctttgcaggttagattgcatgtggaggtgccatcattggtatgtgaggattgttacaagagggtcatagcacagtttatgaaacaagcaaaggtgctatggngttacacttatgctctatataattatataatattataatgtaatgtctctctcatattctggctcanagaaaatatatgcatcanattatagntgtctgtgaatatggtgcagctctatttgtcggtcacgaggaattccagtgtctaaatttgaaactataactataactataacctctcaat

SEQ ID NO: 281092 - DNA, 378 bp, Glycine max
tgcttccccctcatgatcactcttgccttttcatacactgttttgggtacattgaaggcatattcatacacccttttacaaaacaaagaaagtcagctgagtgtggaaatggcttttgctttgaaggcaatttccgaccacactgcagttaaggtttcctttatttttttttttttttcttggctcagccaaaggagaatatcattaataggtaccagaagtagccagataatcacaaaactcatgataagattcatggtcccagatacagtaattatactaacaatagaaactatcctaagtataccctgcaatcccaccatgcactgaatgaacaaattattaacacaacaaagccaagcataatgcatatcccaa

SEQ ID NO: 281093 - DNA, 297 bp, Glycine max
  unsure (1)..(297): unsure at all n locations
ntagtgcccttaattntgatgcaatatttgacattcccataatgtattccctgacatttccttttccttgatacttcatggaaatcaagttctgaaggagagtacttgtttccatcttatccctttttcaaagcgcttttcaatntcaacaaggaattcttcaccactagttatatcatctcaaacaatgccccgaaagacctcaagaatgtcatgcttaatgatcataagactcatgcgaattgaatgatccctcttctcatgaagtttcctttgttcagaggtactggagtccgt

SEQ ID NO: 281094 - DNA, 400 bp, Glycine max
  unsure (1)..(400): unsure at all n locations
agcttttgttcttcagccaccaatccattatcttgaaaggtttaggtccccaatcattggttctagacctcaataggatggggcaatgatcagagaaatctctatccaacacgaattgagtagtatctagccattgggacagccagtcatcagaaagaaggaacctatccaatttgctcatgacagtcccattgngtctacaccatgtgaaatatctcccaacagacctaacctcctcaacctccatatctganatccaagaattaaactcagagatgctagtaagttttatcatacttcatcttgtccttacagtngtttttatcagcataggacacacccaggtctctagcaatctccctatgaagatcctcctcattctcanaataactattattga

SEQ ID NO: 281095 - DNA, 349 bp, Glycine max
  unsure (1)..(349): unsure at all n locations
cggagatgcctgccctagagacctgngattggtatcatagttagttagtataatataatatctaattatctattcatatcttctgagttttcaaatgggaggagggagtcaactcagtcaagtttagaaattgtaggctcatcttaagaaagaaaaagaaacacaactcacatggagccagtcaatacagcaaatattacagtcaaaaccttgccttcagtatatcctttctctattatcattgttgcaccaaaccatacagccagaccataactgcagataaaaacaaagtagagcaaaccatatcccanaccagaggctagtgcctcttgcactccagtcttatatg

SEQ ID NO: 281096 - DNA, 402 bp, Glycine max
  unsure (1)..(402): unsure at all n locations
agcttattggaaatctcatgaaccggtggttgcttgnggactggatgtangcacgggttgtttccgaaccagtataaatcttgtgtttgtcttcttcttccctacactctttactttcctgctgtgcattntttatttccgctntacttttatctaagttattgtttctgttctttactttctcataacttagtagtaaagccttattgaatctagtaacattaagaaggattaatttttaattagtcaagacacattcataattaattcaacccctccttcttaattattccgaggccacttgatccaacacgaattatggaggaggaaagaacaagcatagttaggttccttcgtgggcttaatatggaagtgagggaacaaggtgaactccttccatat

SEQ ID NO: 281097 - DNA, 325 bp, Glycine max
  unsure (1)..(325): unsure at all n locations
gtggtaatcagagcacaagagcttcaagtaggtgctccttatacctccattaatggttttgctntaccttctcttccattggtgtttcttcattnttctccatgtatctcctcacatgtcttgttctaaatgttgttaacatgattctttagagtttccaccgattaaacttgctatagaagttagatttgattntctatggttcaaatttcttgttcttgttcttgaaccatgaattgtgttgagtttaagttcctttaagttntgtcttgttattttttggggctgaaacctaaaccataaaattcttcaaaaatattaaagt

SEQ ID NO: 281098 - DNA, 401 bp, Glycine max
agcttctagcttaatggacttacctagaattaattcctttgataacccttttgagccttgtttccctttccttgttttgaagctcactacaagccttaagtgaaaaaccatgatattaccatatccttaaggaattttggagctctggaattgttttgggaataagtgtggggagtttttgtttcattggacaacttgttttgttggctaagcttcatgatgtaatttgggccatactcgatgtacattgtatattgagtaaatgttagacatgctgaatgaaattatgtttctcaaagaccaaagagtaaaaaataataaaaaaaattcggataaagaaaaagataagcaataatgttgagtgaataagatcttaaatggcacacgattgatgaaactct

SEQ ID NO: 281099 - DNA, 338 bp, Glycine max
  unsure (1)..(338): unsure at all n locations
tcctcttttcttcagttgccgagggcggtccttncgtgagacaaactattggtngtgtcgcgatgttgggttgacgcaacgtgcttggtgccggccctttcgggatcggtggatagaactcgacatccctttgagcataatcttgagggtctttggggacttcttcaggctgttgaggaggctctctttcaaggactggagaagcaatatggcccgcatcgtcttgcaagacgggcggtgagtaattgtgcagcaatccataacggtaagccgctcggttgtatcccaggtgagggctgccatagtgccccagtgtgtcccttccccgtcctactatg

SEQ ID NO: 281100 - DNA, 350 bp, Glycine max
  unsure (1)..(350): unsure at all n locations
agcttcattgtctaacatgtcaacttacaacagcaagccccaagagactcagcataaggatgcacagaccaaagttgcgtatgtaaaaaaattgtatgaccaagtgaaggtgcaaattgcaaagaagaatgaaagctatgccaatcaagcccaaaagaaaaggaaggaagtggtacttgaacccggtgatgatcttggacatttgacgacaaatgttctccaagaaggagggaatgatgagaatcatgaaacatgccanatacagtctaaaggcccaagtggagaatgacgaatgcccaattggataatgacaaatcccccgagtggagaatgatgaatgcccaagtgga

SEQ ID NO: 281101 - DNA, 337 bp, Glycine max
  unsure (1)..(337): unsure at all n locations
agatggaccattcaagtgcttganagaatcaatgactatgcttacaaagttgagctgcccggtgagtataatgttagttccaccttcaatgtctcagacttatctctttttgatgcagatggagaatccgatttgaggacaaatccttctcatgagggagagaatgatgatgacatgaccaagaacaagggctaggatccacttgaaggacttggaggacctatgacaagggctagaacaaggaaagccaaagaagctcttcaacaagtgttgtccatactatttgaatacacacccacgcttcaaggagaaaacgtcaaagttgtgagttgtatca

SEQ ID NO: 281102 - DNA, 403 bp, Glycine max
  unsure (1)..(403): unsure at all n locations
agctntntgttttagaatcttgggatcaactcattttatttcaaaaaggaagtcgtatctagtcaaggtctgagagaccatacaagtttcctaacgatttctaattatgtgggccattaagtctatcatatgctgacaatagccgagaagcccatgaatctcttcgggggcggagtaggtgtctgccatcgccttggccttggctaacaatcggggaagttcttgactcccgttcaaggtaagagcaaaccgatccatccacatggttgtctcttggtgtaaagagtcgatcacccttcctctagcctctttgtccgcatatacttgagcatactcatccgcgattctatgctcgtgggccatggctagacctaactcttcttggtacttggcgatgatagct

SEQ ID NO: 281103 - DNA, 357 bp, Glycine max
gccacattcttcttcacgaactcatagagaggtgatgcaattgtagagaaattatgaaggaaccttctatagaagcttgctaacccatggaagctcctaatatctcccacactttttggggtgggccattcttggatggccttgattttctcaaggtccacttggaccccatttctaccaactacaaaacctaagaaaactatattatctacacaacaggtacacttctctatatttgcatagagggtggttttcctaaggactgatagaacatgcctgagatgtcctaagtgatcatctatgttcctactgtacactaaaatatcatcaaaataaacaactacaaatctacctatg

SEQ ID NO: 281104 - DNA, 420 bp, Glycine max
  unsure (1)..(420): unsure at all n locations
taattctttatattagcgccgncatgcaaacccgcgagaagacggacggttcctgcgttggcgtttccctctaactattacggagaataagggagagaatgttgaatgtgacttgtgtctccaaagactctcattcatcaaactttcaacctaggggtacacactgcttctattatatcggctatgcacctcgtcctgctaacctttttgtgaacactttcttgaaacagttctcttgtaaaactctgctgcgaagatatagcttagctatcaccaccgcccctacatagtatactcactcctttaaaaactatctttgaaaagttcttcatgaacgtgagcgttgctctctccactgtctaatagctatgtgtacttcttggaagaaacccatagtttgtcccccccccttatatgtcg

SEQ ID NO: 281105 - DNA, 420 bp, Glycine max
  unsure (1)..(420): unsure at all n locations
taaaactcagcttgaggattatggngtacccatcacatgtggtactaggtggcggtcgggcgatggtgcacatcaagttntccacatccacaatgcgcgcataaacccaccatcctctgttgcccacctccaactgagctcacgtactcccacgtagcccataccctcgtttctctcaacactgggtccccatcaatcctcccaagcttccacaacatccaagcaacacaacattcaaacagcacaagctatcacagccaagcaaaacagagcaaaggcagataactctgctcaacacaccaaccaaaatcacagcttttctcacttagagaccccagtaataattccttcgatccaattcactaaccgttggatcgactccaaaattgtactggaagtctacagtgcataagcctacat

SEQ ID NO: 281106 - DNA, 125 bp, Glycine max
atcttcagaatatagtgataaggtacaagctctaaaggcagagcttgaaagagcccgaatagtctaagagaagttcaagtccatagccatcagagtctgaccataatatgacgatctaacggacg

SEQ ID NO: 281107 - DNA, 483 bp, Glycine max
  unsure (1)..(483): unsure at all n locations
cttctccctccacattctcatgagtttattaacaacttagataccatcaanaancaccncccgctgcccatgacccctgttgaccctctattagcgaccttagatactaacttgcaccagctgccagcagctcactcgccatcgagctagttgttctncaaaagcacctggaaaacttctggatagccatatgggtctgaattttattttgacccccgctttatactaaatacacacgctngcccttttatgctgattcttttttccgtaacgttacggaaacttacgaaatttcgtattgatactttgttntctcttccgtaaatggtntgggaacttacggattacataatcatccctttttgcgttccgaatgttccgaacttacgaatgtgcattacactccttttgactttcgcctgtacggaattcacaggtgtgcataatgctttctctgacttccacatcccaaaatttacgatg

SEQ ID NO: 281108 - DNA, 329 bp, Glycine max
  unsure (1)..(329): unsure at all n locations
agcttgtccttggtttagacatgattggtacatgatttgngacttgtaggattcaatttgggcaaaattggatgagggaaagagtggttttcgaaatctgcactttatgcagaattttgctgttgaaatgtgcagcagaattttgtataagtgcagaaaaatgcttgtgtatggttggctgtggaaagggtagtgcacatggngttctggacattggatagtagatcccaacggtcaaaatgtaggcttatgtactagagacttccagtaaaattttcgagtcgatccaatggttaacgacttggaacgaagaaaaggttactgggata

SEQ ID NO: 281109 - DNA, 535 bp, Glycine max
  unsure (1)..(535): unsure at all n locations
ctctcagcgacttaacacatatgttatgatggtggnaataatattatctctttattgtcatnnaactacctcacaagtctgcgagcagcgttgagaccccttctttgaacgccatctattatgagaactatagatactgcagcttgagctcggtcaaccacgtatccaacgaatggaatatctgatcgcctatacttcaacaacatctcatatggatgaatgactctggcatactataagctcatgcacggaaaatgtaattatgaaattgagatgcccgaagaaacaccatattctatttaaccatgcattacgtaccatgtccaattatttatgttttaagtgaaacgggtgtatgatcccaacatggttggctcctaacacatgatactaataatggagcgtgaagtttcacactccttccttctttgataatgttttgagaagaaaacgccccgatgagcaacctgataactaatggtctgcactctatcacatcaataaggttttgaacgcatatgcataagatgcgacn

SEQ ID NO: 281110 - DNA, 400 bp, Glycine max
  unsure (1)..(400): unsure at all n locations
atcttcaatcttctcacaaaggagaagacaaagtaaataaggtgtgtctccaaactcttaagaggtgagtttgaatccttacatatgaaagagtcggagtccatttctgattattnttcaagaattcccgtagtttcaaatcaactagaaagaaatggtgagaagttaaaagatgtaagaattatggagaagatactatgctcgttagatcccaaatttgtgcacattgttgtgacaatcaaggaaaccaaagatttagaaactatgatgatagaaaaacttcaaggatcactgcaagcttatgatgagaagcataagaagaagcanaagatcactgagaaaatcttcaagatgcaactaaaggagaaagaagaaagtcgaggaaatgagagaagtcaac

SEQ ID NO: 281111 - DNA, 385 bp, Glycine max
  unsure (1)..(385): unsure at all n locations
nnggacttctatgttctgggaacctctccttncttatgtgtacccaaactccatcacctggttcaagcatgactntctttctgctttatgtggcttgccttgcatagctcgcagttttcttttcaatttgagccttcacttgctcatgcagcttcttcacatactcagctttagcctgtgcgtccttatgcttaagcatagcaatgttaggcatatgcaacaaatcaagaggaagtcaaggattaaatccatacactatcttaaatggtgaacaattagttgtgctatggacagtccgattataagcaaactcaacatgaagcaaacatgtntcccaagattaagaattttcttaaaacagtcctaacagtgacctaaagcctat

SEQ ID NO: 281112 - DNA, 336 bp, Glycine max
tttctttgagtcttttcaaacgacaataacttttgactcggatgtccgattgagagccgtagtatatcgagacgctcgtaattgaaaacggaagctctaagcacattcaaacgacattaacttttgactcaagtgtccgatggagtcctgtactatatagagatgctcgaaattgaagtctgaagctctgagataaatcaaatgacaattactttctactctgatgtccgagggaataccgcactatatcgagacacttgtaattgaagatgaagctttgaggatattctgacgaaattactttttactcggatgtccattgagtcctgtgctata

SEQ ID NO: 281113 - DNA, 435 bp, Glycine max
  unsure (1)..(435): unsure at all n locations
cctctctcccactctcactcgcaatgtatntataatcgganttcactctataatcacgcatcctttccccatcgtagtcgctggngcttgtgaccctttatagcgacgtagctacgagctctgtttaattgcaccgttcataaccgtgtcccaacgttcccagaataactttgacgtggatcgctgaagctctatgttaatcgagcgtctcatatatacaggctcatccgatccgcgcaaaattttgcttggtattgatagagctatatttacattaggcctgactattaccgggcctaaccacatcaacacaaagctattgccccgagtgtatagacctccgttgacccccatttatgcaaaaacaggcctgatcgagcccggtaatactttggccagaacaataaaagccaatatcttaagccatgtcacatc

SEQ ID NO: 281114 - DNA, 413 bp, Glycine max
  unsure (1)..(413): unsure at all n locations
ggnatctttcttgccttatgggcaacaactagagagagattctattgagcacttgatgctattctctaattacaaatggacccgtactctaataatctaggctctaaaagtctgatttatagaaaacggcacctggttatcgatgacacattaacgcgcatcacactcacggtatcgtatgtaacgcttgaccttaatctatgccaagtaatccgagtagaatccctgcttcggcatgaccagtatagagacaccgtttacctaaaccctgtatacccttacgtttattcagcatgaagaacacctccattagtatgtaagtctgagattgtacatcactgagaattgattagtcccatcttgacgcccctatcatagcttatagagatctgaaatggcctcggacagctacg

SEQ ID NO: 281115 - DNA, 106 bp, Glycine max
atatttcacggcatcacaatgataattacagctcttcatattgtgctgataccaaatctcaaggtgattattcattactttagcttgtcttgtgcacaatctccta

SEQ ID NO: 281116 - DNA, 405 bp, Glycine max
  unsure (1)..(405): unsure at all n locations
tagctttctcttatatgtaaagtttattataaagtttatcctttcattaatgcagctctaacactntctcacaccatatgaagagactaaaagcaaattgatagaaatcaatttaagtgttagcaaaactgacaagtgactctttttttactcatatgaaccttcttcatgggatctccaatcacaaagattgggtggccatcacttgtttgttttcaagtggcttaagtcccattcccctcgatgtttctaatatcatattctttcctaaaggtttagcaaaagatctgctgagtttctttctaacttcacataatctatggaaatngttccatcttttagcagctacttaaccacattatgtctcagttgtatatgtctaatttcatcgaatgttttattctt

SEQ ID NO: 281117 - DNA, 318 bp, Glycine max
  unsure (1)..(318): unsure at all n locations
tganaanatatactttttttataggaaacatttcataacaacgaatatgatgaccttgtcatatgtcttgcacccatgcatggcctgtntgttggttggttatgcacaactctttacatagatnnttttattgcatattcacccataaacacagccacataagatgctcgctccataagttcatcattttcatttggatttgattcaaaattctcaaccaagtcattcatctttgacctgtatagaaacaatattacacaatacaacatatatcaagatacacatgattaaacataagttcattaccaaccataatat

SEQ ID NO: 281118 - DNA, 410 bp, Glycine max
ttgcatgcaagcttctagccaaatggacttaccttgaattaattcctttgatagcccttttgagccttgtttccctttccttgttttgaagctcactataagccttaagtgaaaaaccatgatatcaccaaatctttaaggaattttggagctttggaattgttctgggaataagtgtggggggtttttgtttcattggataacatgttttgttggctatgcttgatgatgtattttgggccatacttgatgtacattgtatattggttaaatgttggacatgctgaatgagattgttgttctcacaggctacagagcaaaagaaaaatcgaaaaagaataagaacagcaataaagttgagtgaataagatcttaaatggcaaaagaatgatgagactcttggttctact

SEQ ID NO: 281119 - DNA, 248 bp, Glycine max
  unsure (1)..(248): unsure at all n locations
agaaaagaagagaaaaggagaanaggagaattcccgatcaaaagaatcggaagaaagcaaaaaaggaaagaaaattcccaatcaaagatcgggagaaaacagaagaaatatacagaaaggtctttggaccanacgacatctgaacanatacagagttatcaccanagtaaatatagaaagaaaggaaaccacgacctanagtggtcccctccctttgattgccaaccaaaatcccgtgcgtcggtgac

SEQ ID NO: 281120 - DNA, 400 bp, Glycine max
  unsure (1)..(400): unsure at all n locations
agcttcaaggctaagtcttcatgttgctccccctatctctaacatccgatggattctggccgccggaaatacactttttttgtagtgagtgtagtgtcaggagtggtccagagagtacttgttgtagctagaaatggcatagagaatacttgattgtaatcaaagaatttattagtggaacccttcaaggtttgaagaataattggacgtaactcaagagttggggtgaaccagtataaaacctttgtgttttctttactgcttctatataactagttattctctataagttctacactactataaccaagttntgtgaactggttttctaagaacaatgtgatttcaaatcccttggatgatacccatcgtccattgagaaaagcnntttaaagttttc

SEQ ID NO: 281121 - DNA, 405 bp, Glycine max
  unsure (1)..(405): unsure at all n locations
gctgggcacaacaccatgttgnacanatgatcattcatcacttattctaaataaaaagaaaaaaaaaatctaacggcctgcttagaagtagaagtaggaattttacccaattggttttttcacaccaggtgatgatttcacccaagccacgggaaataaccaaaaacattaatggatttggttcgaatgcacatataatttacactagcattcaaaacaactagttcaaaagtcattttgacagagaaaagaaaaaaaaattacactaacaatgcatcaaaattaaaccaaaaataaaggcttaactactggttagtccctggatttanggaccctatttttnttaanntcctaaatttaaaaataatttttttaccgtgacaattgntntctagtcataataan

SEQ ID NO: 281122 - DNA, 397 bp, Glycine max
  unsure (1)..(397): unsure at all n locations
agcgtctatttctgtaggtgtatcagnntgaattctgaacaatgagggctctaaatgtgaacctgatgctctgtctggaaatgcaagtgcaatttgtatttgtgcatgtcatgtcctacaaaacggacgaagtggaagtggaaatgaacatagattgctgcccaaggaacaagttatccttcctcgctactgcttcttttgcaagggctattttatattatttattaattacccgtgaactacataattgaagttatatagacagctgactgatagtggctatcatttgtctttgatctgaattacagtctgcagtgaccgacatatctaaattcagctaacgcatgttttgaaagaaaagaagtgcatgtatgaatttgtgttcactttaatgtga

SEQ ID NO: 281123 - DNA, 425 bp, Glycine max
  unsure (1)..(425): unsure at all n locations
nttgaacccatgatgaagcctcttagatactacgctctaggcaacttctcataacctgctcttgtgcgntgaaggagtctaaagccagattagaatcattcctaagggactaagccttctatctgacttcttctactcaatcagcatgaaaaggcattgaagggtgccatacttctatctttcttgcacttcgtcttggacctgtccttttgggacagcctctctcttcacaccttgaaccaggactaaaacctatcccttctatataaatcctacttaaccgctaaaggaacgtaagtgcatttctattctaaaaggagaggggttggcaagctacttgaatggacatctgagatggcatcaaccgagcacaaacagatctggctgctagaatgaggcaatgaaccttctacataagtatgcct

SEQ ID NO: 281124 - DNA, 353 bp, Glycine max
  unsure (1)..(353): unsure at all n locations
agctttcattatcgnaaaggtctacattatgctcgctgcgtaaatgccggagcgttcctccactcgccaatatcccagctggaaatcacgagggcatggtcgtaccaaatccaatgtactcggaacatcatcttcgtatatcgcgaccacttgaccttcattccccagacccgcgcttataaagctcctacttatgtggcaaggtgggcttcctgtaccttcttgtctcaaccgcgagctttgactaccgttcttccttcacgcgatgcttatctttatatctgcctgagtgggcttatagcctatcccatacttcccacgattgcctttggcatttatcaagctagttatac

SEQ ID NO: 281125 - DNA, 354 bp, Glycine max
  unsure (1)..(354): unsure at all n locations
acaccatatatagtccctactattctctactagcatgactcatattatttgggttctacccataagatccaatttactttgaatcttctgagccattgtttatcgtgttgtgaggtatatatccgttatgatcaatatgttcaaagcattgaaggggagcttgagatataattcggctttgtggtgaaagaaggaaacttgagattctctttctttgtgaacgacggaagcttgacattntagttactctggtcaacgtgcgaagtatatatgatacatataattgcaaattttctagacttagaaaactgtgcgaaacttataattcatcatcttattatatactttacacat

SEQ ID NO: 281126 - DNA, 417 bp, Glycine max
  unsure (1)..(417): unsure at all n locations
agcttttatctccaaaaatcgcttgaatccgttcaaggtccaacgccttaacagtctcttttacttttatcggttaaaatgaacctttcaaaagtctaaaatcaaccctacgcgtaactttcttgctttcaaagaactacgtaggtctgagttcctcatcgtaattgaggatacgtaggagcaagagccacactcttgtagacctcaaaaattaaaaaaaaaacataaaaaagggaaaataaacaaatattgaagtcatgattttgcacacttgattaaaggctgtcgtcccttgagccacgctcccaaaccttttatccttcaaattcatagaccccttttcggtttttctaacattttcctcanataaacgttggtggcgactccgcgcgttntccttccttggaagacacaccc

SEQ ID NO: 281127 - DNA, 356 bp, Glycine max
  unsure (1)..(356): unsure at all n locations
cttctttgtgagggtctctagttgcttggctaagagctagttctgggctagtagtgcgtcttgtgatgtgagctcgagaaaactcttctttgtaggtgtgtaggctcgatcatgaaggatggcatggtcactgactgccatattttcaatcaactccatagcttcatcaggtgtctttagtttgatcttcccaccagcggaggcatcaagtaactgcttcgaatggngtcataagccatcaatgaagttattgagttgaattagctcgctgaacccatgggtgggagtcttctagagtaaaccaaggaagtggtcaagagcttcactcagtgattcatcggggaattagtggagtg

SEQ ID NO: 281128 - DNA, 392 bp, Glycine max
  unsure (1)..(392): unsure at all n locations
agctctgcatttatatgttattggaagaaataggtaaatgcttcacgtagatacaattgttcccaatcatctcctggttttttgtttagtcttacttacaataatagtctttaagctaaaaaactacaataatctaattataaactattttttgaacacaaaataaacccaataaacaattgatataaaataaaacacttgggtagaggcaaccccctactattagattgtgatcccacaagcaccttcggctgtcagatgatgtgttgtatntcattctatctttcgcttacttttcatgcttagattgcatgcattccatggtaacttaagtttagattcatgaataaatctcttagttttttcttttccttttcaaacattggtatgct

SEQ ID NO: 281129 - DNA, 390 bp, Glycine max
tacaaatgagtggtgcaggtggtgacgcttagattacaatattcacctgagagtcaaagactaatcaaaggactagtgcacagccaacccatgtgcacattggagctgttgagcgtatggggatgttaggattcaattgtaaggtatgtaactcgagtctcacatggaaatatgtgattctagcatggcgtttatacagcctttggctctcctactacaatggctagcttctgtgacatagttttcctaacgttcttaccacacacatttcaagactaatggtatgagacactggaacactaaagagaggctaatgccagcatccaccacatataatttctcatgtttatatatccaaaataatggataatgcaagagcacaccaatgct

SEQ ID NO: 281130 - DNA, 411 bp, Glycine max
  unsure (1)..(411): unsure at all n locations
ttctntgtccataaaaatcacttaanaaaccgttttgaagtccaacgcctcanacggtcctctttgcttttattggttaaacatgaactctcgaaagcataaaatcaacatgtaactttgtcgctactttcaaatccaagagatcattaatgggccaacaccttaacgtttctcttctttaatagaattcaaagatcatttaatggtccaacgccttanacgacttttgttcggtcaaaatatatcctgcaaaaaaaataaaaacaacttaaccaacgcttagttcttatagaactgcgtaagtttgatttcctcatcacaattgacggatacgtangagcgagggaaacacccttatcgaccacaataagataaaaaatacaaagggctaaaaagacataaaaacgtaac

SEQ ID NO: 281131 - DNA, 442 bp, Glycine max
  unsure (1)..(442): unsure at all n locations
ttgaacccccttgttgaagcccattgatntnccgacntatngagactcaagcttcactggctttgacccagagcgtttgtcattntctctgctattncaagtgcataaagaccaaggccacccagggcaacccaaaattggtgattagaatatgcatttttcttaactggaaacaaagaatatcccacccttttcttaacagatagtaagttcaccaatgatacttttatcatacccttctatcagtatgcacccgttgcttaaccacatacacctccatcttccgtgcaattgaacagaattagaacggttgctaccagggaaacattaattgattctcagagggttgcattggcattttctaagattaatcatccatttgagaccccttctcaaaatagtattctctaacttgnggctaggaacaatatctatcaggcct

SEQ ID NO: 281132 - DNA, 51 bp, Glycine max
tcagcaccttgtctgcttgcgtgtataattagccaggcggatacagggcag

SEQ ID NO: 281133 - DNA, 420 bp, Glycine max
  unsure (1)..(420): unsure at all n locations
cccacccagcaacaaataaaaaaaaagatgaaaacgccgtcgcncataagagcgtgacctgtgaacctgaatcgaccctgagacccaccaccaaactaactccctacacccagattcgaacaatgtttagcaccgatcaagactgctgcgcaaaacgcacatagtggcaagaagctacaactgcttcaaggtaaatgacatgcacaaaggcccccacgtgtaggaaagatacacacatgaatacctatccccacggtaggacccaaccaatgatggagcagccgaattaaaggactggacgaggtagccacttcccttaggacaatgacgagcgaagacatacctaccactggagttgggcaccgagcaaagacaccatacaatgaacatgcgtctacacgctgctgcaacaagaaaccc

SEQ ID NO: 281134 - DNA, 411 bp, Glycine max
  unsure (1)..(411): unsure at all n locations
ttcttttatttgggtaanaggctcacattcactntcttctacatcatattcaaacttgtccaaataaataataaagtcatctcgactcaaagaaagtcatataagtctcatacaattaatatagaacctatatcctaatgtcacatcctatcagagcgtggtgttcccgtgtcctctagcatgaggctcttcatagtcatccacctattcatctgctcccccgaacacaagttcaagatcatcacaggatccaaacacaacaacgcacagggagtgagttatcacattcctagcttatagagaaacaagacaattaaatatacatattatataaatgagataccacttgcttaaacatagctcacgtaacttcaccacttcgtcattcataattcacttttcaattatcaa

SEQ ID NO: 281135 - DNA, 450 bp, Glycine max
  unsure (1)..(450): unsure at all n locations
tttgacccccttcattganacgcattcatgtangcgacagtgtgcactactccagcttcgaagagaggtgtacatcaacatctcgctcaggctatacgctggcttatcgagcgtacgctaagcgccacactcattggctaatctcaatgaacaatctggtaagaatatgacctgtatatgttgcactgaatgctaccggttcatctcactaagctgcaccgcttcatccattctgctagcgaaaatagcacacgcttagcctgaacttacgtatgtgcacttagcggctcttaattgcgcttaacgcacaacgcgaacactgtccctatttaagccttanatcatattttttatagtaggttggcggatagctgacactttgatgtctagtgattctacagagagaaatgaanggtctaactccagagagtgcgatagatttagtgagtg

SEQ ID NO: 281136 - DNA, 549 bp, Glycine max
  unsure (1)..(549): unsure at all n locations
actgcgcagcacacacagcggctcggggtgcagaaggtagagataaaccgcnaactcctnccgagcgagagcttgaacctgaaacatctganaccatggacaccacgcgagccgagagccccggaagccggaagccacttttgcagctaagtgaatttatctacgtccaagagctgagcacgcaaccacaacccgaacggcgaaaccgggcaccccaggagtcccacaacgagcacccgcgaatcgcacgccgcgtgacacaaccacgagtaggaggagacacgcaaacgactggacgaaccgctccacatgaagaacaaacatcggtacatcgctggaaaaaagcagcgggcaaggcactagggaaaaggacaccatgcacgccggcggaggacccacagcgcgccaataggccagaaggccatcgatcagccgcaccataaaaggaagcacaccgagtataacgcaccagtcggccgggaggaccagaccaaatgggcacgctgtagaatgacacgagacaaaacgcgagagaaaccaacgccgacg

SEQ ID NO: 281137 - DNA, 504 bp, Glycine max
  unsure (1)..(504): unsure at all n locations
acccacagcccttaattctacaatagtattcaatagaccacgaaacttgacacttgatcnctcacccccaagccgccggacaccttgancccctcgttggacccattcgaaatgcaaaccatagaaacncagctggcttgcaaccaacctctcagagacgatatcgtgtttcagactcattattttcgccagggatcttagcggtggaaccaatgagtctaagtcctagggcttactcacgcccgggaacaagaagggtgtgaatgatgaatccttagaaaggctacattgagtccatactaaagaggataagctgactcgtacaccgaagagcgtctatcgataagtctaacgctggtgagactctagcaaagcgaaatccacttgtgtaagcatcatcaagccaagactttggttaacggctagaaaggaacgaagacccattcatggagttagataaatcctatcgtaaaaacacacgcttatagcgcacaaacagaaacn

SEQ ID NO: 281138 - DNA, 262 bp, Glycine max
  unsure (1)..(262): unsure at all n locations
ttgttganaggttgcatatatttgaggctttaggccaagagtgagtataagctagcccttatcgttggatctgtaatcttgtttataggtcttgtgtggtaaaataagagatcttatcaatgatcttgtgtgagaaaagcttactaaggcacctgttctagctcttactaacttttctaaaacttttgagctagaatgtgatgcctctggagtgggagttggagctgctttgttgcaaagagggcccctattgcttatttag

SEQ ID NO: 281139 - DNA, 244 bp, Glycine max
  unsure (1)..(244): unsure at all n locations
agcaagtcatgtattacacaagttcgtatatctaacggtatatcttatcgtgacttcatttatttgtcataaatatcgatacatcttaagaaaatatttttatagacagaatttccgacagagaatagtaaatgaagtattacatattatacacaacatgggatgttgactggatatacctatcgtgtgagaatatcatacgcacatcatagagcatattctctctatgttggcntacatctaa

SEQ ID NO: 281140 - DNA, 363 bp, Glycine max
  unsure (1)..(363): unsure at all n locations
tatcttctgtttaaaacaattgagcatcagctattattcagcanaatattagagatgtatgttaacagtgatctattaactttttaaagttttacccatgtttgaaagaatagaaatgctggacagggtgagctaatcctatccaattntactatgaattcagtaactaanaaagatagcatctagatatctgccaacagcctcataccatgtaagctgatattgttgtttacaggggaggtaggatacagctaaataacaacttataaaatanataagccgtaagttatttacatgcccaaataatntcaaanaggattagatagagaaatcacagtgtcccttacttgcatttgcttatgg

SEQ ID NO: 281141 - DNA, 381 bp, Glycine max
  unsure (1)..(381): unsure at all n locations
tcccttccaccccaactttccagattntattgcctttngcatctgtaacataggcattgccttctgcatcaactgcaacatcatctgcgaatgatttctcatcacctgcatccaatggaaaattgatattgtcacaaaaggcccaccagttgtatgtctaagctaacacaattttgaaagctataccccatgttatgaagccacgagaatatangacatgcaattaatagaagtactgacgtangtangccattttccttttgttatttattgacatgcatagttcataactaatacattgngaatgtgggtcacggtgcaattgacaaccattcatatgtttttttctttcttacatncttcttgcacacatgaataaca

SEQ ID NO: 281142 - DNA, 378 bp, Glycine max
  unsure (1)..(378): unsure at all n locations
agctctttttaatttcattctcttgctcgggtctccaaaccaattatctctaaagtataacaagttatgaaatggtacacacaattagaaaaatatgaaatttacaatttcagataaaaaaatcagcattattatccatttcaaccattgaactaattcattaacagaagaataatttaccttanaatgctgganaaaagttcctgatgatcttttggaattgctccccatgtaagccaaggctgaccanattgttgcctaatggacaaagtgacagcctttgccgcaaccttagatggatgaaacctannatataaaaataattcatcanaatagtaaaagatcaaatgatgcatcatatataatgataattatata

SEQ ID NO: 281143 - DNA, 379 bp, Glycine max
  unsure (1)..(379): unsure at all n locations
cgtgtgacaattcactgtgacagtcaaagtgccattcacttagcanatcaccaaatgtaccatgagaggacaaagcacatatatgtgaaactacacttcattagatatgtgattgaatctgagaaggtgaaggtggagaaggtttcaacagaagaaaactcagctgatatgttcacaaagtccctctctagtgtcaagttcaagcactgtctggacttgataaattntgaagatgcctaaagtagattggtataagtgcagccctgaagcacaaggtagacacttgttgatttggagtcaaggtggagaattgtggtgtgtgactcanaatcacaaatggcacaagtgagaaggctctaagaggtgctgtcataacagt

SEQ ID NO: 281144 - DNA, 310 bp, Glycine max
  unsure (1)..(310): unsure at all n locations
agcttgtgagatctgaagacttcttcagacatgtagaactggggaagactgacaacccaataggttcaaacgtgacctcaagtgtttgttgatcaactatcacgactaaacacgttgggtttgaacgctccccacactcaccctcgaggcactgagatccttatagtccttgagggtactctctatgttggatntgtgacttccaatcaagatggaaatcacctcttcaacaaagtgctgaacaaaggtgatgtgtttgtgttcccaatcggtctcattgatttctgcatcaatgtgggatatggcaatg

SEQ ID NO: 281145 - DNA, 256 bp, Glycine max
  unsure (1)..(256): unsure at all n locations
tttttcaagagatttactctcttggtatcgattaccagagaatgtaatcgattaccagtggccaaaaatgaattacaacagctattaaaatttgaattcaaaatttgcacttgtgtatggattacacatatatggntatcgattaccagcagttactgaacattttaattcanatttaaaagcttgaatcgattacacatatactgtaatcgattaccanaggagattttcagaaaatattctcaatagtcacatc

SEQ ID NO: 281146 - DNA, 355 bp, Glycine max
  unsure (1)..(355): unsure at all n locations
agcttcagattacantttttgttcatacaaatcagccgattgttgatccagagcataatgttaccacacaataaactgtacatatatatgacctacagtgatatctgctactaatgcaaaaatctaaacctaagatttgaataccactgattatagtgagtggcaaaatccttctcttaaatatttcagccaagaccataacataaacactgtccaatcattttagtttccccataacaaaaacactttactttctttgatgtttgtaacatggataatcagaaattaccctgcagagctagtgatagtgctcactcgcggtacataattgctatgctatctatcccaccttgac

SEQ ID NO: 281147 - DNA, 392 bp, Glycine max
tgtgtgtatgcacagttatttgttaagtgattcccacaagtcatttgaatttccaatatagttataaaatgcaattcaatgttgaagcataaaaaaactggatattaataactacaataatggtgaaaacaaccaaattagcgaagctaaaaggctaaatatttaaaaagctaatgatcgctcaacatgtaaattaacaaaccatcattttaaaacccagagaatacaaattaaaattcaatcactattggtgtcgccccaattctttatgtcttctataacaatttcccaaactttgtcatgaggcctctggtagaatgagaagtcgtatccactattgttgggtgagtcaacaatccatacatgcattctaaatgttaataggggtctat

SEQ ID NO: 281148 - DNA, 334 bp, Glycine max
  unsure (1)..(334): unsure at all n locations
agcttctgttgttcaatttcgagcttgtttacatattatgctccctaatcggacatccgtgtganaagtgataaccaaatgaatttctcgagagcttctgatgtttaatttcgagagtatcaatatattataaccctgaatcggacctaagtgtgaaaagctatgaccattgaatttctggagtgcttccgttgatcaatttcgcgcgtctctatatgtgagtgacctgaatcagacatccgagttaaaagctatgaccatttaaatttctcaagagcttgcgtagttcaatttctagcggctcgatatgcgatgtgtatgaattggagattcg

SEQ ID NO: 281149 - DNA, 336 bp, Glycine max
gtgcctgtatatcgatgcgcctgaagtcgacatccgagtgaagaggtatgaccatttgaatttctcgagagcttcctatgtttaattgtgagcgtctcgatatattatacgcctgaatcgaacctcagtgtgaaaagttatgaccatttgaatttctttagagcatccgctggtcattgatcagcgtctctatatgtgatgcaccttaatcggacctccgcgtgaaaagctatgaccatttgaatttctcgagagcttgcgttgttcaatttcgagcgtctcgacatattatgcgcccgaatcggacatccatgggagaagctatgaccatttgaa

SEQ ID NO: 281150 - DNA, 418 bp, Glycine max
  unsure (1)..(418): unsure at all n locations
agcttcaacattcaatttctagcgtctagatatattacaggactcaatcaaacatccgagtaaaatgttactgtcgtttaaatttgcttagctctccagctttaaatttcgagcgtctcgatatatgacgggactatatcagacatccgagtaaaaagttattgtcatttgaatttgcttagagattcaacattcatcttcgagtgtctcgttatattacgggactcaattatacattcgagtaaaaagttattgtcgtttgaattntctcagagcttcaacaatcaatttcgagcgtctcgatatattacgggactcaatcaggcatccgagtaaaaagttattgtcgtttgaattggctcagagcttcaacattcaatttcgagcgtctcgctatattacgggactatatcagaca

SEQ ID NO: 281151 - DNA, 432 bp, Glycine max
  unsure (1)..(432): unsure at all n locations
tgacgcagcatgaggcacttaanactanagcttagcaattcaacgacagtactctntactcggatgtctgantgagttccgtgatatatcaagacgcttcaaattgaatgttgaacctatgaaccaattccaacgacaattactatttaatccgatgtctgaatgagtcccggtatatattcagacgctcgaaattgaatggtgagagcttaggcanattcaaacgaccataactttttacttcgatgtctaattgaagtccgtaatatatcgagacgctcgaaaatgaatggtgaacctatgagccacatcanacgacaataactctttactcggatggttgaatgagtccataatatatcgagacgctcgaaattgaatggtgaacctctgagccaattcaacgaccataaacttttactcggatgtccg

SEQ ID NO: 281152 - DNA, 387 bp, Glycine max
  unsure (1)..(387): unsure at all n locations
agctnttaaacaaaaaagctatttgtcatggcataatgattgcaagaaaagattttttgatgggaattatgatgagaataaaaaatttcagtaatgtggagcaggtgtggtaggacaatgggggagaggacccaaaagtttgtaaaataaaaatggatctgagatgtgatctaaaaagaaaaagactgagaattcaaaattctcagtgaagccactaagaaagtacttcgagtttagtagtaaaagcaacttttgttagagatgtcacatggaagagtgcgaagacattattaaaacaagaattctgatcatagggtattgtattgaaagcatcgtattaaatagccacttggtttgtaatgctagctagctatctaaaaaaaatta

SEQ ID NO: 281153 - DNA, 405 bp, Glycine max
  unsure (1)..(405): unsure at all n locations
tattatgtgttgatgattataacacacacacacacatgtatatgaattgttaaaataatttatgaattaatagttcanataataaaattaaattgaaggaaattaatatatcaagattcaatgataaatacttccaatgcattnttagtttaattatttattaattntttgaattgaaaatagtatagttcaatttaatagatacatgttttgtgccatgtaaatattaatattgtgagatgttcatatgattcatgaggtgtgataacatgctgtgttgggattataacattatgattgagattgagtgtgtgtgataaattgagtatgtgttgaattgtaagatacatgtgtattaagattntatacacattgagttgtgagttatgaactgtacaatcacat

SEQ ID NO: 281154 - DNA, 387 bp, Glycine max
  unsure (1)..(387): unsure at all n locations
agcttgtaactgagtcttagctatatatcaacacagagagaggaaacacataatgaaaactagcattgctaagcaatcaaacaagagtatnaccctgatcattttttaactaaagaaacttgaggaaagcaaagtattntatgtgttcagtgcacttgagaaagtcaagctacatcaagctagaattttttattgtaaattaatttgacgtcataaactcgtatgtatacaaaatgaagaattanaaatgttggtgtttctcttagatttattgantagtatcaagtcgttagttgtcaatgtaaatattacatntatcaataatattattgtttgacaataaaaattaaaattgttaattaaagtaaaaaaatacatatataaact

SEQ ID NO: 281155 - DNA, 333 bp, Glycine max
  unsure (1)..(333): unsure at all n locations
ttacaaacttaattaactgcatanaaatttactntaagatccttanataatacatatcatgagttcatgacggcaatgtttaaatgtatcaattctattaaatttgagctcgttcaattatttcatacgtattattaatataatttctaaaataattattataaaaattaacgataagtatgattacatgaaagtgtataattaatttatattattgatacctagtctattttgtcatatcttcacttttaaatntgaattgtacatctaacaatntaatacataatattgaatcaacagtcaaacaaataattcaaccaatttatcttctta

SEQ ID NO: 281156 - DNA, 413 bp, Glycine max
  unsure (1)..(413): unsure at all n locations
agcttgcttcacgccatctcagtatgaggatcccatcgaaaccttgtttaaactcacccaaagcggtatggttcaacattgntaccttcctcgccaaaatcgcctcccatacctatcaaaaggttgtcaccggaagagatagccattcgtcgtgattgaaggccatgctttaattgtgatgagaagttaagttgagggcataaatgtccctccaagttcttcctcctcatcgccgatacagatgactaactagaaggtgatctctcttccgatatgctggtttcaatggaaccgcaacaggctcagataagcatacatgccctgtctggtcatttggcgcttgaaccttacgatngtttggacgtatcgcggactagaccatggtgattctaattgatggaggaaatacacat

SEQ ID NO: 281157 - DNA, 289 bp, Glycine max
tgtagctacctcatgtactcctctaatgactatggcatcatttctggcgctaaactgctgggagttggaggccatcttctcaattaaatttatggcttcagcaggagtcatgtctccaagggctccaccactggcagcatctatcatacttctctccatattactgagtccttcataaaaatattggagaagaagctgttctgaaatctgatggtgggggcaactggcacatagtttcttaaaatctctccagtactcatacaggctctctccactgagttgtctaata

SEQ ID NO: 281158 - DNA, 408 bp, Glycine max
  unsure (1)..(408): unsure at all n locations
atcttattctactanggactttagacaacatgcatttcattnttttcttttcgaaatcatacaaattgttcacattcatggtagcaacatgcctaaagggaaccttcatatcaagatgcaaatattgtaataactctntaaacctcctatgttcaacaaaagagaatggaagatcatgctcaataatcatcatagatatcatctcatgtaccacactntgatcaatntttttatttcttaatctcccagcatgatcaagaataatatttccaacatcactattagaatgccttcaaatatacatcacatttccncatatgacgttgtaggttgaagtctcattcttattgtcaccgcccacataatctttcaaacatatttgcatttactcctcactttttcatcact

SEQ ID NO: 281159 - DNA, 370 bp, Glycine max
  unsure (1)..(370): unsure at all n locations
agtaatccatatgtggattgaaacaagcttcctgtcagtggtatttaacactttattangttatctcttcatttgattttgaagagaacgccatagatcaatgtataccagaagatcaatgggaagtaaatattgtttcttggtttggacgtggatgatattttgcttgtggtttatgttaacggtatgctatatgagatgaaataatttctctcaagaactttgatttgaggaatgggtgagacatttatgtcatngccttaagatcatacaaaagatctaggtttttgagtttgcttacaggcatattcacatagtttagagaggttaacatgaagattgtcacaagtgtactccattggaaggtatt

SEQ ID NO: 281160 - DNA, 254 bp, Glycine max
atctatgactgtacatttgatatcgttgagtgaattacgacttcattctaatcgatgacatgctgtggtctatgacgactttaggcttcatgtatagatttgctacatgacctttagggcgcatcgcaaccatggcctcaaggcgaaggtatctggtcttttaatcggtcacattggagatttaatcgattactatatcaacttttagttttgagcgaaaacgagtgccaattgaattgattactatgttatta

SEQ ID NO: 281161 - DNA, 181 bp, Glycine max
cgctgtattatgccaagacttgtctaattaatgcttctcaaccagtattgatctcctcattcactgcccagtctctccattctttcattattttacatgagacatcaagtcgctgatcatgtagataggtatgtactattataatattagacggcatcaacctatgcttgctatatacaag

SEQ ID NO: 281162 - DNA, 406 bp, Glycine max
tagcttgtgtttcaaaataatgatttggttaacatatgcttgctgtaaattagagttagaaatcattaaagaaccagcaaagggaatgctacagacaagaatttacacagaagcataaccttaagaaaataaaatatttttaatgaagttaacaaaattacaaaatatatctttgtagtatttctaaatatggggtgtcagattaaataatatttactaaacttttcataaaataatggacaataaatagcaaaggaaaagcgcagacacgagacttttgccaccaatccataaacatcacggtattaaaaaaagagactcaaatcaaggggggacgagaacacaccaggcttgtcgaacaggggcgcagagatacttaccatgcacagaaacacacagcgacgcc

SEQ ID NO: 281163 - DNA, 359 bp, Glycine max
  unsure (1)..(359): unsure at all n locations
tgtggagagaggcctccagcatgagcaactgcatgcattntatacaatccatagttagaggcagaacgagtagagactctgcaagcagcaaggagtagagaggccttgctgacattcaaaaccatgccccgagtgttcttttattctttcggtatttggctcaacttgctagtggttgaacatttattctttcatcattcggagaaaaatagaattctgaatgattgatttcagatttaattatatgatacatttgtgtgttagagacataccactatgtctaatgcttatgtagtacaactagtatactcagaaattaatatgactaataacatatcaaggttcctaactaatgatgc

SEQ ID NO: 281164 - DNA, 372 bp, Glycine max
agcttcagcctcaatttaaaaccttgcaaataaaaatcttatcatttttttttggaaaaggctgagaatgcaccgagcaataacaaagactgcgttctttgaatgataaaagggaattaccttccatatctgctgaagacacgctccaagtcacgggaacgagtcatcgaagacaagtgtccaacgtcgaggcgggtattactatatttatcatcatggcgaggcatcgttgatttcttccagctctgcaaaacaagcaactgaatgttgaaattcaattcaagaaaaaggccacacagaaacccctttttcaatggcataacgatcatcgatgacattagcaataacgtgagggaatgatgattgatgata

SEQ ID NO: 281165 - DNA, 371 bp, Glycine max
  unsure (1)..(371): unsure at all n locations
actcagctgttttcggttgggaattaattttttaagtgacggagagtttaccgtagatgaataaccacacttataattatggatcgatctttgcgtgagtctgatgatgagcaatttttttttttgaaggggatgataagcatgttaaaatatagttgggttatacatagaaatttgtgtattaataattaataataagattagactcttactaataattactaatangattaaactcttatatttataggttaaatagtagtttatgattcataaactttccacattgtataactgtatgtgtactaaacacattatttcaaaccttagcctgatccttatatatttaaatgcttattaactcatacacg

SEQ ID NO: 281166 - DNA, 270 bp, Glycine max
tttgcatgctagcttgttgttatagccatgtttggatgagtaaaacatacccattctgttctaagaggtttgagatgatgttagtgatgtttatatgctgaaattgctgatggaaaactgttagagaagaaaggtagaactaacctagggttataaagtgataatgtgatgctatgagtggagaaaataagagaggctgtgatagtttgaatgctaagtctgaattctgtggtaaatggatgttaaagtgatgtaatactacctagaaat

SEQ ID NO: 281167 - DNA, 498 bp, Glycine max
  unsure (1)..(498): unsure at all n locations
cctcaccgcctcattatctcatttgtgttcgatagtacaccttactttataaccacccaacctcnttccgctcacaccattcggcttctgagccttaatgaacatcatacggcttgaactagcttttgtcgggtgcaaaaaatacaatgtggtccgctaggtttttctgcgagccaaccgagtgtgttcggcgacattgcatgttcccatgcactcagccatgaaaacattatcccacaatcgaagagaaaaaaaaaaacatataatgacctgatacttggatcggaagataatgctgggttgacgtctgccattaaaaaagaccgatcgaggtctaaaaataaaagaatcaccagatgacgccgatcgagcattttctaattgacatcatccaaatattattcagggataggatagaaaaacagtagctgataccatgcgttatgtaatcccgactgacatttttcagccgacagtgcacaagatgtctttacaacg

SEQ ID NO: 281168 - DNA, 418 bp, Glycine max
  unsure (1)..(418): unsure at all n locations
agcttcaagtttgngttcctaagcttggaattgcatttgggcacctattttgaatctcctatgctgtacctacatataagaaacagtcccactctcccaattntacgaaatcatattcatacatcattggggcatttcaccgagcacttggtgagcgcatgtttgaacataaattgcaagaggatggggacaatgtggtatgccccattgcttcagaatacagcataagcctaaggccttcttattcanatcctcaactcaagaaaacaagcacaaaaacaaaccaaaactgccccacanatataagcacattctcacaattnggagcaccaaaagatgaagaaaatataccaatgggaagctaaaaacatcaagaattgaatacttactttgtggagtgaataataacaccaaaaat

SEQ ID NO: 281169 - DNA, 407 bp, Glycine max
  unsure (1)..(407): unsure at all n locations
nntgaaagtgattcctgcggatgtatgtgaacttgganatggttgatacaagttntaanatattttcctaagccctggtgattaggttgagtcatnctcaagttngacttttgtttcattccaatgaaaatggtagaaagtacctatcattacataacctaactagtagtaacttgggttctcactctcacgttnttttcctttcatcatttgaatttcgaaaattactcccatactaaattganggcgtgccctagcactacaagaaaatttgtgctttgtgattagttggtcatgcccttcaaatccgatagggcgataggggtactcttaatttgagtatntatgtaattataatcatacttaatgcataattaaattataangtaatatcataattataatcn

SEQ ID NO: 281170 - DNA, 421 bp, Glycine max
  unsure (1)..(421): unsure at all n locations
agcttgatatatcttangcaactgctagagatgttgttattgcttcaagactacacacgtgagcctacttagaggtaagggattagtttatcgtaattggggttagagtgaacatgtgtaggaatccttagaggatcanattgnggttaattttggggttcaattgatgccttgatacgaattggatggtttaattaagtgtttggctctgaatgttagaaacctagaaaattangaattcttgattcttgcatgttttcttgaaattgattaaagggtttgttccccatgatgtgatcacatgttctatatatatatatatatatatatatatataatggatgagaagtgataatgtgttagtgagaaggtgttatgatacatgtcttgtgaacaggtgtgggactatacagttctcgat

SEQ ID NO: 281171 - DNA, 413 bp, Glycine max
  unsure (1)..(413): unsure at all n locations
agtgacactatgatactcagcttctattctatntaganattcatgaaggtgttataatgtctganatctatgggattaagatggtcattgaccaatccctattntatgatttaacaaaattgcctagtgaaggtgtaccttttgagggtgcactgattgatgaatggaaattcgatttctctgtgcatgatgcccgccggttggtttgcaccaaccaagcggatatgaccggaaggcttcttgccggttcattggcttttgaaatccgcatcctccattaccttatagttcacatattgcttcctagatcttcaaaccttgcccaggtttctgaagaagatctcattgtcatgtgggcctttcataaaggtttacanattgattgngcacatcttgttagatatcgcatgcat

SEQ ID NO: 281172 - DNA, 425 bp, Glycine max
  unsure (1)..(425): unsure at all n locations
agcttctcgtgatcttgtgtcatggtcatattgagacatgtgtgtggtccaccccattgtgtgactctccatgaatcagtttttttagataaaattgccctcatatagaataggcaaggacattgcgcttttattcaagcaacaaacaacatacctgttcgatttgctttcaacaactttgaaagtttgatgcaccttcataacatattattttagtgcattttttaccgcatctttggtatcaaaatccatgccaacatataattcttgtccaacattaaaactcgatggcatctccaaaccacaaatgtcttcctcatcaagatgactccagttgatattgttataatgcanagcatcattccaaaatggattntcaattccttgtacacctaatagttaaaaaaattcaaatcatacttatt

SEQ ID NO: 281173 - DNA, 369 bp, Glycine max
  unsure (1)..(369): unsure at all n locations
agagacgtggcgtttaacgagaaaggcatgaaggattggtcttcanagtctcaataggagtcgatggtgatcgctgacaaccatgaagaanattatgaaaggctactagatccaacacctgatgagccataatcatccaggaggccatagaggaatcctcaactctcagctagattgcaagattatgtcatgtttaatgacaaagatacatctaatgaagagattatcaattttactttatttgcagactgtgatccagttatttttgaagaagcctcaagtgacgagaattggagaaaggcaatggatgatgagattcgtgctattgagaagaatgacacatgtgagttggtggacttgacaacaaac

SEQ ID NO: 281174 - DNA, 393 bp, Glycine max
  unsure (1)..(393): unsure at all n locations
agcttctatataaggttcgttcctaatttctctacaattgcatcacctctcaatgagctagtgaagaagaatgtggcatttaactggggtgaaaaacaagagcaagcctttgctttgcttatagaagagcttactaaggcacctgttctagctcttcctaacttttctaaaacttttgagctagaatgtgatgcctctggagtgggagttggagctgttttgttgcaaggtgggcaccctattgcttattttagtgaaaaacttcatggtgcgacccttaactaccccacctatgataaagagctttatgccttaataagagcactccgaacttgggaacattaccttgtntccaagggaattgtcattcatagtgatcaacaatcacttaag

SEQ ID NO: 281175 - DNA, 235 bp, Glycine max
  unsure (1)..(235): unsure at all n locations
tgaatcggacctcagtgtanaaagttatgaccatttgaatntctcgggagcttccgttgttcaatttcgagcgtctgtatatgtgatacgcctgaatcgaacatccgtgtganaagttatgaccatntgaatntctcgaaagcttccttggttcaattccgagcatctcgacatattgtgtgcccgaatctgaccttcgtgtgaaaagttatgaccatttgaatttctcgagagc

SEQ ID NO: 281176 - DNA, 411 bp, Glycine max
  unsure (1)..(411): unsure at all n locations
agcttatgatctgtatattatgtctaagtataagccgagtttttgacctctacggtacacaagccctccaagctctaagttcagtatgaacgaaagtgattaagatatttgtaatataagtttatttcttgtacgatacacaaatataagcacacaaaaagtaacattttttagggtgttacactattaactatngggtcaaatgcatgcttggctttctacttcaaactaatttacctttttttttccttcttgtttgttccagctgtaatggctctaaaaaaatgaaagtaataaaaaataattatttataaattttgaaaatntaaaataaaaaatatctttaaaattganaacaaaaaataaaaatagactttttttcttaaattaaacaaatcgtttaatcactac

SEQ ID NO: 281177 - DNA, 313 bp, Glycine max
  unsure (1)..(313): unsure at all n locations
attttgcattgatcattactgagctatatggtggatccattatcatactatattataatttcgcccagcttgatgatggggattaaacccatttgagcattaaaataactgacacttaatgaggtcccatacctttcctttntaccatattgcattgatcattattgacgtatatgttagacacgtacattatcataatataagtataatcaagaaaaaccatagacatcatgtattggaatacctcatgatcaaatttaaattgaacttacactagtttatgattggaaaatgtactggaattgggtgaatt

SEQ ID NO: 281178 - DNA, 380 bp, Glycine max
  unsure (1)..(380): unsure at all n locations
agcttgtaactcgttaatccatcaaaacattntttattcatatatgctcgtccaacttcctgatacactntcaatagaatatgcaagccgttgtattgcgatatttgangttttcatagcacaggagtttttatattcaaatcaatctaacatanaaataagaaatcattataaaaaactgagaattgaactacattgattttttgttatttttttggatgatctttctcttacattaatcattntggnttaatttattatttatgtttttgaaattgaaccaaaccgtaatattgttattaacaactcgattattttaatattctatgcatatatcatttgaaatttataatatttgtagtgttgtgtatacaatataa

SEQ ID NO: 281179 - DNA, 268 bp, Glycine max
  unsure (1)..(268): unsure at all n locations
cgcgtattcataaattaaagagaaacattatctnccttacacgacggcttttgccgactaagctcagtcaacagaaccctttctctctttctctttctctctctctctctctctcttctctgagggccaagagtctgccattgacggtgtggaaggaagaatttttcattttttccccctttgacggattagtttctcttttcttagaaaaatattatttatataatcaaaaataatagaatatttaatatatgtatattagttcatg

SEQ ID NO: 281180 - DNA, 403 bp, Glycine max
  unsure (1)..(403): unsure at all n locations
agcttggccatatgaaggatattctcttgcatgctgagttagtgcttggaattgcaactgatcgcagagaggatgaagggccacaacttctaatttatcggtttcttggtgatgatcttgacagtatggcgagtgatgctatgtggactgatgctaatggcgttgttgtgggttgtgaggattctaaacagagaaaggagctaaaggggtttctccttgattgtgttatagaatatctagaatcaaattgctgccaatattttaactctggatccaaggcatggacaaagctgcccttatgcatganagctgagatgttggctcaagaggtgaagagggagatcaatgagtggttatctatggttgggatggtacctgatgaaattatagaatgggaaatgag

SEQ ID NO: 281181 - DNA, 275 bp, Glycine max
  unsure (1)..(275): unsure at all n locations
agatatgttactccgcaaccaaatttatgtattatatcagacaggggaaccagtttgctagcagctttacaatccgaacgtgttggttggaatgaaccagatgtttcgtctgtgtattgcattccccacattgcatcaaatttcaacaaacagtttaaaaatggtgacttaaaaaaacaagtaatcaatatgggtatgtttcttcctatttcatgcatcatattctggctttattacatgtntactaatagtaccgttggatagagaaatttaat

SEQ ID NO: 281182 - DNA, 705 bp, Glycine max
  unsure (1)..(705): unsure at all n locations
cgtgcatcactcacaactcgcacaattcgccgacagtgacacgtcatngccgttctcntaacctcctagagagagagattgagacttgaggcctctggaaaccctagcacagacacggcgtacccgtggagcctccatagacgatcagcgagcaagacattaacgaggtgactggcttatatagagcatgactgaagcacaaccacattgcggaccatacatgcaccgccatctggtccgagacggacaccactcacaaaaagacatgcaagaccctagatctagctgatctagcccacacaactcgcatgaccctgtcgtagatggagctaatccgtgcaacagaccagtaaagtatgctagctaccgacgaggaacgctaatgaccgtgtacgcgcatatctagacaggcgcgatcctcgtagggaacaagacagatccgcagcctcgacgattatcaagcggctgtgctcgccacaacgtacactagcgacgtgtattgcacgccntggacatcaacctacgacatcggactatctctctctctacagagcattgacactcacacacacagctaatggcggtgctcaagtgagcttgaccacacatgcgtgcgtaacatagtgagctatgtcaaacgcacgacagcttcacaccgatatanagcgacagacactatgaccacaccgcgccacgtgacgtccg

SEQ ID NO: 281183 - DNA, 314 bp, Glycine max
tttgaatgaagcctttgacatatctcctagattgcaatcttaagatataaggatgagatctacgactcaatgtcagtcagataatttaaagattttttggaataatgttgatatcaagataatgatgaaatttgaactcaatgtgtgtaaagataaaattgtatctcttggcgtattattaatcttttgaatatttatacaagagggtggaccttgacataaatgcgaagagtgactctggtcatttactattagtagactaatcacatattgactctaacctatatgacttattggcgatgacctttgaactg

SEQ ID NO: 281184 - DNA, 398 bp, Glycine max
  unsure (1)..(398): unsure at all n locations
tagcttgtgactcttggcaatttctttaaaactagtcacttaaaaagttgtgacttttgaaagaatcttcagaaacaagtcacttgaagaattgtgacttttggaaatgtatttttcgaaatcagttactggtaatcgattaccattaaggtgtaatcgattacacatcaacatatgtgactcttcattntgaattntgcaaattaaaacgtttagaagctctggtaatcgattacaagtattgtgtaatcgattacataagtttgaaatactttaaaattgtttaaatataagttttaactcttgaaatttgaaatcttaacattctaaaacactggtaattgattactaccttctggtactcgattaccagagagaaaaactctntggtaatgatt

SEQ ID NO: 281185 - DNA, 382 bp, Glycine max
  unsure (1)..(382): unsure at all n locations
tgaagaggatgctntaatggagggaaagatagagagaaggggggagcacgaaattgaatgaataaaagagggagagaagtggaactttgaagtgtgtctcataagactntcattcatcanagttacaacaagtgttacacatgtttctatttatagactaggtagcctccttgagaagctttcttgagaaaacttccttgagaagcttctttgagaatacttccttgagaagctagagcttagctacacacacccctctaataactaagctcacctccttgaggagcttccttgaaaagatcctaaagaagctagagcttatctacacacacctctctaatagctaagctacaccccatgacaaaatacatgaaaatacaaa

SEQ ID NO: 281186 - DNA, 318 bp, Glycine max
  unsure (1)..(318): unsure at all n locations
agctttcttctggataaactccacggttgtagagaatgctgatcaaattcccatattaaaatacttataaatatcacaacttttccagccacatgcataattgcaatgcaaaaaataagacccataataaattaaaaaaataaaaaatgcaggacacaaggatcaaacctgttggcagcatatcctgatttgaanaaatcaccaaataaaaacanaaatcaggcanaagttcacaaaaaaatacacaggtatgcaaaaaatgatagaaatcggaggaaagcgagataagagaagagggataggaataccgaagaactc

SEQ ID NO: 281187 - DNA, 379 bp, Glycine max
  unsure (1)..(379): unsure at all n locations
tactgaagttatcaccaattagatggaacatctcatganatatatnaattcttttgggtggaaaaacggagcaatagaagagttacatgtggataacaagcagagtaaagactcacgctacaccatgaatgggaaactaagtttaaaatatatttttgttctcactttgtagcattntcttttattgttntgtaagcaaaaagaatcaaacaatgaaaatctattccacaacatatcccagcatgctggtgcctgatgcagcacgaaatgtgaggcaacaaattcaagaattacatggcanagctagaagtcagtaactgatgccccnacaacattatgaatgcccccattcatgtagcatttgaagctaatgtttcat

SEQ ID NO: 281188 - DNA, 406 bp, Glycine max
agcttcattgctaagggacattcctgaaatagttgttttgcattatcaacaatagctccacaatgataacaaatagaggcaaaagaaaaaataaaccctacattcaaattatcatccgtagatgaacaatcatgaatccatctccaaaacaaaaaggattttgatggcgagattccttttttacgtaagatcttatgccaagataatgattgcaagttagtttggaagaaagataacactcctttaaaagtcatgtttcctaaatttgaggggatccacatgggtttatctatgatctcctctaaaggaataataaaaaatctaatgtcttccgctagctaggaaaagatagtgcgaactcttgagggaagcacccacatttattcctatttaagcccttcaccat

SEQ ID NO: 281189 - DNA, 332 bp, Glycine max
  unsure (1)..(332): unsure at all n locations
atgaacaggactgctactgtgtaagaagtgtgtcgggttgggagcatacccagatgaatcccttttgaanagcggtcgatgaccacaagaatggtggtatagccacgaaatgcgggtaatccagttatgaagtcgagagacaagtcctcccatggccgacagggaactggtaccgagcataatagacatgtggccttcttagtttcatatttcgtgtgttgacagtcgacacatgaagcatattcagtgtgctcatcgaggtggtcaataatagcttgtcagaactgagcatattctaaatcttgagccaactgggcctttaattcctccag

SEQ ID NO: 281190 - DNA, 381 bp, Glycine max
  unsure (1)..(381): unsure at all n locations
aactgaggggctagctgggcatttgtctgctagaggaattatagcagctactgctatctgaacgtgctcaaacgtctcacttaacattaatagcacgttcactactgagccaaaacaaattcgaccgttgcttcacacgtccctctacattcctcaatcaaacttatattntcgtggtaatctcaatttcagcataccccaacagctctcagagatttacgaaatcattccaaacgctctgcttctccatggctacctcaccaaaagaaacttcagctccttgttcaccctctgtaccatcatctccatcatccaccanagcaccatcaaaccaggaacgacctgaattcaatatccagcccatacagatgattcctggtc

SEQ ID NO: 281191 - DNA, 432 bp, Glycine max
  unsure (1)..(432): unsure at all n locations
tatgcatgtgaattatgacgcatcatcaagattcaagccaaggctattgtgcaagcaatcaatggggcaaaacacaccaaatgattatgatgatggatggctcanattctcacaaaggtaaactcatcactttcaaattgagctntcaaaactatcatgacatgtagagaagaatcaaggatttcaagtcacaaaatgtcaagaactgttatnttcaaaacaattacccatttcttgaacatatcctataattcaaagaagaacatgcaaattcgtacgtgcacacaacattgacccaaaatattaaactgaatatccgacgaaactaacaacattaacaaattaacacaactaacaaattaacaaaaccaacattactagcataaccaaagaacacttccccccatacttaaacaacacattgtccttcat

SEQ ID NO: 281192 - DNA, 567 bp, Glycine max
  unsure (1)..(567): unsure at all n locations
cggatgatcgcttcagtcttcnggtatccgtgcacanccangcanaagcncctncactctcaagggacgttcatatatgtgctatatanttcaggtanatgntntatgttcgctatgngccacaacagaactgaggcgtatgtctaaggtggtaattcagacacctatgtgaactcattcaccaatgctatatcatacacatgggttgtggtctcgacactcatactatctaagaggatgtattcccgtgcgttatacctcaaagaagcctacaatgggtgagcaaacatagacatatcacgctcacgtcgaccggactgaggaaagacaacatatgttctcataacgatttaataaaaccggactggaacacatccagggcatacacagaataacgtcgatctgacgtagaagataaacaactgaggcaattagcaacctgattattagagatctgtacaggagcattgctagcagacattcgtagttaaaactcacccgcgtgcagggtgtctaacgagcaggtcatatatctatgaatacactggtntggcgagttcgctcccg

SEQ ID NO: 281193 - DNA, 256 bp, Glycine max
  unsure (1)..(256): unsure at all n locations
atcatcgagatcttcatgatanacaatagaaactagtaatccttgacttgattcgatcctcgataatgcaatgcataacatgccatggctaaagacaggatttggcagataaagttacaccatacaaggtgagacgccttgatacttgttaatagacattgcatgagataacatgattggagatagtcttctcaaaagattaagaggccacggtgattgagaacgcaacattgacattcttgggatgtaaacatta

SEQ ID NO: 281194 - DNA, 402 bp, Glycine max
  unsure (1)..(402): unsure at all n locations
gcttcctcggagccatttcctgcgagaacaaacatntacaagttatgtttactaggttttgcatatctgaacgcacaanaagtcatgctaatccctctgatnttagaacgaactcacgtaatctatgtatgcacacgcgtatgtgtggaatatcctactatttatatcaacatagaggccatccaacagattctaattgtcatacatatatatgcattagaaaagaacacacattctcacgctcaaagcattgcgtcaaagttcacacttaattatatcctaaacatttactattacagactacctacacatatctgaaatatatatcatacaaaatctattggttctctctcatttatatatatgcatattggaaagctattacattctgccacactggca

SEQ ID NO: 281195 - DNA, 402 bp, Glycine max
  unsure (1)..(402): unsure at all n locations
tgtccgcacaagaaanaatactaaaagggattttgggtcaatacctcagtctgtcttaccaaggaaaatggatcatttttaaggtccaacgccttaaaatgactcaccttgcaagtaaaaagaatcgcttgattcacccttaagaaagaactacgtaggtctgatttcctcttcgatggagggtatgtacgagcaagagccccgcttttgtcgacctcaaaataaaaaagaaataaaagtttaggtacacaatttcacacaattctaagataaggctgttgttctttgggacaaacgtgagaggtgcttatacctttctcaaatgtacatacgactcctgaatctggaatattcttcatgaccgantctcttcggtcttttcgacattttccacaaataaac

SEQ ID NO: 281196 - DNA, 413 bp, Glycine max
  unsure (1)..(413): unsure at all n locations
tgaaagcctagctatgtcatgcgaatatccttgtcaaagaagtggagttgaagaaagagtatattagaatatagagagaaaagtgtgtaataagatgggtgatgtgatagagaaagataagatagaacaatacgtactatagaaaattgttgtacaaatcatgtaactccacaggaaatgataatgtaaaattgagaaagataacagtgaagaagtataacatgaagaggaatgattcacaaactaacttttactctaaacatntcattgccattcattattgttctctgtctctctgtttctattactagtgtgtctagataacaagtgagagaattgattctaatccataagatcatggtgacaccatgaataagctgaagctagtatgtgttgcttctctcttaacatga

SEQ ID NO: 281197 - DNA, 550 bp, Glycine max
  unsure (1)..(550): unsure at all n locations
cgctgcccatgatcctatcgattggtcgaaccttagantactcaagcttctgtacaaccattctcatgtagctagcatacanagtccagccgactctggncagtgtagattgtnctgcaatgaccaagagggatgatgttgtattctgtgactgctctaatacattgcgctttgtcatctaaagtcatgccaacctccactataccgactggtggttatacattgtgttactgatgaacgaaatggtgtcgatcaatgaagtgcggtacgtggtcacatgacaagtctactggacacctatggtgcggatattgccacggcggagatggaggtagcattggctaccaacaccctcgtcatacggatggtcaatcgtttggctgactgatgtgatccaagaacctgtgatccttcatactgactgacatcatccatcgttttatcatgacatcgacttatgtgatctntgatagcactgcgatgtccatcttcgtttgatgacacgtatgggaacntagagaacgtggcctataggggatgagagtagctn

SEQ ID NO: 281198 - DNA, 446 bp, Glycine max
  unsure (1)..(446): unsure at all n locations
tggaaattctgatcgcctatacttcaacaacatctcataaggatgaatgactcgggcatactttaagcttatgcacggaaaatgtaattatgaaattgagatgcccgaagaaacaccatttcctagttaaccatgcattangtaccatgttcaattattttgtttttaagtgatacgggtttatgatcccaacatggttggctcctaacacatgaaactaagaatgtagtgtgaaagttcacgcttcccccttctttgtttntagtttgtagaggataacgcaaggatgagcaaacatgaaaacaaatggtatgcaattttgcagatcanaaagtttgttgaacgcatatgcatgatgatgccatgactcatgcaaaatgtgaggctggatatgataacggacanatgcacgatatgtccattatgatagtatgaagagatgctta

SEQ ID NO: 281199 - DNA, 490 bp, Glycine max
  unsure (1)..(490): unsure at all n locations
acactatcaaactcagcttcataaagtntccacttctccgtgttaccggcanagatattaatntagttagcggttaaccacattatgcaattctaagtgtatttttggggaaaaaatgttcttcttttaaatttaatattattccaaaaataaattcaattaaacacatattaaatataaattctcatacacgagtgagaaataacattcatgttcttgttcccctttttatctatattgcgtaactatgacttagccgcacatgcaacagataaggaagagcaacgtcatgccttcacttttcaataatgcttggatatagaaggaataaaaaagtgagaaatattcctgttttggaggggtggaggtttcacctgtgataggaaatangacacagaacaataaataagaaatataatgaattttgtattattttattaaagagaaatattataaaattatatttgtaaattatttggttcggataaaa

SEQ ID NO: 281200 - DNA, 398 bp, Glycine max
  unsure (1)..(398): unsure at all n locations
tctcaaagggcatggttatttctagtntcctaacaatatctaagaatctcaccaaatatctgttcttctccttcttggatggtaccacaagatatggtacttccgcaccttcattcacagctttttctctctttttctctctagcttgttcacttctactcctctcttcactcttattattatcatctttttcatttcttatcattacataatactttatcttggccatttaatatctttttcttgaccattattcgctcttcttttgcctaatttccttaacctttcacatcatctttcttatcatcaatacctctattttcagcatctatcttcttgggcacgacaacactgacctcatcctccgcctccacaaacctttaacttcttgtcttcac

SEQ ID NO: 281201 - DNA, 293 bp, Glycine max
  unsure (1)..(293): unsure at all n locations
ntgagccaattcanacgacaataactttntactcagatgttttatatattctcgtgatataacgagacgctcgaaattgaatgtagaagctctgagctaattcaaacgacaataacattttactcggatggctgattgactcctgtcatatatcgagacgctcgagattgaatgctgtagctctgatcgcattcagacgacgataactggttacacggatgtgtgattgagtcccgtgatatatcgaaacgctcgagattgaatgtgtgatctctgagccaatccgcacgact

SEQ ID NO: 281202 - DNA, 215 bp, Glycine max
ctcggatgtccgagtccggagcataatatatcgatttgcgtcgtttagatcatcggaagctctagagagattcagatggtcataactttccacatggatgtctgaataagacgcgcaatatatcatgatgttcgaacttgaacaacggaagctctccagcaatactgatagtcataactttatcctcggagggacgattcatgcgcagaatatat

SEQ ID NO: 281203 - DNA, 349 bp, Glycine max
  unsure (1)..(349): unsure at all n locations
ntctactatgttgtcacataagtctgcaatgcaatcagatntgaaaatattatgaanagtgaatagtagatcgagtgaatcttanactgtataaactagctgattgcctagaaaactacaacaaagaaagcaaatatataatcctggcaggtcatgaaaacttgatcttgcaacaaatttgagaaaaagtaaatagctataatcatttgatgaagcactagaaaatttaacttgcttgagaatcatgacacattaacttgctggaaaatcatgacacattaacttgctntttagacacacatcttggtttgcagtgcaatataatcaagagcctaattataaataattc

SEQ ID NO: 281204 - DNA, 429 bp, Glycine max
  unsure (1)..(429): unsure at all n locations
cgcttgtgaagcttctatggaggctggatctttgagcttcaatgaggttcttcaatggcgattntccaccatggagatgcagcggaaggcaaaggagaagatgagaggggaggcaccatccactagggaataagccatggaagaaggagcttctccaccaagaatgtgccttggataagaagcttgaagaggatgctctaatggaggaaaaaaaagagagaaggggggagcacggaattgaaggaattaaagatggagagaagtggaactttgaagtgtgtctcataagactttcattcatgaatattacaacaacgtgtacacatgcttctatatatagactaggtagcttccttgagaagctttcttgagaaaacttccttgagaagcttctatgagacaacctccttgggaagctagagcttaact

SEQ ID NO: 281205 - DNA, 387 bp, Glycine max
acagtccacaagcaccattctcttcagtagagaactaaccaagtatgtttgcacgattatcaaaagagagagtggagaagctttcaattaccgacttggagtctggtaatggcaggcctccactccccgaggagagagattccaaattggagccattgttgtctaaagatcattgaagtctactttgtatcataaggtaaaaagtgtatttagccattctttcagaaaaaataaaatgaataggttaacagtaaaccgggtgtaatcaagccaacgttaaacaatagcttgtgtatatttgattggccggttgctgtaaaattaaatgaacttttaagaatggtttattaatgaaatctcctggctgctggtatccctaatacaaca

SEQ ID NO: 281206 - DNA, 85 bp, Glycine max
tccattatgtatttgagtaattagtaatatatctgtttatggttacgctatcttaaacatttccatggattaatgatgaaatatg

SEQ ID NO: 281207 - DNA, 228 bp, Glycine max
gactcatcacgtcatctaataaccttggcgtggatccaagtgcgccgatcatccatgtgcatactcatgtcttggtggcatactcaccgatgcttatttctctatgaaattcatcataactaagaaaacaccaaggcgcccctataacagtcgctccctaacaatggctaatgaagatggcgtgtgtgaacaaatcaaagccaatctatcggtcttaaaacatcaaat

SEQ ID NO: 281208 - DNA, 445 bp, Glycine max
  unsure (1)..(445): unsure at all n locations
ntgagccacaatcctgactcaccatanaccttgacgccaggtgagaatgtcaatccttaccctcggaagcaaaaaagaatagaggggaaatttccaatcaaagaataagagaatgagaatttccaatgaaagcaaaaaaagaaaagaaggaaaattccccaatcaaagagtgggagaaagcacaaaaagataagataggaaattcccaatcaaagaatgggagaaagcaaaaagaaaagatagataattcccaatcaaagaatgggagaaagaaacaaagagaacagaaggaaagaaagctcctgatcaaggatcgaaagaaaacagaagatatgtgcagagaggtctttggaccggacgatatctgaacaatacagaattgtcaccaaatgaacaaagaaggaaggaaaggaaaccacgacctaaaatggtcttctccctttga

SEQ ID NO: 281209 - DNA, 400 bp, Glycine max
  unsure (1)..(400): unsure at all n locations
tcaggttgctcattccagatngctgcanagaaggacagagatctgtattgtgatctattcaagaacatagaccacagactcttgcaacaggtgtagatctcttattcatggcaagctgagttactaggttgaccaaggcatcaagttttccctcaagccttttattttcaatagatgaagatgaattcttggccacctcatggactcctctaaggacaatagcatcatttcttgcactgaatagttgggagttggaagccatcttctcaatcaaattcctagcctcagcaagagtcatatcaccaagagctccatcactggcagcatcaatcatactcctctccatgttgctaagtccctcatagaaatattgaagaatgagttgctcagaaatctggtg

SEQ ID NO: 281210 - DNA, 369 bp, Glycine max
  unsure (1)..(369): unsure at all n locations
ntacttcaatatgttccanatcattaagaatcttggagatatcatccaattgttcagaggctgctcttgactctgctatcttgaaggtgcagttgttgcttcaagcatagccgatttgcaaaggactttgtcatatacaatgagtccagtttcaaccacattgaggcttctgtcttttctcttgcaacttctcttaaagctctatctccaacgcatataatgattgcacttctggctctatcaatcatctttgattgctcctttgagcttagagatatagacatctattcttctcctttaagagcttctgcacagtcatgttgaatcaagattgcttacatcttgattctccataacctgaagtcattt

SEQ ID NO: 281211 - DNA, 380 bp, Glycine max
  unsure (1)..(380): unsure at all n locations
cgtaccccagtcatccataaacctatntggaacattagacattgtcatactcctaatttcgccggagattattatntgatgatatacaacctttgattggccgcttcaagatacttggcaccctttgttgcacaatatgtgaagtcccgagatgtgccgaaaatcanaaggaagcaggcttacgcgatccgtgaaaatatcgtaatgtgacagaaatccaaaggaagtgtttttcgcaatccgtgagttatcgtaacttcttcgaaagctaaacaagagtaaatacataatccgtaaagattcgtaaccttgcggaaagaaaataagtatcggtactaaattcgtaaagnttcgtaacgttacggaaaaagaattacaaa

SEQ ID NO: 281212 - DNA, 385 bp, Glycine max
  unsure (1)..(385): unsure at all n locations
ntaagagataccattaanactaaagtagttcctaaacaattatcaattgttgaagcttcgccgagtgtcctcattgaataacctttattcaaacctttcaaagttagtgataatgctaaacgaacaattatggaacttagagaaactaaatccttaattgaaggcgtatgtgacaatcatagcgaattactaaacaagattagtagtttgcttaaagtcattccagatactccccaagcttcggaaaatacttgcaaaatggtcacaaaaagtacctccgaattaattaatgttattaatgaagatagtgaccaaaacttagattacacgactgatataggatcagtgtcataaaagactataaatccatttaactcctaacact

SEQ ID NO: 281213 - DNA, 96 bp, Glycine max
caatggctcatacctcacataggtcatcaaccattccttcttatcttcaatacggtgctcacctatcaagcgcgagcagttataccgactcgcact

SEQ ID NO: 281214 - DNA, 428 bp, Glycine max
  unsure (1)..(428): unsure at all n locations
tctagtcgtccatagacctcctcataggtactgttcagcanacgttgtatctgtgcattcatcgcatccagtaacagacgttgaacgccgtcctactgatgatactcgtcaccaccaccacctgctccagccataattcaacaggaaaaaaaatgtgcaataaaaattattaaggtttcaagacctcacaacactctactcacgtgtttaactcttagatggtagtacacttgtgtttaatgctctcaataagcttttgtgtaatgtattccctcttgccttttaccactcgtgtttcctcttaagttcctggatggaccaaattagacacacaaggtaatataaaataaaaggaaagacaatataatgatcacaaacagatttgatttgngataacaacttggacttngatttgataataatatatt

SEQ ID NO: 281215 - DNA, 385 bp, Glycine max
  unsure (1)..(385): unsure at all n locations
aggtgggtagtatggctggtggtggtctggtatatgtggttgcacatatatgccattatctntaatgatcataagcgaagtgtcaaggtggttgcaaatgttttcaagtacagggcttggtcatggctaatggaaaaagtggttaaaggcattggggcatcattctacgaatgctgaattgagtttggccattgtatgccactgtcatttatattctgcaaactatggacggtaagttgatgctagggggttataactgtgactgaacggcggaagctatgttgacttaatttcgggcaataattcttgtatttagtattaacgggatgtttaaattgttggctatgaagcacgaacatgccgctgaagtgccgcgttccgcgtc

SEQ ID NO: 281216 - DNA, 339 bp, Glycine max
  unsure (1)..(339): unsure at all n locations
atgacatttagctcacaggtcaagaacacttcatgataacaaagatgatgatctcaagaatcanagaatgagttcaagatgttcaagattgaatcaagaacatttcaaggttcaagaggaaattagatttcaagaatcaagaatcaagattcaaggttcaagcttccaagaataagaatcactattcaagactcaagattcaagaatcaagagaagatattctcnagatcagtatgaaacagttttttcagatcctgactagcacgtgcattcttctccaaagctatctaccacagagtctgtactctctggtgactgtgaccagattattgtgatcaa

SEQ ID NO: 281217 - DNA, 307 bp, Glycine max
tgaatcggacctcagtgtgaagagttatgaccatctgaatctctcgggatcttccgttgttcaatttcgagcgtctgtatatgtgatacgcctgaatcgaacatccgtgtgaaaagttatgaccatttgaatgtctcgaaagcttgcttggttcaattccgagcatctcgacatattgtgtgcccgaatctgaccatcgtgtgaaaagttatgaccatttgaatttctcgagagcttccaatgtgtagtttcgagcgactcgatatattatacgcatgaatcggaccttagtgtaaaaagttatgac

SEQ ID NO: 281218 - DNA, 478 bp, Glycine max
  unsure (1)..(478): unsure at all n locations
ntatatctatggtaaagcagaagaggatatacccttacgggaatcaatattaggaaatatcaaatcttagttntgaataataatgagaatgaagagaggacattgatgatagagatgaaagaatgaatacacacttgcaactgcgcataggaccaatgactagaggttgtgactccttgaagctgtgcgatgctcttttctgtacactccaacgtaacactttcaaaccctacattctattatatttatttcgttataaaagagagagacacttcttttaagatggttttcataaccgtcttagaatggtagtttctaaggcagttcttgcaaaaccgtcttagaataattgcatttatttacaaaaatgtcaccgtgtgtctttctagaatgattctctatcaaccgacttataatcaacgtcgtaaaaatagctttctctagtagtgaatgcatggtgcttaagcgacttaagtga

SEQ ID NO: 281219 - DNA, 362 bp, Glycine max
  unsure (1)..(362): unsure at all n locations
ggggagaagtgaagaagaaaagggttcagccncttcggcacttctctctctctctcgaaattactgaggaaaattagtggcatgaagaanatccaagccgaggcgcttccgtaacgtttccgtgagtaattacgcgaagattctcgaccgttcttcaagattcatcgttcgttcttcgttttcttcagtcttcaacgggtaagtacctcaaaccgagcttttcaattcattctatgtacccgtggtggtccacattntgtatcatgtatttttattctcgttttcatttacttttaatacccncttttaacgtgcttaagccatttatttaagtcatttctcgcctaatctnaaaataaaat

SEQ ID NO: 281220 - DNA, 378 bp, Glycine max
  unsure (1)..(378): unsure at all n locations
tctgtccctgaganactggttcccagaagacaacagggagtttagattgttgtaaccctagccttgcaacaagtcctagggaagtagacacggagatggacaagaaaatccgcagtattgtgagtagcattttaaaagacgcctctgttcctgaagctgatgaagatgttccaacatcttccaccccgaatgtttctgtgcctgatgttgagaaagatgttccaacatcttccggcccaaatgctgaagccctcccttcacccagtgaagaggaatcaacagaagaagaggatcaagcctcagaggagacccctgcaccaagggcaccagaatctgctccaggtaacctcattgacttggaagaagtcgaatctgatg

SEQ ID NO: 281221 - DNA, 409 bp, Glycine max
  unsure (1)..(409): unsure at all n locations
tctntgctcttgctcttaacaattgcanaagcaatnggaataatgtgtctactattatcttgtccaatggcagttaacaaagtaccacaatattacgtcgcaacttgtttgtatggataattactatgattatgtccttcaattctacacaatgaagattgcttaggcatatctggaattgattcgtccatctcattatgcatacaactagagactaaccttttcactatgactcatcaatctgaagaatcaaacataaaatatggactcaaatatgaagaccatttatcttcgtttccaacggaatgaaactgatgctaataaactntatgaatgttgttcaacctgtatacagggtcaacacaatcatcataatttatatggcgagaaacacctgccgcaattgcat

SEQ ID NO: 281222 - DNA, 425 bp, Glycine max
tctataccaccccatttctctcctcctttggcaacatcatatagccaaagtgcgtggcaatcaacacaagattatataactaaagtttacataataaatcataagtctcaacagaatataagacaatcatccaaaagttaaaaccaaatataatccaagcataaataagtcataaccaaatataattcaagcataaaagactaagtgccaattatcgaaagataacaaaagttcagaaaatgataccgtaaaaagcatagcctaatacacggcttataataaaagataataacatcctaaaaactaagacggtggtggaaggtcgaagctctgacgaagataagttacatcctcttcaagctgcgtgatgcgggtatccatgccttcaaagcgaccatccacagaatcaaatcgctcaccaacat

SEQ ID NO: 281223 - DNA, 591 bp, Glycine max
  unsure (1)..(591): unsure at all n locations
tctctctatctcggcgtangacactaccatantagtgatctcgtacatacgtncgctcctactccncaccccacgnctgaccctganacgttttctaggacacttaaatctcacttctctacgggaaaatcttgctgccagcgcttgtaattaaattgttcaatgtctgctgaaaaacatcagctggggctggttaactaccgatgctggctactgttatatctattccacccctgaataatacctggacgatagccatactgaaatgttcgatcggattcatccgggcatagcttctattaagacctctatatgtcatatattcctgagcgacagtcgctaacatatttttccatcaataataagaacatcatgcttatttgcatagggggctaacacttttatagctcatgaaatgaaagcatgcctatgttcagcgatacacaatcttcctctatagatccctactcgacctacattgaatttttgtaggnatacccaacaagcaacctcttctacataagaaatatatctacaaagatgtaaaagatctgaaggatgcgaaaaaatcgccgggctttaaacaccatg

SEQ ID NO: 281224 - DNA, 453 bp, Glycine max
  unsure (1)..(453): unsure at all n locations
ctanagtcgcatatcttanaggaaacgaatcanaattgatgatgtacatatgagactaatttggtggttcataaaatatctagctgtcaaacataagttntactaactagaaatgaatgctgggtagagcattactatcaatatgatatcaacatgataaattacctggaatagtgggtggggaaccctgatctccatagccaagtttcgctggtattttcagcttccgcttctcaccaagacacattcccaataatccctggtcccaacctgcaaagagaggtagtgatcatggaatactctatcttgaaagatttcccatcaatcataaaccagtaatttgtaacaaaattacatcatacatactagtatgattatgtaaatacacgcatgcatgtatgtgagcataaattatagctcatatgtcttggtgggtatgtaaataaataatat

SEQ ID NO: 281225 - DNA, 515 bp, Glycine max
  unsure (1)..(515): unsure at all n locations
gtgacncctgacnatgatcgccatagagnangcgacacaanatactcaagctctggacacttaatatntgagagagaactgcatttccgatcttgagatgaattgacaaagccagcagcacaaacaataggtggtgcaatctgaattttccctgtcacatcgctttgcacatcacctgtctgtctctacattacaatgaacatgcatatgctcgcccacctataacttcatcgcgaactttatagacactgtgtctatataatacctgctagtgtatgagtacatntgccacatctacaggtttcaccgcctcttgtatgatttgactgactcgctttgaagatgacatnctgcgtggttgggataccctgacgtgtcgacacatatttcatgcacatgctgctatagctattgggcataatcttacctccgtatgatggttcatggatgtcgcgcacaacgattttaaccttcctgcagaattccactcttcaatatataagaggtggtggccg

SEQ ID NO: 281226 - DNA, 479 bp, Glycine max
  unsure (1)..(479): unsure at all n locations
cgtgggcanantgacccacgggctncgcttgttatataattgttctattgtccgctgacaaacatgactaggtgctgcgtgactaccgatgctggctactagtatttctatacctcccctgaatcatagcttggagcgaatgcagatttcagaaatgttccgatcggaatcatccggtcatgcctctttataagacctccatctgttatcttttcctggccgacctcagctagcattcctctcaagcaatatcggcgaatcatgtcttttgccaatgtgtgctaacgttttcgtggctgatgcattatatgcttccagggtcagtctgtaacaagtctgcacgatatatcttatctgacctaccttgatatcttgaacgacatccgacagccatactctgttaccaaaacatatatatctccacgttggtaaaaattctgagtgtctgtggaattatcctcgagcttcgtcgatctacc

SEQ ID NO: 281227 - DNA, 233 bp, Glycine max
aaactcaagctctgattcgaatttgagcgtctcgaattataaatgactcaatcggagtatcgagtcacaagctatcgaccgtcgaaagtgctcatagcgtctgtcagatattcgaatgtctccatttattacaggactctatcgatcatccaagtaaaagttattgtcatttgaatttgctcatagctactgatacaattccctgcatctcgagttactacaggactcactca

SEQ ID NO: 281228 - DNA, 264 bp, Glycine max
aaggacacagcatacagtaatcggcaacggtttatggacctgttatatagaagaacgcattgggtctgttgcttatcgtctcaagtaaccggcagaagctctcatacaccctgtattccactgttcattataaaaaccattcaaagggtcactggaatgcgtaacacaagtgcactgaccgaagcaatataaccaccatcaaccctcgatcatgcctatgactatcttagacgaagcgaagaactacagctcatgggcctctag

SEQ ID NO: 281229 - DNA, 564 bp, Glycine max
  unsure (1)..(564): unsure at all n locations
cgatcgccattgggccttgatgacagctgcactancngacacnacagcnngctcatgcttatgagtccctatctgtacggaaacgaagccgcacgtgtgtatgtacatttgtacactcatgacggtggcacgactgacatattgctagcttgtcactacaatcactatgctctaacataaagatgaatgcagtgtagagcattactatactcatgatatccacatgatggattacctaaaacagcgagtgacgaacccgagactccatagcctgattacactggtattctcagatttcgtctcgtattcagacacatccacaatggtcgcgtggcccaactccgcaagacaggcagtgatcaaccacaactctatcttgaatgacttatcatcagggttatgccagaactcttgtgcataagcacatgcgacatgctactgagaatatgtgattacactctagcacgtgtgtgaccatcaattatcgcgcatatgttgaggtgggtctgtacatacatattatcacccctatcttatgactgcatcgataaaacatctctaccg

SEQ ID NO: 281230 - DNA, 337 bp, Glycine max
tctgacagaccatacaagtttcctaacgatttctaattatgtgggccattaactctatcatatgctgacaatagccgaaaagcccatgaatctattcaggggcggagtaagtgttcgccactgctatggccttggctaactattagggaactttttgactcctgttcaaagtaagagcgaatctggcctgccacattgctgtctcttggtgccatgaatcaataaccctctcccatagctcgctatctgctgatttcttgagcgactatcctctacctctgcactgagtcacgctaatttacttcttttgcctcattatgacggccacatttccttc

SEQ ID NO: 281231 - DNA, 351 bp, Glycine max
  unsure (1)..(351): unsure at all n locations
tcataatgaagtagccaagtagtgcacccaagaagcatgatttactctgtcntatttagaaggttgaaatgctacactaaatacttactaataaaattaaagtaattacatttgtaattgctaatttattaaataatatgtattttctggtatgaacgtggttctttcggcttacggaaagcatattatgttggttctaaaaaactaaatttcttacattaatgcttatgataccaatagggaggtcatgcataatgggttggttcctcatgatctctttttaatctaaagtttacgaatttagtaactcaatattctccttatttttccatgaatattgcagcggggcta

SEQ ID NO: 281232 - DNA, 245 bp, Glycine max
  unsure (1)..(245): unsure at all n locations
gaccttagatactcagctgccatccatgcncacaatgatgacccgagtatgttgggaactgttctatcccggatgcggaacgcaagatactgcgcataactgcctgataacgccaacgaaaacggggagtatgggttgactatatcccctcagcagaataaacagaccacactggaggaacaccgtagcatgttcgatgagactgacaggaagaacccccctgctctaatgaacttatacccagt

SEQ ID NO: 281233 - DNA, 254 bp, Glycine max
  unsure (1)..(254): unsure at all n locations
ctgagccaattcanacgacaataactntttactctgatgtctgattgtgtcccgcaatatatcgagaccttcgaaattgaatgtctaagctctgagccaattcaaacgacaatatacttttactcggatgtctgattcacgtcccgaatatatcgagacgctctaaattgaatgttgaacctctgagcaaatgctaacgaaaataagtttttcttggatgtcttggtgagtcccgcaatatatcgagaccctcg

SEQ ID NO: 281234 - DNA, 328 bp, Glycine max
  unsure (1)..(328): unsure at all n locations
cgccacccagctcgcccaggcgagcanggtagcttcctccattatcaactaccttctggaggaatcttatggagggcccaagtgggcctggttgctatgcgcactcccattattactaaggacaccccctgccttatcttaggtgatcctatcttcttaaagttacggaaacttacgaattncgtaacgatacttgtcttctttccgtaatgatacggaaccttgtagattgcataatcatccttcttttgacttacggcatgttacggaacctcagctaatttgcaacgatgcttccattatagttctggtgtgtcacggaacctta

SEQ ID NO: 281235 - DNA, 353 bp, Glycine max
  unsure (1)..(353): unsure at all n locations
gtttacttctgaacaattttacttatcttcctcanattagggtgtatcatgactaacaaagacatgattatcattttttggcttatgaggtttacaaaagacatgatcatcattggtggctcaaataaggtgcaaaggataaattattatcaaacgttggattttaagctgagtggcttaaaataagaacaaacataaataaggtcttgatcacttccacctcatgtaattaatctaacagtctaagaataatgccaaatcangaaaataaatatagacgttttctcacacgtaggtntcacacaactcaccacgacaagacaaagttagttgcttaccataccatgatttct

SEQ ID NO: 281236 - DNA, 500 bp, Glycine max
  unsure (1)..(500): unsure at all n locations
tactcagcttagggtcactttatttccaagtntaatctacattagatattcttgacttgaagttctgttcctattctgactttaactgagatattaagtgtaatatttgagtattttgcaatatggtcagtgcaatgacctgatcaatttaatacactgagatgctgcaaatattttctcacagtttcaataaaaacaaaaaatgatgcatttaatttgtgaaacaaaaaaactgggcagtcatcctagcaagtccttgatcttatcaaaatcacaatctcttttatgatttgccatgtgttgatcacttggttgccccctggatggttgatataattgaaacaaatgtgagacatttgtaaagggaatgaatgtctttttcagaacttattgagaagtacttcttacatacaagaatattctggagaatctgaactaccaaaattggttcagaacttggccatgcttgatctcatccaatttgatcattttcaataact

SEQ ID NO: 281237 - DNA, 432 bp, Glycine max
  unsure (1)..(432): unsure at all n locations
ngacangccgacttgtntaagtaataataataataactattatctataacanttttatggcattatgaatgacagtatgaagtggcatanagtgcttagagagttcccttgcatgtgaaaaattctcaaaaagaaaaggacttatattaaaaggataatacaaccagattaatacttcccaagacaagaatgttttgtaaagacattttcagacaatttaaatatttttatttggctatattagtataaatcatgtctaattcatatattntttaatattatgttctttattttcattttcttttgatatactttgtgttttaataacttgaattcaatatgaatttgtacattacttatacaaaattttataattggtcttttgggtagtatttcactacgttttaaaacaatctaatggttaaagatgtc

SEQ ID NO: 281238 - DNA, 323 bp, Glycine max
  unsure (1)..(323): unsure at all n locations
agatgaagatgaatccgtggccacctcatggactcctctaagattttagcatcatttcttgcactgaattgttgggagttggaagccatcttctcaatcaaattcctagcctcagcaggggtcatatcaccaagagctccaccattggcagcattaatcatactcctctccatgttgctaagtccctcatagaaatattgaagaaggagttgcttagaaatctggtggtgagggcagcttgcacacaatttcttgaatctttcccagtactcatacaagctntctccactaagtttcctaatgccggaaatgtctnttctgat

SEQ ID NO: 281239 - DNA, 446 bp, Glycine max
  unsure (1)..(446): unsure at all n locations
acatgatacatgtcanggctcggtttgtttcaatgataaaagggatgccccacattatttccatgacacanatgcaaaanatgatgatttggaaattttatgcaaaactggtcatgcgtgcgcctatggggacgctcaagtgtcaaatttttatggtcatgtgatgctagggctcacgattcatttcctccatattaaatcaacccaatgtttccaaaatatgtccttttatcaatttgtgcattcctccaagtccatttcaggcgtccggngaaatttcatagcattcacccttcatgtgtacacatttttttttcaaaaactagctatgatcagcgaatttttcttttatagaatagttggaaccatctctttcacaacatgtaattttagctagacacttatttctcttttccacctctttttacttgcttctgtttcctatt

SEQ ID NO: 281240 - DNA, 312 bp, Glycine max
  unsure (1)..(312): unsure at all n locations
ntctttggaccttgaacaggcaactaactcctctntcanaaccatgccatgtgctcgcgactggtccctttcttcccttcgcaacttgagttcactattgctaccccatagagctccgcgaaatttgttccggccatactcttccttgcgagccctcttggtctcttgttcaaaggctcttgcggtaattgcattcttttcccgtaacccggcacactccttccgaacgtgtgtaacggccaacttgaacttcttcttggccagttttgcctttcctaacttgctttagagagctaggacttctttgtcttc

SEQ ID NO: 281241 - DNA, 401 bp, Glycine max
cactaagaaactcagctttaccttccattttaaagagcagtaccaaaagggtttagtttgtagactgagaattgaagcacaaccaaagctcaaagatggtgtggtgtgcactaaagttcttgacattctaaacaaatacttctttccattattgtgtatttattcatgaataactgctgtcatccgcaacttgaaatgtgagagagaaagagatcctctttattttccaattgttcctaaaattacagaattcaaccatcttagaattcagcgatcactggttgaattcacaatattaaaagataaagtcagtccatagataatcttccatttgaatcctatttccaatgtatcgctaattaaacaatcaaattaaactatcttactttgacaagaccact

SEQ ID NO: 281242 - DNA, 313 bp, Glycine max
ccacgagaatgatttcaagattgagtcggcagcaagtcaagaatctagagacattcgatatccagaatcaagtttcatgtttggagaatcaagaagctagagtcttcgagattcatgactcactattcacgaatcgagagataactcactcaagatcagttctaaagtttttttcaaaacattgagtagcacatgacgttctcaagaaatgctttaccaaagagctattactctctgtgtatcgattaccaatagcggatattgttttccaaagctttcaactgcatgtacaaccttccaatcgatggctata

SEQ ID NO: 281243 - DNA, 371 bp, Glycine max
  unsure (1)..(371): unsure at all n locations
ttgtcaccaactaggctactatccaatatgtgtgatagttctcacaaacccagatataatagagagcgaaagactcgttatttgattgtgtctgaacctcagtttttatcgcattctgtcttattctttacttatttggtgtatagagctcatgtgtatgtgttaagtgtgtaccgttgagtagaacagactatcttcgaacaaaaaaactcaaagagttatgagaaggagagattgtaagcatatttattgagcacgactcgtgctgacctaacaccacctgtgttgaattaacactcccatttctcatagaacgctatngctaccagcatgacccatgctcagccaacacgaccatgctactcagcatg

SEQ ID NO: 281244 - DNA, 415 bp, Glycine max
  unsure (1)..(415): unsure at all n locations
tctacatgaagcaaccagctcgcctgtgtgagcatgttacttcatacttaagccatcagctcgatagggcgagctgagctcgcctgagcgagttgagttcgcctgagcaagctgggcggtaagttgctcccctatttggctataaaacggcatgggatgctgangggaagatgctcaccacccttggcaagcatatttcacttaaaagacttttgtcttacagggacttcaatgtctttttcctttacatttcagacacattcaaagtcttttgtcttgcagagacttcaatatcttctgcctttacatttcagagactatcacatacnttttccttgtagagactctaatgtcttctatctcccccttacatttcaaagactatcaatgtcttttatcatgcagagaattcaat

SEQ ID NO: 281245 - DNA, 413 bp, Glycine max
  unsure (1)..(413): unsure at all n locations
ntatagcagattntagtaatgacccactaacttctaattanaataacttattgccattaacctagagaattaaaagaacttaatggctgagtgtaactgaaattgtggcaaccaaaagtcaccccaacagtcactatttggtctcccaaaaagctgatgcctangttgccaattgggcccttattacaacttgaactaaacctaactaaagcccttttagttgattaacctaaaacatattttggtcagccgactttacaaagattgggccattatttagacaaattgaacactctaaaattgagacaaagtggtgccatttagtcctcccccatttgggccatgatacaactcacaaccttggacttttctccttgagacttgngcttgtattcaaatagtatggacaacac

SEQ ID NO: 281246 - DNA, 336 bp, Glycine max
  unsure (1)..(336): unsure at all n locations
caagtccatagccatcaaagtctgaaaagagtatgatgaactaacggatgtcaatatggccacagctgaagccttggaatgagaaaccaataatgcccgaaaggaagaacacgaccaatgcaaacttntgaggagctttatatggcaacaatagtgatctcaagctccgaagacgtgaaaggaatcatcacaggtcaaaggcatgatcttgatagacgagctaaatgcttgccttaggtcgaagagacatttgtccaacagttaagcgagactgaacggaatatgtgggccatcatcgatgagtgcaaagagaagctacatctagcagcgactcac

SEQ ID NO: 281247 - DNA, 300 bp, Glycine max
  unsure (1)..(300): unsure at all n locations
tgataatcagatgacagaaatcaaaaataagattaccttgtattgtaatgtattactctactcctgcaaaggatgagtgagagacagagccacagaatattccaatgaaggaatgtgcaccacaaaataaaatattatcccttttttttttttatttgtgggtaaataaccaaatccatgtcaaaagtaggatgcattcataaattggtctctaaagatgataattataaattntattgtgaacgtgtaaaaaatatgataaattaattttttctggtaaaatntataaaattattttat

SEQ ID NO: 281248 - DNA, 469 bp, Glycine max
  unsure (1)..(469): unsure at all n locations
tgcagacnctcctatgacacatccaggactatcatctccaagttcattcttgtcctcagcatgtgccttctccattggagatcaaggtgacatgtggagtccaaagttcacagataattcatcttttgatgtgcgcttagacaatcctttccatgtggaaagacttaaagagtgtagtgggccatatagcaccatggttgaagtatcatggctttatagagaaagtcagaagtcggctgatactgagacactgctcctgaatctagtgtgaagctgttatatacttatacttgattgagataacacactagaatgaactctttggttctaagttgagttctaatgagcatgtgctattatgttcgtatggacacttatttgtcggctagaacaagtagacctcggcatgttgaagcaccaagagaagatagctatttggatcaacatacactatgctttagcgatgcat

SEQ ID NO: 281249 - DNA, 443 bp, Glycine max
  unsure (1)..(443): unsure at all n locations
tccatcagataacctcaattaagcattcgattcagttcaggtttcaaagagactcacgaaagtgcatgtcaattcttggaattatctatgaggtgcacaagctcacaaaacattaagtataaagacaaataattaactcaaacgttatattaatgtgagaaaattacatctaatagagttcaatcctttcttctcctagctaagaaagaaactagacacttatgaaatacaagaagagagaagataatatgattnttcagtaaagggtggtgtgtacaggtgttctcctaggttttttgctgctgcctatgcctttctatttataaaatcatagatgtgttttatagaggcaaatgatcttcttaatttacaaaataatataatctatactaggaaattatctctttagctaatataatatgtgttaattggtgcaattatct

SEQ ID NO: 281250 - DNA, 336 bp, Glycine max
  unsure (1)..(336): unsure at all n locations
catgagcaaatccaattataggctnatgtcccatanaatgacgtccattatcaattggngtactcatcttccttttctctctagagtttaacggttgaacatttagtcacactcaatttctcttaagcactagccttgtcgtaagcttgaaaggtgatccaattgtcactatttatcttgaatgtctgcaagaatcaataggtcttttgttttggtttgcaagaatgcgcatnttacgtaaataacaattttttttcaataaaatgatgcccttttctttcaacaacaaataggcaaacataaaggatcaattgaaacgactaaagtcttcactat

SEQ ID NO: 281251 - DNA, 467 bp, Glycine max
  unsure (1)..(467): unsure at all n locations
tgtagcacagatgacgaaactctgcaactntgcccacanatttagtgtttctcataattatagacaatctattaatagaagctgtgatggtaacatttagattccaccttagagatattgttgtgatatattcaatatgaaaaatcattatttggaaagacccaaaccatttgggagttatgtcatcataatcgctattgacataggcaagacccaagaaggtgcccttgatggcaaagtaagcttttctctaaaattgaagggtggtccattttcatctctaagatgtctctctctaatgtatggggggtgttgatcaagagagataaagtgatgaactctgattgaagaaattggtaagacttgacgcaagggaagatcaatcaattgctcccggcattgaaaatctgcgaaagatagttcacgagcgaggcatagtgcaaatgacagaagatactatatcacta

SEQ ID NO: 281252 - DNA, 415 bp, Glycine max
gtaacctcatcgtctctcacagtctttagaattgagagcctatccaattcttgtgttcggactctcagccacttatgatagccgccgatgatcccattactgcttcccctaagctctctgtcctttcttcatgccgcatcccatgccttgcgaactccttggagtaccctcgcgttgtggtcaccgaaaccccgtgcgatgaaaggcgtgatgctctcctctgatggcactcctctcatggggtagccaagctgtcttatggcgaggacgagattataattaatacaacctcttgttccatcaagggaacattcggacatccttcgcatgaagatagaatcctgattcttccttccttctagcgagggaacaagataacagacacccctccatgctagccaagagttggtcccaa

SEQ ID NO: 281253 - DNA, 385 bp, Glycine max
  unsure (1)..(385): unsure at all n locations
ntacagcagaatttagtgatgacccactaacctagaattaatataacttattgccattaacctatggaattaaacaaaacttaatggctgagtgtaactgaaattgtggcaaccaaaagtcacccccaacagccaacaagtcagccaccatttggtctcccaaaaggctgatgcctaagttgccaattgggcccttattacaacttgaactaaacctaactaaagcccttttagttgattaacccataacatanttttggtcagccaactttacaaagattgggccattatttagacagactaaacactctataattgaaacatagtggtgtcatttagtcctcctccatttgggccatgatacaactcacaaccttggactttc

SEQ ID NO: 281254 - DNA, 553 bp, Glycine max
  unsure (1)..(553): unsure at all n locations
ttgaccccttgantttgatctacctatgngacactccagantactcaagctttgcggatttggactatgccagtgagaggatacacgtgggtcccacaagaagctattctgatcatcctactaagacgactgagaaaactggcgccaatgtaaaaggtgataaagaaggagaaacccatgttgtgactgccattcctattcgtgtcaatgtttatccaccagaaccgctcacaatgtgtattaactcatatcaataacaagaactgctgcgtatccaccagccagatatgcacaaatgccattcctaaatcaaacacagagccttgctagcgcacttcctatgactataacgacctttagcacacacgccataagacatcaacaaatatgaatttgcaggcaatcgacatgtggggtgaccccagattccgttgtcatgtgcgcaactagatgccataatcactcaataatcaatgcgtagcgtacaccgaaacagggtcctcaatctcattatttgaggaacgatcgacacactggtgctatcgtgaagact

SEQ ID NO: 281255 - DNA, 374 bp, Glycine max
tagcagatgctgcagctgcaagttctatggaagagatggcgaagccatatgatccttatgccaagaaacgcaagaacttaatagctcgtaactcctcaattgagaggagtcgcagttgcgcaaatattggtggaatatcatagcgacccacaaacatacgtcgaggaggaacatcttgtctcactctgagctgtagcgaagagggtaggagctccacttcaatatctcctccatgcactcttcctcctcttcatccgcgcgtcattaataggacatcgctgcctcaatcgtcttcttcaacctgacgaaatcctccttggaggtcatattcctggactgatctgcactctgttgctgaggctcatgatatatct

SEQ ID NO: 281256 - DNA, 474 bp, Glycine max
  unsure (1)..(474): unsure at all n locations
tctcanagaagctacgaggaagcttctagaggaagcctcttaatgaatcttctagagaaagctacatgaagctgtctcggtaaaaacgctgcccagccttcatcaattgttggatcttctcgaaattcggccttaaacttcacaagacacttgtcaatcatctgatcattgagatctttgagaagatgtctggagtgtgctagaagcctcttaatgaagcttctagagaaaactacatgaagctgcctcggtagaaacgctgcccagccttcgttaaccgttggatcttctcgaaatttggtttgcaacttcacaagacactntaccatagattaaccgttggtatctttgagataatatctggagtgtgctagaagcttccgttcccgagagcatctcttatgtaagcatttcagcctttgctttcttgtagcttacgaagaatgtcatgtcttcttctttctcttcttcata

SEQ ID NO: 281257 - DNA, 412 bp, Glycine max
  unsure (1)..(412): unsure at all n locations
tcggaagaaagtgatgaggtacaagccctanaggcaaagcttgaaagatctctgngtagtcaaagagaagttcaagtccataaccatcacagtctgaagagagtatgatgaactaaaggacgtcaatatggccaccgatgaagccttggaatgagaaaccaagaaggcccgaaaggaagaacacgaccaaaacaagttctgaggggctttatagggtagcaatagtgagctcacactctgaagaggtgaaaggaatcatcacgggtcaaaggcatgatcttgaaggacgagctaaaagcttgccttangtcanaaagaaatttgtcccaacagttaagcgagactgaagggaatatgtgggccatcatcgatgagtgcaaagagaagctaaatctagcagcgactcatgagc

SEQ ID NO: 281258 - DNA, 454 bp, Glycine max
  unsure (1)..(454): unsure at all n locations
agtacttgcagttgctcagcttaggcaagcacctgagctctgctgctctattgngtttattcataaaatgccaggttggtgttcttttaataaactgacctgtgaagtctgcaatgaaagattgtcctgtcggatatcattcatatgctagataagtagttctctttaggggcagtgtagctagattacttgataaagagtagacagatgtgacatatatgatttgcatgccaagagtctatttgattatctgatgttgattattctagtctacactatttatgcagctgttgtagaatcattaatcaatactgggaaacaaatagcagctgtacattntattcatgccttccagctccaagaaagcttcctcccagtgccccttctgaatgcatacctcaagaatcgaatgagaaattcacaagttaagactggaaatgtgcgtgacatcact

SEQ ID NO: 281259 - DNA, 432 bp, Glycine max
  unsure (1)..(432): unsure at all n locations
cactatcaaactcagcttatagactctgttgctntnagaagaaaggaacaagatcttattatagaatacacaactagttttgttaaaaggagaaagacgaggaggagaaataaatattatagtataatattatatatttagaataatcaaataaagccattgagttaattaaggataatntaatttaattagtgtaaaagttactctccctaccaaatgttccaatcttagaggagagtcaaaattaattggggagggattttaattctcctcccctttccttcaaaattttgaactaaacaacataaatttataaaaatccctacctccaaccgaacactatatntaaagtacatgcatggatcacaagggtntggtctgtactattttcctttgctattntaaattcagaaaacagcgagtagaatatta

SEQ ID NO: 281260 - DNA, 401 bp, Glycine max
  unsure (1)..(401): unsure at all n locations
tcgaggtcaaccagaagaacctanactccgcggtgcaatcagacagagggtaaccccgccaacaaaccatgtcaataacgtaataagtntgatccgcctgtgccaccccaaaaatcacatacaaagaanaagaaaacagaaaacaaaaacacgacattcattcgaataacctagaaaagtagcaaattcagacctcgtgaaagatgcagtccaatatagagtaggaggggtccttcttccttgccccgctcggcaagccggagggaaaccgatgcagaacggcaccgttccgcagacggcttatcgtcgctccgttgcacgaaacgacgaaacaccgtttcccggaagggcgagcgaagacgaacctganaacgatagaaaacggagtttgttaagttaat

SEQ ID NO: 281261 - DNA, 502 bp, Glycine max
  unsure (1)..(502): unsure at all n locations
aggtgtatcaccttctcccaccacctccttatccgtgagggagaggaacctaattntgtccaaagcctagaatgtgcacattattcgccattaacaaatcgttcaacaattaaaaaaaaatttaaatgcaaggattttccaaatgtaaacaaaaatactttnttttaaaaaaaaaaaaaaaagcgcttacatcagaagcattggaaatcaactctctgaggaagatatccttgttactgtagagagaattgatgatgatatccataagccgcgacacttccgcttggaactcaaatttctccacgttgctctgaagagatttcttcgagatcgactacacctccctttcaatcgcaacaacacgcacacgtttatacacacaataacaagagaacaagagataaagggaaataaaacaacgaacacctcttgatgacatttgaatcggtaaaaggccatgaggcacatcactgatcttgtcctttaccttcggtggatctac

SEQ ID NO: 281262 - DNA, 293 bp, Glycine max
  unsure (1)..(293): unsure at all n locations
ntggataatgagttttattcaaaagttagtcgtataaagcgattaacatactccnccaaatntacagatttgcttgtcctcaagcaaagaaagaatagttcacttgcctcaagtgacaaagatagtggccaatcaaaagaatatggtgtttgattcatcaaggacatcaaccatatgaactaaatatcatggaatgcttaaatcaatcacttctcacaagcatgcaactcttcacagataggagcacaagtattagagtcacagctgaaataagctagtaagcatgacagaaa

SEQ ID NO: 281263 - DNA, 441 bp, Glycine max
  unsure (1)..(441): unsure at all n locations
tattcaagactaagatacactacanaaacatgtntattatgtgtngattataaacaaaatataaaaatgatgatgaaatggtaatttgctacttttnttttaaaaaaaaaataacagtaaggagtaaaaagagcatcaaagagggtgagaatagcacccctatccttcgcaccccttccttccttttattnttttcaccactaaaaggagcttgacaaatagattttttagtcttagaaatacacgaagggaaaaaataatcttggataaacaataaacaataatcttacttttaattaatatttaatcttgaagagggataatgaatatttattntcaccagaacaattttgtgagtaaaaatatacatatacattattcttactcactatcacactgtcctcttaataattcatatatgtacattctgttaattttttc

SEQ ID NO: 281264 - DNA, 312 bp, Glycine max
  unsure (1)..(312): unsure at all n locations
ctttcanatgtggagaaggtgtgtccaacaacaaatataagaccattntatgtgttaaaaagtaagagaaagatcgtacatccgtatctcccttggatattcaatagaattcttagcaagctcagctcacgacaattagaagaaggaataacacagactaacatgggcacacgcacatgatggtagtaaaaggttttggcctcaatnggattattctaattatgaaaagtacgagagtaaattgaagatttgaaaaatcacaaaacagcacatactcaattcagcangacanaaatgcattgagtatattac

SEQ ID NO: 281265 - DNA, 558 bp, Glycine max
  unsure (1)..(558): unsure at all n locations
cgcccccttgaccccttgatgtcctngtctcactangcgacactacagactactagagctcgaagcccatgtggatctatctgaatctatcagggatattattatcgtcttccacttacgcgaggggtggaggacgacctggtctctctactgtgggacgcctatcacgatgacgaccaacacgatgacgaccatctgcatgaccacgttcagtacgtggacctaggacaggaccctatcttctccttctcacatattgcaattactatgacagacagagtgaacttgttactctatatatgactgatacttgctccgaaaactatccccagatgagcctgttcataagattgattacgcagcgtcaggctacaatacttaatatcccgtctactgtctatgcatacgaaaactacgctcacgtgtgtatactactgatacttgcatattaatagatctagcagactctaaactgaaatcttggctggcgaaacatacagtgtagatgccgataggccattattcgacttggcatacccttcgtgactttcacacccg

SEQ ID NO: 281266 - DNA, 493 bp, Glycine max
  unsure (1)..(493): unsure at all n locations
tctttcattcattgcatataatgagactctnttatgtgtcccttttctccttgaacaccttcttggaggatatattccattcggacccactcttgttgctccactcttcttgatgtttttagatgaaggacaactcatcatccttattagattcttctntagattacccattagaagttgtccatgctcagtgctttggacacacttttagacgatgacctggatgacgattcctttgacgatggtgtgttccttactttctgagcactaagagcaagtgaatttcctttcttgacttcttcatctagttgaagttcttattcatggacctttaaagttccaacaagttcttcaagggacatggaatcaagattctgtagcacccttaaagctatgacctgtgatctncactctctagacaaacttctcaagatttatcaatgtgatcatagatatcatatagtcttcctatagatcttaattcatttgatat

SEQ ID NO: 281267 - DNA, 434 bp, Glycine max
  unsure (1)..(434): unsure at all n locations
taaggccatgganaatagcccacagcgcagccatgagaatggtacatgatcccagctntgcgganaacccataaatgaaggtaccaaaattatcacaaataacccctccacaagaagccttggcaccatgatccatcacactagcatcacaattaagagccacctgtcctacatctagagcttcccatctaatgtcgtgagtcccatgaatgctgccactgttgtcaacaagtatatcactgcgggagttagcagccacacaagatgtcacgaaactagaaatcctctcaataacctccgtcacattccacttggttgccttaaaaatgaattcattcctcctctaccaagatatatgcaacgcaattgcaaagaatgttctccaataaacacaccctctcacacctaaaattggacatttggagcatggagct

SEQ ID NO: 281268 - DNA, 485 bp, Glycine max
cgaagggacacacacatttcctaggcccaaagtctcttctgtttaatttttttacctacacctatactcgtcactcctttcacagccaattaacatagatgtagaccttcctctactacctgagtttgtatacgaccttaggatcaccgtcacaaattcgttctcattagcatcggatcgagcccaccagaaaacatgccttctggacttcaacacttacaaagcaatgcacataatggatgtgctctaccaaagaattaatgcagtcaccctccacatatgcaaagccgacagagaatgtcataccaatcagtgtcatctcaacatagtcgaacagagagagtctaaccggtttgatttgtaagagctcggtatcagagacaccaattacatgtgttgactagcttactacataggggtgcatcaaaagatatactatccacgtgttcattcttattgtgagcaacgaaatactgataacgact

SEQ ID NO: 281269 - DNA, 493 bp, Glycine max
  unsure (1)..(493): unsure at all n locations
acactatgatactcagcttggactcttggcaatatctttanaactagtcacttaaatagttgtgacttttcgaaaaatcttcagaaacaagtcacttgaagaattgtgacttttggaaatttatttttcaaaatcagtcactggtaatcgattatcattaaggtgtaattgttacacatcaacagatgtgactcttcattttaaattttgaaaatcaaaacgtttagaagctctggtaatcgattacacaagtagaaaatgtttaaacataagttgtaactcttgaaatttgaaatcttaacattntaaaacactgataatcaattactaccttctggtaatcgattaccagagagcaaaagtctttggtaatgatgttgtgaaaacttcttgtgctactcaatgtttagacaaacttttttaatacttatcttgattgagtcttctcttgattcttgaatattgagtcttcaatcttgatcttgattattct

SEQ ID NO: 281270 - DNA, 455 bp, Glycine max
  unsure (1)..(455): unsure at all n locations
ctggtttggaattgagctagtattattaacagttatgttttcatgagctttttagtatgatnggatttgttgaacttattatacccttttttatacatagcgttcttgctaatttatctacaaatagtattatttgaagatcatcatacataaactntacgtctgttcaaatcatgcggtagtttgatcattgaggatgacatatttttggctggtttgtaggattgagaatgacaaggtggaaaactattccatcactcatagcttcaataagcaggaaaattggactaaatctctcatgtacactctttgcaatttgaaatgggccctctattggtgttgtggaaatactaacttccagcccctttcaagcatggtatcttcgcatgctgaagtgcctgctgtagggtctctgtacacgaaacgtggtgttgatgccanatctgaatctcgaa

SEQ ID NO: 281271 - DNA, 365 bp, Glycine max
  unsure (1)..(365): unsure at all n locations
ntcatctagccaagattatacaaaggtgttacaagagaacctaacgatttctaattatatgggccatcaaatctatcatgtgctgagagtaattgattagcccatgaatctcctcgggggcagtgcacacttcggccatggcttttgctttggctaacagacgcgggaggtcttgacttccattcatggtcaaggcgaacctatccatccacatagtcgcttcttgatgcaacgcatcaatcaccctccctcttgcttctttttcgacatacacttgtgcaaaatcctccactagctnttgttcatgggccatggactggttcaattctttcttgtattgccctatgatagctagcatgctttgc

SEQ ID NO: 281272 - DNA, 213 bp, Glycine max
  unsure (1)..(213): unsure at all n locations
agagccaacacaggaaactataannctttatattacagcaaatagtggactagatgttgtatactttctttctggtggcaaatgtgtgctaggacttgggataactgccctctctacctgtaaatttatttcggaatatgccttattggtccactaaatatctgtgatttgccacttatcactaagttatatatacctgcgaaaaaaataaat

SEQ ID NO: 281273 - DNA, 224 bp, Glycine max
  unsure (1)..(224): unsure at all n locations
ngctctgtgggcttctatggaggctggatctccgagcccatcgaggtctcttaatggngaaaatccaccatggagatgcagcggaagacaaacgagaagaggtgagaggaggatccatccactaatgaataagccatggaagaaggagcttcaccaccaagatgagccttggataataagcttggagaggatgcttcaatggacgaaaagaaagagggagagaa

SEQ ID NO: 281274 - DNA, 339 bp, Glycine max
actcagcttgacctggaccttgcattgacccttcacttatgaagtgctctattgccttatgctctttggatagccctctatcattcccttcttcttgaaaagaatccatcctcagttgtgcatccaaaacacctacatcacaagaagacaggtcagcgacattgaaagtagagctcaccccatactcacttggtaagtcaatcttgtaagcattgtcattaattctctcaaggaccttgacaggtccatcacccctatgttggaagtcagatttcctttgtgaaggaaatctatgcttccttagatgtacccaaatctaatcttctggttcaaatacca

SEQ ID NO: 281275 - DNA, 397 bp, Glycine max
  unsure (1)..(397): unsure at all n locations
tgatgtgaganagcgtggaagagtcagacttcctactttnatttgttgaccacagagtggtacctggagatatgtcgcgggggtcaggagaccttgaggacatcacgtggggtgctattgcccaaaaccaagcttggccaatcccgacccaacccgggcatagtcagtcagtgagaacctgtgacgtacctaatcaagcgagctcctggcagtcaaccaatgaaagatcatagtccaccaagcaaggaggcttgtgtggcggctggccagctatctatcttgggtgttattagaaaaatacactctggtaatcgattaccatacatgggtaatctactatgagggttaaaacttgaaacatgacgttcaatagcttctgggaatcgattaccaatgg

SEQ ID NO: 281276 - DNA, 373 bp, Glycine max
  unsure (1)..(373): unsure at all n locations
gacactatgatactcagctgggtgctatgacatacatgatccacctagattggagcttcatgattaaacacatactacttccctaatgctataaagtcaatgaaataacaatggcaggttattaagcttaagctctaactttacaactggacaattgtagtgaagcatctaagtgaaaggcaaaccgcatctatcagctgggaatttttccccanagtattcaagcaagaactttcttctgcaagttgtcagcacacaatancgttcancagcaagcaatgactccataatagctcttctttggttttcctggtacattggagactcacatgttactaagagaacagggataacttgtctccagaatatatgc

SEQ ID NO: 281277 - DNA, 415 bp, Glycine max
  unsure (1)..(415): unsure at all n locations
cctctagcaaaaggttagaaagcgtgattctccaccaacagactctctgtaaccttcaacataaatatatatgactataatggtttatttcaatcagatacattntgctctaaggacttttccaccattatcaaatattatactcttaatttctaaatgtaagtntcttttatatatggttgatattttaaaactaattttcttaaaaacttaattatataacaaaattgtgtcataccattcattntatcatactaatactttgtcaaataaatctttcatatatatatatatatgtgtgcgtgtatatttgaaatttattcttcataatgctttataacataatctatttaaaatctaatcagacaacanattgctctataccatagaatttactatagtaatacctttcatc

SEQ ID NO: 281278 - DNA, 423 bp, Glycine max
  unsure (1)..(423): unsure at all n locations
tcgcacttgataatggagaacacatgttcagcgctatgcaatgacattcatggtgctctgaacaaaggtggagtatggaggattgccttgagggtccgcacttangcaatcatgaaactcagctccaaactcgaaagtggaggacacatgaacagccctaagcaagaacattcatgtggctccggaaaaggatgagaatggaggattgccttaagggtcctctcttatgcaatcatgaaacacagctccaaactcaaaagtggaggacacatgaacagccctaagcaataacattcatgtggctccggaaaaggacgagaatggaggattgccttgagggtcctctcttatgcaatcatggaacacaactccatactcaaaagtggaggatacatgaacaaccctaagcaataacattcatgt

SEQ ID NO: 281279 - DNA, 459 bp, Glycine max
  unsure (1)..(459): unsure at all n locations
tgtaggattatggcgtacccatcacatgtggtactaggtggcggtcgagcgatggtgcacaacaagttttccacatccacaaagcgcgcataaacccaccatcccctgttgcccacctccaactgagctcacgtactcccacgtagcccatatcctcttttctctcaacaccgggtccccatcaatcctcccaagctttcccaacatcaaagcaaaacaacattcaaacagcacaagctatcacagccaagcaaaacagagcaaaggcagaaaactctgccaaaacaccaaccaaaaccacagcttttctcacttaaagaccccaataacaattccttcgatccaattcgttaaccgttggatcgactccaaaattttactggaagtctatagtacataagcctacattttgaccgttgggatctactagcaaacatncagaactcattctgtactact

SEQ ID NO: 281280 - DNA, 412 bp, Glycine max
  unsure (1)..(412): unsure at all n locations
tgccacccagctcgcccaggcgagctaggttgcttcctcctgaagcaaccttcttctggaggaattttctagaaggcccaagtgggtctggttgctatttgcacccccatttttactaaatactccccttgctcttttttggtgattctttttccgtaacgttatgaaactttacgaatttcgtaacgatgattgttttctttccgtaatgtagcaaaaccttacggattacgtaatcatcccctttttaccttccggagcgttacagaactttacggattgcgcactaacacttccttttaatntctggcatgtcacagaacttcacgaattgtgctacaatactttcttttgactttcggcatgtcacagaacttcacgaactgtctagcgatgggtgccaagtacctcg

SEQ ID NO: 281281 - DNA, 329 bp, Glycine max
  unsure (1)..(329): unsure at all n locations
tgcctcccagctcgcccaggcgagctaggttgcttcccccataagacacttccttctggagaacttcctggaaggcccaagtgggcctggttgctatttgcaccctctgtttactaaatacaccccttgcctttttttgttgattctttttccgtaatgttatagaactttacgaatttcgtaacgatanttgtttgctttccataatgtcacgtaaccttacggattacgtaatcatcttttttttgactctcggaatgtcacggaacttcacggattgtgtaacaatgctntcttttgacnttccgcatgtcacggaacttcacgga

SEQ ID NO: 281282 - DNA, 378 bp, Glycine max
  unsure (1)..(378): unsure at all n locations
tgaagaggatgctntaatggaggacaagaaagttagaacgctggatcacganatacaaggaataaaagatggagagaagtggaactatcaattatgtctcacaagactctcattcatcaaagttacaacatgtgtcacacatgcttctatttatagactaagtagcttccttgataagctttcttaagataacttccttgagaagctttcttgacataagtctcttgtgaagcttgagcttatctactctcactcctctcaatactaagctcacctgcttgagaaacttccttaagaagattcctaaagaagctagagcttagctactcttacctctctaatagctaagctcacctcccttagatgataagctagagc

SEQ ID NO: 281283 - DNA, 233 bp, Glycine max
  unsure (1)..(233): unsure at all n locations
tctgcaatgctntaacatgtcctcgttgaagcgcgaggggatgtcgtggacgtagatgtagcgccccccgcatgggtcgctcttgttgtctgcggttcggagggcacggtcgaaggggaaagtgggtttctccggttgggaaattttctcggggaagccgaggtttttacgaggttgttgaagttggagagtgatggggactacngngttagggttggtgggttggtggcgga

SEQ ID NO: 281284 - DNA, 449 bp, Glycine max
  unsure (1)..(449): unsure at all n locations
tgtattaaatgcatgtcccttcatgtaaagtctatgttgatatgttagtgtgtcttgtacttcaacagagaagttacttctttcatcatagcaagtctacaacaataaagcacactctttgatgaggatcaatgtcttctagattgtggatttcatttattcttcataggactttgacatatcctagaagaatgccttttgcatgaaagaatcttagacataagagtattaaatgaagattttanatgcactacttaaatgttatatcaaatcatcttgtgtgtgtatcgtttaaatatttgaatgcacagagacagatcatcatctaataacatatcaagacccaacatttattatttataattatgcgcatctaatcaaaataatcaggagttatgattcatcattaagacttaaccatttcttgacttaacaacactactaatcaa

SEQ ID NO: 281285 - DNA, 381 bp, Glycine max
cttgcttatgggcagtagcaccccacctgacgtcctcaaggtctcctgacccctgcgacatatctgcaggtaccactctgtggtcaacaaacataagtaggaagacccacgctttctcacatcaagcttattggattatggggcacccgtcatatgtggtactaggtggcgatcgggcgatggtgcaaattaactctcccatttccacaagtcaggcataagcacaccattcccagttgcccaccttaaaattgagctcacgcactcctacctagccttatactcgttcctttcaacaacaggtccccatcaacgcctctaagctttccaatatccaaaaatcaatttcatttgtctgaaacaccctaaacaaaaaacaag

SEQ ID NO: 281286 - DNA, 366 bp, Glycine max
  unsure (1)..(366): unsure at all n locations
tgcttctacattggatgccttagtctcctttttcgngtatgaattgtagattgattattattgcttgtaagaattattgatgcatagtggaaatctaattcaagttgtggattagataactggattagcttatctaaaaatagagagtgaaccagtataaaagattgtgtctttttctctcttgctcacatctttcactcattcaaggtttaatcaactcattcaagttttattcaaggtttgaaaacattcaagttttatgatttttgaaataaggatgttaatgaaggatcatgtgtaacgaaggatngattaagtattgattacatatttcatggaatgcatcattaaaggttctttattcca

SEQ ID NO: 281287 - DNA, 428 bp, Glycine max
  unsure (1)..(428): unsure at all n locations
tatccctagaggggatggaccttttcaggttntggagaggattattcaaactcgacaagtgcatcggatcacgcaagtagtataaaacggtaagaaccgagtatcaaactctcggngaacttgtgttacttggtaaagctatattcattgaataggtgtctagtattaaaagatatgtgtagactatgaacaggtatgtaaactaactattaaaaggaaaatcacgtgagtaatgatgtgtaaagacaactagacaacacgttggtcttcctattaggtgcctgattttattaagatattctctacttaacaatgctcatgtgttcaatggcgtctcctgaaatgctaaaccttgatntctcatgatagtctagcctaatgctgatcaagcatcgtcctcggatctctcttgttggacctaacttgac

SEQ ID NO: 281288 - DNA, 372 bp, Glycine max
  unsure (1)..(372): unsure at all n locations
tgttactaaggaagaagtttatcatgttgtttcctctatgatatcgtataaggcacctgaacctgatgggtattagaaaatattttttaagatattttgggaaaaggttggagatgatgtttggagatttgttagagaagcgattcagaaggtatgtttgatgtgtaggctgctaagactattattgtcctaattcctaaaggtgattctcaaaaaacatttagagtgtgtttggatagagaattttaacaaaggaaagtaatttatcagagaatttanatttttctaatctagaattcattggttggatgtntttttatgaagaattaaatttttggaatcttataccggaatttaaacaactaaaatgtg

SEQ ID NO: 281289 - DNA, 359 bp, Glycine max
  unsure (1)..(359): unsure at all n locations
ctttcagcccacgtcgganacccttccaacccgaaacttagccagcaaggggcacccgctcaaccacaaagggcccccgctcaaaacccggctactacacaacctcgcctcgctggcatttccaaccctccagtgaagaagcttctggagtttgccctgattctgttgtcgtacacagatttgttgccatctttgatcgccaaccaaatggcgatggtgacccttagaaggatttaccagtctcatttccctcggtgttacaaccccaacgctacctatgcttatctggcgggtaccccggggcattcgatagaatagtgtgtggccctcaagcatgaggtccaaagtttgatcgacgc

SEQ ID NO: 281290 - DNA, 328 bp, Glycine max
ctcctacaccaggaacaactgttctaggttagcaaaggcataatcttcacctgcttcaatggcccagagccttttctctagatgatccaaccttcccatttctgtcatagcatgagggctactacatgtgggcacacgcactaccgcgtaacccatattctcccttctctcaacaccgggtccccatcaatccttccaaacttccacaacattcaatcaaaacaacattcaaatagcacaagctatcacagcccagccaaacagatcaaatgcacaaaactgtgcctaaacaccaaccaaaaacacagcttttctcacttaaagaccc

SEQ ID NO: 281291 - DNA, 99 bp, Glycine max
tagataagatacctggtccttagtcctatctttccatatagtacattttcttgtctgccatagtttatgggatcagtaggtattactgaaattattact

SEQ ID NO: 281292 - DNA, 445 bp, Glycine max
  unsure (1)..(445): unsure at all n locations
tgattcanattagaagctaaccacataaactaaaggatattatgcaagctcattgtccctcaaatgaatatagaattaagagggttgcaatgcaaattgcaagttcccttttaggtaaaattatttatcatttgagttttatccttaaaaattatggttactatttgaaggcttttgtacactctagttgttattcaattctcttcaaaagttaaatnttcaaatgaattagcagaagtaccttgcttctatgaagcccatacagtggaccagctaatacaagaaaccaaatttatgtgatatggtcatgacatttaccatgggacacgtgacttcacacttagtgtagtacatttttcatgaaattagtttaaatcatcatatagaacgagcccttacacaacagtaaacttgtgccttgatattgatcatgagttcgaatctg

SEQ ID NO: 281293 - DNA, 360 bp, Glycine max
  unsure (1)..(360): unsure at all n locations
atcacatgtggttctangtggttgtcgggcgatggtgcacaacgggaatttttcacatccaaaatgcgcgcataaacccaccattccctgttggccacctccatctgagctcacgtactcccacgtagcccatatcctcgtttctctcaacaccgggtgcccatcaatcctcccaagctttcacaacatccaagcaaaacaacattcaaatagcacaagctatcacagccaagctaaacagagcaaaggcagaaaactgtgccaaacaccaaaccaaatcacagcttttctcactgaaagacccagtaacaatttcttcggtccaattcgtaacgttggatcgactcataaatttactgg

SEQ ID NO: 281294 - DNA, 442 bp, Glycine max
  unsure (1)..(442): unsure at all n locations
gccgactaatttanaatcatattttttgaacagtaaaatctaattactttctaaaataacatgatttatgggttaatggtgaccctagctccatattaatatgaattgtatggagctaaggtctcataggaccattatgcaaggccaagtgggttggcccgagagcctaagaccaaaataacagctttaaatacagtacaagagatgattgaaaaatagtgtaaccaatcatgctatagggaattaatagatgcatagttgaaaccttggatgcttagttggaggtatagccttgcaaacaactgcttcaagcattctattcgaatcaagtttgacgcaccaattgataagttgataaactctaaacaagaatcccaacacctttggtactttcatgcttcatccaactctgacagttctattccatatactatcccaatca

SEQ ID NO: 281295 - DNA, 413 bp, Glycine max
  unsure (1)..(413): unsure at all n locations
tgtaggattatggngtacccgtcatatgtggtactaggtggcgatcgggagatggtgcaaatcaactctcccacatccacaaatcacacacgaacccaccatccccagttgcccaccttcaactgagctcacgtactcccacgtagcccttatcctcgtccctctcagcaccgggtccacatcaacccctccaagcttcctcaatatccaagcaattcaatatcaaaacatcatgaactaccctaaaccaaaccattcaaacacaatgttagatgttaaaagttattttcatcttgtttggttgctatagccaagaggactcgtcaaatattattagagaatatattgctaaacaatttctaacacctatgcactctngcgtgatccctctatagtcaattatatgaatcata

SEQ ID NO: 281296 - DNA, 229 bp, Glycine max
tatattctttacgatcaagcatctaacataacattaatattgcgctctctagatgaaaccaacttcaaataaatcttataaattcgcatacttaaaaagtttacttggccactacacaaactggatgcataatttaacctaccatcgacaccataaaatattctacagttacaaaatggtttctcaatgggcaaaatgacttatatccgtatgggttccattcttgaaa

SEQ ID NO: 281297 - DNA, 287 bp, Glycine max
ttgtgttgtatccagaacattcgagactatctcttttatcttagtgagagtgattctcctaacttctagagtgattcaagaacaccctggctatatcaaaggactttcacaacgcttgtgtgttgccctcgccggaaagagtgattctttcctatctttcatatgtcagcttgttcttcttaaccatcattacagaaaatgcacttctgcccagaattatctcgagccataactcccgtcttacgcacttaagttaagctatatttgtacctaccttgaatttcaag

SEQ ID NO: 281298 - DNA, 295 bp, Glycine max
taagtatttattacctatacttaacagaatatacttataacactaccaaataaccataaattggaagagttatatacaatttacacaagttttatacacaaaagttagtcgtattcaccgactaacaactcccctaaatttacagttttgcttgtcctcaagcaaaaagagaacaactcacttgtcctcaagtgacaataacatgcagtgactatgtacacaggtgtatgcaacaaaagttagtgatttcatgataagagaatgaagtacaatgccctgatcacttgtcattcac

SEQ ID NO: 281299 - DNA, 424 bp, Glycine max
  unsure (1)..(424): unsure at all n locations
tagggtgattaggtgctcctaaagtagccaaaaataagaactacgatgtatcataaatttagtttgcttttgaaacagcaaagaaattntattgaatcattatagagacacatgatttatttcccaccacatcgtctagagtgtttcacagtgttagagtaattggtattttgtaatggttattgtatttgtcttactctctacagtttttttgcttctgttgtaccctaaaaggggctatgtatagggcaggctcccttatgcctgaacctgtcacatctatcctttctattgtacttcatcatatattattaatataagtcngtgccaagtgagagaataactcttgagcacttttgatctagacctttcctctttagtcacagcttcatgtaaaagtcccctacctgtaatattgaacatc

SEQ ID NO: 281300 - DNA, 363 bp, Glycine max
  unsure (1)..(363): unsure at all n locations
tgtcatcaagactgtcattgctcgtggcacttttggcactgtccatcgtggaatttacgatggccaagatgttgcaggtatactccactacactacactctgttgctttgctctcacagttgaaaagttgagttgtcattcgatgtgtgtctgaatgttctcatatatgcaactatgtgtttcacgaaaacaaagaagaacatgcatagtttgattttccctccatttattacacctgtgtgtttgacaccacatacatgtgcaaggggggaagatttgtttacttggagaagttcatgtagttggtcctttcaacttacaatgtngcataatgtgcacatgcttccaaaactgtatgttgat

SEQ ID NO: 281301 - DNA, 454 bp, Glycine max
  unsure (1)..(454): unsure at all n locations
tggtaaanataaagctcattctaacctatttcactaagctntactgtcaatcttatgaatcatttgataagtgctgaattgctgattgagtaagtgcttaattaagctacttacccaaacaaaccttgattattatataacgaatgtaataaataaatacaaatcatataattttcctgattactacctttgcatgacatactgaactttggcactaagactgaactcagacataatgatacacatttcgaatacaagtcataactgataatataatgatntacttggaacagtcatatcaaaaggctttacaagtggatccttcatacaaagcagctgctgagtgcctggccattgttttaacggatattggtaccaacataaagcttgcaggaaatactcangaaggaatcaaaaatactttgaagctctcaaaatagatccacactatgct

SEQ ID NO: 281302 - DNA, 414 bp, Glycine max
  unsure (1)..(414): unsure at all n locations
ntgagggattggtctttgccagtgaaaggatcgatgtgggtctgaaaaaatgcaattttgatcgtcctactaggacgactgaganaactggggcaaataaagagggtgaggatgagggagaaacccatgctgtgactgccattcctgtacggccaagtttcccaccaacccaacaatatctttactcagccaataacaaactttctccttacccaccacccagttatccacaaaggccatccctaaatctaccacaaagtctgtctaccgcacttccaatgacgaacaccacctttagcacaaaccataaacaccaaccaagatgtgaattttgcagcgagaaagcctgtataattcaccccaaattcagtgtcctatgctgactttgctccatatctacttgatnattcaatg

SEQ ID NO: 281303 - DNA, 319 bp, Glycine max
  unsure (1)..(319): unsure at all n locations
gggatntccttntagtagggaatctatccttcctaagaatgttccaaacccagtccccctcattaagaactagctcctttcttcctctattgcccttagttgaatacacctatgtttggttctctatttgggtcttaaccctctcatgcaacttctttacaaactctgacctagattccccttctttatgtataaaaaaaagtgtcaagtgggaggggaatgaggtctaagggtgttaagggattgaacccatagacaacctcataaggggattgctcgggggttctatgaacccccctattgtacgcaaattctacat

SEQ ID NO: 281304 - DNA, 356 bp, Glycine max
  unsure (1)..(356): unsure at all n locations
ggcatgatttacattctccccctttctcaagcaaattcttcttgacatcatcaatttcttcatgatttaaagataaaactttgtaagacataaaagattttcataaaaataatttcagaagatgaaaacagatattgcaaatcaaacaaagtttttaaataaaatcaaattcaaaccctaggtcagttgaaaatagaagagagatgaaagtagtaagacacatagatttatagtaggtttgtctcaaccactaagactacgtncatttcttagttaaccattaagttccattaactttaataagttacaggtattaatcactaccacttctagctctacaactcaggctctacccc

SEQ ID NO: 281305 - DNA, 301 bp, Glycine max
tcggtattcaatttcgatcgtctcgatgtattacgtgactttatcagacatctgagtaaaaacgttattgtcgtttgaatttgctgagagcttcaacattcaatttcgagcatctcgatatattacgggactcaatcagacatccgagtaaaaagttattgtcgcttgaattttctgagagcttcaacattcaatttcgagcgtctcgatgtattatgggactctatcagacatctgagtaaaaaagttattgtcgtttgaatttgcccagagctacaacattcaatttcgagcgtcttga

SEQ ID NO: 281306 - DNA, 410 bp, Glycine max
  unsure (1)..(410): unsure at all n locations
tgtagccattagaagagaatgagcatgtggttggaagtatgactggaaatgttagtcagtttgtcagattgattgtgagggaatgcattaatcgtatccagtgagagtgtgatccttaaattttgagagaaacgactatcatttagtactgatttttgcgtgaatctctgaagtatggactaaatgcatgaaattgaggatgatgaagaccatgtttgattgtgatagccacttagccaaaaagctgaccatgtgcttgaatgaattatcccttgtacctagtttgagttgaatgaattattgattgatggaaccctgagcctatacagtgttatctcctgctaccttgacttaggttgtangagagcatcatccacatgaagcatgngtcanagcaaatttgtcccaaa

SEQ ID NO: 281307 - DNA, 451 bp, Glycine max
  unsure (1)..(451): unsure at all n locations
gagccatcgtctccatgctgcatcagaagactaaganctctcccctgacggnggagatacgagtagtgaagtcaaatatagcacgcatgacagtgctatgcagaaagcttaaaggatgcaccttatcctcaccccacagtggctgaaggtacccaagacataagcgcggagaaagagcctcaaaccccagccctgaccatttaccagataagcccgaatgacacaagcaatataggtttgtgtgacgacactcctgatataggcccaaagcctaaggaaagctcatcaaggtgtagctcgaacccaaacccacgcagagcatgcctgtcaggaaggacctcaccaaccatgagcacaagcgcaagactaatgtgctacaccagaacacacacccgctcgcttgagaatcatcaaacatgccagtgacacaccccagccttatcatacacag

SEQ ID NO: 281308 - DNA, 331 bp, Glycine max
  unsure (1)..(331): unsure at all n locations
tcttctaaggtaaatantttccagctagagattatcttaactctatctctnggatcagttacttcatgcccactttcaagggtttggaaataagaactaacatgaaaatcaaaacaatatggccctgtgtgcgttgtgaggtgtattgtatgtgactgtaaatgaatgcttgaatctataagggtgcatcatatcctctaaatatgctataaatagaagtgtgcgtgtggcttccctatggccttcagcacatgtattaatttatggaatcaacatataatatatacaaagagattggacagcttttctactctaactagttttatattat

SEQ ID NO: 281309 - DNA, 449 bp, Glycine max
  unsure (1)..(449): unsure at all n locations
tgaatggaaaacaacatcgctttaggaagcattaaaaacacgtataacccaagcctgtggttgttaacaacatcgcgttagttaacaatcattcataacgataaaaaaatatacaataatataaggttttagtttgtgttgaggaattagatagacacatacgtttgtgctgcttccttcaaattttccgcatcaaagtacagctacgtttgtgttccggccattatcacgttagcactatcaatgtttcactaatcaatatcaaagtgtttataacataaggtgtgatatttataattgagtaatctatatctttctacaaatnttttaagatataatcangttgtattattatgtcttatttagtttattataaaagtttgtgcctactctggaggcaaggcatcacacactttgattgcttgggtaggcagcttctaatcctaaat

SEQ ID NO: 281310 - DNA, 423 bp, Glycine max
  unsure (1)..(423): unsure at all n locations
ntagttcactacttcaagtagtgcacgatntgcttccagatgaaaacacgttgccaaaaagttattatcacaccaagaagatattgtgtccaatgggtatggagtattagaagattcatgtttgccctaatgattgcatattgtacatacatgagtntcaagatatgcacaaatgccctaggtgaggggtatcatggtacaaagtgaaggatgatgacgagtgtagtagtgacgaaaactcaaagaagggacccccaacgaaggtattgtggcatcttcccatcattccaaggtttaagcatctatttgctaatggagattaacggaaaaaaccttacatggcatgcanatgggtgaaactacgatggaatacttcatcattcggctgattccacccagtggaagaagattgattgttatatc

SEQ ID NO: 281311 - DNA, 242 bp, Glycine max
  unsure (1)..(242): unsure at all n locations
aaataataatagagaaaaaaaggagctgaacgagcccgaaacccaataaaaaaaccnaggacagcacgaaaagaaagaacgcatcaacaaaaaaaaaggcacaggaccaacacacaaaaaccaccaccacaaaaaaccaagagacgaagaaaagccaccaagaaagacaaagacaacacaaggaaaaacaagacgagaaaaaagaaaccaaacgaaaaaacaaccaacaaagaggagggacg

SEQ ID NO: 281312 - DNA, 393 bp, Glycine max
  unsure (1)..(393): unsure at all n locations
tgctctanantacattgatgtttgtatttatgggaggaggttgtatgccattnttgttttaagagtagtgtcccactggtaaaactaactttccaaatgtttgccttcgcaggaaatggccccgaggaagcttgcctcaaagaggtccaggaaggacaagacagccgaaggaactagttccgctccggagtatgacagtcaccgctttaggagcgctgtacaccagcagcgcttcgaggccatcaagggatggtcgtttctccgggagcgacgcgtccagctcanggacgacgagtatactgatttccaggaggaaatagggcgccgacggtgggcatcactggttactcccatggccaagtttgatccagaaatagtccttgagttttatgc

SEQ ID NO: 281313 - DNA, 384 bp, Glycine max
tctaagaaacagaagagagattcagttgaaaaacatgcggctgtgagattgtcaagctgcttgagactggccaagaagccacggctcgaattatggtatacatgatttccatacagtcaaggttttaaattgcggttgcggtttcatcgtgtcacttgatattgtgctcgcattgcagttgtggaccctaaaaagaacttgacattgtagccaaaatcatggttgcaggccgtttataaaaccttgcatatgatgtttagtgctgcaactcttctatttgagaatattataccaatggcttacgacatatagaatattcttctggtaatttttctttggtagcacaggtgctgatgtggtcatctgtgcatgtagaacatatta

SEQ ID NO: 281314 - DNA, 432 bp, Glycine max
  unsure (1)..(432): unsure at all n locations
tagctacacacacccctctaataactaagctcacctccttgataagctttcttgtttatattcctaaagaagttagagcttagctacacacacaccccatgccaaaatacatganaatataaaaaaaaagtccctacaacaaagactactcaaaatgccatgaaatacaagactaaaaccctatactactagaatgaccaatatacaaggcccaaaagaagataaaacttattctaatatttacaaagaagagaggacccaaccttggtccatgggctcagaaatctacccctagggttatgagaaccccaaggccttctttagcagctctaacccaatcctcttgaagtcttctatcttatacncttgtngggtaggattgcattaacgttgaccaaaccaaaccaaagagcatagaaaatctatttaaat

SEQ ID NO: 281315 - DNA, 312 bp, Glycine max
aactaagcataactgatagggagatcaccattcacattccagaaaatacaggagctttaatagtacagaaaatgaacagtgagagtatcattataagaaacagtactgctgatcagcaactaacaaactaatggactaactaaccatctaacagaataaatgcgactgaaattacggtgaaatgacaaacataaaatgtactggcttatctctaataagcaagggattgaaagcgctactatggataattgcaaataatcgatgtgatcataaatgccatactatatgtgaagtgtcaacattataaccctg

SEQ ID NO: 281316 - DNA, 274 bp, Glycine max
  unsure (1)..(274): unsure at all n locations
ctcctgaacccttctttacaaaaattgtagaacttttntggttactctaacgttatgctcgagtggacgttagtggcgactcttacttattttctccttatgagacgaacatgctatcttatatttgctttcgtcgtaccgtactatggtaagttgcgacaaccatctataaatatgtatttattcgctttactatgttaaaacgattgacgtttctaagatgggtctttcacaaaaccgtcttataaagtagctatactacgacgattttctg

SEQ ID NO: 281317 - DNA, 333 bp, Glycine max
  unsure (1)..(333): unsure at all n locations
cgaagtgagacagtgtggaagagacagnccgcctacttttatttgacgaccatagagtggtacgtggagatatgtcgcgtgagtcacgataccttggggacgctccgtggggtgctattgcccaaaaccaagcttgatcaatcctgacccaacccgggcataatcagtcatggagaacctgtgacgtacctaaacacgcgagctcctggtagtcaaccaataaaagaacaaataccacaaagcaaggatgcttgtgtggaggctggccacctatggatcttgagtgatatctacaatatggcctctcgtaatcgattaccaccggtgtgttat

SEQ ID NO: 281318 - DNA, 395 bp, Glycine max
  unsure (1)..(395): unsure at all n locations
tattaagaaaatcgtccgatcgttagttcgattaatattaatttgagatttgattctcttatataatgtctcgatttaaatttgatggataaaaaaaatacgattaaaaataaatatttttatatactaaccaatataatgatgaaaaagaaaactcattaattatttttatagacgcattattgaatgacatcatagatttttatatactaagcattttctgatacatgtttgtctgtttttttaacatattcttggcatgagccgagccaagccaaagccaaacgaggagccacgccactaacatctttctcgctgaaacgacgacaattaanattatctaaccttcacgccagttcgctgcatccaacgagaacagcgcgactacaattaga

SEQ ID NO: 281319 - DNA, 313 bp, Glycine max
  unsure (1)..(313): unsure at all n locations
tgtaatcgattacacacatactgtaatcgattaccagaagatttttttcaganaacattctcaacagtcacatctttttgtgtggttcttgaatgagtatcataggcctataaatatgtgacttgagacacgaatttgataagagtttttcagaacaaaaaggtcttatcctcttataaagagaaatcgttttatcctcttacaaattccttggccaaattacttgtgattcaataaggaattatttgaatgctcaaattgttcaatctatctttttcaagagagatttcttcttctcttcttcttcattctg

SEQ ID NO: 281320 - DNA, 382 bp, Glycine max
  unsure (1)..(382): unsure at all n locations
tatttgtaantttttctctctttaaaatgagaagctaggttttatagattatttatttatttatttaaaagctcttaaaattataatgagcttatatttaaagaagataaaaatagaaaaataagctctttaaaaaagctcattgaaggcgcttttgaccaacttaagtgagctcttttgaaaggagcacacttcgaatcctatctcaccccttttttatgcttattttgtttctcaccatcacactatatttggctgatatgtatatgagctgatnctttatttgattttcaaattgcaaactaattgattctgtatatatatatatatatatatatatatacacacacccacacacacactgtcaatgccaaaaatacaa

SEQ ID NO: 281321 - DNA, 359 bp, Glycine max
tctcccgcaattttctataaatagggggagatgttaagtataaaatggttcagccccttaggcacttctctctcttttgaatttgcttaggaaaattgtttccgtgaagaaaatccaagccgaggcacttccgtaacgtttccgtaacgttttcgtgagtgatttcgcgaaggttttcgacgttcttcattcgttctacatcgatcttcagccttcaacgggtaagtacctcaaaccaagcttttcaattcattctatgtacccgtggtggtccacattttgtttcatgtatttttattctcgtgttcatttacttattatacccgcttttgatgtgcttaaaccatttatttaagtca

SEQ ID NO: 281322 - DNA, 384 bp, Glycine max
  unsure (1)..(384): unsure at all n locations
tgccatgcgattgcggagaggttggagatccatctcaaccctatggtggtcacgccaagcacatcgacacatgagctgatcgaataatgcctcangattatcaggagtgtcacacnaaactagctagtatatgttaggtcttgacgcatgcggcgcacggatcagtcgtagtttatttacacantttatgttgaaattcgatctctatgttaggattgcctaatctaacttaatggatgatattaagattgtgatcaactcgctgcctattaaagtaatttttgaaaagtgttttttaaatatgttttaaatcttaattatcactatactatgtataattataagcacctggttgatgtcgtctagatgatcgatccaatcatg

SEQ ID NO: 281323 - DNA, 391 bp, Glycine max
  unsure (1)..(391): unsure at all n locations
tgaacaaggaaatntgtatgaagcacatgaattaataagatatgatcaataaataaaggctcattcctagatcatagatctattgagttctctatttcagatcttgaatcaaaaatgtcatcacacatganaatgggtgcatacttggtaactgcagtttgtttggtcaataatcaataatataacatctctcagaaagagatcgaggcaaaggtctcacctgagataaacaagtgtaagatcctgcataatacgtaattggattttacttccataacaagcaaataacattttaaacctggggagcactattacatatttacattgcacatactgtaaaaatcctaaaggcgttcctagactatcaatgatacgaagcaataggatcttg

SEQ ID NO: 281324 - DNA, 458 bp, Glycine max
  unsure (1)..(458): unsure at all n locations
ctaatctttcaaagataaccaattcaagctcaaaggtaattatgtaaagcaagattaatatgtactaaacaagcatgcctagctctaaacaatcaatacaatgtcacacctattaaatatgttntggcatctaaaatatcaaaatcaaaactaaaaaagatgagccttcaatctacaatgcattcgttattgtattaattcacatgctggggtggcatgtcttttaggttactactctgatctatactattatgcattaagatntgtaccaatatgtgcgctcaccaaatgggatattcatttaaaatcctttgtgttatgaaaactgaaaattaaactgctttttatatgtactatngaaggggcanngtgaaagcgcatctatatatatatatatatatatatatatatatatatatatatatatatatatgaatgggttaaacaactgaattgtn

SEQ ID NO: 281325 - DNA, 413 bp, Glycine max
  unsure (1)..(413): unsure at all n locations
ntgagggattggtctttgccaatgaaaggatcgatgtgggtctgaanaaatgcaaatttagtcatcctgcttggacgaatgaganaactggggcaaatgaagagggtgagaaagagggagaaacccatgctgtgactgccattcctatacgaccaagtttcccaccaacccaacaatgtcattactcagccaataacaaacctcttccttacccaccgcccagttatccacaaaggccatccctaaatcaaccacaaagcctgtctaccgcacttccaatgacgaagaccacctttagcacaaaccataaaacaccaacaanaatgaattntgcagcaaatagcctgtagggttcaccccaaattccgttgtcatatgctaaacttgatcccatatccactcanntattcaat

SEQ ID NO: 281326 - DNA, 412 bp, Glycine max
  unsure (1)..(412): unsure at all n locations
tgtaatgcatgttcataccacatcttatcaccctcaccttgcccccaatatatacgcatcttanagagtatatcttcttcattcatagaatttgctttatttaccaacatccaaggttcatatacctctttgcttttttaattttgatatgaatatccttcgatatgtcccctgaattcctacaatcacaatcactaattgatttaccttctttgtcattctctttcagtgcatgttgtggtctagccttcgatccacttcctttagagcttgctaatttcgagcaaccaatattggctagacaaactagtttctcatgacaaatatcctatcgtggaccatatttcttgcataagaaacaaaccaagtgtacataaaccttcatatttatggaggaaatatcactccatga

SEQ ID NO: 281327 - DNA, 438 bp, Glycine max
  unsure (1)..(438): unsure at all n locations
tgcatttggaattgcgaaagccccactccatcattaggatttgtacctgacatctcaaacaaacaaatcaaacgtaacaagacaattatagttgctgtttgaatacctcacccactcaagtgtatcacacaattatggcttttctctaatgaaacactcttgccttttaccactctaattccccttgagttcttaagcaattcaagagattatggccacaacaaagaacaattcaccaatatgtgtaaggtaaggctagacaaggaaaaggttaaccaagaaaaaggctaacaatgtttttaggcacaaatgaaggaaataaaattcagaatttaggaattcaagtaacaatccttcatgcaaccaatatattaccttanagagttttttttnttaagttcttcaagcatgaaccattcagcccaatnnttttttttt

SEQ ID NO: 281328 - DNA, 358 bp, Glycine max
tgtaagcctattacagtagtgtacaaccgaattctttcttctcataaaagaaagaaggataaagggaaggtagtggttgttcctttaaaaattaccttctagcggagtatttataatgtatatgatcttacatggtatctatttgctctagtgagtgtatacagaacaaagagtcatttgagcaatatatttcaccacctccaaactgcaaagttttgtatgtcccatctcattctccacaaaatggtcgggaacagtttacagcatgcttgtggataccacatttgttctattggagaattcctttctacaactatgacgcgcatcaatatttgtggctgcctcatcacttttggta

SEQ ID NO: 281329 - DNA, 425 bp, Glycine max
  unsure (1)..(425): unsure at all n locations
tctatataagctgaaccattntatcaataaacacaagttgagttttattcagaaaattagagtttatctcttttatcttagtgagagtgattctcctaaattcttgagtgattcaagaacaccctggctgtatcaaaggactttcacaacctttgtgtgttgccctcgctggaaagagtgattctttccttcctatcatctccacccttgttctttcaaaccacaattccagaaaatccacctctgcccaaaattatctcgtgaccataactcccatttcacacactcaaattaagtgattcttgagcctaaattgaatttcaaaacgagacctttcacctcgttttggaatcacctcatttggagccctgtagctttccgtattgccatttctatatttctgtccagccaccacttaacctacg

SEQ ID NO: 281330 - DNA, 359 bp, Glycine max
  unsure (1)..(359): unsure at all n locations
tgagatgaggaagtgttgaagggtgaaacttcttgcttatattgttgaccacagagtggtacctggagatatgtcgcgggggtcaggagaccttggggacgtcaggtggggtgctattgcccaaaaccaagcttgaccaatcccgacccaacccgggcatagtcggtcagtgagaacctgtgatgtacctaaacaggcgagctcctggcagtcaacagataanaggaacaaagaccacaaagcaaggaggcttgtggtggctggccagctgtgaaacttgattgatatgtgagatatggactctggtaatcgattaccaatggtgggtaatcgattacaagggcttataaatgaagaca

SEQ ID NO: 281331 - DNA, 347 bp, Glycine max
  unsure (1)..(347): unsure at all n locations
tctcaaggaggtgagcttagttacgaaagggtgcgtgtagttaagctctatcttctcaaggaagttttctcaaagaatcttctcaaggaagttttctcaagaaagcttcttaaggaagctacctagtctataaatagaagcatgtgtaacacttgttgtaactnttatgaatgagagtcttgtgagacacaactcanagttcaacttttttccctttttatccttcaatttcttgctccacccctctctctttctcttcctctttctattcctgcattgaagcatcctctccaagctctttatgcaacgctcatcttggtggtgaaactccttcttccatggcttat

SEQ ID NO: 281332 - DNA, 425 bp, Glycine max
  unsure (1)..(425): unsure at all n locations
gtgtgacaaaaaaaaaacactnttatgatatcacttttctttttaccttctaaggatagtactaaaaaaaatttcctcggagttttagcttattttaaaaaaaattaattaaactttttatcactgtacatgacacacatgtttaatctagtccttgcacaaaaagaaaagatttccaaatcagtccttgtatattaaggctaccaaaacaaattagtagctacaactctgcagttctctgctgcaccatcacaaatgctgaattacaaattgagcacaagacagaatgaaccaaactagattgtccttcttatntgtaatcttcatangacatcagtagcctattattcttattccagacattccaaaaaatctgcttgtgttaattcttttgacattcaagcttgtgatggctgcacacactg

SEQ ID NO: 281333 - DNA, 327 bp, Glycine max
  unsure (1)..(327): unsure at all n locations
tgcatgggatccctgtnacaaattatttgaagnnagtgcactaatatttgaagggtacgcaaatatgaagcgaaaacgcacgtggagggaaagaagagagttgtatatataactgcaccaaattgtcatacaatgagggttgaacgtctaagagtgttctcaagaagggtgataagagagttcacatttgtgtcactggcgacatgggttgagtaaatttcctccaaaatctgttcatcggacatgcatggatagtggctcctgctcattctcagcattctggaggagagacttggtagacattgacattattatgctcatctctcg

SEQ ID NO: 281334 - DNA, 376 bp, Glycine max
gtcttgaaatcgtacattaacagctctaatatacaacttgagatcttctccttctacttctccactcatgattaaaatatctacaagaatcgcgttagaagtgatcgtaaataggccatacaatatcctcacacaaatactctcacgtgtatatactaaattcttttcacccgtgtgtcactctttttggatctttccctctaatagtttcaccactcttgccttataccacccaacttctacttatgaactctaaagtaagaacatctgcggttgatgatacatgacaataaacaacaaggagtccatgataactttattgagtaagatcaaccatagagcaaatcgagaatagcgaattcgacacaagggattt

SEQ ID NO: 281335 - DNA, 348 bp, Glycine max
  unsure (1)..(348): unsure at all n locations
nttgtgtacataagttntgtacatcacattatatgtattggtgttagtcaatgaatacgactaacttttgtgtataaaacttgtgtaaattgtatcaaactcttccaatttatggttattttgtagtgttataagtattttctgttaagtataggtaataaatacttagtacttccattttgtgtgtttaataatcattttctctcaatttcaggttaattaggcaagctttgaaaatgttgtttttcatcttctcgctaagccaatctgctggcttagcgagcgttcactaagcgcaacactcatgggctaagcgcgaggaagactctagaagaagatgagctgtac

SEQ ID NO: 281336 - DNA, 294 bp, Glycine max
  unsure (1)..(294): unsure at all n locations
cttgcttctacaaatatttctgcctgctgttattaacaaaaatcaacatttcactctaaaaataagcatggatgtttgctgctttaattacaagggaaaaatcacagtccaaattgacaatactctgcaatttgcacacgtttctaaaaattaaatgtctcacctgcaaaactgacatgaaatgaanaactcataatctctttgttcactttgaaaatcatcatanacgtttgcttctttaattacatgggaaaaatcacagtccanattgacaacactttgcattatgagttg

SEQ ID NO: 281337 - DNA, 418 bp, Glycine max
  unsure (1)..(418): unsure at all n locations
tccatcaggtggttggcccatttcttcttgactcanattcttcaagggatggcaccaatcctccttccaattcccaatatggcaacccaaaaacaaggaaacagagacaagcaataaccaaagaccaaaaaaaatgaaatgaaagctaaaccaatggagttttaacaagacaatttttcaaggattattcaacaattaaatcaatgaaaaggacatagaatcaagctatgactcaaagagaaacttagaatggctctagagtagagtaaaanaacaaaaaaaaaaagactcaacaaacccctagctttggcacttgttttcacagtaaatttaaattgaaatttcggaactaagattagtataacataggcaccaattatagaataatttttgagacanaacaacaagcacacttccc

SEQ ID NO: 281338 - DNA, 292 bp, Glycine max
gacctatagaaactcaagcttcacatggagctacatcatgtggtatcagagctcaccatcaataacttgtggtgttacaatcaccaccaccaccaccatcaatgtctctgccaccatcattgtccctgccaccaccatcattattaacaataccacctctgtcattgccaccacaaccactaccaaggtcattgcaaccaccaccacaccgccatcaccaatatcgctacctccaccaccccaccatcgacattgctaccacccccactatcgctgccaccacctaaagtga

SEQ ID NO: 281339 - DNA, 446 bp, Glycine max
  unsure (1)..(446): unsure at all n locations
ngatgtcattcanaacacactatgtcgacctatatgaagactatcatgcattgtttatgtaattgtattcattatgcgatataatttgttgtaacccgttactaaccaattaatattattaagtactcgtttggttaagcaagaaaattgttggcccaacaaaaatcatttacgcgtgcagcatacatcattgtcataattgacaacacataatgacatgcatgcgtattatagtttgaccgcgacaacacattggctgacttgactacacattctgaaggaaacataatcacgaaacatgttcacgcgttgtctattatttgtaaacaaagttaagcaatcgctcggtcacaaccatctatatatatgacagacacggctaataaatcacacattatcttattttcaaatagtctcccaattgatacacaaagtatgacattttt

SEQ ID NO: 281340 - DNA, 389 bp, Glycine max
  unsure (1)..(389): unsure at all n locations
tganaggaaacaccactgtcgttgtgaacaatgtatccatttggaaaaataaaacctaatgtggagttcacaactgtctgactgcttgtctctcccaagaattccatagttttttgtaagacttgggttgatactgaaacttgtgctttcttacagggttaggttgtgccatatatatagatgactnttaatatcagtgctgcatttttttaagattaaaaatacgcatgcacatgctttctgtatgtgttgtcaactacacgaatgacgtgacatgctttagcttgcatcagatctgcatgtgtagtcatggtgtgcagggtcctttcacgcgcttttatgtaatgcagacnnacaattatcatacacgatttttccacatgtgtagt

SEQ ID NO: 281341 - DNA, 394 bp, Glycine max
  unsure (1)..(394): unsure at all n locations
tatcctcaaagatatattttataagaattaaattcaatttctctcattcttgttttatgataaatttatgtatttttattttaaaattagaattctaaaaacatatccttttcagattgaagaatgaaattcaactaacctgcacgaagaataaatgattctcatttacaataaattaaaggtatactttttttaacaataatacatcttttaagttcatatttcttataattagaatcaaaataataactctcttttttttttaatgagagagtatgttataaacacagacatccaataacataacagagcagcactttaaagtggaagacacttgtccctaattttccgaaagatgccatgattcttacgtggaaaagaatatntcctttat

SEQ ID NO: 281342 - DNA, 396 bp, Glycine max
  unsure (1)..(396): unsure at all n locations
tggacttcctatattntgngaacctctccttcctcatgtgtacccaaacccaatcacctggttcaagcacgactttctttctgcttttgttggcttgccttgcatagctcgcatttttcttttcaatttgagccttcacttgctcatgcagcttcttcacatactcagctntagcgtgtgcgtccttatgcttaaacatagcaatgttaggcataggcaacaaatcaagaggagtcaaaggattaaatccatacactatctcaaatggtgaacaattagttgtgctatggacagcccgattataagcaaactcaacatgaggcaaacatgcttcccaagatntaaggtttttctttaaaacagtcctaagcagtgtacctaaagtcctattgacta

SEQ ID NO: 281343 - DNA, 435 bp, Glycine max
  unsure (1)..(435): unsure at all n locations
gcttcctagaagagagtagggggaccctnggtgatggttgtccacatattagtcgctgtagtgctaagtgttttatatgatgaaaatcctaccggccagagctaggtgccacccaggaacctatgggctacgttgacttctccctacaaaatgtcttctttctaggtaagtaccacatacaactcccaaagctcctggaaataaaattattgcgtacatatntagattaaagtttctaaatttatagttttaatttaagttaatttacagagtataaaaatgctacttaactcatatttttataaaactaagttttcatgccaaagctntatgtgcaaatgtatttttgagagtaatcaaacgtgtcttcaaaataagtttatcttttaaactgaatntgctccaacaagccaacatagcccatgtgttatggct

SEQ ID NO: 281344 - DNA, 406 bp, Glycine max
  unsure (1)..(406): unsure at all n locations
tatctattgtgtggctgggggataatttaactctacaagcaaaatatcctactttgtatttaataagcaatcagcagacctttctatttctattttttacacatttaaaactcaaacatataaaatatataacaaactaacaaagataaagacaaaaaaaaggaaatataaactcacctcacttgctgctgctgcccatcatttcactctcacaacaaataggaatcatgtaccttcatggacggatccacataaagctctaaggagatgattgctcccattaagatattttttgtacttaaatatatttaataaaaaaattactntccaaattgggccatatgtctaattcaatcacccgcacacctttcttcagtgcatntatgatggggacgtcactgcagtc

SEQ ID NO: 281345 - DNA, 352 bp, Glycine max
  unsure (1)..(352): unsure at all n locations
gcttaacaatcaatttcgagcgccttgatattntacgggactcaatcagacatccgagtaaaaagttattgtcgtttgaatttgctgagtgcttcaacattcaatttcgagcgtctcgatatattacgggactcaatcagacatccgagtaaaaagttatcatcgtttgaatttggtcagagcttcaacattcaatttagagcgtctcatatattacgggactcaatcagacatccgagtaaaaaggtattgtcgctcgaaaatcctcaaagcttcggtattcaatttcgagcgtctcgatatattatgggactcaattagacatccgagtaaaaagttattggcgtttgaa

SEQ ID NO: 281346 - DNA, 436 bp, Glycine max
  unsure (1)..(436): unsure at all n locations
tgtagaatggccagacatgatacatgtcagggtttggtttggttcaagggtaaaagtgatgccccacattatttccatgacacagatgcaaaaatgatgatttggaaactttatgcaaaactggtcatgcatgcacctatgtggacactcaagtgtcaaatttttatgctcatgtgatgctagggctcaggattcattccctctattttagtcaacccaatgtttccaaaatatgttcttttatccatttgtgcattcatccgagtccattntgggcgttcggggaaatntcactgcgttcacccttcgggtgtacacacatttttttcaaaaaccagctatgatcggcgaatntcccanagaagagttggtagtcatctcttttcaaaagcatgtcgngttttcagctaaacaacttattcttggtttcttttcc

SEQ ID NO: 281347 - DNA, 358 bp, Glycine max
tgcatgagaggcttccttggggaggaagtgttacacccctccaatagcaaagctcaccccatgggaacacacacccctccaatagctaagctcaccgccccccaaaatacaaaaaaaaagaccctactacaaagactactcaaaatgccctgaaatacaaggctaaaaccctatactactagggtacccttaacttgtagggtagggtgtccttaatttgtagggtaccctacaaacctaaaattgaccaaaatacaaggcccataagatggaaaacctattctaatatttacaaagataagtaggtgcatacttagcccatggacccaaattctaccctaaggctcatgagaatcct

SEQ ID NO: 281348 - DNA, 435 bp, Glycine max
  unsure (1)..(435): unsure at all n locations
gctgaaggaagaaagagagagcttgcggatgaggtgaaacagtttacaaggcgaaaaacagagcaaggaagcaaaagccttagcttttaggaggatcttaggtttaggagtgatttctaggtttctagaggtggaggagacatccccaccactgtgtaatctattattttctttgaaaatcccctttttacttgtgaaaggtgttgccttgtgatggaaggttaaacccctttgttgggaaattctgttgagaacttgatgtaaattcttatcctatctatttgaggttatttntatgtgttcattgcttatatctgtgctttaattactgcatgctattggtctgatcatccatttgtgtgtaaagttaggatttttatcattggaaaattgattaattcttagaactggatagagcaaggctagataactaca

SEQ ID NO: 281349 - DNA, 370 bp, Glycine max
tcaacatgttaaacatcgctcacctactgaaactatttaattattcaatatcctcggatcgaccaaagtatacgtataatataaaattaaaaaaatgtacaaatcaaagacagtcctacatgtaatttcagtagatttgtaaaattaaaaatatgtacaatataaagacagtgaatacctgcatataattactatacatgctaattttttcacgttacaattttttgattaaacataagctaaaattataacttgttgaatatatatatatatatatatatatatatgtatacatatataactcaccgtaatgtttggaatttaaaaataaaatcagtaatatattctaagaagcctataatgacaatat

SEQ ID NO: 281350 - DNA, 439 bp, Glycine max
  unsure (1)..(439): unsure at all n locations
tgtcacacaatctgtttcataatcatattagttgtactttgttctggacatcaatacaatatgcaaacgcacgtatctttctatgcnaataaattgtttactaatgtaaaaaggtttaattactctgccgtccctgaacttttactaaattctgtgatgatgtgcattntaatatantttttattcaggctangcttgattggacttaagaaccggttcaatgttgatctattattatgtaaaaccaattttaagattgccagtatttanactaacaagcataatttattaaaattattttaatcgatttgaaaattatcttttggagttacaaaattacttattaaattgctatagtttcattttataattcatttnttaagacttaaataatttgtaagtcttgaactgtttgatgaaatttaatatttctctggat

SEQ ID NO: 281351 - DNA, 416 bp, Glycine max
  unsure (1)..(416): unsure at all n locations
tacaagtgcccaaaccaagaattgtctcatttgtacaacncttagtatanattcagcaaactnaaagacaatggtnngaagagctcaangagcccaagagtttatactcaagatgcaactatgggttggagtttatttggatggattacatagcatttggtctaaagaactaattaaggcctattttctatttttcctttaattttcatattttattttcatgtaataagttcatatgactattgacatctttgaggtcaatttttatgtttttaggcttcccaagttattttcatgtaataagttcatatgactattgacatctttganggtaaattttatgtttttaggcttcccaagttattatagtggttagtgggaattaattctaagtggaataatttctaggggatgtt

SEQ ID NO: 281352 - DNA, 419 bp, Glycine max
  unsure (1)..(419): unsure at all n locations
tgactaggcgagttgattntagccttagtttcactttagttattagtcgattcaattaagaatgagaaatcccaaagagaaaacatccgattgatttttcgctttattttactaaaagggtatttttttgattattatattattattttacctcttttttgatttccaacgtggttacggcacgaccgaacggtcggaattcattttaaccgaaattaacggatgatacaattcaaacgatcagtgganatttattttatttttagattaggcgagaaatgacttaaataaatgactaaagcatgtcaaaagggggtatagaaagcgaatganaacgaatataaaaatacatganacaaaatgtggaccaccacgggtacatagaatgaattgaaaagctcggtttgaagtacttaccc

SEQ ID NO: 281353 - DNA, 385 bp, Glycine max
  unsure (1)..(385): unsure at all n locations
taacaaccttaganatcaagtgatcataaattccgaaatatatggggagtaaacgtatatacaattgtttgttgcttgcttgaatcttgatttcaggtattgtattgtcatcatcaaaaagggggagattgtagatgcaattgcctttgatgttttgatgatgatcatgatgatgtgttacaattgatgcaaatgggcttttcaagattaaattcaagacaatacttcaagattacaagtcacaacatcaagatgatcactagaatattaggaagggaattcctaattgaattagcanaggtttggccaagtgatttaaattaaaaaagtgtttctcanaggttntactctctggtaatcgattaccagaggatgtaatcgatta

SEQ ID NO: 281354 - DNA, 399 bp, Glycine max
  unsure (1)..(399): unsure at all n locations
nngatttggtttagacatgattgatacatgatttgggacttgtaggatttgatttgagcaagattggatgaggggaagtgtgattttcaaaatctgcacttatgcagaattttgctgtcaaaataggtgcagcaggattttagcttggtgcagaaaatgcttgtgtgtggttggctggngaaagagtagtatagaatgagttctggatgtttgctagtagatcccaacggtcacaatgtaggcttgtgcactatagacttccagtaaaactttggagtcgatccaacggttaacgaattggatcgaaggaattgttactgtggtctttaagtgagaaaagctgtgattntggttgatgtgttgagcagagttttctgcctttgctctgttttgcttgct

SEQ ID NO: 281355 - DNA, 183 bp, Glycine max
cgtaaatctccacgtgtcaacgggcttgtcagccgtgattgacgaagggcgcagaagacgacgttagtctctgcgtgctatcatgcttttcgtcttacagacaacaaaaagtttatacggataaccactcgggtatttccgcccgtcaacgtgactcaaaagtcagaatgacagaacttgtga

SEQ ID NO: 281356 - DNA, 337 bp, Glycine max
  unsure (1)..(337): unsure at all n locations
tcagagtctttgattcatcataagcatctacacctttcaatccctaaatgttcaatgttcatagtctgttatctgcatccaagtgaaagtccaactattactctcgtttcacgagtcttggatccaacaaattacaattcatggagcagatcaatgtttactgctttgagtgcaaagaataaagttgagttcgttgatggaaccattacacgcacaacccccttgatatctaatcatttttatatgatgcttggaagagatgcaatgatgaaaccctaatttgtggataaactnttcagcatcaacaaactanggaacctatntaggactctctgaa

SEQ ID NO: 281357 - DNA, 306 bp, Glycine max
  unsure (1)..(306): unsure at all n locations
agctnttcgtcttacagacagcananaagaatgtntatacggataaccacttgngtatttccgctcgtcagcgtgactcanatgtgagtatgacagatcttgtgatcgcggaagatgacgtaaatctccgcgtgtcaacaggcttgtcgacgcgattgacgaaaggcgcagaagacaacgttagtctctgcgtgctattaagcttttcgtcttacagaccgccaaattaatgtttataccgataaccactctggtatatccgctcatcagcgtgactcacatgtgagtatgacacatcttgtgagc

SEQ ID NO: 281358 - DNA, 589 bp, Glycine max
  unsure (1)..(589): unsure at all n locations
cacctcccacacccactcactacatgagcgaacaggtcgatgacccacagtatggtgatantaaacaancnagggtacagnnntnnnnncttgagccatagtagnccggcgaanncccnccgacccagggatgctctagaggcgacccgcaagcatgcaagcaagagatggtctaatctgcatattgcattaagcgcgggagcaagtcatggaagtataggccacgaaaatggtaaccaagagcaagagaagacaaagaccccacaaagaatgaatgaaacaacgacagccaatagattcgataacgatcggaagaagaacctatatgtatgaaacaaacgcaagaacaagtaatcagggcctaattatgactgatggcaggcataaaggaatcggacatcctaatgcacctccggagaagacatacaatatggaccctaaaaggcaacgaaaataccagcgaaagaaatgacgctgaatggaaggcatactggaacatacggcacaaccattggccatgacctacacacacgaagaaaacatgagaccagaaacaccagggacaatgacataagcatacgaatctacg

SEQ ID NO: 281359 - DNA, 429 bp, Glycine max
agcttttcgattcattctatgtacccgtagtggtccacattgtgtttcgtgcattattattctcgttttgtttactttttataccccctgttgacgtgcttaagccattttacttaagtcatttctcgcttaacttataaataaaataaatttccaccgaacgtttgaattgtattatccattaacttcggttaaaataaattccgaccgttcggtcgtgccgtaaccacgttggaaatcaaaaagaggtaaaaaataatataataatcaaaaagacatcttttagtaaaataaagcggaaaatcaatcggacgttttctctttgggatttctcattcttaatcgaattgattaataactaaagtgaaactaaagggctaaatcaattcgcctagtcaagctcgtccataaaaataggcttttgaagtt

SEQ ID NO: 281360 - DNA, 419 bp, Glycine max
agcttagcatgcactccatgcttagcccgcactgaaagcttagcacactgcatgcttagcgctcagaaagcccatagcgaagcccaaatgtgcgcttagcacataagctcgcgctaagcgcgaattcagcgtgaatattaagctacatggagcctatataaggaggaagaaacaaaagggaaagacataccgagtctcagaactctctagtgaagtaatccacagtttgagcctctcccttaggggaaaccctctttccttagtcattctccattctcttactattagtcatccatccccttcttctattagcctttgaagtgtaaagtctctcatgcctatgagaggttaaaccccctctgttggagcctagtagccaaagcccttgtaatgaaactgctcttcttatttattaatgc

SEQ ID NO: 281361 - DNA, 603 bp, Glycine max
  unsure (1)..(603): unsure at all n locations
cgcacgcccactctcaacccntagaatacaagggagngtaanaaattatacactgagcgcggtcacgaccttntacactantncagtnnaataggnaggtnnggccctgaaagccatggggagaccnggcnaannccannngaacccggcgagcanacaagaagaactgcaagcgagcaagcagcacttataccaaccagcaagaaaaaacatagaagcgggcacccggtgcggaacacgatccagataccgccacccgccaagtcaagagcaaccgaagctcgcgaacgacgaacgaaacacaacgagcaccaaggacaacacaggcgcaatgcaccggatgagcgaagggaccacaaagacacaaaacagccacatgactgaccggaaggcgaccgacatacgaaaaaagaggcgacagcgcagacagagagaccaaaacaggaaacggccgcaccgcggacaacaccgcaaagaaccagaaagagcgaggcgcacacaaccagaacaacagaacaggagcgccaagactacagaagaaaacagaaaggaaaaaagagacaccacgcgcaaaacaaggacgatcaagcaaggagacgaaac

SEQ ID NO: 281362 - DNA, 391 bp, Glycine max
  unsure (1)..(391): unsure at all n locations
ttgcttatagctcaatggacttaccttgaattaattcctttgatagcccttttgagccttgtttccctttccttgttatgaagctcactacaagccttaagtganaaaccatgatatcaccatatccttaaggaattttggagctttggaattgttttgggaataagtgtggggggttcttgtatcattggacaacttgttttgttggctatgcttcatgatgtaatttgggccatacttgatgtacattgtatattggttaaatgttggacatgctgaatgaaatgttgtttctcaaaggctatagagtaaaaaaaaaatataatcggaaaataaaaatcgaacaaaagaaaaagaaaggcaatatagttgagtgaataagatcttaaat

SEQ ID NO: 281363 - DNA, 396 bp, Glycine max
tagcttccatcaagtggtaatcagagcacaagagcttcaagtaggtgttccttaaacctccattaattttttgatttaccttctcttccattgttgtttcttcatcttttttctccatgtatctcctcacatgtcttgtgctaaatgtttttaacatgattctttagagtttccaccgattaaacttgctatagaaactagatttgattttctatggttcacaattgttgttcttgttcttgaaccatatattgtgtcgagtttacgtacctttgagatttgtcttgttatattctttggctgaaacctaaaccataaaattcttacaaatatattaaagtataagaaaacctcaataatctagagtgacttgttcacctattgcaagtttgtcat

SEQ ID NO: 281364 - DNA, 320 bp, Glycine max
agcttgtatcaatagaagagtatgagcctgtgattgaaagtatgactgaaaatgttagtcagattgtcagattgattgtgaaggaatgcattaaccatatcccaatgagagtgtgatctttaaattttgagagaaacgaatgtcatttagtactgatatttgcgtgaatctctgaagtatggactgactgcatgaaattgatgatgatgaagcccatgtttgattgtgatagccactttatccaacaagtctaccatgtgattgaacggaatatccctagtacttcattttgagctaaatgaattattgagtgattgaac

SEQ ID NO: 281365 - DNA, 420 bp, Glycine max
  unsure (1)..(420): unsure at all n locations
agctntgaaaactctctggaacttggacctttctctctttagaagtctctaaacatgcaaaagctttgataatttcccaaactcccctccaaaatctgatttcaggcttaaataggtggctttgtttgtgctagcacgcttagtgcaactatggaccgctcagcgtgcattagtggatttcggcttagcgcgtgcgtttctcacttagtggatggactgaagtggtgcgcttagcgggatgacccttcgctcagcgcatatgcacaactcatccttcttccagattcttcctcgtaaccggngagtgttgtgctcagtggatggctcactaagccagaagattggcttagcgagcggatgataatcaacacttcacaaactttctaaattaacctaaaattaagaggaaatggttattaa

SEQ ID NO: 281366 - DNA, 410 bp, Glycine max
  unsure (1)..(410): unsure at all n locations
agcttgcataccacgcaaccgaatgaacattattgctaatcgaagcttgagagtgaggaataatcatgggtacaattatgcacgattgcaaatatatgtcgagaaaatagctaatagcatatagtaattcggcaataggaaatggcctaagagcatatcccttgtcggngaaccagacaataaacataatgcttgcttaaatgagatatgcttataagaacatccaagaaagaaaagctaatgccaaatgtgactgaattgcttacaagaattatgcctattctgctaacatgaccatgaataccaaaatgctacaagaagcgggacaccttgcatgtcatcagtaagctcaactgagattctacgataaatcacatggtanaactatctttaagcagaactcagcaaag

SEQ ID NO: 281367 - DNA, 400 bp, Glycine max
  unsure (1)..(400): unsure at all n locations
agccttgttattactcaagaaaaggaagagaagaattggcatgtcataaatgcgtgtataacaaatattgaacatcagttacaagaggaaccctcttccctggcccagcgtgacccctgtccccatccctatccctcaccactaatntttttttctgttacatacgtgattgggaacagatacatcgttatatgatagcaagctatgcatatcaaagcttgagtcacatttgaggggtatcccaatcaaacctgcgctgtgaatagacctcataatcaattggcctagtatcaacaacgtaatcaactgtgtgaatgccctncaaaagagttggttgaaaactatcattacttgaaggcagtaatttatacacgactaataattcaagagtgaatatagc

SEQ ID NO: 281368 - DNA, 436 bp, Glycine max
  unsure (1)..(436): unsure at all n locations
agcttgacttacgcagnaaaaacgtggtggctgtcctcaacagttttaaaagtataaattgatggttntaagtgtttaaatagtgtataaatgattactaatggatgctaccaagtttataacattatgtaaagaaaaaactaaaaattgaatgtgtttagggtcttgaaaagctttgtttttttgtgtaaaatgtaagtgttgctcacaaaaacagtttgaataaaaaaggttgataaacatagggaaaattgcgtgaaaagtggacccaatgagcaaccaaaaacattgaaaaatctaatattaaattcttttctagttttttaagagactcattnttcacacaatctttactacgtgtgggtataaggactcaagcttgtaacaccccgacgaattacaccaaaaagagaaggatctggagtctgtgtatgta

SEQ ID NO: 281369 - DNA, 244 bp, Glycine max
  unsure (1)..(244): unsure at all n locations
atcactcctacatctcatctctagcatgcattntctttctttacccactcctcacgtttggttttttagggaaaaacaccataactaaacgcgccgcaagggatccctatcgcaccagatccaaatctagaacgatgggtgatcaagaagagacgcatgaacagatgacagtcgacatgtcggctctgaaagaacaaatggcctccatgatggaggccatgttangtattgaacaactcatgga

SEQ ID NO: 281370 - DNA, 389 bp, Glycine max
  unsure (1)..(389): unsure at all n locations
agcttgtgagttgtgacatgtagtactacaaatacccccaccatacctcttttcccgttatcacaaactttgtcgaatgctattgctactctagaacaatgatctttagttaatctacactcaactgtaattccatcatataattaccttgcaaaccctaaaatcagagaacattgagtttgttgtagctccatatgaagtagatgctcagttagcgcacatgtgtcaacttggagtagaaaatggtggagttgtagcggtgatcacacaagatagtgatctaatagcatatggttgtccagctataagaactcctccaatactgtcatatcgtgcatgaaggtttactggtcttttgatatctngatatatatactatntcactatta

SEQ ID NO: 281371 - DNA, 430 bp, Glycine max
  unsure (1)..(430): unsure at all n locations
agcttgaagaactttccaagaaagtcatcccacgaacttgaattccactcacttaaagttttattacagctaggctatgtaacaagagctactctttttcctaccttgactttttatccatataaaaatatgaaggtttttgccgagaaggttttaatgagacctcatcctacaaatattatcaatgaagaaatatttcaacaatcacacttatgtcattatattactcctttnttaatattgttccccctagaataccctctttggctaaggttaaacttcattaatcataattagtagttccctcctgaataccctgttgaactaaggtttaacttccttaatcataattaatagttccttcctaaaaactctcttcggctaaggttaaacttcataataatcataattaacagtntgaattttcaac

SEQ ID NO: 281372 - DNA, 428 bp, Glycine max
  unsure (1)..(428): unsure at all n locations
agcttaagctccttcaactgcacaaggctcttaatatttgaagagtatccttgtggaaccttcacctgacgaagacactgacaaaaacttatcttctccttcttggacaaagtatggcaggctgggggcaagtaaattttcttcccatcagaccttggatgcaactgtgctcttatacccatatcagctagatcttgacgggtattcaagccatccttcgtcttgccttgaatgttaaggagcgtcccaataacactgtcacaaacatttttctccacatgcataacatcaatacaatgtctaacgtcaagatcacaccagtacggaagatcaaagagaatggacctcttcttcatatgcaactctgacttttatccttcttttgngtcttcccaaatacagtgttcaggtgttgaacccgctgatat

SEQ ID NO: 281373 - DNA, 266 bp, Glycine max
tgtttaaatgatgaggcataggtatagaatgtcttaaactatcgcttcgcgtgtttatatacatcttagtcttttatcatgcatactgattgatgagatctgaggcgggtgaagctttcttattctctaagtacgtaagaacttacttctactcgaactttggctaccaacatcgatataattgattgcctcgtttgctaatcgaatgtccaagtcaatctcagacataggaaggatctataccttatgataatctattaccccat

SEQ ID NO: 281374 - DNA, 394 bp, Glycine max
  unsure (1)..(394): unsure at all n locations
agcttcacctttttgtactcctcatagtacgtgcatgagaatacatgctctattatcatctcccactccaagtaggcctccagatcattctttcctttaaatggaggaatgttgagtntaataccatccattcggttatcgctaggaacaccatcattccctcttgtgctcctttcttcttcattatgatctctattctccatttgagccaacctctcatggagcgcatcatcttgatgtttcattaacctctccaaatgttgcatcaaagcttgcatttggaattgccagagccccactcatctttatgattatacctgaatctcaacaaacaatcaaccttacacacaatatagtgctgttgaatcctccccatcagagatcacacattatg

SEQ ID NO: 281375 - DNA, 390 bp, Glycine max
agcttgatccaagaagcacgttcatgctctgtctggatctacctaacgttgaatttggaaatgaactgagttacatgtaattcaaaaatgttattgaaccatggttgacgtattgattgttaaacaatggatcatatagacaagatggactacaacctttgtcatttagtccaattctcttatcttctcttctatattggtcatccaatcttctgtaatttggtggagcacccattcgtgtagaaaggaacgtccactctagtggttcattaacatatgttgtgttgaaattgctactattatctattgtaacatgttttcagttagacaattaggtgttgtccgctttataaggagcttagtattctacgattagagatcttgacatca

SEQ ID NO: 281376 - DNA, 421 bp, Glycine max
  unsure (1)..(421): unsure at all n locations
agcttgcgggcatgtaacattccgaatactaaaaagggcggtaagtgatcgtcagtgcccaagagatttggtacagacaaagagcaactccttgcaagtttccagttaaagagatacatgaattaatcgaatacacactctaataagaggatgtagaggttgtgcaagtatgagagtgtatagtggaagataaagatcatggaaggcctccaaganatgtagaaagacctaagatgaagaatcctttaattagactaaaagaacttgtgaatgggatgattttagagaacaaccccatggttgggctggaaataccaaagagtggaagagtaaagagtccaaaggagaattataggttatcaacacattacatggtcaagcctaaaatggaagaaaatagtccatggtggtgcatgtggaa

SEQ ID NO: 281377 - DNA, 418 bp, Glycine max
agctttaacctcattgtctctcacaatctttagatttgggagccaatccaatccttgtgtccggactctcagccacttatgatagccgccgatgatcccattactgcttcccctaagctctctgtcctttcttcacgccgcatcccatgccttgcaaactccttggagtacctttgcattggggtcactgaaaccccgtgtaatgaaaggcgtgatgcttttgtctaatggcgctcctctcatggggtagccaagctgtcttatggcgaggacatgattataatttatacaaccccttgttcccattaagggaacatgaagatagaatcttgattcttccttccttctagtgagggaaccaattaacagacgcccctctatgctagccaagagttggtcccaattcgactatctttct

SEQ ID NO: 281378 - DNA, 400 bp, Glycine max
  unsure (1)..(400): unsure at all n locations
agcttgtacagttaaatataccaaggtgctgtgctgaaataagactaacaatntgtgcataagcttagacgagcccttgcagttcataatcagtattttgtagatgtctacttgcgcatgcatatactatagttaaactattatacagatgatgggcataaacttattgaagcctaaagataaagagtatactgagtgcctgngtggtgatgtgctaggctaanagcacggaatttggtacccttggccaagttgttttagttcacttaacctggttgtacagtgcatatacaagtctttactcatttaagaaattattacaatgtgtatatgctagttaatatcttgagggtttcgggcttcccaatacaagaataaagaatcagctggtaaacttgat

SEQ ID NO: 281379 - DNA, 397 bp, Glycine max
agcttatctcgttgaacgaaagacatcctataagtacattgcataaggtacatgcatcaattaataggtattttatcattatggactttgaacttttctcgtctccgaaagtggtcaataagtgaacatatcctatattttcatttgtttctcagcaaagtctatcagttcctctgggaatggctcaatatagctttccataatgcccaactgtttaaggaggactagtagaggatatcaaccgagttcccattgtcgagtaggaccttgcacactaggaagtttgccacctatatcttgatgaccatcggatcattgtgacatctttcaatgtccccgaaatcctcgattgtgaaaataataggcggcatgcttctaaagacctatttctcatctt

SEQ ID NO: 281380 - DNA, 435 bp, Glycine max
  unsure (1)..(435): unsure at all n locations
agcttaatcccttgaaaattgagggtaggagatttgccctggattcatctagggactactttccttagcacccttatgttcaatacattcgataaataaaaatagttttttttttgctatatgcatgagagtttcaatgctagttgtcacacaaatgtattacacaaaagtacctatcacataaagagtggctatgcaatttagaatgcatcaagaagttttagattgtgtggctacattctttggaaccaaaggcaatgcatcgaanaattactacatacccatatctaacgggaatttctattttcttggttggctnttctgagggagacgtcaccacatgttatgcaggatggtggaagcagtcaatattgtatcattatcatgaatttgcanagaatattactcggtgaaagagctgtatatacaatgatg

SEQ ID NO: 281381 - DNA, 184 bp, Glycine max
actgggatagattctgaatagtttgccagccgttttggatggctatctttatttaaaggaatctgtccctcatattgtatgcacaaaattaatttggaagctgattacaagctcgtgagacaaccttcaagaatgcttaatcctagtatgaaagaagaagtaagaaaggaagtcctcatgttgc

SEQ ID NO: 281382 - DNA, 398 bp, Glycine max
  unsure (1)..(398): unsure at all n locations
agctngagatgaggaagtgttgaagggtgaaacttcctgcttttattgttgaccacagagtggtacctggagatatgtcgcgggggtcaggagaccttggggacgtcaggtggggtgctattgcccaaaaccaagcttgaccaatcccgacccaacccgggcatagtcggtcagtgagaacctgtgatgtacctaagcaggcgagctcctggcagtcaacagataaaaggaaaacaagaccacaaagcaaggaggcttgtggtggctggccagctgtgaattttgtgtaatatgtggattgtggcctctggtaatcgattaccaaggcggggtaatcgattacaaggcttaaaaatgaagacagggggctaagatggtctctggtaatcgattaccat

SEQ ID NO: 281383 - DNA, 428 bp, Glycine max
agcttaggctaaactttagtaagctacttgagctgagtctagtcttacatgagggatctgtgaacgaaactcagtttaagttagtctaaacctaagagggctgtctaaattgggtgtagtcttaaatgagggatctacggacgaagcctggatattcagcctgacgagggatcgagggtttagtaatttaggctacaacatagaacacaagagcatgattgattagagaaatatatttatatgcatcggcttgtttgttagaaagacccaacatatctacctattgttgtcattttatagtgtttagcatacaagtttagtttaaattctatttgaaattatcgcttatacatgttctctcaacaatgcttcgattctgaacttaattcaggctaacattagctccctgtgttcgatactcggattca

SEQ ID NO: 281384 - DNA, 314 bp, Glycine max
agcttctgttttcaattacgagcgtctcgatatattatgggactgaatcgcacatccgagtcaaaagttaatttcgtttgaatttgcttagagcttatgttttcaattacgagcgtctcgatatactacgggacacagatcgacctgcgagtccaaagttattggcgatgacatttgctcagggcttctgttttcaattacgagcgtctcgatagattacgggactcaatcggagatccgtgtaaaaagatattgtcgtgtgaatattctcagagcttcagttttcaataccaagcgtctcgatatactacggg

SEQ ID NO: 281385 - DNA, 383 bp, Glycine max
  unsure (1)..(383): unsure at all n locations
aggcgaatcagctcgtactcgagatactctgagtgacctgctgcatgcaagctntaccatcagaatttacatatgcttcattaacagaaattaccatccacttaaagttagcaatgagccattaacctacgaaattaaaagaacttaaatggttgagtgtaattgaaattgtggcaaccaaaagtcaccccgaagttgatgcctaagctgccaattacgcccttattacaacttagactaaaccaaatcgtcttagaatatgatacagtgacattntnttaattaaaacaatgaacattgttttttactacacacattataagatnggtatcaataactgtcttagaatgtcattgggtggcagtgttgaattatggggaatg

SEQ ID NO: 281386 - DNA, 422 bp, Glycine max
acagtgctgatgctgactatacctacccatcctgtagctcttgtacagcctgtccaccctcagactatgatccacagctatatctaatgctctgatgcccaactgacgttggatggcatatcatttaattttatggtttccgaacctagaattgctagctcagattacattcagaagcatgctactaacagcccatagaatctccagcactgactagatcagagctgaaagacgaactctgaattgtaagcctcaggatgctaggcgtcagacactctaatcacagtctactataacactagagatctaccggctccgttcatctaatgatcgtgtcgccgattcatgttccctctgatattagaagccgaatatctacacgccaattactcggagcttgatgaagatagaacacaactccg

SEQ ID NO: 281387 - DNA, 420 bp, Glycine max
  unsure (1)..(420): unsure at all n locations
agcttgataacacgcagagactaacgtcgtcttttgcggccttcgtcaatcgcggccgacaagcccgttgacacgcagagatttatgtcatcttccgcgcttacaagatctgtcatactgagttttgagtcacgctgacgggcggaaatacccgagtggttatccgtataaactttntgttgtctgtaagacgaaaagcctgatagcacgcagagactaacgtcgtcttctgcgcccttcgtcaatcgcggccgacaagcccgtttacacgcggtgatttacgtcatcttccgtgctcacaagatctgtcatactgacttntgagtcacgctgacgggcggaaatacccgagtgtgtatccgtataaactntttgcattctgtaagacgaaaagcttgataacacgcagagactaacgtc

SEQ ID NO: 281388 - DNA, 416 bp, Glycine max
  unsure (1)..(416): unsure at all n locations
agctttatcattgaataattgactttgaccaaagagaagagagaagaaagaaggaggaagaaaagtcacagtttcctcccttcttcctttccaatagtaatagctgttgctaacaataaaaagggtcacccacacaaccactttctccctcatcatcgctcgctcaatcgaggtcttctcgatttccttctctacaacacaacacaacacaacgctctcttctcttctcttgcaaccaaattacaacttgttccactctctactactctataaggtaagcctttcttttccttctttcactcactcatacataaaaacttttcatcttcgcttcttttcggtggctcttcttctgngtagatccaagtttcaaactttctttggttatggatttggccccgacccaccctttcttc

SEQ ID NO: 281389 - DNA, 408 bp, Glycine max
agcttgttgcataaaaatatattaattgggtgagtgaaaaagttttgatcaatagctcccttgggtatagttcttaggaaacttgcacaaaaaagtaagattgataattagttacgtgacggtataatgtttacttatttgtaagaagagccttagtagcaactttccaaatcacaattctacaaggtgttcatgtgtccaagaaaagtttattctaaaattacaatatgtcagtatgaattcatgatatcatataaatttgatactcacataaagttaagagtgaatgtttgaaagttagcggttagcttatttatgttcagatttgttctgaaaccttctaagacatcatcttataattgttactttgaatatttaaacaataaatataacaccctttgactgccc

SEQ ID NO: 281390 - DNA, 396 bp, Glycine max
  unsure (1)..(396): unsure at all n locations
caagctaacatacttagaaatcaagtgatcatgtattccgaaatatagggggagaaaacggatgcacantttatctataaacaattgtttgttgcttgcttgaatcttgatttcaggtattgtattgtcatcatcaaaaagggggagattgtagatgcaattggctntgatgttntgatgatgatcatgataatgtgttgcaattgatgcaaatgggcttttcaagattaaaattcaagacaatacttcaagattacaaggcacaacatcaagatgatcactagaatattangaagggaattcctaattgaattagcaaaggtttggccaagtgaattanaataaaaagtggttttcaaaggttttactctctggtaatcgattaccagaggatgt

SEQ ID NO: 281391 - DNA, 344 bp, Glycine max
  unsure (1)..(344): unsure at all n locations
agcttgcatttggaattgcgaaagccccactccatcattaggattagtacctgacatctcaaacaaacaaatcaaacgtaacaagacaattatagttgttgtttgaatacctcacccactcaagtgtatcacacaattatggcttttctctaatgaaacactcttgccttttaccactctaattccccttgagttcttaggcaattcaagagattatggccacaacaaagaacaattcaccaatatgtgtcaggtaaggctagagagacaaggaaaaggttaaccaagaaaaaggctaacaatgtattgaataatatttggatgatgtccattangaaatgtcg

SEQ ID NO: 281392 - DNA, 415 bp, Glycine max
agcttttcgattcattctatgtacccgtagtggtccacattgtgttttgtgcatttttattctcgttttgtttactttttataccccctcttgacgtgcttaagccattttacttaagtcatttatcgcttaacttaaaaataaaataaatttccaccgaacgtttgaattgtattatccgttaactgcggttaaaataaattccgaccgtttggtcgtgccgtaaccacgttggaaatcaaaaagaggtaaaaaataatataataatcaaaaagacatcttttagtaaaataaagcggaaaatcaatcggacgttgtctctctgggatgtctcattcttaatcgaattgattaataactaaagtgaaactaaaggctaaaatcaattcgcctagtcaagctcgtcccataaaat

SEQ ID NO: 281393 - DNA, 423 bp, Glycine max
  unsure (1)..(423): unsure at all n locations
gcttggtccccaacgctctgttcaagctttcccaaaatctagaggtgaatctangatctctatcagatactatactagatggctcaccctataatctaacaatctcacttatatacagggaagtcaacttctccaaggaaaatctgatattaataagaatgaagtcagcagacttggtcagtctatcaacaataacccaaatagaatctaaacctctaggggttctaggtagtcctaccacaaaatccatggaaatactgtctcacttccactanggtatctctaaagatagtaactttcctgaaagtctctgatgttctatcttagccttctgacagattaggcatgcatacacaaactcactaacctctctcttcatattgnngccaccaaacatcatctttaaatcctgatacatcttgt

SEQ ID NO: 281394 - DNA, 434 bp, Glycine max
  unsure (1)..(434): unsure at all n locations
agcttatgctgcanacatctacaacagaccttctcaacctcagcagcaaaatcaaccacaatagaacaattatgacctctccagcaacaggtacaatcatgggtggaggaatcatcctaaccttagatggtcgaatccttcacaacagccgcaacaacaaccttattttcaaaatgttgctggcccaagcagaccatacgttcgtccaccaatccagcagcaacaacagcaacagccgcagaaacagcaaacagttgaggctcctccgtaaccttcccttgaagaacttgtgaggcaaatgactatgcaaaacatgcagtttcaacaagagaccagagcttccattcagagcttaactaatcagatgggacaattggctacacagttaaatcaacaacagttccagaattttgacaaattgccttctcaatctg

SEQ ID NO: 281395 - DNA, 417 bp, Glycine max
  unsure (1)..(417): unsure at all n locations
agcttcaacatcagaccacttccagggtgctggaactacttcacatggacttgatggggcctatgcaagttgaaagccttggaggaaagaggtatgcctatgttgatgtggatgatttctccagatttacctgcgtcaactttatcagagagaaatcagacacctttgaagtattcaaggagttgagtctaacacttcaaagagaaaaggactgtgtcatcaagagaatcaggagtgaccatggcagagagtttgaaaacagcaggttcactgaattctgcacatctgaaggcatcactcatgagttctctgcagccattacaccacaacagaatggcatagttgaaacgaataatatgactttgcaagatgctgctatggtcatgctncatgccanagaacttccctataatctct

SEQ ID NO: 281396 - DNA, 400 bp, Glycine max
  unsure (1)..(400): unsure at all n locations
gcttgtatgacttgagaagtttcttcacaggtgtttcttttatacttctcaccgatttgcttccaacgaatntaattctatctaaaaaaatcttcggtccgtataaatgttccttttctttgcttgcttatgattatgggtgttcatacaccgatttggggttatatatctatatatgtatatatatataacaacaaccattctttctctgctgaacgtcttcttttctctctttgatatgatgaaacgcactaccttgctgatatgttgtatttcaatatttggggatcagttctggtcatatattggttgatggatcttgaaatgttaacatatctctttatatttacgtttaacacaatgtcatgtgatttcaacctgctgaaagacatgcatgaca

SEQ ID NO: 281397 - DNA, 421 bp, Glycine max
  unsure (1)..(421): unsure at all n locations
agctntaaccgatcgtttaagccgttttctcacctaataaatgataaaatgaatttcaaccgatcatttgcgttgtaatctcatttaatcactgttaaaacaaaatctaaccgatcgttcacgctgtaacctcagttaaacaaaataaaagcaaaataataataaaataatcaaaatatcttgaaaaaaaataataaaataatcaaaatatctttgaataaaataatcaaaaaaatcaatcggacatttttctttggaagtttccttggatcaattaactaataaccaaagtgaaactaaggctaaaatcaatntacaaatcatagtttgtccgtaaaaatcactaaaagaccatttaaggtccaacgccttagacgggcctctntgcttatatcggttaacatggaccgttcaaaagcat

SEQ ID NO: 281398 - DNA, 412 bp, Glycine max
  unsure (1)..(412): unsure at all n locations
agcttgtatttaanaatgttntanaaatacttttaattaatatttgaatntttattcctttattaatatatatgtgaggggtagagggtgtcacaataaccacacgcagtggttacatagattgtatgttttagttttgttttgctattgcctgttgtttgtggcatttgaggaagggaggactcacccttgcaaccaccattttagggggaggtcatggagcatccacagaggatgttcacttggatcaatagctaccgctacaactacacgatggaggaagaagcgctcctccacacacactttggttacatctggtgccactntntgttgttagatgagcctangataccatcgatcaccgtagagacacacactacgtatcacttgtaggtcttggtaatgacaactc

SEQ ID NO: 281399 - DNA, 421 bp, Glycine max
  unsure (1)..(421): unsure at all n locations
agcttgttaatacttcaaatagatttgacacatttaattaatttatgataccaagttagtaataataaatccttaaaattagaaatgaaaaaatgaattaaatctataaggttgactcatttaacctactaaatggagtgagttggaatttccaaccactctcaaaactagactcaatctagctttttttttttgggaaggtattggttgaatctattgaaacaaaactctttttagaagcttaagttttaatgataacaaacttttaagaagtaaattataagttatctaaagagatggtttgctttgagatgtgttttaataagacagaacttgatcataagcataaagaaaggtgtgaagcctttagaatggaaagtcttttanacatagattcttcctattaaaaataggactacca

SEQ ID NO: 281400 - DNA, 420 bp, Glycine max
  unsure (1)..(420): unsure at all n locations
agcttctcgggtggtgggtttgtacgaccatctctgagaccttaaaaagtgttggtagtttattagatgatagttgatagttgatagttttagagaattattttagaaagaagactatgtcattgattttttggatgatcaattacaacataccaattgcctatttataggctcaagtcaccaacctctcaatggcggtgaatgtttctacattactttaggtctttctagagttttcatgatagtactagattcttctatcttatacatacacttatagttctagattgttctatcatatttatacacattatagttctagattgttctaccatattcatacacactatatttaagaatattctaganatttatagcaatttcaacactcctccttgatgcanatttctgtgactccga

SEQ ID NO: 281401 - DNA, 400 bp, Glycine max
agctctacatcagaatttagtaatgacccactaacctagaattaaaataacttaatgccattaacctagggaattaaaaaaaacttaatggctgagtgtaactgaaattgtggcaaccaaaagtcacccccaacagccaacaagtcagccaccatttggtctcccaaaaggctgatgcctatgttgccaattgggcccttattacaacttgaactaaacctaactaaagcccttttagttgattaacccaaaacatattgttggtcagccaactttacaaggattgggccattatttagacaaactaaacactctaaaatcgagacaaggtggtgtcatttagtcctcctccattagggccatgatacaactcacaaccttggacttttctccttgaaac

SEQ ID NO: 281402 - DNA, 410 bp, Glycine max
  unsure (1)..(410): unsure at all n locations
agcttgtccttaaattcagttaagagcaacgcaaagctcacattatctgcttcaactcctaaacaatccaaaatttttggcttctggttttatgtcaatacatcaaaatcttatgttttacttgtgtcatcatgtaatgcttcctctactattgattccataaaacagaaaaaaaaacactaaaaaatgaaacctaatatcatcaacaacataaaccaaaatttttggctgctggttttgtgcccattccccacatttgatcttcgatgatccaatctacaaatctcccccccgccccccataaaaatgaataaaagaaagaaaataaaagaaacttcagaaaccagttcagaaagaanaaagcgctaaatttaaaatccaattgaaaaattaaatatgaagaaaaatga

SEQ ID NO: 281403 - DNA, 417 bp, Glycine max
  unsure (1)..(417): unsure at all n locations
agcttcccgtcagtgttaatggcggcacccacgtcgganagagaccctgcatgttatttgtttagaaacgaaccccctttggtaaattgtttgtaaaacaagccctgtacggtaaatttgccgtgctttgaactatttcataacaaataaatgaattaaacaaaaacacgtgtggtaaccttcttttcagtctaggactctaagggagccactcttttttccccttcctagtnggatttgttgctctcgaccaaagcagaaaagtaaagctgaatggggaataaggaagcagtataataaggaatcaaaaccaattcttcacatcacatccattggttntttttttttnttgtcctttcgttggttaagaattagatattacatccctttgtttgtagttaaaaaataattttaatt

SEQ ID NO: 281404 - DNA, 319 bp, Glycine max
aatcaatgttggggggtggtgatagatgcacaagaacttaggttcaattgtcgtctcttccactatgagattgaatgtctgatttgagtggatgcaagttcttgttacttcatcctcactaataaatctcacagtagcacgcacactgaaagctcacgtgtactctctgttattgcctgagacaattgttagtcgatgaatacaactagcttctgtgtataaaacatgtgtaaattgaatcaaacctccaccatatatggatgctttgtaggattataaatactttttgttaagtacttgtaatagacacttaatactt

SEQ ID NO: 281405 - DNA, 397 bp, Glycine max
  unsure (1)..(397): unsure at all n locations
agctttacatactcgcctagatctctttctgaaacgcgtctcgaactcggacctccacccggccgagtcaaaggccgagttcgagtccaacgcgctgcaaggccctgttgtctcgggaacgagtcanggaagcggcgagtacttcctccgagtcggaatcggaaagccaccgagtcaagcctacgtggttctcgacaccggaagcgacgtgagctggatccaatgcgcgccgtgctccgaatgctaccaacaatcggatccaatcttcgacccgatttcgtcgaattcgtactctccgatccgctgcgacgagccgcagtgttagtcactgtacctctccgagtgccgcaacagcacgtgcctctacgaagtcttctacggtgacggattctacacc

SEQ ID NO: 281406 - DNA, 432 bp, Glycine max
  unsure (1)..(432): unsure at all n locations
agctntgatcaaaatctaacgacaataactttntactcgaatgtccgattgtctcccattgtatatcgagacgttaaatattcagaatagaagctctgagcaaaatctaacgacaataactttttactcggatgtccgattgtgtcctgtagtatatcaagactctcgaaattcagaactgaagctctaagcaaaatcaaatgacaaaaaaattttactcggatgttcgaatgaatcccgtaatatatggagacgctcgtatttgaaaacggaagctctgagcaatatcaaacgacaataactttntactcggatgtctgattgtgtcccatagtatatcgagactctcgaaattcataacagaagctctgagcaaaatcaaacgacaatanattttaactcggatgttcgaatgtgtcccgtagtatatct

SEQ ID NO: 281407 - DNA, 191 bp, Glycine max
gccggagaggtcgatgatagataagaactaccggactcgaatatgttatgggagattgtgtttttacatggagtactattatacaagacattgtgacactttttacttgtgatgacgagtatgtagctgcaacttcttgcgcatgttatgccgttaggcttagaacatagttggacgaactatagttgttg

SEQ ID NO: 281408 - DNA, 540 bp, Glycine max
  unsure (1)..(540): unsure at all n locations
cccaccgcacccccaatacttatgtgagtattaacaatggtgtaccccattntaattcaggatttggnggcgtttgaagctgtgagacatgaaancaggcgaacactagccccgggatgcattaagacggctgcagtctgttagctnttattataataactgactcaccatatacctagacgctaggtgagaacgacaatccttaccctttgtagcaaataacaagaggacaatgaccatatcccatcatagacgaagcgaaaaaacaagagagatagataatatccgatcaaaggaagaaagagaggaaaggaaattcccatatagagagtgggagaagaacaaaataaaaggaaacaaggaaccgagctcttggcaatgatcaaagaaaacaatgaaataacaataaggttatgggcatacaaaatcgaacaattcgatagtaccaaagaacaaaaaagatatggagccatacctagagtggcatctcctatgataccacaatatctggcgaagaaatatacctttgcgatagaaaaa

SEQ ID NO: 281409 - DNA, 91 bp, Glycine max
atcttacagcgacgcagctgccgctttttggagctaggctttgctcactcactcgggtcataggtaagctcgatctccttgtgaagcttgc

SEQ ID NO: 281410 - DNA, 393 bp, Glycine max
agcttctggctgagaagactaagaagaagctggaggaagctgcatagtcaggaagcgttgatggcgtcatcgaccctccatcccccgtcagacgccacgtgaagtggaagatggcccgcaccaagaaaacaggggagatgacgactgatgccgcaaaggaaattgcttaaacaattgtaagtcattttcaactaaccattataattatatttcaatattttgtgaatgccatgtacaactgtgtcttttctgtgcaggattcctttgaggagcaagtgacacaaggatccttcatcccacatggacgtcaggatgttctcactgctgctattggacgtccagagcaccctgtacgtgttcatgctgctggagccggtgtcaccatcaagcaat

SEQ ID NO: 281411 - DNA, 411 bp, Glycine max
tagcttaacattatgatcaaatttatctgcttcaaccagttacagaaatgactggtcacaaagtaatcactatatcataattgatggataccaatgtaaccataaatgttatacattcacagtgaatgaaagcacctcacaacaatgtaatatatttattgtcacataatcatcaacaatgctacaaatgctgataacacatttactaattctatcgaatacaccaaaattgttattcctaactgatgattaagcctttttacaccgcatttctctatgctcttaaaaataagatgtccatttcatgcgaattgttgtcatggtgtccttgtcaatggcatccatcaccaaaccctacaagttatatatataacagtagtgatgcagataataaattgagtcaactgatat

SEQ ID NO: 281412 - DNA, 322 bp, Glycine max
agcttaaagagccagcatattggtgccatcgccttatgagtatgcaagaacgtattatctaccataaccgagtcgtgatgagacatcataaatcataaataataatagtaattgtacgtagagagaactgcatcgaggaaaacatgatggatgataactcaatgtacatgtggttaactggaattatcatattacctcggcttgagcccaaagattatagatgtacaatgatttgctcgatttacagagcagagagaggacatacctcgatcgtaaaggatacctatggaagaatggatgataggatgactcttatccgacg

SEQ ID NO: 281413 - DNA, 401 bp, Glycine max
agcttgtatgtccttctttggctgtgagaaggagttctcatccattacatttgcagatgtaagcacagtctctgttgacccagataactgcaatgagtttggttccagtccatcaagagagactttgaggttcacggcagtggtaccgaagttcacaacctgcaaaagtcaattgattcagattgatgacagtgctaatgaaagcataaatggatgctctccatttactttatccaccattttctccattcctatcgcttttataagatattgggaaaataaataaaatggaaatgatacacactttatgggaagtaacatttattcttttccaaagcttattgatggaataatggagaggacccaaacccaatgacagcatttagagcacaacaaatcta

SEQ ID NO: 281414 - DNA, 410 bp, Glycine max
  unsure (1)..(410): unsure at all n locations
agcttgtataatggctagacatgatacatgtcanggtttggtttggttcaaggataaaagggatgccccacattatttccatgacacaaaaatgcaaaaatgatgatttggaaactttatgcaaaactggtcatgcatgcacctatgcggacactcaagtgtcaaatttttatggtcatgtgatgctagggctcangattcatttcctctattttaatcaacccaatgtttccaaaatatgttcttttatcaatttgtgcattcatccgagtccatttcgggcgtccgggaaaatcttcacagcattcacccttcaggtgtatacacattntttcaaaagctagttacgatcagtgaatntntccatagaaaagttggaaatcgtctcttttanaagcatgttggtcttt

SEQ ID NO: 281415 - DNA, 430 bp, Glycine max
  unsure (1)..(430): unsure at all n locations
agcttacatatgaaggtcttgtaaaattttctgctcgggtatcaatccaggtaattggatatacccaaacccaatactgaaatctctgatttagtaattggtttctgaggacaaatatgacaaaccaatattgtaacttaattacataagagactaatagatttctatgacaganagaaaacataaagttcttattgaattgatggaataaaaaaagccaccaatgttaggtgagctgaaattatttatacctatacacacaagcacttaaccatagtgcacttataattagttctaacagactagtaactaactgtaaccaacagagaacaaacaaaaaatacatttgcaatgtatatggtaatggacagtattatgcctttgaaagaacatgcaaatacatgtggctgcttagttgtagacatgtttt

SEQ ID NO: 281416 - DNA, 312 bp, Glycine max
tttattgttgaccacagagtggtacctggagatatgtcgcgggggtcaggagaccttggggacgtcaggtgaggtgctattgcccaaaaccaaacttgaccaatcccaacccaacccgggcatagtcggtcagtgagaacctgtgatgtacctaagcaagcgaactcctggcagtcaacagataaaaggaaaacaagaccacaaagcaaggaggcttgtggtggctggccagctgtgaattttgtgtaatatgtggatggtggcctctggtaatcgattaccaaggtgggtatcgattacaggcttaaaatg

SEQ ID NO: 281417 - DNA, 425 bp, Glycine max
  unsure (1)..(425): unsure at all n locations
agcttgaaatgaggaagtgcggaagggtgagacttccttcttttattgttgaccacagagtggtacctggagatatgtcgtgggggtcaggagaccttggggacgtcaggtggggtgctattgcccaaaaccaagcttgaccaatcccgacccaacccgggcatagtcagtcagtgagaacctgtgatgtacctaaacaggtgagctcctggcagtcaacagataaaagaaacgaagaccacaaagcaaggaggcttgtgtggtggctggccagctgtgaactttgagtgttatatggngtatggcatctggtaatcgattaccaagggtgtctaatcgattacaaggattaaaagtgaagacaggaagctaagatggcctctggtaatcgattaccaaaggtgggtaatcgattaccaggctta

SEQ ID NO: 281418 - DNA, 418 bp, Glycine max
  unsure (1)..(418): unsure at all n locations
agctntcccacagtcccaaatgacatttcaaactaggattacctcactctaatctccaattaccactaaatccagatttggcttttcaaatcctcaaagcatcacacttttccactcatatcactacattctcactttttaaccctaggttaactctaccctacatctctatcagttttccatcagccatttcagcacacaagcatcacaagcatcatcataaaaaccctaaaacagaatgggtaagcttgactcataccaaacattagcatgttttcaacaaatttcttcacaaataactatcataaggcataaacctagtaaaactacccatcatacctcccanaacccaatacccacgaaaatntatgtgagaagaagtctacccaaacctgaaatgtgaagtcccacaatggag

SEQ ID NO: 281419 - DNA, 415 bp, Glycine max
  unsure (1)..(415): unsure at all n locations
agcttgtgtattcaatatcttgatgaggatgttccatatgttctcaagactggactaatacatttgctgcccaagtttcattgtcttgcaggtgaagatcctcataagcatcttaaggagttccatattgtctattccaccatgaaaccccctgatgtccaggaagataatatctttctaaaagcttttcctcattctctggaggaagtggtgaaagattggctgtactaccttgctcccaggtccattaccggctgggatgaccttaagagggtgttcttagagaaattcttccctgcatctaggaccactgccatcagaaaatacatttcaggcatcaggcaacttagtggagagagcttgtatgagtactgngaaagattcaagaaattgtgtgcaaactgttctcaccact

SEQ ID NO: 281420 - DNA, 413 bp, Glycine max
  unsure (1)..(413): unsure at all n locations
gaggctntggagagtngaggctctacccacaagaagggtggactcccccncacaacttaaatctctgatttaataatacgtgtctcacgacaaatatcataaaccaatattgaaacttaattacatacaatactattcgactattatgacataaagaaaacatacgatgttcatatgatcgatggaataaatcaagtcacctatgttaagagagctggacttatacatcctatgcccgcgagcactgtacccttgtgaacttatgattaattctatcatacgagctactaacatgagccaacagagcacagacctctaatacataggctatcgatatggaaatggaacatataatgcctttgaaataacatgctaaaacagtgtgtgcttaattatacacatgatctgctccg

SEQ ID NO: 281421 - DNA, 425 bp, Glycine max
  unsure (1)..(425): unsure at all n locations
tagcttattctacacctactagtttattcttaatggtttctaaaataacatcaagcttaaaggggttaaaagccaacacctatattnttgaatgtcaggatacaagtttcaaaactaaaattttacatcttatcttagtcttgtaaaaaaagaccatatatttaattctgaacagcaaagtaatcttagatagaaaaagaataatcggaatggaatgagatataatgttctcataataacagctcacctctgtaacaccaggcagcattattcctcgtcatttaatctccttaatttgtatattatcttttgataaatcaaataggtccctatataagacgatagagttattttgaagacttcanaaatccacattcaaaactactttcttcaatgtttaaagtgtgaggtatagtctcacatag

SEQ ID NO: 281422 - DNA, 415 bp, Glycine max
gaaatagaaccaaaacatatatgtaattaagaaaataacgcatagatgatcaaatattattattttgtgcggtataatcaaaggcatagaaaatgcatacgatgagttgaatccgcagaatcaagcactgtgtattaaattatgtgctacttcacatatagtcgatagtttaatttcaaagagtcaagttttgagctgtgagtattatatacgatgaataaagaataaccggccgttgctcgtaaacaaggccgtacaagtatgctgcagccgtatggcttgcacttataacttcgaactgcgcagtcgaattgcttactgcccacatattgaatgttagtggtacactaatatttcatatcattgacaataattagcttactttggagatgaattaatccttactctatactac

SEQ ID NO: 281423 - DNA, 354 bp, Glycine max
  unsure (1)..(354): unsure at all n locations
agctntgatttttatctacaaacaagctgtgatatttatgttgaacacgtatgttttctttgatttttatctacaaaaaagcttgattgttatctacataaaaactttgggtttatatatgtatcattgggtaactttgttttttcgcaacccataagcttaaatttttttgggtgttctgcctttatattttttttccctttaacactagctaaagttatttgaatgggttatattcttttatttgtctgtccctttagttagacacttccagtttgatattcaaatatatgacagtgctttatatcacatatatgacattctttgtctatgtcttatctttattatcaaata

SEQ ID NO: 281424 - DNA, 383 bp, Glycine max
agcttctgtccctgagaaactggttcccagaagacaacagggagtgaagattgctgaaaaccctagacttgcaacaagttctatggaagtagacacggagatggacaagataatccgcagtattgtgagtagcattctgaaagatgcttctgtgcctgatgctgagaaagatgttccaacatcgtccaccccaagtgtttctgtgcctgatgctgagaaagatgttccaacatcctccgctccaaatgctgaagccttcccttcacccagtgaagaggaatcaacagatgaagaggatcaagccgcagaggagacccctgcaccacgggcaccagaatctgttccaggtgacctcatcgacctggaagaagtcgaatctgatg

SEQ ID NO: 281425 - DNA, 382 bp, Glycine max
agcttgcctcaaagaggtccaggaaggacaaggcggccgaaggaactagttccgctccggagtacgacagtcaccgctttaggagcgctgtacaccagcagcgcttcgaggccatcaagggatggtcgtttctccgggagcgacgcgtgcagctcagggacgacgagtatactgatttccaggaggaaatatggcgccggaggtggacatcactggttactcccatggccgagttcgatccagaaatagcccttgagttttatgccaatgcttggccaacagaggagggcgtgcgtgacatgagatcctgtgtaaggggtcagtggatcccgtttgatgccgacgctatcggccagctcctgggatatctgttggtgttgga

SEQ ID NO: 281426 - DNA, 405 bp, Glycine max
  unsure (1)..(405): unsure at all n locations
agcttttattttgatgataagtttagatatcctgagaattctgctcatggtcaactcccaagaacagtggatgtaattgcagaagacgaccttgntgattcttgcaagcctggagatcgagtggcaattgtggggatatataaggctctagcaaggaagaggtagtgtgaatggagtatttaggtagctccagacaatatactgacataactcctttgcacttgcttgctttcttgaacagaaacttgattgactgattntcatgtangactgttctcatagccaacaatgtttctcttctcaacaaagaggataatgcaccaatctacagtgttgaagatgtcaaaaacattaaagagatagctactagagatgatgcatttgatctgctaagtgattcacttg

SEQ ID NO: 281427 - DNA, 423 bp, Glycine max
  unsure (1)..(423): unsure at all n locations
agctntagtcaaacagaataatccgaaaatgtcaaagaattgggtgttgaanaagcataacaagactttctgtgattggtttaaagatacaatctttgcagatgagaatgcttcagaaacattaagaangctagcagatgggcctaaaagaaatgttataacctggcaaggatacgacataaacaggtattcattttacacaaaagcacaagatgacaaaagtacaatgcagaacagcggggtcaccctaagggctgaatctcaacactttgcaagtgtcaatgatgccaatccctgtgtagcttccatcccttactttgggttcattgatgaaatttgggagcttaattatgtgaaatttacagtatgtattttcaaatgtanatgggttgacagcaacaccagtgtgcgcaccgatgatat

SEQ ID NO: 281428 - DNA, 344 bp, Glycine max
  unsure (1)..(344): unsure at all n locations
agcttgaatggatgtatcttccaaattaaagtaatgaaatgtagagaaaaggaacatttgcaacataatgagaagataatttgcagtctaacactcaaaccacttttataatacttgatccgtttcagaatatgtcattcaagataattgcacaaagattaagaaagccactaattagtctcaattatcataaaatataatttatttcctttttatcaaaatattggcactcctgactccactaatgccattgctatctctcattccacttggtagagataagagagacaaagatatagttgggacaanaaaaattcaaactttaattttctaaaatgacagat

SEQ ID NO: 281429 - DNA, 314 bp, Glycine max
agcttggcttagcgggaaaggatgcgctaagcgccaatatcattctgttttgaagtcattggaagtgcgcttagtgcaggtagtggcgctaagcctgaatcactcactgtaagttgaagcttgatgtacgctaagtcttgcatctcaggctaagtgcatattgcagaaagatttttggtgttgcagaaagcgctaagtgttgttgttgcgctaagccccaaatgcttactggaagttataacttcaggttgggcttagcgcgaggctaggctaagcgctagtgtttcaaactcaaatgtcacgttggcacgcta

SEQ ID NO: 281430 - DNA, 433 bp, Glycine max
  unsure (1)..(433): unsure at all n locations
agctnttcataacactgaatttgatttctgataattgattactaaggtcacaagatcatatgaagggggtaggataaaatcagtttatattatgaagtggataagaaccacagtacatacataattcacagaaaaatgtctcatttaaatctacaaggcaaaacaacatttatcacttatatttcatttgccataataagtgacaaaacaaattatgactaanaacataatccagacagacaataatagtcttgagggaaccaatatcaatatcaacatacaacacacttgggtaaatcatcaagctagcataactacaaaaccaaacatggtgtggttgtcattatgaacctttaatttcaaaacanaaatgaaatatgannagtggataatggcatatgaatctcttcactgtaacaactgaccaaactac

SEQ ID NO: 281431 - DNA, 430 bp, Glycine max
  unsure (1)..(430): unsure at all n locations
agctttctcataagtcctaaatgacatttcaaactaggattaactccctttaacctccaaataccactaaatccagatttggccttccaactatcaaagcctcactctttttccactcataacatcacattctcactttctaaccctaggttaactctacccttcatctctagcagttttccataagcaatttcagcacataaacatcacaagcatcatcataaaaaccctaaaacagaatgggtaagcttgactcacaccaaacatgacaagtttaacatgctttcatcaaatctcttcagaaataactatcataaagcataaacctagtaaaactacccatcatatctcccanaacccaatacccacgaaaaattatgtgagaagaagtctacccaaacctgaaattntgaagtcccacacgtagaga

SEQ ID NO: 281432 - DNA, 368 bp, Glycine max
tgatggattgcccagtgcatcaattccttccaagtagtaaagttaaaacggaagtcccagtgtcgaattcacatggactttgcttataattaggtagatgaatattttattaatacaagaaccaaagaaaattgtgtgaaaaaggctatgaaaaaaatagtaatttaaaatgatagaaaattcaatccaacaagaagttgattaaacaagaatctaaattaattacttaaaacataactgagaagaaaatccagttattatagaagttaaattctaaagatgagaatgttgggaacttagcctactagagctactatttgatgtgatgttcataatttttctctatgtatagatattccaatttacac

SEQ ID NO: 281433 - DNA, 414 bp, Glycine max
  unsure (1)..(414): unsure at all n locations
agctngcctggtacatcactcttaggtggtgcattcatcttaccaagcccctcattgagcagtgtgttaggtacttgttcccaggttcaacaacattaacaactccatactcaagtttccttatatattctcccatgcttttacctccaacgcatgcataagcttgtatattgatgaatgcccaatagccaatataaccttctcagtttgtgaggccaattcccttgttagtgacattgttaaagcatgaaaccctgtcaaaaattaaaaaacaaacaccccatgtaaatacctagacaaaaaaatctaanatataacgcactcagttagatgtgaagcacacacaaccctttaacaatacattcttagaatatgtttgaatggaggaatttagagagaaatagcacanatgat

SEQ ID NO: 281434 - DNA, 421 bp, Glycine max
taagcttgagtagtaaaatgtttcaaatcctatacatgggactgctacagattgtcggtaacaagtatttgaaatagtttagcgcaagattaaaaaatctatgtgggatacagttacttctaatggagcagatgattttgaaatgactgtctagaatttcataactattattttatcacttaatcagagcccaaatcatgtttatcaatttttagattcttaactagaattagttatagttttgattacataagagatccttacaaatttaatctctcattcattataattatataaagtttctgactgaaaccagcaggaaaactctcgatccttgaaacaccttgcggatgaaatgagtggtccattatctccaatgtcacttcctgcaccaaagcaactcatattcactcctggagtt

SEQ ID NO: 281435 - DNA, 391 bp, Glycine max
  unsure (1)..(391): unsure at all n locations
agcttgaatgtcgcttttgttaatcaagtgttactttatgcatttgtagatattaggctgctgtcgattattttgcattgcgatgaatgagtcagattccgaagcattgcatccagaaaacgaattatagaataaacgctttcactgtacggtccttattcaagagtctttctaacaatgagtagtagtatattaaacataattcactataaacatattttgactctcattataattatcatgtaatgtaatagaaaaaaactattccaaaataattattattttaacatcttactataatattaattattctttcctttatataacttataatattaatgattgatagtaaaatctataaatanattaataatgacaaaattaatttcat

SEQ ID NO: 281436 - DNA, 407 bp, Glycine max
  unsure (1)..(407): unsure at all n locations
agcttgtcatttatcattactcactcagtgtctctctccattattcataggtcaagtcattatgatgtattaaaatgtttcattgcatcgcgatgatttcgacacataattgtgtctatgatattttatggcgcgatcaccctaagagatgattgagttgggcctaatgtaataagacagtgatcagactaagaccttgtaaggaagattgtggatcagaacataatccgatcttagagggtacatagtccctcagcctcaaacaagagatgtgcagagactaagtgtgttgagatggaaatacaatctgatccaagagatacacagccgcctagtctcagtatgagatgtatagagactaatggtatagggattagagcacgatcctatcangggaggtacatatt

SEQ ID NO: 281437 - DNA, 401 bp, Glycine max
agcttgtggcttgttcaatgcttcgagcttaaaccttgaaggcttgctgcctctgaagtttcttctgtgagcgtagaactcgctcatgggcttggaagtaccggagtggctgtaccaagcttgtgctacggctatcagaacttgcaagtcttgtggctcgtgttggtgttcgtggatctctggactcttcttcatggcactgagaaaacgttgtcttcatgaggaggccatggttatgttagatactatcgtggaaggaaggcctcacatctgacatatgaagcagacgcaacttctttctcctttttctgtcactgggaaatatgaatgcattttgtctttgttatcctaattcttgtgaccatgaggttatatctgaccttgagtaacataataagaat

SEQ ID NO: 281438 - DNA, 410 bp, Glycine max
  unsure (1)..(410): unsure at all n locations
agcttcaacatcagaccacttccagggtgctggaactacttcacatggacttgatggggcctatgcaagttgaaagccttggaggaaagaggtatgcctatgttgttgtggatgatttctccagatttacctgngtctactttatcagagagaaatcagacacctttgaagtattcaaggagttgagtctaagacttcaaagagaaaaagactgtgtcatcaagagaatcacgagtgaccatggcagagaggttgaaaacaacaggtttactgaattctgcacatctgaaggcatcactcatgagttctctgcagccattgcaccacaacagaatggcatagttgagaggaaaaacaggactttgcaagaggctgctagggtcatgcttcatgccaaagaacttccctat

SEQ ID NO: 281439 - DNA, 389 bp, Glycine max
  unsure (1)..(389): unsure at all n locations
agcttgtatccaatagaagagaatgagcatgtgattgaaagtatgactganaatgttagtcagattgtcagattgattgtgaaggaatgcattaaccatatcccaatgagagtgtgatctttaaattttgagagaaacgaatgtcatttagtactgatttttgcgtgaatctctgaagtatggactgaatgcatgaaattgatgatgatgaagcccatgtttgattgtgatagccacttagccaaaaagctaaccatgtgtttgaatgaattatcccttgtactcagtttgagctaaatgaattattggttgattgaaccctaagcctatacagtgttatctcctgctaccttgacttangttgtaggaaagcatcatccacaagaagc

SEQ ID NO: 281440 - DNA, 426 bp, Glycine max
  unsure (1)..(426): unsure at all n locations
gctcaattgcttcaggttgctgcattgaagggcaaaggtctgtatggtggtcaacaaaagaacaccaaccacaaacccttgccacaaggacagaattctgaatcaagggccacttggttaccaaagtaaccaatggcatcaggttggcttcaagcttcttaatttcagatgatgcagatggggttgtaactaccctcatgcactcctttaatgactatggcatcatttcttgcgcttaactgctgggaggttgaagccatcttctcaattaaatntcctgctttcacangagtcatgtctccaaggctccaccactggcagcatctatcatacttctcttcatattactgagtccttcataaaaatattggagaaagaagctgttctgaaatctgatgggtggggcaacttgcacatcagttcttn

SEQ ID NO: 281441 - DNA, 433 bp, Glycine max
agctttggataaccaagcctatcagaatgctagacgaaatatagatgggaatagatgtaacaatggcggtaatgacggaccgaggcataaccgggttgagggagtaaagctcaatgttcctcccttcaaaggtagaagtgatccaaatgcctacctggactgggaaatgaagactgagcacgtatctgcctgcaatgactacactgatgcgcaaaaagtcaagctagcagcagctgaattctccgactatgcccttgtttggtggcataaataccatagagaaatgttgatagaggaacggcgagaggtagatacatggactgagatgaaaatggtgatgagacaaaggtatgtgcccactagctataacagaaccatgcgacagatactccaagggctgtcccaagggactctaaccgtcgaagaatattat

SEQ ID NO: 281442 - DNA, 424 bp, Glycine max
  unsure (1)..(424): unsure at all n locations
agcttgcaaatctgttntaagtccaagcccataaataaaataaaatctgggcaagataagataagatttgataaaataaaatctagatgaaataaaatttagataagataagataagataaaatctagatgaaataatatctagatgagataaaatctggataagaaaaaatttgataaaattgtctgctttcttcaagtctaagcccaattccagattcaagcccaattgcttacaattctcctgaaattaaattaaaaacacaaaattagtcaagtaggcccaaatgataaaactgcataattaatttgacaattaaggctaataagtaattaaaatggtgacaaaaagggttaagaaataggagaaaatgatgacacatcacacacctaacatgcataatctaatctttnttaatcactag

SEQ ID NO: 281443 - DNA, 371 bp, Glycine max
  unsure (1)..(371): unsure at all n locations
agcttgcctcanagagatccaggaaagacaaggcggttgaaggaaccagttccactcccaaatatgacagccatcattttaggagcgctgagcaccaacagcgcttcgaggccatcaaaggatggtcattcctccgggagagacgtgtccagctcagggacgacgagtatactgacttccaggaagagatagttcgccggcggtgggcatcgctggttacccccatggccaagttcgacctagacgtagtcctcgagttttatgccaatgcttggcctacagaggagggtgtgcgagatatgcgatcttgggtgaggggtcagtggatccctttcgatgcggatgccctcagccagttcttgggataccct

SEQ ID NO: 281444 - DNA, 400 bp, Glycine max
  unsure (1)..(400): unsure at all n locations
agcttctatataagctgaaccattttatcaataaacacaagttgagttttattcagaaaattagagtttatctcttttatcttagtgagagtgattctcctaaattcttgagtgattcaagaacaccctggctgtatcaaaggactttcacaacctttgtgtgttgccctcgctggaaagagtgattctttccttcctttcatcttcaaccttgttctttcaaaccacaattccagaaaatccacttatgcccagaattatctcgtggccataactcccgttttacgcactcaaattaagtgattcttgagcctaaattgaatttcaagacgagacatnttcacctcgtttggaatcacctcatttggagccctgtagcttggagttttgccatttctat

SEQ ID NO: 281445 - DNA, 402 bp, Glycine max
  unsure (1)..(402): unsure at all n locations
agctntaatttcaaagtattttttttttaatttctcatttcagttactctctattcatatttaatttattctttatgtgataattagattgatggtattaaaaaaatgaagatgacaattttaaatcatcataaaatgtaatgacattagcatgtccttaatgccctcattntatttcagatgccaagatcaaattaaattaattttaaaaattaaaagacttaattgaacataaaaaataaattataagacaaaaacctaataacttattttttgtaatatttcattnttttcatattactaaactctcctaagaaaatgtaggttaaagtaacgttntaaattttctaatccttaatttaattatgggttcaagaattgtagataccaatttaatggtat

SEQ ID NO: 281446 - DNA, 411 bp, Glycine max
  unsure (1)..(411): unsure at all n locations
agctnttccttaagcttcaagatttagccttaggttgttcactatgtttctcatgttgctccccttatctctaacacatggaactaagggcgacctctagccttagtttcatattcagactgaaactgacgagaacctctccatgaatttgtggagtgactcatcttcgtcctgctgaatgtttgtgagtgcaactataggcaagtggtgtgctttactcatcatgtactgngctccaaaatgcacaataagtgtcatgaaagaatctatcgagttccttggcaaacgaatgtaccagtggagtgttgaaccccttaggttcatcangaatacttggcacattatgacatcatcattcgtgaatagattcatttgtgtaaccgatgcatctatatgctcctctggatccga

SEQ ID NO: 281447 - DNA, 325 bp, Glycine max
agcttgattgaagttgtcaaattgacttgtttcaaaagcttgagctcaacttaattagttcgcttataacttgttgttttcttttcctacatctaattttccttgaagtagttttttgtttattaatttactatttagttgattacatatcattatgctaggaaaaggatagtaatattactcttctaaagtatggttattgaaatagtactagtatacagcatgaaaccaattaaatcaattagactgcactactaagtaatagcatgacataaagtatcattagtattattattattattattattgtgaatacattgtctta

SEQ ID NO: 281448 - DNA, 410 bp, Glycine max
agcttcgttgcaagccagtggttggaggagaaggctggatgatgaagttgatttgtggagtgcataatcatgaattggccaactcattagttggacatccatatgtagggcgattgactgaagctgaaaaaacaattattactgatatgacgaagtccatggggaaaccaagaaatattctgctaactctgaaggaaaacaatgctaatagttgtacgatcattaaacagatatacaatgcaataaatgcatttcgttcttccataagatgaagcgatattgaaatgaaacatttgatgaagcttcttgaacgtgatcaatatattcattggcacagaataaaggatgaagatgtggttcgtgatatcttttggtgtcaccctgatgcagtgaagttagtcaacgcatat

SEQ ID NO: 281449 - DNA, 411 bp, Glycine max
agcttcattgcctaataggtcagcttacaaaagcaatctccaagagactcagcataaggatgcacaggctaaagttgagtatgtgaaaagattgcatgaccaagtgaaggcacaaattgcaaagaagaatgaaagctatgccaagaaagctaacaagaacaggaaggaaatgatacttgaaccaggtgattgggtttgggtacacatgaggagggagaggttccctaaacaaaggaagtccaaacttcaacctagagaagacagacctttccaagtccaatcatgttttcttattaattagtgaattatttaacactaatagggcttacaaattaagctctgtgtagttctcatgtgtgttataagcttatagcctttaggaatctgagaacacaacttgaaatgatatat

SEQ ID NO: 281450 - DNA, 410 bp, Glycine max
  unsure (1)..(410): unsure at all n locations
agctntaacaagtaagttgtcctttntttttttattaaccacctatcaagaaaaagttgatgcatttctttctttaaactgttttcttgcattcttccttgttttctctgccaaagcatcagctactctctctaaccaccgcactgtcaaagcacaccaaaactgtgtgcaatttaattatgcaacaatgactctcctccctttcctcactttcaatatttgtcatcaattntagaatttccttctgtttggccatgctgttgcgaaacggtggcaaaaaaactctcattcgcagcgttagaaaactctcctttgaggttctcacctaaagcccctccgctgaagatgaatcggatcccgttgattctgtcaacccgcattctgcaagaaggtgagtgaagcgaatgtat

SEQ ID NO: 281451 - DNA, 357 bp, Glycine max
aaaaatgattgatgttaaaacttcagactaaaagtctaaagaataaatttttcacatttaagacacaaaatatgagaaaatattatcactgttagcagtttacgtacaaagtaatcaagcctgccatgttccccagaaaaggaaagtcctggctaggactttctatatcactgattcttctgtacaaagatgtgctaccatgagccagaataaaaatatgatagacaataatgaagtacaaaatatatcataacaagtaggactacaaagaaagatatacgtacagctggtctaagttattcaagagagagatatttgatggaatgggtccctctaatccacttccatgcatttctc

SEQ ID NO: 281452 - DNA, 283 bp, Glycine max
gattttggataaaataaaatccaaataaaataaaatttggtagaataaaatagtctactcgcttcaagtccaagcccaattctggattcaagcccaattgcttataattctcctgaaataaaattaaaaacacaaaattaatctagtaggcccaaatgataaaactgcataatcaatttgacaattaagacatatcagtaattaaaatggtgcaaaaagggttaagaaatatgagaaaataatgacacatcaaaaccccccatacttagccttttgcactcct

SEQ ID NO: 281453 - DNA, 350 bp, Glycine max
  unsure (1)..(350): unsure at all n locations
agctttagctgttatgttgttcaccatgttgttcatggttgcttcccctttatctctaacanagtagggtggttgtcnggtattntgaggaaattaagtgatagtgtttcaacccctcgaaaattggcaaacaacaattttatatatagatttctaatactaacatttgaattaaatgatttggacatgtgtatggtgatattcctaaatacattaatatgacactagtaactgtctttgtataacttctttgcaattgtgtgaactggtacttcaattataaaaaaagaccttgcttccccgcacttaccaatctcacatgcctaaatgaaattatcaaaattattaat

SEQ ID NO: 281454 - DNA, 446 bp, Glycine max
  unsure (1)..(446): unsure at all n locations
ntctaaagttttctggttttccaaaccttgaaaataaaagtttgttattcatctttntcattcccttctccctttgccaaaaagaattcgccaaggactaaccgcctggattctttttgtgtctctcttctcccttttccaaaagaactaaggactaaccgcctgaattcttttgtgtctcccttctcccttgtcaaagaattcaaaatgacacagtctgagaactcttttgattcttccctttcccataaacaaaagatttcaaaggactaaccgcctaagaattcttttgtttcccccttcacaaagtttcgaaggactaaccgcctgagaactttgtcttaacacattggagggtacatcctttgtggtacaagtagagggtacatctatttgggttattgtgactgagaacaagagagggtacatctcttatggatcagttc

SEQ ID NO: 281455 - DNA, 338 bp, Glycine max
  unsure (1)..(338): unsure at all n locations
agctggtggttataccttcaaccgaacacggccgngtgtctgtttaagcccggattcaaggcgggctgcagcaccggcttccggttccctaattgtactggaggcagttgcngtggctatatcctctatggttttctggagttttaacatgacctccgagatggaagccacttgatcttttaaggccgatagatcggccttcatttgttcctgcacgccctcttcattatccatttttctggatcgagtgttataagggtgccttggtgttttcttagttatgatgaaattcctaaagaaataaacaacggtgagtatgccaccaaaacatgaatatg

SEQ ID NO: 281456 - DNA, 396 bp, Glycine max
  unsure (1)..(396): unsure at all n locations
tttaagacaatttttcctgaaatttgggggagttggtttgatggataattntaaaggtaagaaacaacaacacacacaacaaattaataaaatgttttatgtgttaaaaaaaaaggagagaagttcaaataaagtgtgtgtgctgttagaacaaagtcaagtgaaagactagtgagtaagctaagtggattgaaaagacaaattgggtaagtctaggatttgtgctctcttagaattcaagcttttgcatcctagaaaaaccaatattnttttgtagcccagcctcactacaagctaataaaagtccttctgattcaatttgtgcatttcaaactntatggcatgagatgaagtacaaagattggacctcttgttagttattattgctaaatagct

SEQ ID NO: 281457 - DNA, 215 bp, Glycine max
acattctattgccgggtcgatgactcactgaatcgaacatattctccacgtttgctatggagtgtaagctccacttgaaacgaactgactgaattatgggagcgattgatctaatccctattatgtatgaaagctgcgactgtgggcatcaaggactccttgtaatgcctgacatcgtctgataatcgactacacttatactgactcgctatgat

SEQ ID NO: 281458 - DNA, 313 bp, Glycine max
agctattagtatattcaaacgacaccaactttagacgcggatgtctgattgagtcccgcactatatcgagacgctcgaaatagaataccgaagcgctgagcaaattcaaacgacaataactgtgtactcggatgtccgattgagtcccgtcgatatcgaaaagctcgaaatagaatgttgaagcgcggcgcaaagacaaacgacgcaaacactttactcagatgacagatcgaggcccgcaatatgtcgaaacgcgcgaatgtgaaagtcgaaactctgagcaaattcaaacaaccataacttttcactcgga

SEQ ID NO: 281459 - DNA, 432 bp, Glycine max
  unsure (1)..(432): unsure at all n locations
tccacaacatccaggtaattccacatgcaatcatcatggtctcactttaccaagcaaaacagggcaaaggcagaaaactctgcccaaaacacaactcaaaatcacagcttttcacatacaaataccccagtaacgtttccttcgttccaattcgttaaccgttggatcgactcgaaaattttactggcagtctctagtacataagtctacattttgaccgttgggatctgctagcaaatgttcagaacccgatatgtactacccttttcacaaccagccatacacaagcatttttctgcacttatacaaaattctgttgcacatttcaacagcanaattctgcataaagtgcagatttcgaaaactactcttgccttcatccaattttgcccaaattgaatcctacaagtcccaaatcatgtaccaatcatg

SEQ ID NO: 281460 - DNA, 438 bp, Glycine max
  unsure (1)..(438): unsure at all n locations
nggataagattatacggagattatggagggactnnngactactttctacaatnatgcataaaaaaaggtgtctgtcattcatctcaaactactgtttatgtatttttatgcatgcaagcactcacgtgcacatatataagtngttgactagttattaattttaattaaaacataaccatatactataatttcaattatttattgtaaaactaaaataaaattatatatttaaaaatatttatttattataattataaatatataaaaactgtctatcaacttgtggaatgtataaactacaagttagtatattaataaagagaaaatatacatataatatataatctgagacatgatattttgtcaatgaaaactaataatataaaagtatgtgattttttattggaataaaatatatagtttttaataaaattatat

SEQ ID NO: 281461 - DNA, 331 bp, Glycine max
acagagcggacctagagagatgttgcggtggtcaagagaccctgcggatgtcaagtggggtgctattgcccaaaaccaagcttgaccaatcccgacccagcccgggcatagtcagtcagtgagaacctgtgatgtacctaaacaggcgagctcctgacagtcaacagataaaaggaacatagaccacaaagcaaagacgctggtgtggtggctggccagctgtgaatcttgtgtgatatatgggttatggcctctggtaatcgattaccaagggtgggtcatcgatcacaatgcttaggaatgaagacaggagactaagatggtctctggt

SEQ ID NO: 281462 - DNA, 322 bp, Glycine max
  unsure (1)..(322): unsure at all n locations
agctnnattattcaatttcgagcatctcgatataatacgggactcaaccagacatccgagtaaaaagttattgtcgtttcaatttgctcaaagcttcaacattcaatttcaagcgtctcgatataatacgggactcaatcagacatcggagtaaaaagttattgtcgtttgaattgcctcagaggttcaacattcaatttcgagcgtctcgatatatttcgggactcaatcagacatccgagtaaaagttattgtcgtttcaattggctcagaggttcaacatttaattttgacccgtccgatatattacgtcactgaatcg

SEQ ID NO: 281463 - DNA, 415 bp, Glycine max
  unsure (1)..(415): unsure at all n locations
tccaggaatgacaaggcggccgaatgattatttccgctccggagtatgatagtcaccgctttatgagcgctgtacaccaccagcgcttcgaggccatcaagggatggtcgtttctccgggagcgacgcgtccagcttatggatgacgagtatacagatttccaggaggaaatagggcgccgacggtggacatcactggttactcccatggccaagttcgatcaagaaatagtccttgagttttatgccaatgcttggccaacagaggagggcgtgcgtgacatgagatcctgngtaaggggtcagtggatcccgtttgatgccgacgctatcggccagctcctgggatatccgttggtgttggaagagggccaggaatgtgagtatggccagaggaggaaccggtcggatgggtt

SEQ ID NO: 281464 - DNA, 428 bp, Glycine max
  unsure (1)..(428): unsure at all n locations
tctacattcaatttcgagcttttcgatatattacggtatttttatcggacatccgagtaaaaagtgattgtggtttgaatttgctcacggcttcggtattccatttcgagcgtctcgatatattacgggactcaatcggacatccgagtaaaaagttattgttgtttgaatttgctcagagcttcggcattccatttcgagcatctcgatatattacgggactcaatcagacatccgagtaaaaagctattgtagtttgaatttgctcagggctccagcattccatttcgagcgtctcgatgtattacgggactcaatcagacatccgagtaaaaagttatagtcgtttgaatttgctcagagcttcgacattcaatntcgagcgtttcgatatattacgggactcactcagacatccgactaaaaag

SEQ ID NO: 281465 - DNA, 321 bp, Glycine max
agctttgtcatatgatttatatgctccagcttgagggggagtgttgaatgttgaatatttcttttgtattttagctttgtttggtagcttaatctgtaagccttattcagaaggcagcagtgagatgtcactgtcatctctcctctctctttttttgtatcctatatatatgtaacattttgaatctaataaagatgtgacagaaagtgaggttatgactcctcctcaccttcatttcaagtatactcatatatgtaacgtgtgaatgtttggtcctttatttggtattttaccaggagttctctaacactttcatgtcta

SEQ ID NO: 281466 - DNA, 435 bp, Glycine max
  unsure (1)..(435): unsure at all n locations
ccctcgttaatttgtatatttttattcaatgacaaattttatttatggtaaagccgnnaatcatgataataattactttctttaaaaaaaaactttgataataattatcttaaaaatcatataaataattatatgtaactaattgatagtgtaaaagctattaacctaacaatacatgcttattaactcttaaaaattggtaaaactcgctagaaaacccaatcataatggttgaaaaaagacgaagaactaatattgaataattggccggcttcaatggtttcttttcatttgtttttatcttttatgatatttaactcaataaaaaatactttgtaactagaaaaaggttaaatgtcaagttacaaaaggctgtgtctgagaattacgtataaaatattatcatttaccatattattattacgtagttatcat

SEQ ID NO: 281467 - DNA, 244 bp, Glycine max
caccgctagaatgcagactctctttagtactctgactcgcaaggggtgtgaatgcaaaacctatgggccattccaagcacacctactactttgtggtagtgggcctttgaatggggggaagggataaaattcatcttaccagcccccacaaatgagaacggaaagcacaagaatgatcacattttaaaatacgatgtaccaaagccacttggattaccaaactgttttatttcattgctctaat

SEQ ID NO: 281468 - DNA, 389 bp, Glycine max
  unsure (1)..(389): unsure at all n locations
ggctaagattttaattacttcatccataacatcaaataagctagaaagtcttccacaatattcaaataaaatatatttgattatttaaaaaaatatacataaaacacattcccaatgtaagtacataacactagtcatatatcattaaaagaattaagtttaaaacacataatcataaacaaccaagagcaagtcaatataatcatcatgttcagtcatactaaacaagtattaaaagaaatactaagtattcaaatgtcataaaaatatagtcaaatacaaggcttaaaacaaaatataattataatctaaatctattatcagagaatcaacttaattctaagtaacanaaattagttatgaacacatacatgataactcattactta

SEQ ID NO: 281469 - DNA, 314 bp, Glycine max
  unsure (1)..(314): unsure at all n locations
tgaggtccttcaacggtgattttcagccatggagtnngtgnngtaagataaaggaaaagacgtgagatgagactgatcgangccgtacccgaatcatataaacatgagaatgcagtaactaggaagtgatcctaggtcgtttcccaacgagcagtgacaaaccaaatgttcataatatacttgcagtaacagtaacgattggggggggggtgtttggactccctccttatgccgattatcccctgcnntaagactatgaagaagatgcccgtttatgccctttactgcccctcaaggatccggcccctcatgaa

SEQ ID NO: 281470 - DNA, 331 bp, Glycine max
  unsure (1)..(331): unsure at all n locations
agcttggatttttgcttcaatggaggaaaaganagagggagagaaagaaagaagggggaacacgaaattgaaagaataaaagagggagagaagtagaactttgaagtatgtcttacaagactctcattcatcaatgttacaacaagtgttacacatgcttctatttatagactaggtagcttccttgagaaaacttccttgagaagcttctttgagaaaacttccttaagaagctagagcttagctacacacacccctctcataactaagctcacctccttaagaagattcctaaagaagctagagcttatctacacacacctctctatta

SEQ ID NO: 281471 - DNA, 393 bp, Glycine max
  unsure (1)..(393): unsure at all n locations
gcatgcacaagagnctggccggggcttgaagctgttgcatgtctacgaagttctagagagagaaaggcccaagttccaaagagttctgagagattttgctgtgtgaagatctgcagagacgagagctcgaagtggaagccattctgaaagcttgagaagagtttatgagtgattgtgagatcctagaggtgaaggagacatcctcaccacttgtattttcgcaatctttcattntgctcttctttgtgttgtaaaggacgtttccagactatggaaagttaaatcctctattggatcttccctgtaggtacgtgatgtaaatatatttctatctatgtaatgatgttctgtgtgttctctgcgctatctccttatcattcatgtatgccttta

SEQ ID NO: 281472 - DNA, 56 bp, Glycine max
agctttatttattacaaagaaattaaagatattcaagatggatgataaagacagtc

SEQ ID NO: 281473 - DNA, 388 bp, Glycine max
  unsure (1)..(388): unsure at all n locations
atcttggaagctagacttcattgcatgttgtgttgatgttcaaaatttcatagctactgccttggctagaactatgtgatatgttgtttttcttgaagttttatgtttaaaaatgagttcttaggatgtcaaaactttgagttagccttaaatttcacttaaatcgaagttttctagcaaaagtgaaaaaacaaaaacaatttaagcatattttgtaggattaaatttgtcacaaaattaaaatggtcataatggttgtatggactaaatttcttaaatatttgacttcaaaaatgagtttgttaggtgtgaaaatcanggtactatcagaccctaattctatcaggacaagtttctcaagaaaacaaaacaaaacanaaaataatga

SEQ ID NO: 281474 - DNA, 356 bp, Glycine max
atcaatacagagcaggcacttgataagaagattgatgcacaaaacactacagtattcagaagaatcaccagaagacatcctactgaagaacaatctttaaaagataacccattaccagctcaagaagatatcatgaggcaaccactaagacaagataacaagcattaacaactatatttcaaattcaaattttgcaagctgtatagtagaaaatagtggaaaaatgtagcacccgaaggtgagaagctggagaagttggaggataaacaattgacatacagatagatgaaagggaagctcatgcagccgtgaatgtgttcgaaaatccctctaacatccatatgttggaacaaaat

SEQ ID NO: 281475 - DNA, 396 bp, Glycine max
  unsure (1)..(396): unsure at all n locations
tctgatcatcctgcattgatgaatacgaaaattgcggcacatgaaaaggatgagaatgagggagaaacctttgctatgactgccattcctacacggtcaaatttcctgtcagcccaacaatgtcattactcagccaataacagttcctctcacccaataatccacaaaggccatccccaatcatccacaaagcctgcccgctgcacatccagtgccaaaacaccaaccaaaaaggaattttgtagcaaaaagcctgtaggattcaccccaaattctagtgtcatatgccaacttgctcttatatctacttgataatgcaatggaagccataacccctgccagggttcctcaacctccattnttccgaggatacgactcgaacgcaacatgtgcata

SEQ ID NO: 281476 - DNA, 98 bp, Glycine max
  unsure (1)..(98): unsure at all n locations
catgaacaaaagaggnnnncacatcccaangccgcaactcaagggcaacatgagcaactaatgtcaagattatacgaagtgaatctttcttagatact

SEQ ID NO: 281477 - DNA, 396 bp, Glycine max
actatagaggataatgccatggcgactgcctctaatatttctagggaagtggaaccggcgctgcaacccgcaataaacttaggccgatatagaaacacgacggtgttcggtcggaggtatagtcctcaagcttaaccttatggcttgcctccagacttcactccccgtaccgctccagacgatttgaaccaagcccctaccttcgaggggcaactccctccttatgccgattatcccctgcaagaagacgatgaagaagatgcccgtctaggccctctactgcccctcaaggatccggccccccatgaattgccccaaccaaacatagtccgccatgtcccatctccacccgcacccgttaaagaatctgttccctttgcataagatacggaaaga

SEQ ID NO: 281478 - DNA, 303 bp, Glycine max
aatcaattagcggatgattttttcaaaaatatcctcaacaggcacatgtttttatgaggttcttgactggctatcataggcctatgtatatgcgacttgagacaccaatctgcaagagtctttcaaaacacaaaagtcttatcctctcaacaggaaaaattctttatcctcttaacaattccttggcccaaacactagtgattccataaggaattatttgagtgttcaaattgctcaatctatctctgtcatgagagaacacttcttttctgcttctttattctgaaaaaggaatactagacc

SEQ ID NO: 281479 - DNA, 231 bp, Glycine max
catggctcgttctgcattgactagtggatactgtcggtacaaaaacttggattgttttgtgatcctcggccataatggaccgtgtttgagtattactcttcctttatacaaaagtataaattctatgctaggttgtaatctcttccctgaggaaaacccttaggccggagctaatttgcctcggttgcagatggtcagctgggttgactggacaaagatttctaggttctt

SEQ ID NO: 281480 - DNA, 233 bp, Glycine max
cacaaccgttcataccacagaaattttcacttcatacatcttctttgcaatacatataactctttgcctactcgattaccacaagacgttatctattaccataggtcaaacatgatccaccactacttttttcatgagcattgccaattcccactgtgtcatcgaacactcatactctgacctcaattaccaacacctattgaaccttctagcttaaattcttcatctcgtgc

SEQ ID NO: 281481 - DNA, 245 bp, Glycine max
  unsure (1)..(245): unsure at all n locations
gggggggggggaccacagcggcggcttgaaggaanaccaaangcccagaccgccagcaggggctnanancccaaaccatacttaccacgatatcctcgtgtattgatcaagctacttatatcgacggactatgtgcctaaacccatacaaggttcataacaggcccccatcataactctggccataaataccacagcatcggacagacaacgctgcccatagatggactccactgctgaaatgct

SEQ ID NO: 281482 - DNA, 171 bp, Glycine max
gaaaagagaaagaaaaggcccctaggaaagggaaacagatgcgagggactcacctttgagtagacaaagattaagagctgcagaaggaatgctctaactgcaggcatataaaaaatacttgtgaatttattattatgacattcaactataagccaataccagccatatata

SEQ ID NO: 281483 - DNA, 438 bp, Glycine max
  unsure (1)..(438): unsure at all n locations
aagagaggattcacaacttgccagaatnctaactcttgttcttgcatctgatactngcccttgacaaggaactcagtcactagatttgctacgaagttaaacacctctactgcacaaccaccacacagcgatagtggtgctcctacgtagaaactggcttcataaaaataaccaatcaatcctcttcattttagtattttctggataataaccaccgataactaagaagtacaaatgcaggaaatgatgcaactaatttatataattatgttacctaagaacgcacgtgtgaaccttcaccatttcaaataaccagaaacattgaaattattttagattgcacatcaacaagtaataaccgtacttcaaatctttctaggactagtcatgcatatataacatttagttcacatgtgagaaaataaatagaactagtaa

SEQ ID NO: 281484 - DNA, 276 bp, Glycine max
  unsure (1)..(276): unsure at all n locations
agctttaattaatccaattttcccaaggagtacttgctaaatgataaagcattnntatgggattcagatttatcatctggccgtgagagctcatcatttaacattctcccccaataacttgatttgaatatttgagagaattcatccactgaaacatatttgtaaggaatatcattgcggtaccagtattgcctttgatccttcttagagattacctgtacatagttgaaaattttcatttgtgaggctatgctatgaggacaaagtggattaaac

SEQ ID NO: 281485 - DNA, 457 bp, Glycine max
gaacttagaaactcagcttgaatctctcctttgggtggacatgattctctatgttttcatgggcgacaagcatacaacaattacagtgagattatctgatgtatttaggcgcaatgcttccttgactagctctccggcacattgctgtgggtcatcatgccttcttaatcctcggcgaacaagactaactgcaacttggctagacattacatcccaaatcccatcacacccaatgatcaagaactcatcaccctcagtcaatgtaaccagccgaacatctggctcagcaataagaggggatgcagcaccaagtggaaatttcaagtcccaatccccaagggctcgagttactgaaagataaccattgagatatccatcatcaatgaacccacctaactcctccaccctcctcttctctggtagataacttggcctgtgatcattagacatctcaaca

SEQ ID NO: 281486 - DNA, 340 bp, Glycine max
agctttgcttatttggtcttcgccagtgaaaggatcgatgtgggtccgaaaagaggcaaatttgatcatcctactaggacgactgagaaaactggggcaaatgaagagggtgagaaagagggagaaacccatgctgtgactgccattcctatacggccaagtttcccaccaaacccaacaatgtcattactcagtcaataacaaacctcctccttacccaccacccagttatccacacaggccatccctaaatcaaccacatagcctgtctaccgcactttcaatgacgaagaccacctttagcacagaccaaaaaaacaccaacaaaaaggaattttgc

SEQ ID NO: 281487 - DNA, 400 bp, Glycine max
tctacttatgtggcagggcgggcttgcttcactatcttgttttcaacgcgagttttgaccactgtgcttccttcccgcgatgcttcttttcatgtccgcctgagtgggcttatagcctaaaccatacttcccacgatttccttgggtatttatcaggctagttatgccgccgttgtctttgcctaaacccatcccgggttcataaccgttccccaacataactcgggccatcattaccgctgcatcggacagacaaggctgcccaaagagggagtccacggaggaaatgctgaccacctcaaaagactggaaagtagtttctaacgattcttctacggcttccacataatgcatggaggatgggcagcttaccaagatgtcttccttgcctgacacgatg

SEQ ID NO: 281488 - DNA, 434 bp, Glycine max
  unsure (1)..(434): unsure at all n locations
cccaccattntctcatagtagaacactggttatgtgcctactatcattggtatcatctgcctctccatcattggcggcgctacttgagttgtcatatccctccatctttgggcgtatcttttaaaaaattcgtgctcctgttctgtagctgcattctatctggagtcatatcagaattgtactaatactgcctaacaaaggcaaccattaagtctttccgagaatggatttgggaaggttccaaattagtatatcagatgacggctaccctagtaagactttcctggaagaaatgcatcaacaatttttcatctcttgtgtatgctccaattntcctgcaatacaccttcaggtgattcttggggcaagttttccccttgtacttattgaagtctgacaccttgaacttcggaggaatgaccacgttgggtact

SEQ ID NO: 281489 - DNA, 241 bp, Glycine max
  unsure (1)..(241): unsure at all n locations
atctttctgaatcataacggactcataacgacttcgttnangtgtangctcatgttaagcttcaccttcaacatcttcttttatctcgtcaacgttttcagctgtaggctctccaaccattatccattcatgatcaacanacctcattccaagtttcttgagatgcctatcagtaatctcactagaggctattgcaaagtcacaatctcattcgagacatcaacctttgaatatcaatgaa

SEQ ID NO: 281490 - DNA, 222 bp, Glycine max
atcaattcttcatttaaatcgtgttgatagatatcaatttcttatatgcaaattaatttattttaaatgagaaattacattaaatttataaaacaaccatctatttaaaataataaaaaatttttaatttaataattaaaatataaaataatatttaactaggatttgctgaccacaacaggattttaatacataccaggtattttcgcactcaataatttt

SEQ ID NO: 281491 - DNA, 319 bp, Glycine max
  unsure (1)..(319): unsure at all n locations
agctttgttttctcattgtnggccttaccccaaatattatctgaaattgtctccttattggcctccaccaagatatcgatagggatattacggtccttcaaccacaaaatatctcttaagccataagcatgaccaagcttttagagaccaagtttcgggacaccaaaaggcacatttgttgacttagccatccacacattcgttccatatgcaccacctttagcgcttacagacaaccctaacccactccaaactgttcccattaaacaccttaatccccaacaatatcaagaacgacgtgcaactagtttatgctatt

SEQ ID NO: 281492 - DNA, 268 bp, Glycine max
tcctcacggaacacgttacggaagcgtttcggaagcgcctcggcttagattttattcacggagacaatttttccaagcatattcgaaagagagagatttgcctaacgggctggaccccttccttcttcaattcctcccctattgatagcaaaatacgggaggtggttgccgcccagctcgcccaagcgagctcatctcgcccaagcgagcacggttgcttactgcagaaacaaccgccttctggaggaattttctggatggcccaaat

SEQ ID NO: 281493 - DNA, 343 bp, Glycine max
  unsure (1)..(343): unsure at all n locations
agctnttttttggtttttagntctataattttgcactgtgggtgattgtgattctttgcaagatcttttcttccatttttagacctgttaagtatttatttcttaaaatccctaaagcatgaacttatagaggctaacaaataanaaatgaaaatcttaaaggactaacaataagaaaaatgcaaacttattgagattaattaaacatgaataataaaacttatagaacccaaataacaaaaaatacaaatttatagagactaaacatataaaataaatttacatacactacaattaaaaaatacaaattttctaagactaaattcatattaaagcctacaat

SEQ ID NO: 281494 - DNA, 383 bp, Glycine max
  unsure (1)..(383): unsure at all n locations
tcttcgtagagcgtggcattacggagatttcnttcgtaagcttttacggaataactggttctgtaacaagtgttttacggctacggaagaagttctttcgtaaaaaatttactgaagaataacttcttccatatgtaacagatctacacaaaaaaacggtaaaatgcgtacctccggcgaaataaaaacaacaataacaacagcaaccgccaatatttaaccttcaccgaatgactacctcgaaaaaacttgtaaaaaccacccagaatggcacaaactagacgacagtgaaagaaagaaagtgtaaaactgtaaaaaattacacaggcgtcgtatatttaaagaataacgagacagaggaaaaactggcattttataaaaat

SEQ ID NO: 281495 - DNA, 177 bp, Glycine max
  unsure (1)..(177): unsure at all n locations
ataacccacctcccctgtgccactccaatgactcacgtactgccacgtacccatatccgcgtactataacaccggggcgcatagacctncaaggtttcccaacatccaataatacgacattcaaacagcacagattatcacagcctacaaaacttggcaaggagaaaacctttcaaa

SEQ ID NO: 281496 - DNA, 285 bp, Glycine max
  unsure (1)..(285): unsure at all n locations
agctnaatcttctgagaggtgacgtnacatcctcattgtgcgtttctagttncctttcttggagtcagctatcaccttcctccttttctgcactaatattgttaatgtttgaaccttgagatatgtaaaactagtgtccaagaggatagccatgctctatgtagcattcatctacagtgtggttagtgaaagcacaatatataaatagtttacttcctcttcctcctgagtttcctctaccaaaagccactttgcgttcctcttcctcctctggaagcataattc

SEQ ID NO: 281497 - DNA, 440 bp, Glycine max
gatcgaccactttcaagctgaactgcaaacatatttagcagtgtcaataaccatggaatggaacagtttatgcatttgaacaattggaggcgtaattgagagactgtaggtattataatcagataaagagttggctgtcatggacatctcattgggggctgttatcacctaaacttctaacgtggtaaaaataataatggaaattccacaagacactagtataaagcagaatattttgattctgtggagttggtttcagagatacaaagaaatattaaaatctaccaaattgcacaaattgtgaagtagtgactcctagtaatatgcactcttaagacactagacctcaatggatatatgaagtttgttctggttactgatttacaagtcagtggaaggcggaacaaacactacacttcaaggaccattgatatttgaca

SEQ ID NO: 281498 - DNA, 452 bp, Glycine max
cttgatgatatggtcttcaccgacgaaaggatcaaagtgagttcttataaaaggcaaatctgatcatcatactttgataaatgccaaaaaaactagggcaaataaagagggtgaggatgaaggagaagcctgtgctgtgactgccattcctatacatccaagtttcccaccaacccaacaatgtcattactcagccaataaccaaccttctccttacccatcccccagttatccacaaaggccatctttaaaacaaccacaaagtcttccgcacttccaatgacgaacatcacctttagcacaaacaaagagcaccaaccaagaaatgaattttgcagcgagaaagcctgtagaattcaccccaattccagtatcctatgctgacttgctcccatatctacttgataattcaatggtagccataaccccaaccaaggttcatcaacctccat

SEQ ID NO: 281499 - DNA, 319 bp, Glycine max
  unsure (1)..(319): unsure at all n locations
agcttctgttttgagatcaacttgatgttctatgccctcttgaaggtggcagtccatgaggaatctccatangaaagacattnntaaattcctgcaacaagggttgaacactangagaaataganatagtaaactcattagaattatcagtagaaattttactgtatttgcaatactgtagattgagtggttcataagcaggtaacattttcctcacttcactcgcctctgcaaaataattaaattttctctcatgtgtatcactctctctcttatgtgtatcactctnttcctcgggtgtatcactcttctttttcat

SEQ ID NO: 281500 - DNA, 429 bp, Glycine max
  unsure (1)..(429): unsure at all n locations
tgtacattcaatttcgagcgttccgatatattacgggacttcttcggacatccgagtaaaaagtaattgttgtttgaatttgttcagagcttcaacattcaatttcgagcttttcgatatattacgggactcaatcagacatccgagtaaaaagttattctcgtttgaatttgctcagggcttctgtattcaatttcgagcgtctcgatatattacgggactcaatcagacatccgagtaaaaatttattggtgtttgaatttgctcagagcttcaacattcaatttcaagcgttccgatatattacgggactcaatcagacatccgagtaaaaagttattgtcgtttgaatntgctcagagcttctacattcaatttcgagcttttcgatatattacgggactcaatcagacatccgagtaaaaagta

SEQ ID NO: 281501 - DNA, 322 bp, Glycine max
gctattatggttttgggatgtcaacctgcaaatgtgtgggaagggaagcttgattggagaaaacaccttttggaatggagaagccactttctgggggtgcgtgtgtgcggaagctcgaatcacgaatctgtctaagtgtaatgcatcatccctgggtagcattaaatctcatgccaggagcctcactacatccaacatatgggaagtcacatagacgatgcgtgggagtggagctctatttggagaatgccattgttttgacaatgaaattgatacggttggtgtttgtctaacgaggttcagatatggcattcaaccacat

SEQ ID NO: 281502 - DNA, 321 bp, Glycine max
  unsure (1)..(321): unsure at all n locations
agctgtcatgcttatatgggcatcnggacggagtctttttgttcgcacaagnctatcgcagggggttgtaacattgtgggttatgacatatgtcacttagttgaagccaatggccatgcgagaggtattcgagttccgggggagaaaatatagggacttttgtatcactaatgttcattttttctcccacgccctcactgatcatatctctacgaatcctcagtcttggatccgcacgactatgtaagacaatgctcgcacgcttatatgttgcctgatgggatgctatcgaccatatcaaacagtctatagatctttcct

SEQ ID NO: 281503 - DNA, 209 bp, Glycine max
  unsure (1)..(209): unsure at all n locations
agcaagctattgagtatattaaaacccanaaatccaggaataattaaggaaagcaagctaattgatgaaaaaagattaattgaagaaagcaaggttaattaatgaaagaagactaattgaggaaagcaaggctaattaaggagagtagaataattaacgaaaagagaataattaacggaaggagaataattaaggaaagaatgtttaat

SEQ ID NO: 281504 - DNA, 407 bp, Glycine max
  unsure (1)..(407): unsure at all n locations
acctaggctgatgaagacnnctantattcaaaatgctgctggtttgcagcttctccccaaaagcctttggcagtcctgcacttagaacatgcacctcactctttcaaaatggtcctattcattctttctgccaaaccattctgttgtggagtgtgagggactgttttgtgccttttgatgcctattttcctgcaaaactcattgaactgctctgaaacaaactccaggccattgttagttcttaaaacttttaattttgtaccaagtcgatttccaacaagagtatgtcattctctgaatttttgaaaagcttccgacttatttttcaaaacatacagccatactcttcttgagaaatcatctatgatggtgagaaagtatgagcttccaccatgagtattcactct

SEQ ID NO: 281505 - DNA, 297 bp, Glycine max
agctttttgttgcaaaattcctttttgttggtgtttttttggtttgtgctaaaggtggtcttcgtcattggaagtgcggtagacaggctttgtggttgatttaaggatggcctttgtggataattgggtggtggggtaacgaggaggtttgttattggctgaataatgacattgttgggttggtgggaaacttggccgtatatgaatgatagtcacagcatgggtttcttcctctttctcaccctcttcattcgccccagtttactcaatcgaactcataagatgaacaaatttgcc

SEQ ID NO: 281506 - DNA, 441 bp, Glycine max
tcaacatcagaccacttccagggtgctggaatacttccatggacttgatggggcctatgcaagttgaaagccttagaggaaagaggtatgcctatgttgttgtggatgattactccagatttacctgtgtcaactttatcagagaaaaatcagacacctttgaagtattcaaggagttgagtctaagacttcaaagagaaaaagactgtgtcatcaagagaatcaggagtgaccatggcagagagtttgaaaacagcaggttcactgaattctgcacatctgaaggcatcactcatgagttctctgcagccattacaccacaacagaatggcatagttgagaggaaaaacaggactttgcaagatgctgctatggtcatgcttcatgccaaagaacttccctataatctctgggctgaagccatgaacacagcatgctaca

SEQ ID NO: 281507 - DNA, 339 bp, Glycine max
  unsure (1)..(339): unsure at all n locations
agctttgcgtanttggtcttcgccagtgaaaggatcgatgtgggtccgaaaagaggcaaatttgatcatcctactaggacgactgagaaaactggggcaaatgaagagggtgagaaagaaggagaaacccatgctgtgactgccattcctatacggccaagtttcccaccaaacccaacaatgtcattactcagtcaataacaaacctcctccttacccaccacccagttatccacaaaggccatccctaaatcaaccacaaagcctgtctaccgcacttccaatgacgaagaccacctttagcacanaccaaaaaaacaccaacaaaaaggaattttg

SEQ ID NO: 281508 - DNA, 433 bp, Glycine max
tctacttatgtggcagggcgggcttccttcactttcttgttttcaacgcgagttttgaccactgttcttccttcccgcgatgcttcttttcatgtccgcctgagtgggcttatagcctaaaccatacttcccacgatttccttgggtatttatcaggctagttatgccgccgttgtctttgcctaaacccatcccgggttcataaccgttccccaacataactcgggccatcattaccgctgcatcggacagacaaggctgcccaaagagggagtccacggaggaaatgctgaccacctcaaaagactggaaagtagtttctaacgattcttctacggcttccacataaggcatggaggatgggcagcttaccaagatgtcttccttgcctgacacgatgaccaggtgcccctccactacgaatttcagcttt

SEQ ID NO: 281509 - DNA, 261 bp, Glycine max
  unsure (1)..(261): unsure at all n locations
agcttaacttctgtattttagtaatgacccactaacctagatttcaaataacttaatgccattaacctagaattcaaataacttaatgccattaacctanggaattaaaaaaacttaatggctgaatgtaactgaaattgtggcaaccaaaagtcacccccaacagcccataagtcaaccaccatttggtctcccaaaaggttgatgcctaggttgccaattgggcccttattacaacttgaactaaacctaactaatgcc

SEQ ID NO: 281510 - DNA, 353 bp, Glycine max
cacatagcttcatttcattgatttgcaccacacacacttaaacacttttatttatacttacagtttttttataacgaaaacaatgtgtatatactgctctgttttgaccattttatttcttacccagtctcccccaaatttgggacaaatttgctttaacatataactcccccaaattttggacaaatttgtcttgaaccaagcttttctgtggatgatgctctcctacaagctaagacaaggtagcacgagataaaactgtatatgctcaaagttcaatcaatcaatcaatcattcaactcaaaactgggtgcaagggataaatcattcaagcacgtggtgagctttttggc

SEQ ID NO: 281511 - DNA, 242 bp, Glycine max
agcttggtttttggtacttaccgttgaagatcgaaaacgatgaaaaacgaatggagaacgttcaaaaaccggtggaacctttgcgaaattcctcacggaaaacgttacggaaaacgttcggaagcgcctcggcttgaatttcttcatgggaaacaatttttcaagcaaattcgaaagagagagaagtgcctaaggggctgaaccccttccttcttgccttcctcccctatttataacaaaat

SEQ ID NO: 281512 - DNA, 323 bp, Glycine max
cgtgttctttgaaagatccgtccccctttttgcaaatgttctatagttgcatcctatccggaaccatatcaaaattgtactgatactgcctaacaaaggcaaccattatgtccttccaagaatggactcgggaagattccaagttagtgtaccaggtaacagctaccccagtaagactttcttggaaggaatgtattagcaattcctcatcttttgcgtattcccccatcttctgacaatacatctttagatggttcttgggacaagtagtccccttgtacttgtcaaggtccagcaccttgaacttgggaggggtgatgata

SEQ ID NO: 281513 - DNA, 314 bp, Glycine max
atcctttcacataaaagctgtgtgtaatcgattacacttatttggtaaccaattaccatggatagcctctgaacaaaatcaaaagatgtaactgttccaatagttttcaagctcttgtgaaagacatatcttttccaaatggctttcaaggttttgtcacaaggttataactcttctaatagttttcttcactagacttgagagtctataaaagcaaggctttgatctgcaaacaaaaactttgtctaacaattctttagacaacaaacttttgccaatctgatctctaaatctctttgaacttgttcttcttc

SEQ ID NO: 281514 - DNA, 354 bp, Glycine max
  unsure (1)..(354): unsure at all n locations
agcttcaattttattgtctcataaaataatgccaaaacccgtatcaatatatggagatcgtggtatggcattgtaagtgacatccctggccaaagtggatttgaatgggatggcactaagcacatgatcacagttgagaatgaaaatgcttggaatgaatattgcactgtaagtattctttaatatgttactatttgttattccaagtagaatggatttaacttttttttcagtcgcatatatcggctaaaccgtntcgaatcgaggtgattcaaaattgggatgatagagtggatttgtgtgctaaagatagagccaccggtcatggagctgaaactgctatggatgctgatg

SEQ ID NO: 281515 - DNA, 348 bp, Glycine max
agggagagaagttgaactttgatgcgcatctcacaagtttcacattcatcaaagttacaacaagtgttacacatgcttctatttatagcctaggtagcttccttcataaacttccttgagaagcttccttcagaagctagagcttagctacacacatccttctaatagctaagctcacttccttcatatgagaagctagagcttagctacacatacaccctataatagctaagctcaccctcatgctaaaatacatgaaaatataaaaaagtccctactacaaagactattcaaaataccctaaaatacaaggctaaaaccctacactactagaatggccaaaataca

SEQ ID NO: 281516 - DNA, 383 bp, Glycine max
gagttatcatgatatttgaattctctacaacgacatgcaaactggtccttctgggttgggattaagagatgttattacatgcatgctcaggtaagggtcaacaaccaacatcaagcattagatttttccaaaattaaaaagtattctgtcacatagaatagaatgatagaaattatgatgttagccggttttcttttaattgacgaagaaagcaaatcaaagagaaattatatatgtatgtcacctcaaaggaagcatcctgatgttcaccccgctcattgaaagcttttgaagcctataatgcatgtttatcacaacaattaattaaccaaaaagatgaaaatctgtttgaaaatatattgagaaacccactggtcactcac

SEQ ID NO: 281517 - DNA, 276 bp, Glycine max
  unsure (1)..(276): unsure at all n locations
agctntgaattttggcatctgaagnctaagagctctgggcagataagtctgttaaagctggaagtggggctgaagtacaagatgaagggatgccagttattggtgcaaaggaagaaggaacatcagctgctctgagcttggtcttccttgcctttggaaaattaactgtttggtcattcgcatttcaacagttccttatgatataagctaagctaatggccggtcttatgttttcataggaggtaagggcatgagatcccattcccctcgatctac

SEQ ID NO: 281518 - DNA, 399 bp, Glycine max
  unsure (1)..(399): unsure at all n locations
gtccataccaggcactaagtctagggagaactcaacctctctctcacgtggtaatccggacaccttaaacacctttggaaactccctcaccaaaggtatatcactcagaggggttttgcctcaacactcatactagctaagatcatgtatacttgtgcatcctccctcaaagatgcctcaacctggttagcagacaaaaacatatcactttcactcacaccaaaagacaacagatttctcaaaatagtttaataaggcgtggttggaagataaccagtccataccaagaataacatcaatctgactcanaggtaaaacaaccaaatcaaacaaaaactatctatcagaaattaagataggacattgcaagcacacatcagatgttaaaacagacccact

SEQ ID NO: 281519 - DNA, 209 bp, Glycine max
ctcctctacctatatccttttcttccgctgcatctacatggtggaaataccattaaggacctatttgagctcaaaatccaccctcataaaccccacaacagcttcatcgggggaatccaacactaagccttattccgtgctcttaacctcattgatgtgtgtttacctctcttcattggagctctcattttctccagatggtctccatg

SEQ ID NO: 281520 - DNA, 446 bp, Glycine max
  unsure (1)..(446): unsure at all n locations
tgatgataaaagtgagaagtacgtgtgtgtgggttacgtctcaatatccagngggtacaagctctatagtccaaattgtagaaagatcgtcataagtcgcgacgtggagttcgacgaagaagattgttgggattggagtgttcaagaagataagtatgattttcttccttattttgaagaagatgatgaaattgaacaaccaatcatagaggaacatattacaccacctgcctcaccgacaccaaggctggatgaaacaagttcaagtgagaggacaccgcgactaatgagcattaaagagatttatgaggtaaccaaaaacctaaacgacattaacctcttttgtcttttggtgattgtgagcctctatgctatcaagaagcgacgggaaacataaagtggaagacgccatggacgaagacatcaagtcaatcacgaagaatgat

SEQ ID NO: 281521 - DNA, 360 bp, Glycine max
  unsure (1)..(360): unsure at all n locations
agctntgattctatagtccaactcaccataaacttttccctcaaagggaaacaaaaaaaaagggagaaagaggaaaggagaaaaggagaaaattcccaatcaaagagtgggagaaagcaaaaaaaaagacaagaaggaaagttcccaatcaaagagtgggagaaagcaaaaaagataagaaggaaaattcccaaatcaaagagtaggaagaagaaaagaaaggaaagaaaattcccgatcaatgatcgaaagaaaacagaagaaatatgcataaaggtcttttagaccagaccacatcttgacaaatacagagttactaccaagtagacacaaaagaaaggggggaaaaccatgacctga

SEQ ID NO: 281522 - DNA, 416 bp, Glycine max
  unsure (1)..(416): unsure at all n locations
tgacttgggtttagacatgactgatacatgattngggactttgttgaattgatttgggcaagattggatgagaggaagtgtgaatttcgaaatctgcactttgtgcagatttttgctgtgaaattgtgcagcaggattttgcacacgtgcagaaaaatgctatgttttcgctggttgtggaaagagtagtgcagaatgagttctagatgtttgctagtagatcccaacggtcacaatgtaggcttatgtactatagacttccagtaaaattttggagtcgatccaacggttaacaaattggatcgaaggaattgttactggggtctttgagtgagaaaagctgtgattatggttggtgtgttgagcagagttttctgcctttgccctggtttgcttggctgtgatagcttgtgctg

SEQ ID NO: 281523 - DNA, 264 bp, Glycine max
agcttgtttttgatttttcctgagttctgtaacaagcttagaacactaaacttggccttctcttaattgtctttgggcttggcgaccacgatcaacaaagtactttcggcacctactatatgttgacttgaccaatgttgttattggaatgctgcgacaatctttcaacaccttattcacacattctgataggttggttgtcatgtgaccatatcttcgtacagatgtatacgaagtcatgctccatttttcctctgaaatgcg

SEQ ID NO: 281524 - DNA, 316 bp, Glycine max
  unsure (1)..(316): unsure at all n locations
tatcctggtctccttggtggtgagctgctacanactcttctttccttgaatggcattatctctgtgttccttctccattctactaccattcatcttccaagaagcaaatgaatccataggtgaagaagatccaacgcctacaatctccacatgggactacgtcaattccactatctaattgcgcttctatatgttgacacaccaaaattgcctctgatgtatggaaacttgagagaagatattgatacataaggattgcccaatgacatgacgtgtctatatcagtctcttggctgggggtatatgcatcaatcag

SEQ ID NO: 281525 - DNA, 344 bp, Glycine max
agcttttctttacttatgacaatacacaaaaaatgtggattagtacacacacaagacaagagagagggattgagagttgatacagacaactatttttatttaattatttcattgctttataattataatactaatttaatgtggtcgaaaagaaaatatattataaacatcgcgcacaagtaatatttaatcatataattattctttcaaggtgaaaaagtatgcaaattctgtcaaataaatattttgagatgaattggtggtaataacaacttgtatgagtataatttttacttacaaatagattgcttatacttacttcaaaatgtttcctttctattaat

SEQ ID NO: 281526 - DNA, 332 bp, Glycine max
ccttgtacgtcacaagtcatttctgcctgcgtctatcttatttttcacacaagcatacaaaacaaggaaagaaaataaaaaatagcgaccgaaatgaaataccaataccacacatccaattagaaaaaataaaaaccgcccctaatttaatttcctgatttctcaatatttattatttaagcggtgggaccctttatatacagtttaattcggccgccagctttgtcgtctctttcgtctgcgtccatccccggcgttactttgcgtttgactctcattctctatctctctctacacctctctctctctgtctctcaatgtctataaggtca

SEQ ID NO: 281527 - DNA, 357 bp, Glycine max
agcttgtaatccattccattcaccacgcatgttgctagctccattataccctcggccatgaagattttgaatatcaagacaatggcgagaaagaacactcgaaatttgtctcttcaatgttaaagaagaagtgtcgacaacatgaataagatcaaaaaatctctcttgaacatgcccatctttatccataaatctcaacactattgcaatttggtctcttttttattcatctctagcttcatcaatggtgagacaaaaattaaaaataccaatctcttcacgtattgcaacacgtacccttctagcaaaatatacaatatctctttttgaatacttggtgagatatattgagcattt

SEQ ID NO: 281528 - DNA, 440 bp, Glycine max
gcttgatgtcttcaaacacactatgtagacctaaaggtagattatcattcattgtttatttattggtattcattatgcgatataattcgttgtaacccgtcactaaccaattaatattatcaactactcgtttggttaagcaaggaaattgttggtccaacaaaaatcatttacgcgtacagcatacatcattgtcataattgacaacacataatgacattcatagtttacctgtaagaaaattggcacgtaaatggaaatggttcttcatctatttcgtagaaagagctccaacccataagtggctgagactccatgatcatgctccagacacgaagatatataaagacgtcgaagtattgaagaaggattataagtcccttccttgctgaaacagtagtagaacgtggggaatatgaaaggaagttggcaatttatat

SEQ ID NO: 281529 - DNA, 378 bp, Glycine max
  unsure (1)..(378): unsure at all n locations
gaagctnggagtttttttntccaaagncaaggaggaaagngaagatgtgattggttggaacttgtctaccaaactatgatagataagatttttatgctatttttttggaaaaataaaagtcatgtggactgataggataaaaatagtttaaatcttattctctaggcatgatatgttagtggtgttatctttctggaagaagtattttcttttctattttttaaatatgttgcttcatatcggaataaaacagagctttgctatcttaaattctttctttatgctcccttttattctttaataatactgtctgcggttattaacaaaaaaaaaacaacaggaataattggatgtgaggtactcatgtgggttcttctc

SEQ ID NO: 281530 - DNA, 387 bp, Glycine max
  unsure (1)..(387): unsure at all n locations
caccttctccttccccaacgcgggcgatcatcttagcgccgaggtcgtaaaccgtttccatctcggtcgtcttgagcgtcagcttcccggtcttcgcagcggcgccagacaccgcagggcggtcgatctggacctcgaccacttccccttcaatgacttcggcttcttccttgatgcggacgccgatggccttgcggaaggcctgngtgagggcttccggtttggacatttccaatgagaagatttcgctggcagcgatcatggcaaaaggggtttcgaggccganggacttggccatgcccatggcgatggcggtcttgccggtgccgggctggcctgctaggaagaccgcgcggacggcgatcttgccatctttaatcatctgga

SEQ ID NO: 281531 - DNA, 301 bp, Glycine max
ctaaaggaaattatgactttcaattccagaagttgtaatacctaattagggattcatcggttaaattgagtctttaatttagaaatccattgcttacaatgactaatctttaaaaacaaattacacccaatgggtactttgggccaacaataatggaaaagactaagagattacagtcctaaagactaagagggtagagtcataattacacccaatccgtacttcggccgacaataatgggaaagactaagagattacagtcataaaggagaaaagggtccgaaataaaagagagagggaa

SEQ ID NO: 281532 - DNA, 312 bp, Glycine max
tacttataacactacaaaataaccataaattggaagagtttgatacaatttacacaagttttatacacaaaagttagtcgtatgcaccgactaacacactgacatcctttgaattttgcaatgcaaggttattatcttcaagaagtctatataagagtcttatagcacggaaattgtgcgcttcctcaaattccatcacaatgtgcttctgatacttgaattcaagcaagcactattgtgttggctcctattttattataaattggtcacctaacagttgaggatactgtgagcgttagtaagcctaatggt

SEQ ID NO: 281533 - DNA, 435 bp, Glycine max
  unsure (1)..(435): unsure at all n locations
gaaagaggaagtgtagaaggtgaaactgcgtgctnnntttcgttgaccacagaggggacttggagagtgtcgcggaggtcangagaccttggggatgtcaggtggggtgctattacccaaaaccaagcttgaccaatcccgacccaacccgggcatagtcagtcagtgagaacctgcgatgtacctaagcaggcgagctcctggcagtcaacagataaaaagaactaagaccacaaagcaaggaggcttgtgtggtggctggccagctgtgaatcttgtgtgatatatgggttatggcctctggtaatcgattaccaagggtgggtaatcgattacaaggcttaaaaatgaagacaggaggctaagatggtctttggtaatcgattaccaaggggtgtaatcgattaccacgcttgaaaacgaggtctggaagct

SEQ ID NO: 281534 - DNA, 176 bp, Glycine max
agctttagattttatgggaggaaaaatagaagcaaccaaataattcacattttaaccaaaccaaggagtggggaaagaatcatatatattatacagaatgtacaaatggtcattcaaaaaatcatcctaaatgggtgaatcctcaaacgcacgctcaatcctactcaggtagtcag

SEQ ID NO: 281535 - DNA, 354 bp, Glycine max
gatcattttcccctgccattcattgatcaaatgcttgagcgcttggcaagtatgtctcattacaatttttttatggtttttctggttatttacaaattcatattgctcctgaggatcaagaaaacaccacattcacctatccctttggcatttttgcctataggaggatgccctttggcctatgcaacgcctctggtaccttccaacggtgtatgcttagcattttcaatgattttttagagagttgcatagatgtgtttatggatgattttactgtttatggatcctcttttgatgcatgtttggatagtctaaatagagttcttaatagatgcattgaaactaaccctgtgc

SEQ ID NO: 281536 - DNA, 376 bp, Glycine max
ttgcatcaatattacatctctgagggtaactaacagtgaaagtcacaacgtactttggctttgatgttaaatcctgcaagcagcaacttaatcaaatactctgtatatagatgatataccgcaataaaaacatcagaggcctctccactccaaaaatttacagactggcctcatatacaaacagaaaataaaaatcaagctcgaataaaaaatgcacgtggcaagcaacataaattatctatgtcactatacttgtcccaattatatcaatcgtagattaggggtgggatatttagtgtacttcatcgaaacaaacaaagaatctggtgaaagcatgtaaggcttcttaacaagttcataacaacagtagcaggac

SEQ ID NO: 281537 - DNA, 301 bp, Glycine max
  unsure (1)..(301): unsure at all n locations
agcttcnctcgtttcattccggatgacgttcttccggagaattgtctgtgagtatttccggaagacacaaattgatcttccggaagaagattcctccagagactttccggaaaaattatttccggaacttttccggaagaaccttcttccgaaaaataattgctgaaggcaagttcacccattcactgtcgctgggccccagacaaaagctggtgcacgaaccactcccaaggctaaacccactaacacactcacccggtcccgcagtttctcaacatgggctacccatcttttcctagac

SEQ ID NO: 281538 - DNA, 574 bp, Glycine max
  unsure (1)..(574): unsure at all n locations
cccacacccaccaacccacaacgaaagtgtaggcaaagcaacactcnaactttanatntaatcaaaanttcacaaaaaaaacnanaagaggagcgagctgagcctcgcaggccnaacaacnaaannaaanaacncnaccnnaagcccaaacaagaaacaagagagaaggaccagtttccctataacgaacccaaacgagcacacggcaggcgggcggtgaacccaacccacacgggacagaacccgagttagcaagaaaacagaaaacaagctacgcacgccgctgaacccatatcgaaacacagcgaacagcaaccgcgggcagcccatgcgaagaactacgaacaggcctatccatgatacccacatcatcggaagagacaaaacatcacggcagcgggggccaccaggctactgcaacccctcagcatggagctaggacatcgcgaccgacgatactccaacgaaaagcataaacaaaactggccggcgaacacaggcgacactcccgaacgcacaaagccaagccccaccgaaacctcgaaagaaaccaagacacgggccctgaccaccg

SEQ ID NO: 281539 - DNA, 300 bp, Glycine max
tcaaacccatcgatctaataaacccaaacgagccaattcccatctaacatagggagattgtggaaaactcataatacagaattgcaagagcaatgctcccagccgaagaaaattctttggcccaaggcttgaagactgaaagataccacataacccctggcattgcaaaatcccctttctagacagatccaattacatctgttttccctcatcctttcttattttaaataagcccaaataatctataaaaaccatggaacctaaacctaagcacatgaagtggtgtattctctcttctta

SEQ ID NO: 281540 - DNA, 260 bp, Glycine max
  unsure (1)..(260): unsure at all n locations
cacactgcancancagggcgggcgttccatggcatcagaacgcacaaccncaatnctctcacttgttattctctcatctgtctgtaaaacgtatgtggtcaatggtatctagcacaaaactaagcttatagtcattgtgttactgtccataacgaaacagtacatgaaagtcagatgccccatctgacataagcttccgttgtctactttctctctatctcaatcggcatcctactcaattagaacnaagcagtttatgc

SEQ ID NO: 281541 - DNA, 178 bp, Glycine max
caagcaaacaactcgcgggcattaaataggctacacactctccaatgtgtgccttctttgacccacctatatatgacagactgcgcactccctcactataaagaaccattcttgctcaactagtcatctatgcgaactatccatctctcccgtactcaggatgccgctgccatttctt

SEQ ID NO: 281542 - DNA, 340 bp, Glycine max
atcaatatgacaagacgacggtgtgtagagtgatccaagacgtacaaatggacctccactgaacttattaatatacagatcgagatatcttaatgatgaagagcttccaaatgatttacgaagagcaccacccattcatttgtgggagaaccctatccgctcaatgtatatagatgccccaacatgatctgtcggattgactgaaagtcgagaactctgagctgcaagatcagtgagttcacgggatatacacggagctagaattgctaacagtacattatcctgtgggtggagtgggacatatgacaagtatatcaccctccagtagcagacattaccc

SEQ ID NO: 281543 - DNA, 272 bp, Glycine max
  unsure (1)..(272): unsure at all n locations
ancttttattgttgttcaaaannaaaanatnaacgcgaaggaaaaggcacaactatgacaatcacattaacagaaacatccctatatgtctaacaaattaatgttgaagtaacaagttgctggaagatgctgtgtttatgcactggacgtggattaaagctatggagaaaaaattttctatgcactataaccagaggtccagcaacataatagatggcatttggattaagaaacaaaaacctgtggggcaagcctgtggacttgatgcggga

SEQ ID NO: 281544 - DNA, 441 bp, Glycine max
  unsure (1)..(441): unsure at all n locations
ntgattgcccatatgcacgccactactggtaacggttcatattatataatcaaatatatattgcgagatatttttcatctccagagacactataggaatcatgtctgcatatgattaattctaatttctacatacgctatattgttcacataagtctaccagacaataactatatccaagtgcatcaaattctaaatcatattagcgggtttttgcatgataccttctacaagtgacagaccacaaatgtgtgcaaagcaagttagtaatgtgacatagggacacaagaaatgaataaacaaacttgagattgaaaataatatatgtttttggttctttaataattgaacgcataacattgagctgaattcccaattgcaataaaattgaatctccagaataatatgtcttcagggtacattaccttgattcgtcattaat

SEQ ID NO: 281545 - DNA, 354 bp, Glycine max
  unsure (1)..(354): unsure at all n locations
agcttgctatcattccaganaaggacaaacccgcgacagaggaaaacactactaatgaaggcggcgcaacttctgtggatgctaataatcaaaacattgccaatgaagcccaagcaaacactgagcaagaaatggagaggaaagtcacgcgggaagcatatgtcaaattaacacgcaagcataaccaatatacacatatcacgaaaaatgaaaactacggggcaaaacactcatgtatatctctctaaaacaaacggccttacaaagctgcgcacccacaacaagaaagaaaataactgccgccgaaaaaaaacgctaaccgggacatcggagaacaaccatgaaaaaatcgca

SEQ ID NO: 281546 - DNA, 364 bp, Glycine max
atattgaaatgatgaatagtttgtgatgtttgtaactggtgtctagatatggactagtacactgcagcgaacaattttgacagcaggtccaattgttgggtttccaaaggttagtgccatccttaagtcaggaaatatggattgacaaaagtatacattattagtgctcctgcacttactatctatatgttagatacaatggcgcgcacttgatgagataaatgccggtgtgtgtgatgggaagacatatgaagaaatcaagaagaacatgccagaggagtacgagtatgtcacaaacttgtaatttgtcttatttccagttgaatgctactggtacatcagataaaaaaaaccagtgcgtggt

SEQ ID NO: 281547 - DNA, 383 bp, Glycine max
ttcttgggcaacatacacacttgctcaaactcatgaaaggaaacacaaactcaatcacagtcatgcattcaattcaaaaccaaatcatacaccaattttcacacaaagataaaagtgttttattgccatatcatcaaaatcaagtcaaactgttccatatacttcagaataagcaaaccaactacccataaataaaactagcagtgtatacaaacataaaagaaatactgtactgaaaccgtaatcataataataataatccaaaaagcaaaaagcatcatcaggaatcaacaatgtcaagagtgtataaattagggaataagtgagagcaacaacttctccagatgacgaataagaaagatcgataattcctccaactgggg

SEQ ID NO: 281548 - DNA, 133 bp, Glycine max
acctggctttttttttacatggaggttggaattaatggaagggagttgtatgccattttggttttaagggtagcaattcttgggtaaaaactaactttccaaatgtttgccttcccaggaatggccccgagga

SEQ ID NO: 281549 - DNA, 413 bp, Glycine max
  unsure (1)..(413): unsure at all n locations
acgatgaagaacgaacgaagaacaacgaagacggtgaataactttcatggaattgatcacaaaagcattacggaagcgtctcgactntgattntttccttctttcatcttctcctcactaattttatgtgatgtctgagctatcaaggtactgaacccctcaaactcagccccttcacaccattttataaggaaaggggggaggtggttgccgcccaactcgcccaggcgagctgggttgcttccacctgaagcaatcccctttctggaatattctagatgggcctagatgggcccagatgctaggtacacccccaatttgattagtgcacccctattttgtgtttttagctaatttctatcggaaacatcatgaaactttatggattatacggcgacaagtgtcaagcatct

SEQ ID NO: 281550 - DNA, 381 bp, Glycine max
  unsure (1)..(381): unsure at all n locations
accttaacnattaatttaataatatnnnaatnaaatnaatagtgggtaatcacattaatttaattttatttaatcactttttttgtaacttggttntgttgtcttctttatctcccctcgtttatatctcaatcaccccgagacaaattaaacgtttatcataactcttatctcatactacttctttaaaaaaaatcgaaaaaaaaaatgcacaatttgaaacttcaaaacagagtcaacgagtgggctccacgcggcgtgcacgcgtgcaacgacacttgggtcccaattcggatccctttgtagctgtaggctgctttgttttcatgagagtcagagccctgaaagtgacacattttcaatattctgccgttctaatca

SEQ ID NO: 281551 - DNA, 389 bp, Glycine max
  unsure (1)..(389): unsure at all n locations
agttctgagagattntgctatgtgaggatctacagagaagcgagtttgaagcgaaagccattctgatagcttgagatgagtttgtgagtgattgtgagatcctagaggtgaaggagacatcctcaccacttgtgtttttgtagtctttcatcttgttcttctctttgttgtaaaggaggtttccgaactatggaaagctaaatcctttgttggatcttccctgtaggtacctgatgtaaatatatttctatttatgtaatgatgctttgtgtgttctctgtgctatctgcttttcattccagtgtgcttttaccttgatcacgtagatgcatgctttgttagggtcattcaacagtgggaactggtctgattttaagtcctggatagta

SEQ ID NO: 281552 - DNA, 100 bp, Glycine max
atacataagaaccagcgcggcgactccccaggcataaccaccactctgacccaggtcgtgaaaagcctctagatgcaccacatgaacatatgttgcactc

SEQ ID NO: 281553 - DNA, 329 bp, Glycine max
  unsure (1)..(329): unsure at all n locations
tcctgagtatgacagncaccgctctatgagcgctgtacaccaccagcgcttcgaggccatcaatggatggtcatttctccgggagcgacgcgtccagctcagggacgacgagtatactgatttccaggaggagatatgccgccggcggtgggcatcactggttacccccatggccaagttcgatccaaaagtagtccttgagttttatgccaatgcttgcccaacagaggaaggcgtgcgtgacatgaggtcctgggtgaggggtcagtggatcccatttgatgcagatgctatcggccagctcctgagatatccgttggtgctggaag

SEQ ID NO: 281554 - DNA, 373 bp, Glycine max
  unsure (1)..(373): unsure at all n locations
cattcactcggccgggatccttaagcgacctgcagcatgcagcttattatactgcgccttatgaaagnagccagagattttaataactaattaaataataggaatattcaacattcagaaaatttagttgacatgtattcaaaatgatatattccctaattacttcaataagatctgtatgtttttccctggcttatattggtttattntattttgtattttcttaagtgtacaccagtctattaaaatttatatatcatgattattaaggagttcaagtggtggtctcaagttgtcttacatagttctttatgaacttctttaggtaaatgaatntagttattttctattctattgctcggcatgtacctga

SEQ ID NO: 281555 - DNA, 446 bp, Glycine max
  unsure (1)..(446): unsure at all n locations
tatatgcaatgtggtaccatgtcagtgaanaacctcgtcgtgctctctangaatacatgacaagacaaaccgcacaataataagtcaagtcactctcactaggtaatatcatagggagaccagtcagggtcacagtgttttgcgagaatgctccaaccatatgggatcaacataggcttaaaggagcactcaaaccgtgtgacccccaaggcctacactccgaagagtccgtcagggcctctccctcctgattcaggtccaacccagaaaacattttagcacacagactctatctatgaactgtacaaaacacacgactcctcaattgttctcaaaataattttaacccgtcgccctttaagggtcttatcattaactcgtcgcccttaaagggacttagcattaactcgtcgtccttgaagggacttatgatcgtgtgattgtac

SEQ ID NO: 281556 - DNA, 273 bp, Glycine max
  unsure (1)..(273): unsure at all n locations
gagctngttttatgtttcttcgatncggcccatattgggtgtggaggtcatggagctctctcaatgaaagcaccagttgttatgaattggcactgggaaatctagaattcgaggtctagggcttccagagcaacaacagggaaagaaaaagtatgtattatgtccgcttaatctgctgcattacatgcatgtgctatgaatagatgctctatgatcattctagacaaataatcctaaccaattttggctttctgtgccttggacgattgaaat

SEQ ID NO: 281557 - DNA, 450 bp, Glycine max
aacgctaaaggctacataaatggaagataaagctgcgataaaagatttgctggaagacgaggaaaacccatatgagaatactgtaagttttaatatatctgatatttgttattgtttagtttcttgcaagcttttaaattgtggttgcaatcaaaattcttttaaaacataaattctgaaaaaaaattaagaaaaaatatgtgaccgatgcaactataattgcggttgaccttggtctctccttgcttaattcgatttatttttcatatatactttatgtttatatccataaatttctagataaatcaaacatatagatgtgtgtatgtatgagcagattttctcacaatataacataattttgagttattaaatgatttttgctaactaattacggacaaataaaacttgcagatgggatctactcttctaagcttgagcctgaataac

SEQ ID NO: 281558 - DNA, 276 bp, Glycine max
aaggagacatcctcaccactcgtggttttgtagactctcatcttggccttctctctgctgcaaaggaggtttccgaactatggaaagctaaatcctttgttggatcttccctgtacgtacctgatgtaaatatatttctatttatgcaatgacgctttgcgtgttctctgtgctatctgctccccattccagagtgcttttaccttgatcacgtagatgcatgcttagttaggggcattcaaccgtgggaactgtgctcgatttaaagtcctggat

SEQ ID NO: 281559 - DNA, 369 bp, Glycine max
  unsure (1)..(369): unsure at all n locations
ggctttacatatgggtaaaaggctcacatncactttctggacctcttattcaaacttgtccaaataaataataaagccatctcgactcaaagaaagtcatataagtctcatacaattaatatagaacctatatcctaatgtcacatcctatcagagcgtggtgttcccgtgtcctctagcatgaggttcttcatagtcatccacctattcatctgctcccccgaacacaaagttcaaatcatcacaggatcgaaacacanacagcaaaccgggagtgaggtatcacattgctaactactagagagaaacaacacaacatatagtaaccaaatacaagttacttagcatatctcacattatgtcatcact

SEQ ID NO: 281560 - DNA, 251 bp, Glycine max
tatcctgcccatggatagttatgatcgagccttgggcaaatggtccccaaattgggaatgaccgttcaaaataattcagatctattcgaatggtgcttatgaatcacatgaattaacccctcagaagcgtactttgagtataaatggtgaatatttgaaaagatatagaccaacatatgctcgaagataatatcaccctctaataggaagacattatggaaacataaaaatggacgatacacagtcttatt

SEQ ID NO: 281561 - DNA, 314 bp, Glycine max
  unsure (1)..(314): unsure at all n locations
agcttgtatattggctagacatgatacatgtcanggcttggtttggttcaaggataaaagggatgccccacattatttccatgacacaaatgcaaaaatgatgaattggaaattttatgcaaaactggtcatgcatgcgcctatgcggacgctcaagtgtcaaatttttatggtcatgtgatgctaaggctcaagatacatttcctctattttaaatcaacccaatgtttccacaatatgttcttttatcaatttgtgcattcctccaagtccatttcgggcgtccggggaaattttcacagcattcacccttc

SEQ ID NO: 281562 - DNA, 440 bp, Glycine max
  unsure (1)..(440): unsure at all n locations
ctataaatactcagctgccgcccatctcgcccaggcccagtgggcctgtttgtttttgcccccctttttactcaatgcaccccccttctatttttttgtaattctttttccgtaacgttacgaaactttgcgaattttgtaacgatacttattttccttccgcaaggttacgaatccttacggattatgtatttacttttttttagctttcgaagaagttacgaaaactcatggattgcgcaaaaacacctctttttgacttccaccacattacggaatttcacagatcgcgcaagcctgcttccttttgatttctgagacgtctcgggacttcatttattgtgcaacaaaggacgccaagtatctcaaagcggctaaccaaaggttgcatgtcatcaagtaataatccccggatgaaattanggtatgacaggctttta

SEQ ID NO: 281563 - DNA, 350 bp, Glycine max
  unsure (1)..(350): unsure at all n locations
agcttatactggcatcacttcatcttggttgcgatcgactactttaccaaataggtcgaagccgcctcatactctagcgtcacgaggaatgtggttgttacgttcatcaaaagggagataatctattggtatggattgccaaggaagattatcacaaacaatggcaccaatctgaataacaaaatgatgaaagaaatgtgcgaagagttcaagatccagcacggcgattccacgccttactagcctaagatgaatggggcagtagaggcggccaacaagaatatcaagaagattatttagaaaatgactctgtcatataaggaatggcatganactcctcctttcatgct

SEQ ID NO: 281564 - DNA, 438 bp, Glycine max
  unsure (1)..(438): unsure at all n locations
tttgctctatttgaacaaatctttctgccatgtcactcattactgtctgngatcttatttctgtgcccatgaatgaaaagattctggtctagtggccgtagacagccagctctgaataccaactgttataggatttaggtgggaaagagaaagaaacagaatgacagagaaagaaagaggcaaagagagaagaaaaggatagagaggatagaagggaagagaaacaaagagctcaaggaaatatgctctgcactatgtgattatcatttggtctctctaaaatacgacagacctgccttattatagacagctacccaataacctaacagccaagagacaacagtagctgactaaaactaacaaactgacatcccttttctttttatttacatattatatacaatgaaagattaatatcagattagtcagccttaacaa

SEQ ID NO: 281565 - DNA, 398 bp, Glycine max
  unsure (1)..(398): unsure at all n locations
gcgatcagctcggacccgggatccttaagcgaccgcggccaggcaggctttttatatatacactaggttaaggacttaaggcttttataaaagtctatttagtcataaattcaaacttatttcatttgaaaagtctcttaggcctaacacacacattataagaagtttattataaaatataattttgattaatggtcatgaaaaaatagaataaacctaacaatggaatattttcttatttataaacaggttaacctcgactcttacaaaatnttacctacattattacactcttatcttggtatatataaagagagttttgtcattaacctattagcagattagtttatttagagattaagtcagtcctacataaaactttaatgtaaaataaactt

SEQ ID NO: 281566 - DNA, 333 bp, Glycine max
  unsure (1)..(333): unsure at all n locations
tagtcaaaatcaatcattgattaacctccaagcaaagattgaagctntagctaggaattttagtttccataggtcctgaagcgctccatccagatttgcctccactaaactttcttgcagcaagttataggccctccttgtagagtaatatccgttaggctcagatttccacatccaacaatctgttgtatgttgctggattgcaatctgtgagatgtcttccataaaacctacagccgatgcgatttcattatcaaacaaaggccttctccatcaaaggttccattcccatgctgagtcattgaaacttcccacttgctggatgagtttatg

SEQ ID NO: 281567 - DNA, 234 bp, Glycine max
acctggagattaggaagggttgaagggtgaaccttccggcgtttatggtggcccacagagtggtacctggagatatgtcgcgggggtcaggagaccttggggacgtcaggtggggtgctattgcccaaaaccaagcttgaccaatcccgacccaacccgggcatagtcggtcagtgagaacatgtgacgtacctaagcacgcgagctcctggcagtcaacagataaaaggaaaa

SEQ ID NO: 281568 - DNA, 396 bp, Glycine max
  unsure (1)..(396): unsure at all n locations
gaagaacgtcgaagaacgggggaaacctttgcgaaattcttcacggaaaacgttacggaaacgtttcggaagcgcctcggcttagattttcttcacggaaacgatttttccaagcaaattcgaaagagagagaagtgccaaaggggctgaacccttttcttcttcacttcctcccctatttatagcaaaataggggaggtggttgccgcccagctcgcccaggcgagccaggttgcttcctccagaagcaacagccttctggaggaatattctggagggcccaagtgggccttgggtgctattgcacccccatttttactaagtacacccgcctctgcttttttggtgatttctttttcgtanagttacgganacttacgaattccgtaacgatac

SEQ ID NO: 281569 - DNA, 325 bp, Glycine max
cccctgtcgcccctattctttaggcgttcacaccagtggaagaaacgtagaccaactgtcctctcttcaatacaacctcgattctttccccggcaaacaccaaatccgcgaagctggacggcatgcaacccactagcttctcatattacaacactggcagagtagctaccatcatggtgatcatctctatctcaaccatgggaggagctacttgtgccatcaaattccttcatcactgcgcatagtctataaaggatccaccctctatcttaaacatattctgcagacgagcacggtcaagagccatatcataatagtactgata

SEQ ID NO: 281570 - DNA, 376 bp, Glycine max
ataggggagatattaaaattaaattaaaagaaattaatatattaatattggacgataaatactttcaatgcattttttgtttaattatttattaattctttttagttgaaaataatatagttttatttaacatatacatgttttgtgccatgcaaatattaatatcgtgtgatgtttatatgattcatgaggtgtgagaacatgttgcgttgggattataatattgtgattgagattgagtataagtgtttggttaatacttgatgtgatattatttgtgttgtgaattgtgaattatacaataactcgactggagtgtaccttgagataagtgtttatgcgcgaggattacctaagataaggattacctaaatta

SEQ ID NO: 281571 - DNA, 309 bp, Glycine max
  unsure (1)..(309): unsure at all n locations
agctngattttgaatgcanaagaacacaagagngggggcatattatgtgaagctacccttttaggccaacaatcagctatgggctacgccatgataatttccttacaccttggtgtttagaaattttgttcatcatgaacatgtaggggtagaataggtaacaaaatacctttagtgatttacggctntggatatggctgcaagatacttggatgtgtgtacatgtaatttttttttggatagccgaaatgtctcacaaaatgaatatatgttgcatgttatgtaaaaaaaatacctcacaaaaatacc

SEQ ID NO: 281572 - DNA, 445 bp, Glycine max
  unsure (1)..(445): unsure at all n locations
taggacaatgtccagtctatttcaattgttacccaaacaatancttgagtttaatggatagaatcattcgtaactctctgttcctaaacatccactttcatggacatgacatgaaagaaggatcaatcccaacagcattgatatataagattcagtacaaggtcatgaacacttgtgcataaagagtccttctaaaaccacaatgaggagagacaactttgtttatcactgacatgacaaaggccaatgtttctctcccaagagccataaaatgggatgaggtaactcttcctgaaaaataggtcatggacaaggccactccgtcagtccctggatccgctccaacatagaacaaattaagcaagacaactccggtaaggtagaaataaccttccatacgagaaattatctttcatcaagactagaagcctcaagattcgacaac

SEQ ID NO: 281573 - DNA, 440 bp, Glycine max
ctaagctcttctatttttttggctggaaagccaaaggggtttattctttcagggaacagcttgaagacttgggaagaggttgtagagaaatttctgaagaagtactttctagagtccaagacaactgaaggcaaggcaactatctcctcattccattaattcccaaatgaatccctgagtgaagcgcttgagagattccgtagcttgttgtgaaaaacaccaactcatggattctccgagccgattcaattgaacattttcatagatggtttgagatcgcagttcaagcagttattggatgcttctgttggaggaaaaattatattgaagacccatgaagaagcaatgaaacttattgaaatatggcagctagtgatcatgcgaatttgcgtgataggactcatgtacccacaaagagaagcctactggagctttcttca

SEQ ID NO: 281574 - DNA, 440 bp, Glycine max
  unsure (1)..(440): unsure at all n locations
tgaaggtatgaaagaatgcttcgttcaaaagtnagnaacttcaatttttcaactcttctagtatttataggtttcacaagtgtttgttgtctctaaacaatcttcaaatgcgtctaatgtagtatatggagaaggtgtgtgttgggagcactaaatgcatgtcctttccatactaataaactattatgtttatcttccttgacctacactcctactatagtttttagtggtcaaatcaacttcaaatgtagaacaagtatgctaataagaatgacatgtctttttacgtgaagaaactatttaaacttgattgttatcttattctattcattctagacaagtcataggaagaatgtttaaacattctttatacaaaagatcaagagatcataatattaacttagtcttttaataacatttaatgtttgttggttttcatc

SEQ ID NO: 281575 - DNA, 359 bp, Glycine max
  unsure (1)..(359): unsure at all n locations
tgctanagaactgaggagaaatgacaatgcggccgattgattttgttatactaacgagcacatcttaagcgcttactgcgcacaacggaggcctctcgcgaatgaggcggctatgcctgcttctgatgacgcatggacacttatccctgacccgactacaattcttgcgaaaggtcggacgaaatcagccacgatcagaggtgatatggattgggtcccaccatctgagcaccgcacaaaatgtatcatatgtggaagccaaaggcataaccagcgtaggtgggcaatgcaatcttaacatgataggtgatcgaatcgttgattcatgtatgttaccccactgatgtgcatttgcttac

SEQ ID NO: 281576 - DNA, 306 bp, Glycine max
agcttattttcatgacccctgaacatgtaataaatattaaactatagattacgtaaaaatttcgttgaggtttgtgttcttaataattaattaattattcaaatgtattatttcaactcttgtggaatccatatctctaatctttggagcttattgagtcaagagctctcaaagactccttcatatggtcaacctgcaccacactaatatgcttctcaatagtataatgacaataagtggatatagttagactttaattctggctacaacaaagcataccagatcccttaaaaaacatggacaaac

SEQ ID NO: 281577 - DNA, 443 bp, Glycine max
tgccaaagctatcactgatgaagatcgaggtatgtatagttttgggattaccaaaaaagatacaaaggattatggttgagcaatagaagaaaaaaaatacaaggaagcaatcacagaagaaggaagaagaggaggagctatttgcatgggagcacaggacaatgaagagacatgaacaatgtaatgcgttcaccagttgaaacatcagtaccacaaaggctgaagaacctgagtaagactaatgaaaatgacgaggggtttgtacaaacagctttccaaaagagaaaggttgtagccctagttgcccctgccccagaatgagctaagaccgtccaacatgcttcagaaactcaaagaacctatcattctttctgtcatacccagacacattgtaacaagggctacaaatgccaatgccaagattggtgaaaatgaatggatag

SEQ ID NO: 281578 - DNA, 327 bp, Glycine max
  unsure (1)..(327): unsure at all n locations
agcttttcatttgcttanacacggcnacnaagaaaacggggagattgtgagactgancatcgctaaaccttattgccccttgagagtcgattggtatcataagtgacaagagactgattactgcctgaggatgtgttaccttagattgcatgatacccggtccttatttgatgatcttgtaactctcaagtatacatgctttacccggtggacctaaatcaggccatttcgatggcatcatatcatgcgttatcctcagaaccacctatggctcgtggtccaactgtttacattcataatcctaatagacgtgaaaacgtcaacaac

SEQ ID NO: 281579 - DNA, 310 bp, Glycine max
  unsure (1)..(310): unsure at all n locations
ataatcatcancaatcagcgggcgtatgttgttcaaaaataaaatctcaacatcatctattatacaaatttacataatatataataacaagctagttcataaaccaatcgagtcaaattatacataattcaaatgaaacttatatatgcaatcagtgaaaatagtaacgtaattagttcagaacattaagctgatgaataagttcaaggagtgaatcatcggactcaagaccgaatgactaaatgcctatatagtttagtgtaggtgttatccgtatcaatagaatcgtaggactatccggcagagaatc

SEQ ID NO: 281580 - DNA, 333 bp, Glycine max
  unsure (1)..(333): unsure at all n locations
agcttatgtttattcgaatnnctcaagagnnnccgggggcaattgcgagcgngnanangacccatgtccccgaatcggacatctgtgtgaaaagttatgaccattcgattttctcgagagcttccgttgttcaatttccagcgtctcgatatattatgaccccgaatcggacatctgtgtgacaacgtatgaccattcgattttctcgagagcttccgttgttcaaatttcgagcgtctagatgaattatggtcccgaatcggacattcgcgtgagaacttatgaccattctaatttgtcgagaggctccgttgttcaatttcgagcgtctag

SEQ ID NO: 281581 - DNA, 429 bp, Glycine max
tataagctgaaccattttatcaataaacacatgttgttttttattcagaaaattagagtttatctcttttatcttagtgagagtgattctcctaaattcttgagtgattcaagaacaccctggctgtatcaaaggactttcacaacctttgtgtgttgtcctcgctggaaagagtgattctttccttccaatcatctccacccttgttctttcaaaccacaattccagaaaatccacctctgcccaaaattatctcgtgaccataactcccattttacacactcacattaagtgattcttgagcctaaattgaatttcaaaacgagacctttcacctcgttttggaatcacctcatttggagccctgtagcttccgttattgccatttctatatttctgtccagccaccacttaacctatcgtttacca

SEQ ID NO: 281582 - DNA, 445 bp, Glycine max
  unsure (1)..(445): unsure at all n locations
ntgacttgagtcatcaagagattataaatatgtgaccatgtgtctgtgtntaaataatcatcatcaatcatctttgaatcatctatctttcaatctttttcaacatcatctctcaaacatctttcaatcaatctttcaatatctttctacataattttctgattcatttctcttcatatttctaaaagttttttatcaacactttctcttccaagaaaagttctttgttcaaaaacttatgctattcatctttttcgttctcttctccctttgccaaaagaacgaaggactaattgccttaattcttttgtgtctctcttctcccttacaaaagattcaaaggactaaccgcctgagaattctttcgattcttctcttccccttaagcaaaatatttcaaaggactaaccgcctgagaattctttngattcttctcttcccctta

SEQ ID NO: 281583 - DNA, 329 bp, Glycine max
  unsure (1)..(329): unsure at all n locations
agcttgccnatttatacctgaaatcgagagaaaatgattatgaaacacacaaaatgaaaatactaagtatttattgactatacataacagaaaattcttataacactacaaaataaccataagttgggagagttagatacaatttatacaagttttatacacaaaagttagtcgttttcaccgactaacaataggctgaactcagtggacaagcaagtcaaaaagattcattctaacaaaaagttgttgttctccaatgttaatcaacttcagaagactcttaatgacttctttgagagattcctccactttgaggaaagggtttatga

SEQ ID NO: 281584 - DNA, 316 bp, Glycine max
cctttatctcagctttgagatcgatgatcaggtgtgagttctaagatgcaaagacaatgcggaccttatgtacaagagagacttagataagatgattcagatgatcgacacataggtcaaaaaaattattcagatcagttatgattcatgtccaagatcaatcaagatcagactaagattcagatcagagaagacttatcgatagtttaaagttttcaaatgtacactgatttctaaaccttccaaagtttctttggacataccaatggatcatacctacaatggtcaaacttactattaccgtcatgtcaaatgt

SEQ ID NO: 281585 - DNA, 302 bp, Glycine max
acgacaataactttggactcggatgtgtgattgtttcccgtaatatatccgaacgctcgaagttgaatgttgaagctctgagcatatgcaaacgacaataacctttttactcagatgtcggatggagtcccgaattatatggagacgctcgaaatgtaatcccgaagcatggatcaaattcaaacgacaataacttttgagtcggatgtccgattgagtcccgcaatatatcggaacgctcgaaatggaatgtagaagcgctgagcaattctaaacgaccataacctgttactcggatgtcg

SEQ ID NO: 281586 - DNA, 391 bp, Glycine max
  unsure (1)..(391): unsure at all n locations
agatcaacttgatgttctatgcttcttgaaagtgtcagtccatgaggaatctccttgggaaagacatctttaaattcctgcaataagggttgaacactaggagaaacataaatagttaactgattagaattatcactctctctctcttgtgtatcactcttttcctcaggtgtatcactcttctttttcgtattccattgtggtgcctcactattttctttctcttgttcaatttcgagcgtctcgatatattatccgcctgaatctgacgtccgtgtgaaaagttatgaccatttgaatttctagagagctttcgttgttcaatttcgagcgtctcgatatattatgcgcttgaatcggacctncgagtgaaaatctatgaccatttgaa

SEQ ID NO: 281587 - DNA, 192 bp, Glycine max
agcttgtcgtatcaattacgagcgtctcgatatactatgaaatgcaatcaaacatctaagtaaaaagttatagtcgtttggatctgctcagagcttctgttttcaatttcaagtgtctcgctatattacaggactcgatcagacgttcaagttaaatgttattggccgtttaatttgctacgaacttccatt

SEQ ID NO: 281588 - DNA, 442 bp, Glycine max
  unsure (1)..(442): unsure at all n locations
cattgataatagaagctatgagcaaattcaaacgacatttactttttactccgatgtccgattgtgtgccgtagtatatcgagactcccgtaattgaaaacagaagctcgtagcaaattcaaacgacaataatattctactcagatgtccgattatgtcccgtagtatatccatacgctcgtaattgaaaacagaagctcgtagaaaattcaaacgacaacaactttcaactcagatgtccgattgagtgctctaatatatcgagacgcttgaaattgaaagcagaagctcttagcatattctaaggactataacttatatctcggatgtccgattgggtaccataatatatcgagatgctcgaaattgacaatggaagctcgtagcaaatactaacgaccataacattntactcggatgtccgattgtgacccgtaatata

SEQ ID NO: 281589 - DNA, 340 bp, Glycine max
agcttgctttattcctgccccacttctaatacttttatcattttctaaaggtttaattgcattttaagaaaattatgtgaaattttaaaagtaggagacaaaaaattggggataagaatagattagatcatccgttaggtatctatggtctcaccaataataagcttatgttatatcatacttctttagaaaataaataggttaagaccttttaaaagtctatttagttaaaaaaaattggactttatcacttaaaaaatcttttagacataatagatcaatcttagtgttattattatattacatttgtgatgatatattgaatacttgtctatcggaa

SEQ ID NO: 281590 - DNA, 445 bp, Glycine max
  unsure (1)..(445): unsure at all n locations
ntgcggatttggtcttcgccagtgaaaggatcgaagtggttctgataagaggcaaatttaatcatcctgcttggacgaatgagaaaactggggcaaataaagagggtgaggatgagggagaaacccatgttgtgactgccatccctgtacggccaagtttcccaccaacccaacaatgtcattactcagccaataacaaacctcctccttacccaccacccagttatccacaaaggccatccctaaatcaaccacaaagcctgtctaccgcacttccaatgacgaagaccacctttagcacaaaccaaaaaacaccaaccaagaaatgaattttgcagcgagaaagcctgtagaattcaccccaattccagtgtcctatgctgacttgctcccatatctacttgataattcaatggtagccataaccctagccaaggttcatcaa

SEQ ID NO: 281591 - DNA, 361 bp, Glycine max
aaacagcacaagctatcacagccaagcaaaacagggcaaaggcagaaaactctgctcaacacaccaaccaaaatcacagcttttctcactcaaagaccccagtaacaattccttcgatccaatttgttaaccgttggatcgactccaaaattttactggaagtctatagtacataagcctacattgtgaccgttgggatctactagcaaacatctagaactcattctgcactactctttccacaaccagcgaaaacatagcatttttctgcacgtgtgcaaaatcctgctgcacaatttcacaagcaaaatctgcacaaagtgcagatttcgaaattcacactttctctcatgcaatcttg

SEQ ID NO: 281592 - DNA, 297 bp, Glycine max
ggcgacgcaatccggaacggtccacaaggaatacccgggtcccccactttatttgagaaaactggaaaccaaaaatgcgactacaactttagtgaaagttgggagtgttttacccgagaagattacacccccactcgtccgggacgagcttatcaatgtgcaactgattgatttatgtccttttatgtttatcctttataccctttatattttttttgggcgacagggttccttgtctatattctattggagagaatcaactactgtcttttataggattttttacttaaggacttt

SEQ ID NO: 281593 - DNA, 346 bp, Glycine max
  unsure (1)..(346): unsure at all n locations
nagctatactttctaattcgaccgtctcgatatatatggggactcattcagacttccgagtaaaaagttattgtcgtttgaatttgctcaaagcttaaacattcaatttcgaatgtctcgatatattacgggactcaatcaaacatacgagaaaaatgttattgtcgtttgaatttgctctgagcttcaacattcaatttcgagcgtctcgttatatcacgggacttaatcagacatccgagtaaaaagttattgtcgtttgaatttgctcagagcttaaacattcaatttcgaatgtctcgatatattaccggactcaattcaacatacgagaaaaatgttattg

SEQ ID NO: 281594 - DNA, 348 bp, Glycine max
tccggagtatgatagtcaccgctttatgagcgctgtacaccagcagcgcttctaggccatcaagggatggtcgtttctccgggagcgacgcgtccagcttatggatgacgagtatacagatttccaggaggaaatatggcgccgacggtggacatcactggttactcccatggccaagttcgatcaagaaataatccttgagttttatgccaatgcttggccaacagaggagggcgtgcgtgacatgagatcctgggtaaggggtcagtggatcccgtttgatgccgacgctatcggccagctcctgagatatccgttggtgttggaagagggccaggaatgtgagta

SEQ ID NO: 281595 - DNA, 229 bp, Glycine max
  unsure (1)..(229): unsure at all n locations
agctttttttggaccttgaacaagcaattaactcctctntcagaaccatgctatgtgctcgtgactggtccctttcttcccttcgcaacttgagttcgctattgctaccccatagagcttcgcgaaatttattccggccatactcttccttgcgagctctcttggtctcttgttcaagggctcttggcggaatcgcattctctttccgtaacccgcacactcctttcga

SEQ ID NO: 281596 - DNA, 408 bp, Glycine max
  unsure (1)..(408): unsure at all n locations
atttagtagatgaagatgaatccatggtcttctcttggactcctctaagaacaataacatcattgcttacactgaattgttgggagttggaagccatcttctcaatcaaattcctagcttcagcaggggtcatatcaccaagagctccaccactggcagcatcaatcatactcctctccatgttgctaagaccctcatagaaatattgaagaaggagttgctcanaaatctggtggtgaggacagcatgcacacaatttcttgaatctttcccagtactcatacaggctttctccactaagttgattgatacctgaaatgtcttttctgatggcagtggtcctagatgcaaggaagaatttctccaagaacaccctcttaaggtcatcccagctgaaaatggacctgg

SEQ ID NO: 281597 - DNA, 306 bp, Glycine max
agctttttttcatgcacaacgtgtgaccatatgatgtgtcaatggggtgtaacaagcatatgctaaccctccccgcataaatttaatgggagagaccttctcccctgctatgaatagattatatcatcccacacgtctctaatgccctccctgcatgaaacatatcttatatcctacttcttcaaaaactaaattaggtgagaccttatacaagggcatataaatacaaaaaatctgacattctctctctacataattgttccacataatagatcactcttagtgctgttattatattaaatccgg

SEQ ID NO: 281598 - DNA, 439 bp, Glycine max
  unsure (1)..(439): unsure at all n locations
taactnttctttntctttggcttgtacctcactgttttcattgatctaaacaccttataaaaaagatgagtttctcctacttctttctttataccaacacatgtaacattagagagagaaatagataggataataagaagtatacatacaataatcaataagtaatatgatttaataaaaagatggagagacagagagaaatatatagctagtcaatatggtccttaaagtgtattgatgtttcaagttaatcgctaaatgttaataaactaatttgtttttttgaaaagtagtgccatatttcacattcgtgtttcatcttagatagatagatcatgtaatcattaaaaagtaattaagttcttgcgcgcatataaagactaaattgtatnttaatgagaataaatatggacatatctgacacaaactatgaatgtga

SEQ ID NO: 281599 - DNA, 329 bp, Glycine max
  unsure (1)..(329): unsure at all n locations
agcttttgtttctttcaacacanaatctangtatccgaaacccctcaatttaatggattntcaacgcttgagaagtgaaattgagaatggcgtaaatttggagcaaactctcacctcacacaagtctataacatcaatttcaacttgctcaaactggatttacacctaaaattccaccgaatcaaaatatgactcctcaacacccaattttaccctagaaatggctctttgctcactttggtcatttgtttttctctcttgcacagcccacactttctcataagtcttaaatgacatttcaagctatgattaactcacttttaacctca

SEQ ID NO: 281600 - DNA, 381 bp, Glycine max
  unsure (1)..(381): unsure at all n locations
actcaaccttctggaggaagcctcttaatgaagcttctagagatttctatgngtatagcttcctcggtaaaaatgctatgcagcctttgttaaccgttggatcttcgcgaaatttgttctgcaatttcaaaagacaattttccatgatctgaccgttcggatctttgagaagatgtctgtagtgtgctagaagcctcttaatgaagcttctagaggaagcctcttaatgaagcttctagaggaagcctcttaatgaagcttctagagaaaactacatgaagctgcctcggtaaaaatgctgcccagcctacgttaaccgttgaatctttntgaaatttggtttgcaacttcacaagacacttttccatgatctgaccgtgc

SEQ ID NO: 281601 - DNA, 212 bp, Glycine max
  unsure (1)..(212): unsure at all n locations
gaaagattcagaaaatggaatgatttactcactttgcttaacagctcactttctgttcaagcttaattttgaaaggactgcaactgcttgatcaccacccagaagataataaggatgtcccatagcaacagcggcagataaacagcctcttcttanggaacctctctcagatacaagcattgtggctaagtcccaccctctaccaaattcac

SEQ ID NO: 281602 - DNA, 370 bp, Glycine max
  unsure (1)..(370): unsure at all n locations
aggagatatccccttgacagccatntcaaaatataaatcataggcctccggaacaagtntatctttgcaaaggctattaatgattgtgttgttgtaagttacaccgctcttacatctctctcaacaacttcaaggcagctcttgtttctccaactttgcataacacattgatcaaatcanagtcctgtaactaacttgatccagttgaaatccttcggttgccacattgtcatgaaagtgtagtgctttcttgacctcaacagtgagacataaaccattcatgagtgtgtgaaagatatgatgtctgcgataacccatcttgagaaagggcaatgttatttgaggaggatgatcatagtaacattgctat

SEQ ID NO: 281603 - DNA, 207 bp, Glycine max
tcaagcttcttatccaaggtatattctggaggagaagctccttcttccttggcttattgcctacaggatggtgcctcccctatcctcttctcctttgacttccgctgcatctccatggtgaaaaatcaccattgaaggacctcattgaagctcaaagatccagcctccgtagaagctccacaagcaagcttccatcaagtggtaatc

SEQ ID NO: 281604 - DNA, 356 bp, Glycine max
gatgaccaagagctcatgagagtcaaagaacatccatctcaagagaatctagaacaagtcaaagagttcaagaatcaagaagaattcaagactcaagaagaaagcctacaaacaagaatcaagattcacgatctcaagaatcaagatcaagattcaagactcaagattcaagaatgaagaaaagactcaatcaagataagtattaaaaagtttttcaaaactttgaatagcacatgagtttttgacaaaacctttaccaaagagtttttactctctggtaatcgattaccatattgttgtaatcgattaccagtagcaaaatgagtttgaaaatgttttcaaactgaatttacaac

SEQ ID NO: 281605 - DNA, 451 bp, Glycine max
  unsure (1)..(451): unsure at all n locations
agannaagcggganagttgagacttgtanactgagacattcgcacggccccgggatcctctnagtccacctgaggcatgcaaccttggagtgttgcgtancctaccatctttttatagaaaagtatccataatgtgtctaccatcacgattatcggctccctttccataatagggggtcccacttgtgcacgcagatcccttcaccttttgggcgagttctttgaagaatcgtcctccttttgcaaatggctaaattgcatccattcggaccatatcaaattgactgatactgccaacaaagcaccatatgtcctccaagaaggctcagaagatccagtagggtccaggtacactacccaatagactttttgaaagaatgattacaattcctatctttgctatcctccatattgacatcatcttaatggtctggacaatagtccctgaccg

SEQ ID NO: 281606 - DNA, 403 bp, Glycine max
  unsure (1)..(403): unsure at all n locations
agcaaaatcctgactccctataccttgaccagggttttaatgtctatccttactctcggaagcgagaagaatagaacggatatntccaatcaaagataaggaaagaacgaagatttccaatcaaagagaaagcacaatagataagaacgacaattccccaatcaaagagtgggagaaagcaaaaagaaaagaatgaaaattcccaatctaagaatgggagacagtaaaaaaggaagaatatgatggaaagatagctcctgatcagggatcgaacgaaaacatatgatatgtgcagataggtctttggaccggacaatatctgaacaatacagaattttcaccaaatgaacaaaaagaagaaaggaaaccacgacctataatggtcttatccctttgattacca

SEQ ID NO: 281607 - DNA, 294 bp, Glycine max
ccgaccgggaccctaacgcctcggctgcacctcatttaatagtctcccaatcctattccaagggatcttcataaccccatcttatgagaggtaccctctgaaacccatgcatttatcagcatgactaatttggaaccatgaatagcctattccccccagagaagattcataatgattctcttgaactaccttgaaacttaataatggctgaagaaaaacatcatcactaaaccaaactatacattgctagatgataaattcaattcaatgagatctagaatggaccttcatacc

SEQ ID NO: 281608 - DNA, 458 bp, Glycine max
  unsure (1)..(458): unsure at all n locations
aactaagctattcaactcttaaatactaccattacatagacaatgattcctcattttgttgacactntttaacatggaacttgaaaaagtgggtctaaagctcaacgagactctattattctatggtgccaggcatttttttcaatgagtcacaaactatatacccataacttattagaatcttctgaaggaatgttgagtttgtcaataagaagacgatagcatccaaggttctaggagtcaaagttgtattgtccaacaatactcgccaaggcaatagggtgccttcgtgaaggcaatacctaccaagagagatgggagaagaactatgactcccatgtaacaagggcactctatagggaaaatgctgagaatatatgtgatcaaaagactatagtaaacggcattatgtgcgagaaggctaagaattgggccaacactctgaataagagtgttct

SEQ ID NO: 281609 - DNA, 318 bp, Glycine max
  unsure (1)..(318): unsure at all n locations
agctgtagatttcaatggaatctntngtttttgagtagttgtccaagagggttttgggacttcattcaactgattgtccaatccagtagtttgtagttgtcatgttctacaatctcccaaaggtctatatgaataaactcganatgagctatcatatgttccttccaataatcgtaattgatgcctttgaatntggtggcttatttgtggaatattcttcttccatatctattngactttaagatctctcctctgtatttcttaaaatactcaagccgagagacctggctctaatgccaactataatataacatatca

SEQ ID NO: 281610 - DNA, 424 bp, Glycine max
  unsure (1)..(424): unsure at all n locations
agcttnctttcatacccacttcatcaaatgtcatgttacaacccctcaccgnccattaaacactgttgctcaatctccaccgaaaggtggcatgccttaccaaaaaccaccctatagggagaaatccccaaaggtgtccggtaagcggtcctatgggcctatagagcatccttaagtagcttgctccaatcctttntgttgggctgcactagcttctgcaacacttgttttatctctctattaaaaacctccgcttgtccattagtttatggatgataagctgcaacaattgtatgaacaaccccatacttttggagcaaggatgccaatgacttgttatagaagtggctcccttggtcactgataatggctctaggctgactacaacctgcaaaaagttagatctcacataatccacaacaac

SEQ ID NO: 281611 - DNA, 265 bp, Glycine max
catgaggtcctttaatggtgattttcaccatggagatgcagcggaagacaaaggagaagatgtgagaggaggcgccatccactatggaataagccatggaagaaggagcttcaccaccaagatgagccttggataagaagcttggaaggatgcttcaatggaggaaaagaaagacggagagaaagagagaggggggagcacgaaattgaaggaataaaagagggagagaagtggaactttgaagtatgtctcacaagactctcat

SEQ ID NO: 281612 - DNA, 197 bp, Glycine max
agcttaaatatgtgggtaggattgtgctcacacgcttaacacaaatataaatctattagtgcgcataagtgaatattggcttagcgcgctaatatcatttaacagatgaactgaaacggtgcacttgatgaactccagaggtgcgctctgacagataatcttcttctggatattttcttgcgcttagccactgagtg

SEQ ID NO: 281613 - DNA, 514 bp, Glycine max
  unsure (1)..(514): unsure at all n locations
ccgctaggctttgctnctcgatacattttgaaactngnagaaccncaggannnncnagaggatacctgcaagcatgccagcnagaatttgtgtgctttcttgcaggaatagaacgagagaacgaatgagagaggcgggagcgccaaattgtaagaagaatactggagatgaattgaactttgagttgtgtctcacaagactctcattcatcaaagttgcttcaagcgctacgcatgcttctatttatataccaggtagcttccttgataagctgtcttgataaaacttgcttgaagagctctttgagataacttgcttgacaagctacaacctagcatcacacattcctctcataactaagctcaccttcttgagaagcttccctatgaagattcctaaagaagctagagcttagctacacatacctctctgatagctaaggctatctccttgagatgagaagctagagcctaacttcacacctcctattatagctcagctcaccgcatgacan

SEQ ID NO: 281614 - DNA, 268 bp, Glycine max
atattatgcgctcgaatcgaacatccgtgtgaaaagtgatgaccatttgagtttctcgagagcttccgtggttcaattccgagcgtctatacatattatgtgcccgaatctgaccttcgtgtgaaaagatatgaccatttgaatttctcgagagcttccgacgttagatttctagcgtcgcgatatattgaattcctgaatcggagctccgtgtgaaaagctttgaccatatgattttctcgaaagctatcgtggtcaatttcgagcg

SEQ ID NO: 281615 - DNA, 362 bp, Glycine max
  unsure (1)..(362): unsure at all n locations
ttagcttattctctcttacgttattgaggtcgttggtccaacaggtcccttaatcactnttcttgagtaagaagaaagagaagaagatatctctcttgtgaaggagaactggacgtagccttatttgagtgaactaatataaattaaatgtttctacttatctcttaagatattcgatcagtattctctttaacttatattgacacactctatcccacaagtgttatcttaaaagatctttgtggtatattgatctatcgattagtggacgacaatgtctttgttctcattaaaactggtttaatcattgatgacactatcactaacatggcttattgcatatttatctgagaaaaacaact

SEQ ID NO: 281616 - DNA, 465 bp, Glycine max
  unsure (1)..(465): unsure at all n locations
acacatagaaactcaagcttcttaggaatcttcttaagaagcttctcagtgttgtgagtttanttatgaaaggggtgtgtgtagctaagctctagcttctcaaggaagttttctcaaagaagcttctcaaggaagttttctcaagatagcttctcaaggaagctacctagtctataaatagaagcatctgtaacacgtgttgtaactttgatgaatgagagtcttgtgagacacaactcanagttcaacttctcttcctttttcttccttcaatttcgtgctcccccctctctctttctctccctctttcttttcctccattgaagcatcctctccaagcttcttatccaaggctcatcttggtggtgaagctccttcttccatggcttattccctagtggatggcgccacctcttacctctcctcctttatcttccgctgcatctccatggtggaaaatcacca

SEQ ID NO: 281617 - DNA, 315 bp, Glycine max
tagcttagcttatataatttcaaagatggaagatactttaacataatttatgcaggtatccatcacaatccagaagaacattgatgcttctattaaagatctagaagttcaagttggacaactgtaaaaatagctatctgaacatggaagtggatctttctcagcaaccacacaggtcaaccaatatgaacattgtaatttaattacaacaaggtgggggactgtggttggtttgaaggataataatgagaaaaagaataaagaatgagttgaaatgaatacgagataaatgatgatgtggtgactactgaaaaa

SEQ ID NO: 281618 - DNA, 465 bp, Glycine max
  unsure (1)..(465): unsure at all n locations
tagaaactcaagcttcttcnttgtttgctaagagacggacccaagatgtctctcctttctctgngcatgaacggaggctgtctagcgggcaagcatgcctcacctctcggcgaacaacgtgtgaaaccaaccatacataaagagccggagtacaacaaacaatcctcgtactgctcttctcacatcttcggtcgagagtgtcatatatgtcagctagcatagcgacaaccgagctttccttgtggtcatgataagcaagaaaagcgacgatcgctgctgcgtccaccaacccatccacatgtggaaagaggactcctccgaagctcaacagtgcgagaatgtctatgaacggtgcccattcgcctctacctgccaagatacttgcctatgcctataagcattttctcagtattccaaccaccccatctttgacttgctctctgtggtctaattcctgcgccgaga

SEQ ID NO: 281619 - DNA, 291 bp, Glycine max
  unsure (1)..(291): unsure at all n locations
ttctgctntgttttcanaaatcactanaaactgtgttaaggtccaacgctttaaacgatcctctatgctcttatcggttaacatggaccattcaaaagcatagaatcaacacgcgactttaccacttttgcaagaactacgtaggtctgaattcctcatctcaattgaagatacgtacgagcacacgccacgcttttgtcaaccacccagagatcattaaggcgcacgccttaacgatctctccttcaaaaccagaaatcgttatggtccacgcctaacgttctctctttc

SEQ ID NO: 281620 - DNA, 356 bp, Glycine max
  unsure (1)..(356): unsure at all n locations
tacaaactcaagcttgcctcnagaggtccaggaaggacaaggctgcttgaatgaactatttccgctccggagtacgacagtcaccgctttatgagcgctgtacaccagcagcgcttctaagccatcaagggatggtcgtttctccgggagcgacgcgtccagctcatggacgacgagtatactgattttcaggaggaaatatggcgccggcggtgggcaccactggttactcctatggccaagtttgtccagaaatagtccttgaatttatgccaatcttggtcacatatgtggcgtgcgtgaatgagatctggttactgtcatggatccgttcatgccgcgctatcaccacttct

SEQ ID NO: 281621 - DNA, 267 bp, Glycine max
  unsure (1)..(267): unsure at all n locations
agcttgatgtgggtgctntattggaggataaganagagagaaggaaagagagaggggggagcacgaaattgaaaagaagaaaaagggagagaaagtgaacttttgattgtgtctcacaagactcttattcatcaaaagtgcaacaagtgttacacatgcttctatttatagactaggtagcttncttgagaagctntcttgagaaaacttccttgataagcttctttgagaaaacttncttgacaagctagagcttagctacacaca

SEQ ID NO: 281622 - DNA, 444 bp, Glycine max
tgtatgagtactgagaaaggttcattatattgtgtgcaagctgttctcaccaccagatttctgagcaactccttcttcaatatttctatgagggacttagaaacatggaaaggagtatgattgatgctgccagtggtggagctcttggtgatatgacccctgctgaggctaggaatttgattgagaagatggcttccaactcccaacaattcagtacaagaaatgatgctattgttcttagaggagtccatgaggtggccacagattcatcttcatttactgaaaatgaaaagcttgaaggaaaacttgatgccttggtcaacctagtaactcagcttgccatgaatcagaaatctacacctgttgcaagagtctgtggtctatgttcttttgcatatcaccgtacagatctatgtccttctttgcagtaatctagagtcaatg

SEQ ID NO: 281623 - DNA, 279 bp, Glycine max
cacatacacattctttaggctgtagaccgctcacttaattgtgcatattctcctcctttgttcttgaggttaagctctacttgaaattaagttatttaattatgcgagttcttgatttaatccctattttctgtccccctttggcatcaacaataaccaaagtgcgtaacatatgactaatgatacacaagacattcattgacaaatcatgaagcactaaacatgatgaacccatattaatatataaacctcatagccatataacatgaattataaatg

SEQ ID NO: 281624 - DNA, 369 bp, Glycine max
  unsure (1)..(369): unsure at all n locations
aagctcactacaagccttanatgaaaaanaccatgatatcaccatatccttaaggaattttggagctttggaattgttttgggaataagtgtggcgggtttttgtttcattggataacttgttttgggccatacttgatgtacattgtatattggttaaatgttggacatgctgaatgaaatgttgtttctcaaaggctataaataaaaaaaattcgaaaaaagaaaaagaaaaacaataaagttgagtgaataagatcttaaatggcacaagaatgatgaaactcttggttctactctttatgtttaaatnntatctttacttctttttattttcttattttttcttaatatgcacttattccccatt

SEQ ID NO: 281625 - DNA, 369 bp, Glycine max
  unsure (1)..(369): unsure at all n locations
aatatatactcccagtataaacatgctttaaaaatatttgttttagtatgataatatactttaaatttgtttgtttttaattaaatttaaattttgtttttgtttgttttagtatgaatatccttagaaacatatacccgcataccaacatatatatatatatataatataataatataagaatntataaattgtaaatttaaaatcgatgtaaaacatgtgttattatattaataaataaatatcaacggcttgcattatgatttgttatgtgatccccgcattgctcgcttatttgttttccgttgtctcttcttttttctcaacgattgtcttttatttttctccgagttttcctcttatgctaca

SEQ ID NO: 281626 - DNA, 225 bp, Glycine max
tggccccgggatccttgagtcacctgaggctgcaacttagctttcaggaatctctaagaagctctcaggaactgctaagaactctcaggaactcctggcttaatagagcagtgtacactggtgacttgataataaatctgtgaacacactaagtaacttttcctttttactctcaatcatgcttcctcctcttcttgttttcttctcctgagctctctcacttta

SEQ ID NO: 281627 - DNA, 437 bp, Glycine max
acactactcttgatttctaggttgaaatctctggtgctgtcagcttgaacatacgagcttgtataaattactgggaattggtcactacgtgtgttgagctgaatttttttactggattttctagacatctggaacaaaaatatgaaaaaagaaccaagcaattcggattaaaggaaaaaataagaaaaatcacacaaattggcagaaaaatcagtgtccaagaaaaaaaaagtgaaagggaagtgtgcttgttgttttagctgaaaatttgttctataattggtgcctattttataccaatcctagttctgaaatttcaattgaaaattattatgaaaacaagtgccaaaactagaggtttcttgagtctttattttttttatgagttttctactctactctagagccattctaggtttcactttgagtcctagctt

SEQ ID NO: 281628 - DNA, 364 bp, Glycine max
  unsure (1)..(364): unsure at all n locations
cctgactcaccatagacattgacccagggtgttaatgtctantcttaccctcggaagcgagaagaatagaatggaaattcccaatctaagaagagaaaagatggaaaattccccaatcaaagagtgggagaaagcaaaaagaacagatagacaattcccaatcaaagaatgggagaaagtaaaaaggaagaataataatgaaagatagctcctgatcatggatcgaatgagaacagataaaatgtgcataaatgtctttggaccggacaatatctgaacaatacagaattgtcaccaaatgaacaataagagagaaaggataccacgacctataatggtcttctccctttgattaccaaccaaa

SEQ ID NO: 281629 - DNA, 372 bp, Glycine max
cttattaactgtcttggcttttggccactctacattgtctttcgaacctactgtacgttgatgtgaccaatgttgttatgggaatgttgcgacaatccttcagaaccttgttgatacattctgagaggttggttgtcatgtggccatatcgacgtccttctctatcataagtcatcgtccatttttcctttgaaatgcgatcaatccatgttgctatggctggactcaattcacaaaagttttctatattgtgatcaaaaatgtgcttgctaggagtgtaggttgtataaaattagttatgaataacatggatgagtatatacgaaaggtgaatgaacgggaccatcaaatatgaaatcttacccagtttct

SEQ ID NO: 281630 - DNA, 136 bp, Glycine max
  unsure (1)..(136): unsure at all n locations
ttatcttntctttatagctacggnaaaanctgggacttagcgcatgtataagtctncacagaggccattgccttcctttgccagtattatgattagcccatgagatgcttcactctggggacttccagctatcacc

SEQ ID NO: 281631 - DNA, 442 bp, Glycine max
  unsure (1)..(442): unsure at all n locations
tctacttatgtggcagggcgggcttccttcaccttcttgtcttcaacgcgaactttgaccattggtcttccttcccgcgatgcttcttttcatgtccgcctgagtgggcttatagcctaaaccatatgtcccacgatttccttgggtatttatcaagctagttatgccgccattcttttttcctaaacccatcccgggttcataaccgttccccaacataactcgggccatcattaccgctgcatcggacagacaaggctgcccaaagagggagtccacggaggaaatgctgaccacctcaaaagactggatagcagtttctaacgattcttctgcggcttccacataaggcatggaggatgggcaacttaccaagatatcttcctcgcctgacacgatgaccaagtgcccctncactacgaatttcagctnttggtggagt

SEQ ID NO: 281632 - DNA, 159 bp, Glycine max
  unsure (1)..(159): unsure at all n locations
ttagcttcatgttgatgaatcaagtngattcaagtagtgttgataatgacaaagatgatgacaaaaagcccacagaatgattccacgattgagtcaacaagttcaagatcaagtttaatttcaaagattcatgaagataagatgaattcaagtttcaag

SEQ ID NO: 281633 - DNA, 446 bp, Glycine max
  unsure (1)..(446): unsure at all n locations
aacaagtgtcttcacagatagtcatcacactgtagaaactatcaaatctacccatcatatgtcccaagggcccatacccacaaaaatcaaaggagaaagaagtccacccaaacctgaattttcgaagtcccactcgtagccacgcacttcacgaccccgaaaatgccctcctttcgcgatttggggcagaaatgatggccaaagggtgaagctatgcttggagcttcaatggagaatgaagaagaagaaaatggcaacgtgagggagagagagagctgtcttgaaagtgtggtggctgagtgaagagagagaaaagctttttgggtttaaataagaaggggtttctctttgtctattattgtattcaagctctgccacatgtccctattagagtggagcctaaagagcncactttccctttttactgtgacccacactcagccaca

SEQ ID NO: 281634 - DNA, 260 bp, Glycine max
  unsure (1)..(260): unsure at all n locations
tacacattgntctactcgtacctcaaaaaaagcaaagcttattccccccagacttaactagcactatcaaacacctctatatctagaatggtttaatttctgatcatgacctgtgtttgatctctgaggctctaggtattgattaaacttataagnatttgacaactctcattcaaccatttgacagcatattttaaaccttgatgtcatcataaaaaattcatattaatttgtctgttcatcccactgacctaccaaat

SEQ ID NO: 281635 - DNA, 330 bp, Glycine max
  unsure (1)..(330): unsure at all n locations
aacaatgcactaggagtgtaattagagctgtgttattacatgtatngtgccaaatatgtggaacttttgagcactactacaagcaacctctgcatcaacacactttttaaaaaccactcttgctcggctgcttactgtatcaacttctgtctctgcttcctttagaggtccaaaacgcctaaacattttattaaggtttgtttctgagggaacagaacccaactcagcaaagttcataacaatgtcagcaggggcattctcatctatataaccaggagggtntgcacgagcctcaatgtgattggttgtagaatactgtttcctggaata

SEQ ID NO: 281636 - DNA, 384 bp, Glycine max
  unsure (1)..(384): unsure at all n locations
tataccttgagaggttacacggagaggaagatagtgcgagcanaaaatgggtatgtcacacgcgaggttacacagagaagaatagcacgagcatactaggtcgcgtatgacataatttaaaatatatgtccaacatcgatttccaatactaaactgatgtttacaaaatgatggtaacgttaacatcggctttttccaatataccgatgttaactagtcataacttatcatcggatctcatataacctatgttagcgtacatcagttaacatcagttcttctaaagccgatgttatcaaattagagttaacaattggttgtaccagaaaccaatgttaacgtcaccttcgttaacatcggatttttagaaatacccatgttaac

SEQ ID NO: 281637 - DNA, 444 bp, Glycine max
  unsure (1)..(444): unsure at all n locations
ttggctacaacctnnagctgcccctgtggcaacttcaaaaattcaaagaactcggagatcttcacagttataacaatggagtaccaagatataagtatcagagtattaaatacaataagccaaactcataatcaagaaataatcaaaccagaattcaaataacataaaatgtcaacaaccacaaaatatccaagactgaaatttaaaaacacaagataaataagcaaagtacttagcataataatgtaaattctaagaaactaaaagccaaaatacacggcttataaaagataaatattcagaatctaaaatctaagaagacggaggaggtggtggaagatcgaaactctgacgaatgtatccgacatcctcttcaagctgtgtaagacgaatgtccataccggcaaagcgtgaatctaacgagtcaaagcggtcaccaacata

SEQ ID NO: 281638 - DNA, 232 bp, Glycine max
  unsure (1)..(232): unsure at all n locations
tataaaataaagtattacttaaaattaatataaaattttggtttcaacacaaaattactcaaaagtcagttcaactcaattaatttaaattcaaaattaatcctanattttttattacatactatatatataaaaatatatctaagatcaattattaactcatcaaacaaacaatcaccgtattaatagaagaataagttaaacaaaactgggtcatcttcttgatgtgtgt

SEQ ID NO: 281639 - DNA, 425 bp, Glycine max
  unsure (1)..(425): unsure at all n locations
cttatattgctggccgatttttgtgttgttaaaaacttgctttatctccgcattcttttatggagtgtcactgtattttttttcccttttttctcttaccattatcttctggttagttcttgaaataattctaaggaacaaacatttgtttgtatttgagtgagtgtttntaaaagaattgatgtgatctaggtttgaatattttcattctgaaagtatgtcattagtaaagctctataaaaaaaattattcaacacaattaaatttgcttccactcaaaatcaattcctttacatgaaattaaacatgtaaatatttatataaaattatgtttgcggtatttcgatgtgatttgtgaatccaaacacgctatttgagtatttaaagttgagacttgagacttgtagttttaatcgtctatgatg

SEQ ID NO: 281640 - DNA, 329 bp, Glycine max
  unsure (1)..(329): unsure at all n locations
agctgatngttaggacagccatcatgcttgctgcaagcggttggttgaggtaaagagctaatgacaaaggatctccatttaaaatatacactgagctgatggttctcgctacttaagattgggatttgcttatgtatttgcattgcaagtagtggtcataacatttgtaagtaattggcaaaattgtttcgatattatttttattgtttcttttggtcaaattacatcaaacatctatgaccagactgtcctaacaacaagaacctctctattggcaatgttccaatctcttgaccctcttctcttatacatctcgagtgcctaagtta

SEQ ID NO: 281641 - DNA, 437 bp, Glycine max
  unsure (1)..(437): unsure at all n locations
tgcttgatggcacgtgatccatggaaaggataatttcttgttgatgttgtttctttattggtaaagatagagcctatgttacagagatactaaacggctgtggactacatgctgatattgggatacctgttcttatagagcgtagcctcgtaaaaattgaaaagaacaacaaacttggaatgcatcctttacttcaacaaatgggaagagagataattcgtggaagttcaataaaggaacttgggaagcgaagtcgattgtggtttcatgaggatgtacttgatgtattgattgtcggttttgtagaggaaattattaaaaacagaggagagaagagagacaatacgtatgtggaggaaatagaattattttattctaattcaaattggtctcagtagcgatacaataaatagcanaagataaactaattagataac

SEQ ID NO: 281642 - DNA, 398 bp, Glycine max
  unsure (1)..(398): unsure at all n locations
cttatatatggccaatcttggaataagctttacttctgggatatggtttatgttattgtgagatgttcaaccagcctanataccacacattncacaagagtgttaaattaaaagggactccgttagaaacttcagatttaggagagaaaatagccaaggatcatatccaatgtttgattttatcattgtcaacaatcaatccaaccgatgagcaaactttcccaaacctgattttaaaattttgaaatgaacaatttatttaaacctcctaccaaattcatttgtcttcaaaataatcattcgaacttatctggggaataatttcttttattgtccccattttgaacaaataatatcccggtagatttctagcgattataaccttgaaccttctcttg

SEQ ID NO: 281643 - DNA, 445 bp, Glycine max
  unsure (1)..(445): unsure at all n locations
gtaatacaacattcaacagtacagattatcacagccttcaaaacatggcaaaggcagagaactctgcccataacaccaaccataatcacaacttttctcacttatagaccccagtaacaattccttcgttccaattcgttaaccgttggattaactcaaaattnttactggaagtctctagtacttaagcctacattgtgaccgttgggatctactagccaacatccagaactcattctgtactactctntccacagcccaccacacacaagcatttttctgcacaaagccaaaattctgctgcacctatttgacagcaaaattctgcataagtgcagatttcgaaaatcacactttctctcatncaatcttacccaaatcaaatcctacaagtcccaaatcatgtatcaatcatgtctaaaccanagtcaagctntaaagcaca

SEQ ID NO: 281644 - DNA, 366 bp, Glycine max
  unsure (1)..(366): unsure at all n locations
acctaggagttaatgactttgtattnagtgatcttgaagcggaataatattatattgttaaataatacaacactgtaaagtatatgaaatatcaaattattaaattggaggatattaatgaactaaatattataaaaataaattattgaaacgatggaattattgtttttttaaacatgtattatgaatntaaatgctaataaaaaaataatagggatatatttgaattttaattatcttaaaataataactagtttttatgtaactgataataaaaaatggtctttcttttagtgtatcctatacaaatctaaaataattggataataacactatttgctaacaaatatcatctattaataaaat

SEQ ID NO: 281645 - DNA, 374 bp, Glycine max
atggcgccttctctaaccttgtctccttaatcttctgctgcaactccatggttgaaaatcaccattgaatgacctcattgaagctcaaatatccaacctccatagaagcttctcaagcaagtttccatcaagtggtaattagagcacaagagcttcaagtaggtgctctgtacacctccattaacctccattggtgtttcttcatttttctccatgtatttactcacatatcttgtgctgaatgttgttaacatgattttttagaatttccaccaattaaacttgctatagaagctagatttgatcttctatggatcaaatatcttgaaccatgaattgggttgagtaaagttcctttgaattttgcttgctat

SEQ ID NO: 281646 - DNA, 72 bp, Glycine max
agctgtgtttctaatccttactcaccataaaccttgacccacggtgagaatgtcaatccttaccctcagaag

SEQ ID NO: 281647 - DNA, 438 bp, Glycine max
  unsure (1)..(438): unsure at all n locations
tcaatcatttgcaaatatgcatgtgtattacgactcatcanctttgaatcaagccaaggctattgtgcaagcgatcaatggggcaaaacacaccaaatgattatgatgatggatggctcacattctcacaaaggtgaactcatcactttcaaattaagctttcaaaactatcatgacatgtagaggagaatcaaggatgtcaagtcacaaaatgtcaaaaacttttattttcaaaacaattacccatttcttgaacatatcctataattcaaagaagaacatgcaaagtcgtacatgcacacaaaattgacccaaaatgttaaactaacaatccgacgaaactaacaacattaacaaattaacaaaaccatgataactagcataaccaaagaacactccccccctacttaaacaacacattgtcctcaatgtagcaca

SEQ ID NO: 281648 - DNA, 238 bp, Glycine max
aatttgatcatcctactaagacgactgagaaaactggggcaaataaagatggtgagaaagatggagaaacccatgttgtgactgccattcctgtactgccaaatttcccaccaacccaacaatatctttactcagccaataacaaactttctccttacccaccacccaagtattcacaaaggccatccctaaatctaccacacagtctgtctaccgcactttcaatgacgaacaccac

SEQ ID NO: 281649 - DNA, 452 bp, Glycine max
actcagcttgaggattatgggacccatcacatgtggttctatgtggttgtcgggcgatggtgcacaacaagttttccacatccacaatgcgcgcataaacccaccatcccctgttgcccacctccatctgagctcacgtactcccacgtagcccatatcctcgtttctctcaacaccgggtccccatcaatcctctcaagcttccacaacatccaagcaaaacaacattcaaacagcacaagctatcacagccaaacaaaacagggcaaaggcagaaaactctgccaaaacaccaaccaaatcacagcttttctcacttaaagaccccagtaacaattctttcgatccaattcgttaaccgttggatcgactccaaaattctactggaggtctatagtacattatcctacattgtgaccgttgggatctactagcaaacatccagaacgcat

SEQ ID NO: 281650 - DNA, 367 bp, Glycine max
  unsure (1)..(367): unsure at all n locations
tctagcttccttttacaatccaaaatcccgaatagtctgacataacatacactcttagttaattttggttacaaacttacaatatatcagattgcattgcatatcaatgccaatcaagcgataaactcattaagagaatgagaatagagaatgtatatattaccttaaagacagatccaaagccaccttctccaaccttctncgaggaatganaattgcgcgtggctaatttcaattgcttgtgagtgaataaacgaaagctctcatncgtgatctcttcatctgggtaatctgcagtgcaagccaagagagaccaaagaatatgaataaaaacatttcaaagacaaaaaatgttcaataataatta

SEQ ID NO: 281651 - DNA, 433 bp, Glycine max
  unsure (1)..(433): unsure at all n locations
tgtagatcaaatgtccaatgtcaaggataaattttccaatcctttgtccattgtaagattttgataaattcgaacctaaagtctaacccaatagataagtttaaggtttttttttttcaccataattttggtatgaaatatccatcaagatttattgataactaatttttattagaaaatctaactaattacctttaattggatctccttttttaacaatattttttccatctaaaaaaaattataatttgtgaccttatttatggagactgattccagttatacttggacacgactagagctatagggttgacctaatagtcaaaagagaagagaaggaatatgaggttatatagttgaattcttcctgctaataaaaactaacacatgataacanatatttgtctaataaaaaaaacttttagtatgttta

SEQ ID NO: 281652 - DNA, 491 bp, Glycine max
  unsure (1)..(491): unsure at all n locations
cgcgaaagatgtgcaatgatngcctcgaaacacagggcgaattcagctcggtacccgggatcctctnagtcgacctgaggcatgttagcttctctatctggtcatacatatgaaccagcacgacgactccccatgcataaccaccactcttgaccatgtcggcataaagcctctagatgcaccacatgaacatatgttgcactcttggttaccaaaagagggcgaatgaacaggtgccgcgnataagcacgagctggtacaatccatcggcgtgcctcgcatctcatctcatagatgtctcgaacccatcccagccgtacatatgccccgcgtgatcgtgttgtctcggctcttacctccttaacagacacctcaagcaactctgtctacaataatatcacctcgtgcacagaaagagcatgagggctgtggaagggccactaatacgcagatggaggaggcaacacattatccaatgtgaacgtcactcg

SEQ ID NO: 281653 - DNA, 509 bp, Glycine max
  unsure (1)..(509): unsure at all n locations
cttatccaagaaacactctgattggtgggtgagagcttttttccttccatgnnngcttattctttaagtgggaatgacacnnctcgctctcacnctctntnnctcctttaaatcttccgcnntgcaactccatgnnngctgaaaatcanccattaaaggggaccttanngtgaagctcannagaatccaacctccatttagaagcttctcgaagccaagccttccattcaanngtggtatgagaagccacaagagnncttcaagtagggtggttcccttaaaacacccnncattaattttcatgttttaccccttctcctccattattggtttcttcattttttttccatgtatctccttacatgtcttgtgatgaatgttgttaacatgattnttttagaatttccaccgattatacttgctatagaagctaaatttgattntctatggttcaaatttcttgttcttgttcttgaaccatgaatcgtgttgagtttaagttcctttga

SEQ ID NO: 281654 - DNA, 310 bp, Glycine max
  unsure (1)..(310): unsure at all n locations
tctgcnnnatatctatattctgtacataaggagataatccggagtggagtgattatcacgaaagatagagattgcagctcattgcaaaattatcgaatatgagcttgagtaatgactggaagtgcgattgaatcctatgccatacntgccacgacgattaacatccaatcacccgtgaagcatgtcattgaaatactatactatagcccgctagacgaactaatcttgtctttctagtaacaacacataaagacatgttctgatttatctttaacagccatatttttgcagatgaccaattataacaaat

SEQ ID NO: 281655 - DNA, 448 bp, Glycine max
  unsure (1)..(448): unsure at all n locations
ctaagcttgatgcaacattggagaggtaatgaaacactagatgattattaacatgtnttctcatgcaacgactatgatgaggaccaaaatgtgaagcttgctgccacggagtatttcgactatgctcttgtgtggtggaacaagctacaaaaggagagagcaagatatgaagagccaatggttgatacgtggacagagatgaaaaagatcatgaggaagcggtatgtgccggctagttactcaagggacttgaaattcaagctccataaactaacaccaggcaacaagggggttgaggagtattcaaggaaatggatgtgctcatgattcaagcaaagattgtagaagatgacgagggaactatggctcgatttcttaatggtttgactaatgatattcgtgatattgtcgagctgcaagagtttgttgaatggatgatttgctcaca

SEQ ID NO: 281656 - DNA, 360 bp, Glycine max
  unsure (1)..(360): unsure at all n locations
cagctcggtcccgggatccttanatcaccttatgctgcttcttcatttgtganatcaggtgcaaccatttcccttagagtcctctcacgggtgaggttggcctgttctcaaatgttaaaatcagaatgctcacaatcagaatgctcaaaaatataatgctccgaatcaggatgttcgaaatcaccaataacagaatgcacacatcacccatatggaatgctagatgatcaaangtataaatgatgcctaactaatctatgaaatgtcctatctatctcaagatcaaagggtcgtaagtcagatggattgcctctagtcatacactacatacagcatgcacaactagttgccttgtcatgt

SEQ ID NO: 281657 - DNA, 274 bp, Glycine max
  unsure (1)..(274): unsure at all n locations
gcgagctataantactcaagcttcagagcacaacattntattgtctaacggaagagatctctttagcgtgaaggcgacgcgtatcgaaaagttgttcttgcgactgacacacacacgatgacatattggactgaacatgtacttcatcatcattatcttgtggctgggttggtagggttgatgttgtcgaggatactactaatagactaaatgtgctatacaatggagaacagcacatggagacactgggacaccacagtaggtgtaaaattga

SEQ ID NO: 281658 - DNA, 154 bp, Glycine max
  unsure (1)..(154): unsure at all n locations
ttgcatgctttctnnatttatacccaaaccctgcccttttctctcatgtcacatcaattctaggagagttaaagcaacaaacttcttcttgacctgaaggctagtcttaaaaccttgaagcctagaaatgttcggaagcaagttcacccttcac

SEQ ID NO: 281659 - DNA, 443 bp, Glycine max
  unsure (1)..(443): unsure at all n locations
tacacaaaattggtacctattattgttgatacatattcagtagtgtgatctattatttattttttctctatatctatccttgcattgttcacctaagaaaggtgatagagatacatgtcaatcaaatcattaagagaatttctatttgttgaacgtgtggaagtattacaaaaataatgagcatgagctcttagctatagaggtatcccctcgtctaagactatgaatggtaacgagacagacatgagtaattaaaaataaaacataaaaagaattaaaaaaattattttttgagctccagagacatatagacattgcanatatcaatatgaatgtataaacttaaagagttgtaaaagataatcactctgacaatttattagttattctatcaatcttttaaacaacatattttattcaaatcatatgtatggaaaagtaaa

SEQ ID NO: 281660 - DNA, 67 bp, Glycine max
acctggctttaaattaacattgaggttggaattggtgggaggaggtattttgcctttttggttttaa

SEQ ID NO: 281661 - DNA, 457 bp, Glycine max
  unsure (1)..(457): unsure at all n locations
tgcccgccgcacatccggtgcctaaacaccacctttagcgtataccaaaaagtgaatttgcagcaaaaagcctgtaggattcagcccaaattccggggtcatatgctaacttgctcccatatctaattgataatgcaatggtagccataacccctgccagggttcctcaacctccatttttccgaggatacgactcaaacacaacatgtgcatatcatggaggagatccgggacattccattgagcactgtatgaccttgaagcgtaaggtgaaaagtctaattgatgtgggctggctgaaatttgaggagaatcacttgtgaatcctaacattgacaagcggcaccacacatggggcaatttgaaggttgttgtttgatgtctctaatgactcattangattttcaagtttatgcaattattgagaaccacaattacaatgctaaataatatggat

SEQ ID NO: 281662 - DNA, 366 bp, Glycine max
aagactcaaagggcaggaacactggatgataacatagatgatgatctcaaaaatcaagattcaaggttcaacctttcgagaatcaagatcatgattcaagactcatgattcaataatcaagagaagacttaatcaagatccgtctgaaaaagttctttcataaaagaatttgccaaggactaatcgcctgaattcttttcgtgtctctcttctccctgttccacaagaacaacggactaacagcctgaattcttttgtgtctcccttctcccttgtcaaagaattataatgacacagtctgagaattcttttgattcttcctttcccatatcgaagattccaagactacctgctgagaatctttgt

SEQ ID NO: 281663 - DNA, 378 bp, Glycine max
  unsure (1)..(378): unsure at all n locations
tgttaacacaantagatgggtcgaattcttatggggtgtaaatttcttgtgacggtcacaatccttccattgctaagtagaataattctattcttatggaattgatagacacatgttgatctctggtccataaaaaaatcttgattaatatttgaaatttgttcaacatatatatattttgtaatattattattttggactaacaacaaccaatgcaagcacaatttcattcttactaggttaataaataagtattattagcaataaaaagattacttgggaattagtagaaataattttaataaaattgatattattatataaatataacttatgatttttgttaattcaatttgatctatttatttctctttacan

SEQ ID NO: 281664 - DNA, 472 bp, Glycine max
  unsure (1)..(472): unsure at all n locations
actaagcttgtttgaactcatcataatgcttgctcatatatgttttgtttaagcaaagtatcatgatgaatcaagaacgattcanagatgttttgatgataacaaaggtgatgacaaanagctcanaggtcaatcanagaatgagttcaagatgttcaagatagaatcaagaacacttcaagattcaaggatcaagctttcaagaatcaagatcaagagaagacttaatcaagattcaagatccaagaatcaagagaaaacttaatcaagataagtatgaaaaggttttttcaaaaactgagtagtacatggatttttctcaaaacatgtttaccaaagagtttttactctctgataatcgattaccagattgttgtaatcgattaccagtagcaaaatgaatttgaaaaagttttcatatgaaattacaacgttccaattgatttcanaaaagttgtaatcgattacaatg

SEQ ID NO: 281665 - DNA, 277 bp, Glycine max
  unsure (1)..(277): unsure at all n locations
agcttgggagtggtggagttatcanntggctttgcatcattgtttcaacacacctgaagacaaaataatatgggatggtggcctcanggtaattttccttcttatttatcttggctttggtttgtatagaaaaaatanatagccaaaaagaaaaaagaaaaaagtgtatttgggtcttgtattcaaaaattggtcttgtaacaaaatttaaagtttagatttttgctttccgtngtataactttcatcattatcatgtgttatgcttgtgccatgtg

SEQ ID NO: 281666 - DNA, 451 bp, Glycine max
  unsure (1)..(451): unsure at all n locations
actaagctaggtaatgagctccttcttcaccttagacttgatcatcttcattctttnttccagtttctctaataatttgaaactgtcattttgttttactcatgaagggaaactntgaaaaaactcaatattcttcattctctntcaagatttcgcgagttcatcaagagataggggggtctctcaaactcttgaaccatgtgcttgctattgaacttccatgaacatgttgttgctttgacattttcgagcttgttgtcatgtcctgaaactgtgtgctgagctattttacttgagtttttggtgccaaaaatgagttctttgcatgttaaaacgtatatttagccttaaatttcatttaaattgaagtttccaagcaaaatttacaaacaaaacangtttaaggacctttagtaaaatgaaaaagttgtcacgaatttggactgagtta

SEQ ID NO: 281667 - DNA, 154 bp, Glycine max
  unsure (1)..(154): unsure at all n locations
agctnaaatcaacctaatattctttgttttaccaaatcactgctggctctaaacaaataaacatatttgacgtttgtgtgctcacaaaataactcttaattgtcttacagaatgatatgaaaactaaactcttagtcttttctcttatgatata

SEQ ID NO: 281668 - DNA, 416 bp, Glycine max
  unsure (1)..(416): unsure at all n locations
tgggctcttgcctcactcaccgcctttgtggtttcatttctatctatcttatacttatcccaggtgtgagattgtctacacctagaccactccttgaaacactccttttttactctaactttgctctgaacattttcattacaccagcacgagtctctacccctacgtccataacctgtagattctcccaacgtctctgtacccactttaatagtctctcgggacatcttgttgcacatatcattaacacttacttgtgagtgtacacaccaacccttccatatcttttgatggaagatgacatgnttctgacccttcaagtgccagcatgcgatccttggcgctgccagatgacttcgtctctttgccctatctctaatgcttacatacgaaaccaaaactctatgttgggtagt

SEQ ID NO: 281669 - DNA, 364 bp, Glycine max
  unsure (1)..(364): unsure at all n locations
agcttaatatcattaatgattcccttcctttccactagtaagtactactcggctgtatattggaatagagaatagaataaggttcctatggaaagtggaaaatcagatgcgaggggaactcaaccttttgagtagtagaaagatttaagatgctgcaggaagtgaatgctcctaactgccagtgtcatatagaaaaaagtactcgctgaatnttattattaatgacatctcanaactattaatgcgcaataaccaagccataatcatagacagctaaggtntctttgatactcttatgcaagttgtggagaaactcatgaaatgaanatattattcgataagtggagatacaagcttgcattca

SEQ ID NO: 281670 - DNA, 452 bp, Glycine max
  unsure (1)..(452): unsure at all n locations
ngaagagaggattcacaacttgccagaattctaactctgtttcttgcatctgattcttgcccttgacaatgaactcagtcactagatttgctaggaagttaaacacctctactgcacaaccaccacacagcgatagtggtgctcctacgtagaaactggcttcagaaaaataaccaatcaatcctcttcattntagtattttctggataataaccagtgataactaagaagtacaaatgcaggaaatgatgcaactaatttatataattatgttacctaagaacgcaggtgtgaaccttcaccatttcaaataaccagaaacattgaaattattttagattgcacatcaacaagtaataaccgtacttcatatctttctaggactagtcatgcatatataacatttagttcacatgtgagaaaataaatagaactacgtattcacaatttca

SEQ ID NO: 281671 - DNA, 141 bp, Glycine max
tgccgtgcgaacacgatatttcaagttacaatttttcatcaatctccgcatttttccgtgtaattatcatgatgccatccacaaacgattacagctcgaatgctgcttaaaaaaatacaacattcctgatctttttggaag

SEQ ID NO: 281672 - DNA, 102 bp, Glycine max
  unsure (1)..(102): unsure at all n locations
agcnagatttccatgtgttcttnggcagcacaaacatcggcttaacctttgttacatgattcgcctgaaccgaacctcggtgtganaagttatgaccatttg

SEQ ID NO: 281673 - DNA, 352 bp, Glycine max
ctaagcttgaatcggacacccgtgtgaaaagtgatgacaatttgaatcttactagaacttccgttgatcattttcgagtgtcactatgtgtgatgcgccaaaagaggacattcaagctatatattatgaccatttgaagctcaaaagagctatcgtagatcaattctgagcgcgtagtaatgggattatgcctgaatctgacgttgatatgaaatgctatgaccatgtgaagccgtaaccaccttggagagcacagtatagggcctaactagcatatatgcgcccaaatcggacattcgcctgtggaaaatgacgctaagaatgtattgaaagctttcaatgtgggatttct

SEQ ID NO: 281674 - DNA, 217 bp, Glycine max
  unsure (1)..(217): unsure at all n locations
tctgcttggactgtgctatgtagaaaaacaaacaaccaaagtgaaccaagagccatttctatggcaaatttgggtgttgaagagtcaaattttgattcggtgagaatttacgtgtaaatccagtttgagcaangttagattgatgttatagacttgtgtgaggtgagagtttgcctcaattctacctcatccttcatttcacttctcaaacctagaa

SEQ ID NO: 281675 - DNA, 446 bp, Glycine max
  unsure (1)..(446): unsure at all n locations
tcaagaaaaagatggcctcagcaaattccttatttccaaaatgtaattctatcttagacctccaatctttaatggagagggttaccactactggaaaacccgaatgcaaatttttattgaggcaatagatctaaatatttgggaagccatagaaatagggccttatatacccaccacagtggaaagagtttcaatagatggtagttcatcaagtgaaagcataactatagaaaaacctaaagatagatggtctgaagaggatagaaaacgagtacaatacaacttataagccaaaaatataataacatctgccctgngaatggatgaatatttcanggtttcaaattgtaagagtgctaaggaaatgtgggacactcttcgattaacacatgaaggaactacggatgttaaaagatctangataaatgcactaactcatgagtatg

SEQ ID NO: 281676 - DNA, 225 bp, Glycine max
  unsure (1)..(225): unsure at all n locations
ttggcttgctttctttattgttgctcatngactccagattgctgcacagaatgacagagatttgtatggtgatatgcagaagaagatagaccgcagactctcgcatcaggtgcggatttctgattcatggcaagttgagttactaagttgaccaaggcgtcgagtgttcactcaagctcttatttcaatagatggagatgaacagtgccacctcatggctcctct

SEQ ID NO: 281677 - DNA, 181 bp, Glycine max
  unsure (1)..(181): unsure at all n locations
ttagtcaaacaaaataatccgaatatgtcaaatatttgagtgttgaanaagcataacaagactttgtgtgattggtttaaagatacaatctttgcagatgagaatgcttcagaaacattaagaaatctagcagatgggcctaaaagaaatgttataacctggcaaggatacgacatataca

SEQ ID NO: 281678 - DNA, 395 bp, Glycine max
  unsure (1)..(395): unsure at all n locations
tccccttccantnaatgnnanaggaatatanagttgttttgggtcatgcctggattctattgatgaatcattnaaagacctttccaaaatttgctaaccactgagttatctgatgaacaaggatgcttgtgttatgtttaatgatgaatgcttagaagcctttaatacccttaaagccaagttggtctctgctcctgtgattacagcactaaactggggactagagtttgaataatgtgtgatgcaagtgattatgcaataagtgctgtgctgggacaagggaaaggcanaatttttcatccatctactttccaagaaaatgttgaatgatgctcagaccattattccacccctgagaaaaattgttggcaatcctttttgccctttagaattcg

SEQ ID NO: 281679 - DNA, 448 bp, Glycine max
  unsure (1)..(448): unsure at all n locations
ttagaatctcagcttccattattctatgtacccgtggtggtccacatttggtttatgtatttttattctcgtttcattcactttttatacccccttttgacgtgcttaagccattntatttaagtcatttctcgcttaacctagaaataaaataaatttccactgatcgtttgaattgtattatccgttaactttggttgaaatgaattccgaccgatcggtcgtgccgcaaccacgttggaaaccaaaaaagaggtaaataataatataataataaaaaataaaaaagatacccctttggtaaaataaagcgaaaaatcaattggacgttttctctttgggatttctcattcttaatcgaattgactaataactaaagtgaaactaaggctaaaatcaactcgcctagtcaagctcatccacaanaatatggtttgaaagtttatta

SEQ ID NO: 281680 - DNA, 398 bp, Glycine max
  unsure (1)..(398): unsure at all n locations
agcttgatctggttaacctcttttgtttgggcaactgaaaagaaatgtnattgataagaatattgacttaagctttttgcattctgtcaggtgcaagattggttgtatacagatggtgaagatgccaatgccacagagtttcaagagcgtctagatcagttaaaagctgttggagatcccaatttcttcaggtatgttatattcagtataactattaatttctttctgcatgcatatntgtggtanagtttgttctgaattggtaacatttgtttccgttaaaagacttacagctcggccagcagcagtggcatgctaataatacattgtgagttgaacaggtatcataacaatcatacatgtaagtgggcttagtgttttatttcttatgtcttttg

SEQ ID NO: 281681 - DNA, 448 bp, Glycine max
  unsure (1)..(448): unsure at all n locations
tgggcattgtggaatgactacgatcgtcatggtgtggactatggtcatgatgagtntaccatagttgtcgtcgaaagctgacattgttcanaagggatgtcatcattntgccatggccgtgctacttaccacgatagtggtcaagtgacaaagttgttcaaatcttcataaagcatgcactttccaactctttcactccattgagcggctatacttttccaagacaaaatgagtgtctaagcatgagttttgccaagataatgcatgataatgacacaaaactcacacaaaatgtcacccaaaaagtggtttatcaacctccccacacttgagcattgcttgtcctcaagcaatttttctagttatcttaatcaaaatanattctcccaagccagaactcaagtatcanaacccccaatttattcaaaagtaaaaactcacacgttgg

SEQ ID NO: 281682 - DNA, 406 bp, Glycine max
  unsure (1)..(406): unsure at all n locations
agaagtgaactttgatgctttgtaatncatctcggaccatggaccctcagagcacctgcggctgcacctattttangactttctcctgcgcaacctgagagtttgactactcaaccttgcctacctccttcattgatttgatctgatagggcacgttgggttggactgtatgaaaggattggatgtggagatctatttagacaatatcttcgatgctcatccaactctctcgctagattccactatatcctgctctatctggacaatgatcacttagactctggactttagatcctacctaccataattggcgtacataaaaaaatgctgaactggataccttcgtcacttccaggaccgcaagccgtccaagactgaggtcattcttcctaccaaacttctgtcg

SEQ ID NO: 281683 - DNA, 217 bp, Glycine max
gactatggcatcattacgggcgcttaactgctgacagttggacgccatcttctcaattaaatttctggctccagcaggagtcatgtctccaacggctccaccactggcagcatatatcatacttctctggatattacctgattcttcataaaaatattggacaagaagctgctttgtaatctgatggtggggcaactggcacatattatcttaaatc

SEQ ID NO: 281684 - DNA, 288 bp, Glycine max
  unsure (1)..(288): unsure at all n locations
agcttgactcttaatnatttgtatnggnnggatgtngaattctggttgttcctggtgcggagatgatggtacaacgggtgaaccaggagcggcatttcttttggtgatgaagccatggagaaacagagcgtttggaatgatttcatacatctcagaaaactattgggaaatgctggaaaaaacacgaatgccaagcacatataaatttgaatgaagaatgtaaaggggcgtgtgaagcaacggtcgaatttgctttgtggtgaacgtgctattaatgttaagtgattc

SEQ ID NO: 281685 - DNA, 431 bp, Glycine max
  unsure (1)..(431): unsure at all n locations
gtcgaccaaaaggttcanaaggaagagagaagaggattgtgttggttggttatcaagttgtaggtgagatgcacgacctaagaagcatggcaggccgaacggttcaaaaattaaaatgaagaatgttgttgatgttggtaatgaagttgatggggctggtgagattacaggacctaatatacatgatcaaccaaaaggttccccaaagatgaagaagaatgctttgaaagttcataatgaagttgttggtgttggtgatatcacaggacttaagaaacgtggtcgaccaaaatgttcaataaagaaacagggtactgttgtgtacgctttcaataatgaagtgccatgtgagattgcatacaagatctggaaaatataaatgctgacaatctgtgtcaaaagtttagatgatttgcaagcctaatactaat

SEQ ID NO: 281686 - DNA, 476 bp, Glycine max
  unsure (1)..(476): unsure at all n locations
agacaacgaagaaagtgagcctgatcactcgactacacgcgatcaggaggacccgggatacttgcagcatgctgcagcatgtctactggttttgctattaaanagaccacncccnggggaaccggaaacatgacatgtcatgtttaattgcaatgcgcacaaatgtcctttgatctttataaccccgatctacgttatgtgcttgtgttaattttctttataacatagacatacttcgttataatcttatgttaaccaaatcactttttttattgatgatcttagtatgacattatcttgtaaatgaatattctcttctcaacatgaattattgcatattcaaacgatctctaattcaaatttattaatcgaatttgtaagttacttttgtggattcagagagcatttcattctaagaaaatatatttaattcgtccttaaaataatttatatttcgtttatgagaaaaactcttt

SEQ ID NO: 281687 - DNA, 502 bp, Glycine max
  unsure (1)..(502): unsure at all n locations
aggggnnnnaagcttgagttacgtgctcngtatcancngcanantcgagnnanatacananaagnngccntgtananaaacaacggaggagaggttttatngatttatatcattccataacgcggggctcaggaggatcgtacaacactctagaaccccacatatacattttagcatgatgaataatacgagatcaatgggtgctcccaataaatgaaaaatataatatctttttgtatgtaagatgtgggaatcgctgaacgtgaagttgaacaacggatatgctttggtgtccgataatgggtgtggagttgtttgaagacccatggtctcgtgtgtgtgccatcaacataattcattgtgcatacatgttattgttctattacctgctactcttatcttacctccatgagttctgttagtgttcaagatgaccacaacattaatgtgtcatgtcaacaacttggttatggttcgagatgctcctccgatcactaattcg

SEQ ID NO: 281688 - DNA, 397 bp, Glycine max
  unsure (1)..(397): unsure at all n locations
tagcttattttcacagatttgccccatgcacagcttgacagcttacccaaattttcccacagttcaagcttatcttctcattctcgtccaacactagctattctcaatacaatcaattgtgtgaatcanaagtcacaggagggtgttctgggtttcttaattatctctattgctttcatcaccattgtaaggagctctgctctatttatcactggttacagtctttgattatctctgctgtttatactanaagaagaaatatgctgtcattactggttcatcaagtatttgacacttcctatcctatcctattgggtgtactatcttttaatatattatgtaaaaggaatatttttatcctacctaggctattgagggctcaccaacctagtatatc

SEQ ID NO: 281689 - DNA, 409 bp, Glycine max
  unsure (1)..(409): unsure at all n locations
ngtttgttattgctctgaacaccttttttctctctcagattttactggcaccagaagtattaaaatttaataaaacttttctttgtaagtttatgttaatgttaatattgactgggtccatttctgaaatttcctagttagcaactccgctcttccctttattttatttttcttttggttgatgaagtgttatttgtgtccactaatttatgcattgngtgtaatttttataaggcaatggaaatggaggttataaggttgattcgaatgttgaagctgaggaagttgcagcagatgacgacgatgatgacgatgtcgactgggaggaaggctgatgaaaaatatctgatcagtataatgtaatggtctattctgatttgcaatggccaatgctcattaataataccgc

SEQ ID NO: 281690 - DNA, 130 bp, Glycine max
  unsure (1)..(130): unsure at all n locations
ttgctngctattctcaagtataagggcaagcgtaggatggtcaactaagaaacattcctagaaccacacctatacaaggtaggtacccgtgtaactcccatcgaccgtaaatggactgagattccagaca

SEQ ID NO: 281691 - DNA, 258 bp, Glycine max
accaggcaccataggtagaggtgaaaactctaacccataactgatgctgatcagatgcacaagcccatatccatatacacaacaaagctaagttgaatttggagatatactttatccccagacccccatcagacttatgcagacaaatatcatgccatctcacccaagggatttcattatgaacaatgtctacatcccacagaatataccactgaagggatatcacacttgacggatatcccaaggggctgcattcct

SEQ ID NO: 281692 - DNA, 311 bp, Glycine max
  unsure (1)..(311): unsure at all n locations
gatgggcctagatgggcccaaggctgattatctcccctctaaactgttcagtncacccggagattgagtggaaggctgatctacttccgaaacattgcgaaatcttacggatcgcgtggcaattggctctattcaactcgacatgaccagcaaaaacccgtatgtcgacaaacaattgaacctggacgaaattacggtatgacaataataatgggaataaagtcttaatacttctaaaaggggatgggtgagacattatattctcttagactatgatatggattcgtatcatttgatcatctactcatcat

SEQ ID NO: 281693 - DNA, 510 bp, Glycine max
  unsure (1)..(510): unsure at all n locations
aggggtnnangcggataatgaatacttgtannacttgagacactcgcanatccacggcgaatnataatcaggnacccggngatcctgcagagncgacgtttatgcgtgctatcagctgttgatatggctgctgtagaagcacagcgacgaaggttaaccctacaacatcttataactatggtgttactattaaccattggatgcctcaattatttagtcttagattctcggatctgagttagcacaagtcataatccccactttagtccagcgtgccgtttctataatgcaggtgggangcagaacgtgcctatcataaagactactccaaatacttgatcagcttgagggagacgagagccatagaatccctttatcatttttgcattatattctccatatcgaatagaatgccgttagctacattgtattctatgagaatcaaaacatgattataaggatatacataggtgaaaatagaaatctcaaaacaacaacaagagcgccccg

SEQ ID NO: 281694 - DNA, 113 bp, Glycine max
acgttagctctatcaatcatctttaaatcatctatctttcaatcttctctcacatcgtgcaatacctttgaactctgtctacagagataactcttcatctgtctaaaagggtt

SEQ ID NO: 281695 - DNA, 371 bp, Glycine max
  unsure (1)..(371): unsure at all n locations
agggaaccctatctccgacagccaatgtggtgagtcccatacaaatagtccccaagaaaactggcctcaccgtgatcanaaactaaaaagaagagctgattcttactcaagtacagaacagttggagaatctgcatcgactatatgaggctgaaccaggttaccaaaaaggaccatatttccctgccattcattgaccagatgcttgaacgcctggcaggtaaatctcactactgttccttgatggttgtttggtaatatacaacaactctgcgtctgaggtttagaanaaccacattcacctgcccttcggcctttttctatagaggatgcctttcgcctgacattgctccggtccttctaccgggcatg

SEQ ID NO: 281696 - DNA, 421 bp, Glycine max
  unsure (1)..(421): unsure at all n locations
tcaggctgctcaattgctccaggttgttgcatgttttggcttatgtctatatggnggtcagcagaggagcacagaccacaaacccttgcgacaggtacagatttctgattcaaggccagctaggttaccaagttgaccaacgcatccagttttccttcaagcttcttattttcagatgatgcagatgggtttgtagctacctcatgcactcctctaatgactatggcatcttttctggcgctaaactgctgggagtttgaggccatcttctcaattaaatttctggcttcagcaggagtcatgtcttcaagggctccaccactggcagcatctatcatacttctctccatattactgagtccttcataaaaatatatgaaaataaactgttctgatatctgatggtggggctactggcaca

SEQ ID NO: 281697 - DNA, 176 bp, Glycine max
  unsure (1)..(176): unsure at all n locations
acctnctgtttgattgggtaattaccatggattagaccctctttgaccaaccggtttggggtggattggaattaggctagttaaaccaaggttttacttaattaaggctaccctgtttaaaaattccaaggctaaccctaccctgtttgtaacctgtcataagctttttttagtct

SEQ ID NO: 281698 - DNA, 387 bp, Glycine max
  unsure (1)..(387): unsure at all n locations
tttgtcaaaaatattgctcanaacttttcagcttccgaccttcatgacctcaacatcattcagggtaataattaaggaaagacaaatatttgtcattaatattttataacttgacttcgatcatgagnttgtgctagcttattgcttcccgcgagtttggttaatattttccggcaaaattcggcttttttgctggttttctggcaatgaagtactagtatatatctatcagtatctatctggcacgtaccagaaatcctgtgttggcacaaaatgtcacacacacgctgaaaatatattttatactatgtttaatttggatgtgataaaagaaaataaagaagaaagaaaatatatatagaaagaaaaaattattgtttttttcta

SEQ ID NO: 281699 - DNA, 397 bp, Glycine max
  unsure (1)..(397): unsure at all n locations
gctcttaannatgggaagagtattccttgtgggacccttcacncaaccaaagaacactgccaaaaattaatcttctccttttgggacaagtttggcggcttggggccaaagtaatttctttccattagaccttggatgcaactgtaatcgtatgtccatataagctaaatcttgacgagtattcaagtcatccttcgtcttgccttgatgttaaggagcgtccccatcacactgtcacanacatttgtcttcacatgcataacatcaatacaatgtctaacgtcaagatcagaccattaccgaagatcagagaacaatggacctcttctttcatatgcaactcttacttttatacctcttttgggtcttcccaaatattgtattcatgtgtngaacg

SEQ ID NO: 281700 - DNA, 389 bp, Glycine max
  unsure (1)..(389): unsure at all n locations
agccttaggtgcccattgttgagacatggcgctactgtatgantctttcatttgagggcctaactcctacgcatacatattgccccgtgcttatatgaaggactaacctgtaagaagttgaaagtgaacaattatggacgtatgatcttacacttatcttaaaagcataagatgaatctttcattcagacttgttattgcacaacaaacacaaccatggtgtatgctttttttttcaataatggaacaagaacttcatccaccttctaacagggtaaatgatcattagtcattgtcatctcacatatatatataaaagcaactcttgatctagtctaatatttgagctttggtcattgtgtgaggcaaaaataatataaatattataac

SEQ ID NO: 281701 - DNA, 518 bp, Glycine max
  unsure (1)..(518): unsure at all n locations
agannannaagggtagtgctgatccttgtatnccctganacattgagtaanangccccgaaaccanatgctcaccactactagaggagaagccacattttgnncacttaaacctcctcctctaaacaccattaagaaaagttgttttcacatccatttgttgcaactcaaggtcaaaatgagcaactaatgccaagataataccaagagaatctttcttaggtactggagaanaagtatctatgtagtcgattccttctttttaagtaaatcccttagtaacaagtcttgccttgtatctctcaatgttgcctaatgaatcccttttggtcttaaagacccatttacatccaatggcctttaccccattaggcaactctacaaggttccaaactctgttactctgcatggaattcatctcatccttaatggcatcataccatanatttgactctttacaactcatggctngatcaaaagtgtcgagattattntcagctccaatattaaagtcagatn

SEQ ID NO: 281702 - DNA, 339 bp, Glycine max
  unsure (1)..(339): unsure at all n locations
atattatctactcanaaagtacacttctctatatttgcatagagggtgttcttcctaaggactgatagaacttgcctgagatgtcctaagtgatcatctaggctcctactgtacactaaaatatcatcaaaataaacaactaagaatctacctatgaaatcccttaagacatgatgcataagcctcatanaggtgtttggtgcattagtgagcccaataggcatcactagccattcatacaaaccaaacttggtcttgaaagcggttatccactcatcaccctttttcattctgatttggtgatacccaactttaagatcaattcttgaaaacatattg

SEQ ID NO: 281703 - DNA, 366 bp, Glycine max
  unsure (1)..(366): unsure at all n locations
gccgagccgagccttanataggctgagccaaaggcctttcacaagcgcctcggttaatttccatccctaagcaaagtcctgatcaggcgttagaagatgaaaagctgacttttgtaaatgaaaccgagtggacttagatcccaaggaaggctatgagcatgattcggtatacctttgctccgagataaacacaacgtgttgatgagacaacacaaaaggcttgtggaaaagctaagatatctatgcgtaaattttaccaatccctttgtngaagatggagtgatcactcaaatgagatgaagataactcctacccatcaacagtcatcaactgtaagcaatgttaagcaatgataactcttgagag

SEQ ID NO: 281704 - DNA, 339 bp, Glycine max
  unsure (1)..(339): unsure at all n locations
tacacaacctgcgtgagcaatagtaatattatccccagcgttgcgttagggataaaattgctctggcacgaattagccaactctttcatcactctcctaagtctcgtcgtaataatctttgtaattatcttataggatacattataaagactaatatgacaaaaatgtttcatagacgtaaccggctacacctttgaaataagagctacaagacgttcactgatcatcttcacttttagtggctcatcaaaaatatcttttatgagatcgcaaagagaatctcccacaatggtccactggatcggatcttgtaaaaaattgactgtcagcntctgcact

SEQ ID NO: 281705 - DNA, 516 bp, Glycine max
  unsure (1)..(516): unsure at all n locations
aggannnnnnnnnggggattaaaatgatcttacattattctcttcgcaaatccagcggcgaaccaagcgatgctcccgaggatcctctaaagtcgaccagcagcatgtaagctnnttttatatgnnaannnnaaagacactanaaactaataggattgaataattaatttcaacaattatctaaattaccttatttaacaactattgagataattattcaatctaaaaattattaagaaatatattcttgaaactctgaatatctccaattacataataatttaaattatctaattttgattattttaaaatactataattctatttcttaaattataaaataatatgctatanatactctctcgaaagtgaaaataattgagatcaaatattctaagttactaatagttataattaaaagttgtaataaatgtttcattcaaatattacacattttaaaatttacaaatacccattggaaaatacggatcactccaattaacatctttgtttccg

SEQ ID NO: 281706 - DNA, 391 bp, Glycine max
  unsure (1)..(391): unsure at all n locations
acaggttcaggtgcaggtgctgctactggtttatgcactttattttgctngccagacctcagggggatagcgctcacatttttcggattatgcacagtttgtgaaggcaatttgtcagaattttgggattgagctcggttcatctgagtagccatctgccccatctaatttgtcagactctgaatgaaggctcttgtctctagctgaaattgcatattctggatggtcatttgcctcactaactcctctaatgaaggttgagacggggccatagtttctcgtagtctttgttgttgttgctgcattggaggatgatcatatggcctgcttggaccaacagcattctggataagagggataagttgttgttgttgctgttgtggttgtggag

SEQ ID NO: 281707 - DNA, 362 bp, Glycine max
  unsure (1)..(362): unsure at all n locations
tagctagccattccatcttttccaggcgagcagggttgcgttgctccagaagcaacaaccttctggaggaatcttctggagggccaagtgggcctggttgctatttgcacccccatttttactaagtacacccccctgccttnntttttgtgattcttttttcgtaaagttatggaaacttacgaatttcgtaacgatacttgttttctttccgtaatgttacggaaccttgtggattacataatcatcccctttntgacttacggaacgttacggaacctcactaattgtgcaacgatgcttccatttgatttccggtgtgtcacggaaccttacggattgtgcatcaatatattcttttg

SEQ ID NO: 281708 - DNA, 459 bp, Glycine max
  unsure (1)..(459): unsure at all n locations
actaagcttccttgagaagattcccgaaaaactagagcttatctacacacacctctctaataactaagctcacctctttaagatgagaagctagagcttagctacacacctcctataatagctaagctcacccccatgccaaaatacatgaaaatacaaaaaaagtccctactacatagactactcaaaatgccctgaaatacaaggctaaaaccctatattactagaatggccaaaatacaagcccaaaaaagaaggaaaaacctattctaatatttacaaaaaagagtggacccaaccttggcccatgggctcaaaaaatctacccttaggttcatgataaccctaggatcttctttagcaactntaacccaatcctcttagagtcttctatccaataccctgggggggtaggattgcatcataatgttagcctgttgaggctttctttccatttct

SEQ ID NO: 281709 - DNA, 292 bp, Glycine max
  unsure (1)..(292): unsure at all n locations
tctatctctatctttgacaagaatgagctctgataccacgtgttagacaagtggcctcagatatcttaagaaagggggggttgaattaaaatattcgaagctttttcccctaattaaaaatctatcttactntttacttaagttatgaaattccttaatgacaatcttcttaaatattaattcaaatgaagcaacttgaatatgaatataaagcaataataaataaaggagattaacggaagagaaaatgcaaactcatgtttatacttggtcggccacacccttgtgccta

SEQ ID NO: 281710 - DNA, 449 bp, Glycine max
  unsure (1)..(449): unsure at all n locations
cacccagctcgcccaggcgagctcagctctttctgcgtttcttgttgctncctccagaaggcaccgtcttctggataacttcctggaaggcccaagtgggcctggttgctatttgcaccccctgtttactaaatacaccccctgccttttttgttgattctttntccgtaacattatggaactttacgaattttgtaacgatacttgttttctttccgtaatgtcacggaaccttacggattatccaataatgcttcctttcgaatttcggcatgtcacggaacttcatggattgcctaatgatgggtgccaagtacctcgaagtggtcaaacgagggtcgcatcccaacaaacggatggtccccggacgaaagtatggtatgacaagtagcatgtcttctataaccatttcttgacaacattattnagtatatctcaaaagaggtaac

SEQ ID NO: 281711 - DNA, 307 bp, Glycine max
  unsure (1)..(307): unsure at all n locations
agctntaacttcatcgtccctcacagnctttagatttgggagccaatccaatccttgtgtccgactctcagccacttatgatangccgcgatgatcccatttactgcttccctaagctctctgtcctttcttcacgccgcattccatgccttgcgaactccttggagtaccctcgcgttgtggtcactaaaaccccgtgcgatgaaaggcgtgatgctttcgtctaatggcgctcctctcatggngtagccaagctgtcttatggtgagaacgggattataattaatacaaccccttgttcccatca

SEQ ID NO: 281712 - DNA, 450 bp, Glycine max
  unsure (1)..(450): unsure at all n locations
ggganaccctatcagagcaaacagaggaaaagtgttgangaattttangaatctactagagatgctactatcactgacggactacacacatgagcccgcttagaggtaagagatgagtttatcacaattggggttagaatgaacatgtgtagggatccttaggggaccaaattgggatttattttgggatgtttattgaattataatttttcctttatgattataaatacaatattgttgtgtttgacagaccaattgatgtcctgatgcaaattggttgataaaattgagtgttcttggtgttttcgtgtttttaacctatgatttcgattcattgattttggtatgattgtgtgaaattgtttgaggggttttacttcccatgttgtgagaaacatttttgtatanattatntgtactttggacaagatattctagattgacatgata

SEQ ID NO: 281713 - DNA, 168 bp, Glycine max
tactgaatctactttgtgtattgaggagctagaaaaaatcattgcatgcaatatatcttaaggccgggtactggtgcccatcttttatgatgttgacccatcagatgtacgccatcacaaaggtgcttgttgaagagcattagaagaactcgctcaagacatatattc

SEQ ID NO: 281714 - DNA, 265 bp, Glycine max
tgaaacacagaaaggtgcgacgggctcggagtaagatctgagctgaaatggggaacgagagtgatgacccgcggaagcggcggctgtggaatctcgtgattttggacgcgttatgtgcggacttgctatatgctctcctgacattggaggtccaaaaggacattgtgatatgggttcaagcaatttataagctactttttaaccattggtgatgttttgctcggaactccttttaatccattttttgtggatggatcatcaatga

SEQ ID NO: 281715 - DNA, 186 bp, Glycine max
  unsure (1)..(186): unsure at all n locations
taatgtgtctaccatcaccattatcgtcttcctttccatcattgggggtaccacttgggccccaaatcccttcaccttttgggcgtgttttttgaaagatcagcctccttattgcanatgttctgtagttgctatctatccagaaccatatcaaaattgtactaatactgcctaacaaaagcacca

SEQ ID NO: 281716 - DNA, 396 bp, Glycine max
  unsure (1)..(396): unsure at all n locations
ngagatgaggaagtgttgaagggttataacttccttcttttattgttgaccacagagtggtacctggagatatgtcgcggnggtcaggagaccttggggacgtcaggtggggtgctattgcccaaaaccaagcttgaccaatcccgacccaacccgggcatagtcggtcagtgagaacctgtgatgtacctaagcaggcgagctcctggcagtcaacagataaaaggaaaacaagaccacaaagtaaggaggcttgtggtggctggccagctgtgaaatttgtgtaatatgtggatggtggcctctggtaatcgattactaagggtgggtaatcgattacaaggcttataaatgaagacaggaggctaagatggtctctggtaatcgattaccacg

SEQ ID NO: 281717 - DNA, 393 bp, Glycine max
  unsure (1)..(393): unsure at all n locations
agcttcaccttcggttnttattagaactattgtaaaaaatgtttttactaaaaccaatgttgtaaaggtaatttctatattcggtgggtgccataatcgatggtagttctaacatatatatatatatataatgntcccacaagaacncattttcttgatcncatttttaaanaaaacataataccgtgaccatgaaaaacaaaactaagacactantatattaatataataaatgcaacatgaaataactagtgaacttcaaaataaactatggtgaaccaatgatttgatgatccaacaacaacttggatccttcttcattgtatgctaactatcgctctctcactttaacatntccaaatgcatcatcatgatntatgctaactatcactc

SEQ ID NO: 281718 - DNA, 434 bp, Glycine max
  unsure (1)..(434): unsure at all n locations
caaactttattatctagaaatattgtctgaaggattatatattctaggaggaaaacagagatcactcccanaccacctcnatatttaaaaacctttgcttctagagttgagaaacanaccattntcaagcataaaagaaagattnttaacaacaagctctatacaaggggcccattcacgatggtatgaagtaatacttcatataacaggaagaatggcatgagaagatgagaaaacccctcccataccttgggtaattntaaaaatggttcgaatgtgattataaatntcattaccttgtagctcaaggtctcctctacaacatacttgaatttgaggaagaaaaacatctttcttgaacataaaagtntaaagagaagttagggaaatttagagaaaatgatgtagagcactctaggagagagagaaaaatg

SEQ ID NO: 281719 - DNA, 327 bp, Glycine max
  unsure (1)..(327): unsure at all n locations
ggatctctaagtcacctgaggcttgcacctccttttcacctattagaggataaaagtggccaaaaaaaaaccttcttacaaaatttcatccggtgaccctctctatatttccactccaaaccctctttccttctccttccacctaaaccattcaacaaaaaatggagagcaaanagagatctaagacctcaaaaatagagtgaactaccttctaatgcctcagcaatcgaaattgccagttctaagagtgtgcccccanaggagctcaagcatgaaggatacatggcaaatgttcacatgatagtaatctgtctcacatctgaaaat

SEQ ID NO: 281720 - DNA, 433 bp, Glycine max
  unsure (1)..(433): unsure at all n locations
tcctacggcctgcctccagacttcaccccccgtgccacttcggaagattttaaccaagcccttacttttgaggggcaactcccaccttatgaagactttcccgggcaagacgatggggaaggagatacccatcttggccccctgctccacctcaaagatccatccccgcatgaactaccctagccgaacatagtccgccatatcccggcctcacccacacccgtaaaagaatctgttccctttgcagaaggtaagggaaagattgaagcgcttgaagagaggttaagaacagtcgaaggcctcggcaattacccattctcggatttggcagatttatgtcttgtgcccaacatcgtcattcctcccaagttcaaagtaccagactctgataagtacaaatggacgacatgtccaaaggagcatctncggatgt

SEQ ID NO: 281721 - DNA, 124 bp, Glycine max
aacaaactcaattgtggactgctacacggatttaaatcattccactggtctggaccacactctagttgattaacctcctatacatatcatggagctggatcataaaatcatttatcaatgtgtt

SEQ ID NO: 281722 - DNA, 349 bp, Glycine max
  unsure (1)..(349): unsure at all n locations
ctttcaaatggattcccactgaanttattattagacagattgagatatcttaatgatgaaagttttccaaatgatctangaagagcaccaccaattgagttgttggaaaaatctagcagcacaatatttttaaatgccccaatatgatctgtcagattgcctganagttgtgaactctgaactgcaagtcttgtgagtccatgggaaatacaaggagcaagaatttctaaaagttcattaacctgttggttgagtttgagatatgatanacctatcacccttaagttgcagacattacccaaagaagttggaatgtttccttcaagttgactatatgacanatcaagtc

SEQ ID NO: 281723 - DNA, 353 bp, Glycine max
  unsure (1)..(353): unsure at all n locations
nagaggcacctctatgactgtcgaactacacacgtgagcctacttanagataaggaatgagtttatggcaattggagttaaaatgaacatgtgtagggattcttaaggataaatttaggttattttgggatgttaatgtattgtaatctggcttatgataatatcatgagattgtatgttgatgggcaattgatgcatatcccaatggtgataaattggtgtcttattttttgacctatgatttgatatatatgtaaaatgttgaggggtttactccatgttggagaatatttttgttattcgttgtgtttggacagattatggataccatgaaataaatggggaaagtcttg

SEQ ID NO: 281724 - DNA, 427 bp, Glycine max
  unsure (1)..(427): unsure at all n locations
cacatggttacaagccaacacaccattttctatttttangccanacttcttcttctagtgctccattaattangagtttgattcctganaggtgcagacacacctgcaggctacccctgcaagccacctgctaatagaacattgatgactntgtgtacactangttatagctgaagctgcaaatgtcataaacataatgaatgatgttgtgaccccagcttttgtggctagatcccatgtcttaattatttttttttgaactgcaaaaataatttatattaaaagataaagagtaccaggggtactatataaacacacaggagtaaagatctcctgaaaatgataacaaaaatacaacaacccaacaaatacagccacaaacccaaatctacaaacccactctaattaaaagctatagacatagctg

SEQ ID NO: 281725 - DNA, 304 bp, Glycine max
  unsure (1)..(304): unsure at all n locations
agcaggaattctcatacttaattcngaactcacaacccgggatggatatgccataatgaggttctacacattgtaggcatgttgctctaaattgaacctgaagagaaaccacctgttgatgctgatgatcataaaggtgggcatttgtatcaaactctaaccactcgtgcttcactcaagatactcctttcaacatgatctgcacatgacaaagggatgtctatgctaagtctgatcgcactttatcatttatggtggtatgttctttctctagattcttctcacacatcatgtggatcctatc

SEQ ID NO: 281726 - DNA, 451 bp, Glycine max
  unsure (1)..(451): unsure at all n locations
ttgagagtcgagaatacttgattattatttgttaagtnttttatgatgtagaagaaaatgaatgtgagcctttttcccttttgaaagacttgttaaaaaaatgttttaaaattacttttaattaatatttgaatttttttattccttattagtatatatgtgaggggtagagggtgtcacacttagcatattttgaaatttcaaaatcaaattaattcttaacaataggttcaggtcatgtagatctctacattgtttccttttgttattttcttttggttattttgttgttgtctttaatttatacttccataaagcttttgtggacatttctgactttcgccaataattggtgtaaattaggatccaaaagcctcggtcaagactcattcatgtctgttcctaatgaggaaaacttgtgtcacattcccaggtgtgctcttcaattctg

SEQ ID NO: 281727 - DNA, 336 bp, Glycine max
gagcacagaccacatacccttgcaacaggcacagattactgatgcgagtgcaactgggttaccaagttaaccaatgcatccagttagtcttccaacttcttagcttcacatgatgcagctgagtttgtatctacctcatgcactcctctaatgactatagcatcattcctggcgctaagctgcggaatgatggaggccatcttctaaatgaaattactggcttcaggaggagtcatgtctccaatggctgcaccactggcagcatctatcgtacctatctccatattactgacgacttcataataatatagcataagaagttgatctgaactctga

SEQ ID NO: 281728 - DNA, 275 bp, Glycine max
  unsure (1)..(275): unsure at all n locations
agnccctatgcggacatatttatacgngcgaaactggtggaccgtttaggaaatctgagatttgattggctggaaagtctataaattgaaaacccagcatacatcggatatatcgccctccatttgccaacctttcaaactatttttttgcattatgcattattcgattataactatggctatgcctcgaaggtatcattactctagctatctcttggattctttcggtattcttgatctcagatcatgttatgcgcataattgtcctctaaaat

SEQ ID NO: 281729 - DNA, 449 bp, Glycine max
  unsure (1)..(449): unsure at all n locations
cacgacaaccaaatgagaanatgcatgtcaaagtttatcatcatatnactnttattggctttgataataaccaaatcagaacgacatctaaagtggctattgctaaactgttattaaatttttgttcctttcagattgtaaaattatttatttttttattttaatgtttatctctttaaatattttattttcttcatattttaaattttcttttaattttaaaatgcttttgcaacaattaaaccaaaagtgcatccgcgaagtaattgctgtggaccttttatagcttctataataactaaattagaagtgcatccaaagtagtgactactgaagcttcattntattaaagttattattaaaaatgttattattattaatattatcaatgttattntatatttctaagttatgatgaacatatgtatacaatntaagttcatatgact

SEQ ID NO: 281730 - DNA, 292 bp, Glycine max
taacccatattccggaggaagggtgtacaaaatgaagtgcaccaagaaggactcacacatataaacctccaatatcataatttgagctaaaagatctcgcatttgcattatgtactaatgcacaccttacacactggtgagctccagagaggagaacttcatgaccagggtgctttacttgctaaagccctatctgaagtgatgaactagatatcaatagccttacgcaggtctcatactttctcatgttggtcaacaaaaccacatatcctatccgagagttcagccttac

SEQ ID NO: 281731 - DNA, 387 bp, Glycine max
  unsure (1)..(387): unsure at all n locations
ctcaagctntgagcaaattcaaacgacaataactattgactctgatgtcctattgtgttccgtaatatatcgagacgctcgtaagtgagaacagaagctctgagccaattcaaacgacaataacttttaactcgggtgtccgattgtgtctcgtagtatatggagacgcttgaaattgaaaattgaagctctgagaaactcaaacgaacataacttttgactccgatggtcgaatgtgtccccgagtatatcgagacgctcgtaattgaaaacgaaagctctgaacaatttctaacgacaataacttttgactcggatgtccgattgtgtcccgtagtatatcgagacgctcgttattggaaatagaagctcttgaaaaaatcaaac

SEQ ID NO: 281732 - DNA, 103 bp, Glycine max
  unsure (1)..(103): unsure at all n locations
tgcatgctatctttgcttatttggtcttcaccgatgaaaggatcgaagtgggtctgaaaagaggcaaatttaatcatcctgctcggatgaatgagnnaaactg

SEQ ID NO: 281733 - DNA, 217 bp, Glycine max
ccttgagatgaggaagtgttgaagggtgaagcttcctgcttttattgttgaccacagagtggtacctggagatatgtcgcgggggtcaggagaccttgtggacgtcaggtggggtgctattgcccaaaaccaagcttgaccaatcccgacccaacccgggcatagtcggtcagtgagaacctgtgatgtacctaagcaggcgagctcctggcagtct

SEQ ID NO: 281734 - DNA, 108 bp, Glycine max
  unsure (1)..(108): unsure at all n locations
tttctntgttttctaatcctgactcaccatagaccttgccccagggtgagaatgtcaatccttacccttcgaagccaaaaaaaaatagaagggaaattttccattcaa

SEQ ID NO: 281735 - DNA, 422 bp, Glycine max
ttcgaggtacttacccgttgtatatcgaagatcgatgattatcgaatgaagaacgtcgaagaacggttgagatctttgcgaaattcctcacggaaaacgttacggaaacgtttcggaagcgcctcggcttagattttcttcacggaaacaatttttccaagcaaattcgaaagagagagaagtgcctaaggggctaaaccccttttccttctcacttcctcccctatttatagcaaaataggggaggtggttgccgcccagctcgcccaggcgagctcagctcgcccaggcgagctcagctcgcccaggcgagcagggttgcttcctccagaagcaaccgccttctggaggaatattccggagggcccaagtgggcctgggtgctatttgcacccccatttttactaagtacacccccctct

SEQ ID NO: 281736 - DNA, 475 bp, Glycine max
  unsure (1)..(475): unsure at all n locations
aataaaaatgagctttganaactgagacnctcgcaangccccgggatcctctgagtcgacctgaggcatgcaagctgaatcttaatganacttaatgngctttctaacacagaacctgccacttcaacttgtgaataagttcaacctttattatgttccacttgtcagaatgaagtacttacccccacttactttttcttttagatctcttattttccgtgtccttctctctgcaaaataactttttatcttgtaatgaacacctgtgataaagaataagcttgaaaaaatctcaatcatattacgacaccggaatttttggatacttgtgattagcatctagttaactcacaaggttatatcatgatcaacataatatagattgctaatcctgatgaagatgcatattgacaataatcatacattcttgcatcncaagggaccgacttggttcacgcctttacactgaaacccc

SEQ ID NO: 281737 - DNA, 449 bp, Glycine max
  unsure (1)..(449): unsure at all n locations
tgtaggattatggngtacccatcacatgtggtactangtggttgtcgggcgatggtgcacaacaagtgttccacatccacaaagcgcgcataaacccaccatcccctgttgcccacctccaactgagctcacgtactcccacgtagcccatatcctcgtttctctcaacaccgggtccccatcaatcctcccaagctttcccaacatccaagtaatacaacattcaaacagcacaaattatcacagccaagcaaaatagggcaaaggcagaaaaactctgcccaaaacaccaaccaaaatcacagcttttctcacttaaagaccccagtaacaattccttcgttccaattcgttaaccgttggatcgactcgaaaattttactggaagtctatagtacttaagcctacattgtgaccgttgggatctactagcaaacatctagaactca

SEQ ID NO: 281738 - DNA, 163 bp, Glycine max
gggatccttgagtcacctgaggcatgcagctcttttccaggctcttcgggtgttgaagctccttcttcatggctaattccttattggatggcgcctcctctcacctcctttccttggtcttccgctgcatcttcatggtgggaaaatcaccattaaaggaccc

SEQ ID NO: 281739 - DNA, 401 bp, Glycine max
  unsure (1)..(401): unsure at all n locations
tctgcaagggtcatgactactgtaggagacatgtttntcttttcttaatncttttaatattngccttctttcttcttcccttatttgttccctctcaccttgatttatcctacctctctttcccttttctttctttctagttntcctttccataacttgagggaactcaactcatctaagattctagagagagaaagtccttatgactagtaccctcaccattaacactagatgaaagatgactcctattggttcctaagttgtggttctttcttgctgggggtttgcaaaaggtaaaagctagggtttaaaagaactcaagataagcgtgataatcaagaagaaagtattatgtaataacaagataaactaggtgtgactattaaagaaaatatgctatg

SEQ ID NO: 281740 - DNA, 166 bp, Glycine max
  unsure (1)..(166): unsure at all n locations
tttcttaactttttggttnagcacacttgacaatataggagaaagatcctggaagaagtaatgactatatnagatccagcagtattcataccttaaggctcttcaacaaatagaccttcaggctttgatggaaaaaactactactactagaaggacaaaatgaagc

SEQ ID NO: 281741 - DNA, 323 bp, Glycine max
ttggcacctaatggtggggctgtcaaagaaccctacaaaaaaattaagcacaacggtgggatggcttctcattagaaacacaatttatgttgaaataaatattgaggatatattatatctaaatttcaacattcaaagaaataaatagagacacatatatccctgaaacataccaacatatcaggtttaatgcctgtaccatcaacatctccctcttcaacatgccacccagagggaatatctacagagactataactgatcttttttggccaatttgattattattattatgtaaagagacaagtctctggatcaaatcatc

SEQ ID NO: 281742 - DNA, 316 bp, Glycine max
  unsure (1)..(316): unsure at all n locations
tatgtcgcgggggtcaggagaccttggggccgtcaggtggggtgctattgcccaaaaccaagcttgaccaatcccgacccaacccgggcatagtcagtcagtgagaacctgtgatgtacctaaacaggcgagctcctgacagtcaacaaataaaagaacaaagaccacaaagcaaggaggcttgtgtggtggctggccagctgtgaactttgagtgttatatgggatatggcctctggtaatcgattaccaagggtgggtaatcaattacaaggcttanaagtgaagacaggaagctaagatggcctctgataatc

SEQ ID NO: 281743 - DNA, 141 bp, Glycine max
  unsure (1)..(141): unsure at all n locations
atctntgcttaccccaaggatccattangaaattacttgtgaaagagagccatgagggtgggctgatgggccactctgggatagaaaagacccttgtcttactcanagaaaagttttattggccccatatgaagaaagatg

SEQ ID NO: 281744 - DNA, 351 bp, Glycine max
  unsure (1)..(351): unsure at all n locations
ctctatntgctatgcctaacttctagtcatcacaacctttttttgtttcagtgtctttcatgttctgcagctcgaattctctgtccaagtagagtacttgcatgtcgttggttctttcacagccttgatattctgatttgagataatccctctggcgaacttgatgttcataattcttgtaaaaatgatttttaacatagcgaagaaaagacaatttttagcctaaaccttttttgtcttcctttctttgtgattcttcatttgagccgtcgttgaatttaaagatagttcagggacatcatagttttcttctagtgccttccaaagatccaatgcttcaagatgagtagt

SEQ ID NO: 281745 - DNA, 444 bp, Glycine max
  unsure (1)..(444): unsure at all n locations
ggaagaagccncaaggacaattgtatgtatctnggattattaagaataagaagaaaatggactcctctccctcccttgaagaactcatgaacaacaatggagaatgaaggttccaagtttgatatttttggaggagtgaagagataaggctttaaggcttggtccaaatgaaacttggttaggcttaatgttgataagatcaaattgacaaaatgaatgaccatttgatagccatggtggaagtgctaaatgcggccatatatgggtattttgccttttgaatttttaaccagaaatggctaaagtagacttaagcaaaaatggtaaagtaaaaattatttttgctaaaactggtaaatcttatcctaatcttctatattagtgtgctaacttcctagattagtgtgctgacctcccttgggatatgtgtctttagagtgaacc

SEQ ID NO: 281746 - DNA, 177 bp, Glycine max
  unsure (1)..(177): unsure at all n locations
taagctncaattttcctatttttatggacgagctngactaggcgaattgatattaccctctattttcactntacttattaatcaattccattaagaatgagaaatcccacagagaaaacgtncgattgattttccgctttattctactaagagatgtctttttgattattatattat

SEQ ID NO: 281747 - DNA, 347 bp, Glycine max
  unsure (1)..(347): unsure at all n locations
gatgcagcagtaatgatgtacgagttatgtagttgaacggnnacnaacccgggatgggtttgggcaaatacaacagtgacataactagcctgataaatgccaaaggaaatcgtgggaagtatgggttaggctataagcccactcaggcagatataaagagaagcatcgtgggaaggaagagcggtagtcaaaactcgcggttgagacaagaaggtgaacgaagcccaccctgccacataagtaggagctttataagcgcgggtctggtggacgaaggtcaagtggtcgcgatatacgaagatggtgttctgagtacattggatttggtacgaccatgccctcctgat

SEQ ID NO: 281748 - DNA, 495 bp, Glycine max
  unsure (1)..(495): unsure at all n locations
nccgtggttctaacattganacttgtacntcacaaganncaggaggacccgggatccttaagtcgaccgcggcatgtttttctagatttcatattcaacaaggcgagcaagatgcggagacgaggaatggcaatcccatatgcgaaccattccctgaagtaacctactcttgggacaccatactcagcacttgtaatgctatatagccctataagcgctattaatcctgaggatggaatatatactatctgtgctatgacaggctagaacaaaaataactacgttcagtcgtagaaatgatgcttctattacactaatgtgcaacccgcatagttatattatcttattcagcgagtattgtcattatttattgtatgaatacattagtagctcgtgtctggagagcattaatactatgagtcactgaaaatggctagttgacccgaatggtcaataaacacattaaaattcggcctaatcgaccgaaagtagacg

SEQ ID NO: 281749 - DNA, 548 bp, Glycine max
  unsure (1)..(548): unsure at all n locations
cggataacaaaaanaggggnnnaggggcagttaagcctgagaccatgtatnntcgttgtancnactncganaanatnaacagaaanaacannnagannagcggaacgagaggaagaagaaactcttggagtgttttanagttataangagnagggagcnctggggtcttagagagagtgatactcctaaatgcttgagtgattcaagaacacactgtgtgtatcaaaggactttcacagcctttgtgtgttgccctcactggaaagagtgactctatccttcctatcatgttcgcccttgttctttcgaaccacaatcacagagaaatgacgtctgcgcagaagcttctcacgagcgtaacttccatgttacacactacaaggaagtgagtcttgagcctaaattgaagtgtcaaacaagaccttgctccttagtgaggaatcacctcatagagaggccctgatcttcctgtacagcgatttgtatatttctgacagccaccactcagactatgatataccatacgattcatgcatattattgccaag

SEQ ID NO: 281750 - DNA, 355 bp, Glycine max
taccttgtgcatgattgatttattccttgcacccattttgatctgaaagtatgattgtttgattgaaccttgatcctgtacagtttatctccttctaccttgtcttaggttgtaggagagcctcattcataaaaggagattttggttcaaagcaaatttgcccaaatttggaggaattatggggtaaaagcttgtaatggtaagaacagagcaacacacacaatcatctaataagcagcaagtattaaaaaaaactgtaagtataaaagaaaagtgtgtgtgtttctatttaagaaaaataaaaggtaagtgcggaaagcaagtaatatagatgaataaaaagaaaaaggtgatc

SEQ ID NO: 281751 - DNA, 394 bp, Glycine max
  unsure (1)..(394): unsure at all n locations
ttcaatttaaggcccaaaacttccctcagaaatctgatttcatgctttaataggtggccttgttagtgctcatgcgcgtaacgcaattctgaaccgcttancgcgcattagtgaaattcagcttagcacggcttttcttgctcagcggatggactaaagcggtgcgcttagcgaggtgacccttcgctcagcgaatatgcacagctcatactccttacagattcttcctcgcgctcaaccgagaagtgttgcgctcagcggatggctcgctaagcccgaagaaaaatgattatttaacacacaaaatagaagtactaagttttattacgtatcgttaacaaaaagtaattacaacacttacaaataccattaattggaggagtttgatcatttg

SEQ ID NO: 281752 - DNA, 465 bp, Glycine max
  unsure (1)..(465): unsure at all n locations
acacttagcaactcaagcttgtgcattcaatatgctgataagggtgttccatatgttctctttactggactaataaatttgctgcccaagtttcatggtcttgcagatgaagatcctcataagcatcttaaggagttccatattgtctattcctccatgaaaccccctgatgttcaggaagatcatatctttctaaaggcttttcctcattctctggagggagtggcaaaagattggttntattaccttgctcccaggtccattaccagctgggatgaccttaagagggtgttcttggaaaaaagtttccctacatctangaccactaccatcacgaaagacattntcaggcatcagacaacttagtggagagagcttgtatgagtactgngaaagattcaagaaattgtgttcaaggtgtcctcaccaccagatttctgagcaactccttctacaatatttcta

SEQ ID NO: 281753 - DNA, 214 bp, Glycine max
atgctcacgagagaacatgtgatagtatgctcacctgaaaaatgaacaattatgagaggtgttgcacagagcacacatagaacttttcatcaatatggtttatacaaacaattcttcttacatgacagtgcattcaagacatttagcttgttagctcttgggccacatctcattgttccaacttgtaagggatatgatatcaatccctattctt

SEQ ID NO: 281754 - DNA, 290 bp, Glycine max
  unsure (1)..(290): unsure at all n locations
naagctatatatatgtntacatatggcaacataattcagcgaaattcatcattggtgaaaaggggaaaatgttacgaacatcataacaaaaaatttgtcacaaaataaaattaaacttatttggaatttttcaactcgttcaaatcaagggaaaattatacaatagaaggaatagagagctcactccccttattattattattattattattaatttaattaaaacaagcaacacaaaatattttataacaaataatatatatttaaaatttaaatggggatgttacatg

SEQ ID NO: 281755 - DNA, 405 bp, Glycine max
  unsure (1)..(405): unsure at all n locations
agcttgcgtgttgtgttgcatcggggaacaatttcactgtaaaagtgggtcccaattggattcctaattttcaacttacctatttggaagtgacatcatggcagttaggtcccagctttccattgtggattcagtcacaaaaccaacttcattatgttggactatctaacacggngattntcgattctattcccacacagatgtgggaagcactntctcaggttttgtatttaaacctctctcgtaatcatatccatggtgagattgggactacattaaagaatccaatatctatcccaactattgatctaagctcanatcacttgtgtggtaaattaccctatctttcaagtggtgtgttcggttagatctttcaagcaattcattctttgaatccatgaatga

SEQ ID NO: 281756 - DNA, 407 bp, Glycine max
  unsure (1)..(407): unsure at all n locations
agctgcttatccaaggctttctcttgttgatgaagctcctccttccatggcttattccctagtggatggcgcctcctctcacctcttctccttcatcttccactgcatctccatggttganaatcaccattgaagaacctaattgaaactcatagatccagcctccatagaagcttctcaagcaagcttcaatcaagtggtaatcatagcacatgagcttcaagtaggtgctccgtaaacctttattaattttcagcattaccttttcctacatggttgtgtcttcattattctccatgtatctactcacatgtcttgtgctgaatgttgtgaagatgattttttagactatccaccgattaaacttgctatagaagctagatttgactttctatggttcaaatctc

SEQ ID NO: 281757 - DNA, 505 bp, Glycine max
  unsure (1)..(505): unsure at all n locations
agccnnnccnccggcagcaacgtagtccgatgcatntgcgattcgcaanaccncncaagcnnnatacanactgcgaggatgacccccagggagtgaggctggttttggtttttctgactaggttacggaaattaaaatctcatattatcacttagctcaacacacttcctcatacttaacatgcacattcagaaattcacacatgactaactcaagtcatccctcnanatattcaagtcagccatatagtcaaattacaagatanataccacttaaatatcaattgataactataaatatgtaagaggtggtacaactctccacccttgtagaaattcgtgcccgaatttacctgactcaaacaaagatggataggctggtcgcatctgactctctactcccaatggaatctcttccctctatgtgtttggcacctatcctcacctcaagacaaggttatatgcaagtctcttactgacgtctccaatcgaccctgagatgtcag

SEQ ID NO: 281758 - DNA, 369 bp, Glycine max
  unsure (1)..(369): unsure at all n locations
tggaccctcanaaanggcagacttggagattcttatcgagtatattaatggaaaacaaatgatcaaaatgaatttatgtgccgaaagagctaaagatgtcttataaataattcatacatatatttacgatcctttccctatggattcaatgaatggataaatgtatttcattatgttcaaagatgagtactttatctttaatagatgagaagtcatggtctttaaatgttctcaagcctttcaaagctgaatttgaacttcaattaaataagaaaattatcgttgtcacatctgactgagatggtgaatgatagcgttactatgacatacattgtgaacaacgtctacaactcttcacatttttctctt

SEQ ID NO: 281759 - DNA, 319 bp, Glycine max
atgaaccctaccctaatataaacactaacctaaccctacgcttaacaccaaaccctagacccttaacccaaaattctaatccctaaaccttaacctctgaattctaatccctaaaccctaaactctgcattctaaaccctaaaccctaaactctaaaccacaagggttagacaataaaccctacatattaaaccataatcccttaaccctaaaatttaaaccattaacccttaaccctaccttttataccctttaaccctaaatataaaaaataaaccctaaaaaataaatcctaaattctaaaccctaaacccttaac

SEQ ID NO: 281760 - DNA, 363 bp, Glycine max
  unsure (1)..(363): unsure at all n locations
atacctgatagagaatgatataacttcaaatgggatcctaagaattaataacctatctttaccaaaaagtgattacaccattacaaaatacccttcatttggaggaagttgatccatttacacaggtttatacacaaaagtagtcgtattcatcactaacactccccaaattatagtttgcttgtcctcagcaaataaagacagctcactggtcccatgtgacaaaacatgcaatgactatgtcaaggtgtatgcacaaaagtattgattgatgataaagaatgaacanaatgcctcatcacttgtcttcacaaacatgcagttatcaaagagaaaataaatgtacctgtcaatagatgaagt

SEQ ID NO: 281761 - DNA, 222 bp, Glycine max
  unsure (1)..(222): unsure at all n locations
agcgaagcaatcntggttttttatggcaacanaggacagcgagagtgatgctatgtgagatggtgcatacgtgtctatcatcacttttcaccacaagttacaagtttccattcaactgttccccattccaccatattcttgtggctatgggagaggattacaagataaggtactgagagctcaccgcccttattataataatcaccttatcattacaataaa

SEQ ID NO: 281762 - DNA, 174 bp, Glycine max
ttacatgtacttccaaagtgtatttgttacctacatcacacacatttcctttgctaaattcacatacatgcatactctaagcactttgtctatcaaaaaatgcatacgtgcacatcttggtatttctaatacctatacatacacaaacttcattatgaatcttgactatctaca

SEQ ID NO: 281763 - DNA, 308 bp, Glycine max
  unsure (1)..(308): unsure at all n locations
aganggagatgtggctgactganctgaaacaccgcacggacttatgaccgagcgcttctgactccttctcaccccgagacgggatgagtatttaacactcgtaccaaaacaacactgaatcactgttccaggcgaacgagtgggacatcccagtcggtgcatttgaaggactattcgcgagagagaacgaatgaaacggacttcgcagagataccgcggaggatgcctgaaagtgtgacattacgcgctgctcaaggagaactgaaagtccgggagctgtggaccagagattctgatgagcggcgaac

SEQ ID NO: 281764 - DNA, 527 bp, Glycine max
  unsure (1)..(527): unsure at all n locations
nttctaagttcccaagccctagcnancntannnnctnannnnatanacacncaagcnnngagcatgtcatcncgagaaaggagcataagaattttcatttttacttttccccaacaaaagcggggagaggatatgaatatagtagacgaactgcgagttctatccaccatatgtgatattctatagtaaccccacactgctagtttgaacatgaggaaagctgtagaagaatataaacaattccttctcatataatatcataactcacgctaggtgtcaatgtacgaatcaaactaatttctatggaccattgtgacctacataaccttctgatcatcatgattattcgttggacactgctatatcaagaattgacggatgaactctgttcatttggctccctatcgtatgctgtcaaatcttaatagatccgacattaatagcgcgtacactttgcaatcatgacttcacaatatcacttattactatgctcattgagaaaaccgcctgtgcttgactcatctttg

SEQ ID NO: 281765 - DNA, 420 bp, Glycine max
  unsure (1)..(420): unsure at all n locations
tatgcttgaattgcttatnggatgcccattggttaacttggtaagcccagctttggccttgaaccatgaaatnntgtacctgttgcaaagggtctgtggtttgtgctcctctgctgaccaccatacagacctttgcccttccatgcagcaacctggagcaattgagcagcccgaagcttatgctgctaatatttacaatagacctcctcaacctcagcagcaagatcaaccacagcaaaataattatgacctctccagcaacagatacaaccctggatggaggaatcaccctaatctcaaatggtctagccctcagcaacaacaacagcagcctgctccttccttccanaatgttgctggcccaagcagaccatacattcctccaccaatccaacaacagcaacagccccagaaacaacc

SEQ ID NO: 281766 - DNA, 389 bp, Glycine max
acacatagaaactcaagcttgatctaccaccaccaccgcaccatcatcttattttctttttgttaacattatagtactttgatttctagccatgtatttggctatattattatgacatttgaacaatttagtatttcatttatttgcatagtatgattgaacaattatgaattatgttaaatgactatgtggtttttatatatttgatctattcatgttacttgcttcatgattggtttatatttttcaatgaatatcttgtgaatgattagtaatggatgtatgtattatattcggtacgcactttggctttttgttgatgccaaagggggagagaaatggcgattaaatcaagaactcacataagtaattaacttaatttcaagtga

SEQ ID NO: 281767 - DNA, 355 bp, Glycine max
  unsure (1)..(355): unsure at all n locations
agcgtttattataaccatacaatncgancgcatntatcatgaaactaccctaaaccaagacaacagagtagaggcagaacactctgtccaaaactcattcaaataccacagctntccttactcatataccccagtaacattctcttcgttccgattcgttaaccattggatcgacttgaaaattttactggaggttcctagtacataaatctacantttgaccgttgggatctgctagaaatgcctggaacccgaaatgtactactcttcccatgactagcaatgcacaaccattnttctgcactatgttaaaaaaactgctgcacaattttgacagcatttttctgcataatat

SEQ ID NO: 281768 - DNA, 429 bp, Glycine max
  unsure (1)..(429): unsure at all n locations
cttgcacaattggtcttcgccagtgaaaggatcaatgtggngttgataatagngcaaattgatcatcctactaggacgactgaganaactgnngcaaataaagagggtgaggatgaaggagaaacccatgctgttactgccattcctgtacggccaagtttcccaccaacccaacaatatctttactcagccaataacaaactttctccttacccaccacccagttatccacaaaggccatccctaaatctaccacaaagtctgtctaccacacttccaatgacgaacaccacctttagcacataccaaaaacaccaaccaagaagtgaatnttgcagcgagatagcctgtagaattcaccccaattccagtgtcctatgatgacttgctcccatatctactttgatattcaatggtagccataaccct

SEQ ID NO: 281769 - DNA, 508 bp, Glycine max
  unsure (1)..(508): unsure at all n locations
aggggnacagcgtaannagcctgtcnactgaccgtcngnanccnncaacannnnaccgnggnncngggganccnccngacgcgaggcgaaggcaggcattctaggctaaatanaananancaaacaaggggacagagaggattttatagttcaccgaacaaaaaatgttcactaataataatctctttataagacttattactatgaactaataatatctttcatatatatatatacatatatatatagatatatatatatatatatatatatatatatagacacatagatccatctatataataagagacaactgatatctaacacgttagatctgttggtcctcgccgcgcgggatacaatagttataactcacgtgggcagaggtaccctacccgttaagaagatatatatagggaatgcgacactgcgggatccgaccacgggtggctgtgtaacacatcctatctgatgggttctgtatagagtgcgatatacatcaccgggg

SEQ ID NO: 281770 - DNA, 302 bp, Glycine max
gataggaatcggttacaacaaagcggattggttctttgaaaggttaagtgatatgatgagatctgattcaagtcgctctgctaaatatgacagtaacagagtgtatggttgtccttggttggatggttctttaaagcggaatctacctggaagaccagtagcttgacaagtctacgggtgagaggtgtcatgttcttttcctatctaattaatcattacaattgtatgtgttctgagaccgctgtgatttgatgtattgattatcattccaagccattaacttcatcaacctgatttagctg

SEQ ID NO: 281771 - DNA, 347 bp, Glycine max
tatcttgagttatcatccattacgagtgttctagatgaacttgagaaaccttcccttcacatgactgttgagacaaaaccctcaagaagaacaccttaagttatctgaacttagctactaatggtttctttgagtgtgctttaaaagacatgactaaattcagaaacacagagaatgtgtgaaacataggcctacagttgaagttctctagacataatatgcatattcagactaataccactagaaggagagttgttcaaaaccaagacagacaatcatgttttctatgccgataagtccaaatatcaaaagttgtatatgatcagaagcatcatgctgggagtagc

SEQ ID NO: 281772 - DNA, 334 bp, Glycine max
  unsure (1)..(334): unsure at all n locations
tcacanaagtttatatggcttgaaacatgcatcgatgtagtggtacaagaagtttaatgagtttatgagcaactcaggattcanaagatgtgacatggaccattgctactatgttgagaaatatactaatagttatgttatccttgtcgtgtatgttgatgacatgttgattacaggatctagtatgatagaaattaatagtttgaagcaatagttggcagaaaactttgaaatgaaggatcttggtccagctatacaaatccttggtatgagaattcttagaaacagatcagaaggaattttgaagttgtctcaggagaaatatatacacaag

SEQ ID NO: 281773 - DNA, 401 bp, Glycine max
  unsure (1)..(401): unsure at all n locations
tttgatccaattcaaacgacaataactttttactcggatgtctgattgactctcgtcacatatcgagacactcgaaattgaatgttgaagctctgagccaattcaaacgacaataactttttacttggatgtctgattgaggcccgtaatatatcgaaatgctcgaaattgaatgttgaagctcctagcaaattcaaacgacaatatctttttactcggatgtctgattgaggcccgtaatatatcgagacgctcgaaaatgaatgttgaacctctgagcgaatncaaacgacaataaacttttactcagatgtctgatagaggctcgtaatatatcgagacgctccaaattgaatgtngaagctctgagctaattcaaacgacaacaactttttactcgg

SEQ ID NO: 281774 - DNA, 384 bp, Glycine max
  unsure (1)..(384): unsure at all n locations
tcaacattcaatttgagcgtctcgtaatattgctgtactctttcagacatccgagtaaaaatttattgtcgtttggattggctcagagattcaacattcaatttcgagcgtctcaatatattacgggactcattcagacatccgagtaaaaagttattgtcgtttgaatttgctcagaggttcaacattcaatttcgagcgtctcgatatattacaggactcaatcagacatccgagtaaaaagatattgtcgcctgaattggctcagatcttcaacattcaatttcgagcgtctcgatatatgacgggactcaatcagacatccgagtaaaagttattgtcgtttgaattgctcanagctcaacattcaatttgagcgtctcg

SEQ ID NO: 281775 - DNA, 396 bp, Glycine max
  unsure (1)..(396): unsure at all n locations
agcttgttatataaactagttcaataattaatatacaaacacatgttgtcatgcctaacatggctaataacagtcgaataacacacttacacaaaatacttccctaaaaataatcataccaaaaatattgcttcaatacttaattccaaaataaacaaacccatacacctcacaatcacatgcaatacaaggcaaacaaaagtggctaagcctactcgggacatccttctcattatgagagtgatgtngcntcaacatttattttttttatagtacttgtagaccttatccacatgttctaatcatcataggtaacagaaaatanatntaatcatcanagtcttgaatatataaccacaattcacataaggaactttagaatnggaagtctaaaat

SEQ ID NO: 281776 - DNA, 127 bp, Glycine max
agcttgctctatatatatatttgatgtttgtattgatgggaggagggtacatgccatttttgctttaagaataacgtcccactggtaaaactaactttccaaatgtttgccttcgcaagaatggccc

SEQ ID NO: 281777 - DNA, 498 bp, Glycine max
  unsure (1)..(498): unsure at all n locations
agccncnnnnnnngcaggctagtngcaagctacnancgcacactctagnaaactcaagctnctgttctcaatacgagcgtctcgatatattacgggactctatcggcattttgagtaanaagtattgggcgngtggaatgatgctcagagctttcagttntcaatattcgagtcatcttcgatataactacagggacacaattcggacaatccggagtcaaaaggtatttgtcggtttgaatttttcttcagagccttcccgtttcaatttacgagcgtctcgatattacaacgagacacntcggacacccgagtaaaaattattgcctttgattttctcagagcttctattttaattacgagcgtctgatatatacggacacatcggacatcagtaaatgttatgcgttgaatgctcaactttgttcattagacgctcattatacggactatcggcttcagtaaattatgcgttgattctcaactagttcatacacg

SEQ ID NO: 281778 - DNA, 390 bp, Glycine max
  unsure (1)..(390): unsure at all n locations
catncgctgcacaaacagaatcaatcgggagggtatagtattattaatatgtgaattattgccataccgtgtggtacaaacaataatgtctcaaaacaactaatggttccgctttttcaagccctcagaacctatgatgggtatttaataacaataatagtagtctagtgcagtaagtatggagaataagttctattgcacgtatggagaataaaagctttgtttgtgtaattgtgctatggaaatgaatccgccgttataaaaccttgctttagatacgaaatgtttctagaaatgggagacaatataatanattgtggaagttttcttcctattatttgattcctatctgtaggacgatatggaattcgatgttgtacttcaaacatn

SEQ ID NO: 281779 - DNA, 386 bp, Glycine max
  unsure (1)..(386): unsure at all n locations
attgccttgtttggatgangtagacataccctttctggtttagggcttttgtgatgaatgttgtgatgtttatatgctgaaaatggctgatgaaaactattaaaaatgaagggtaaattaaacctagggtaaaaaagtgagaatgtggtgtatgagtgggaaaaggatgagactttgagagttggaaggtaagtctgaattcttgtgtaaatggaggttaaatgagtaatcctagcttgaatgtcattatgacatgtgagaaaggtangctgtgctagagggaaaacaaatgaccaagtgaacaaagagccatttctaggcaaaatgggtgttaagagtcaatttgattngtgagatttggtgtaatccagtcaacaatctaatag

SEQ ID NO: 281780 - DNA, 419 bp, Glycine max
  unsure (1)..(419): unsure at all n locations
agctggtattatacaatttggagcattctcatgctctncaaaaccaaaactcatcttcaaagctggctttgccatttcatccacaacactgttggcttctctgaccacatgattccaaacctcattttcatattgccctgaaaatctgtgaatctcttcgacaagttgatgctgaggatgacccanatcacatctcccatcaagaaggtttatagcctccctagaatccgaatccacacgaataagtcgaaaagccgaccatgcaaacttaagaccaagtaaaatggctcgaagctcagcataaagaacactgcctcctccacttttggcctgaaaactgcaaagcaaggaaccagcaaaatcgcggattagccctccatagcccgcaagactgccaaattgagcaacagatgcatcac

SEQ ID NO: 281781 - DNA, 151 bp, Glycine max
  unsure (1)..(151): unsure at all n locations
agcttggtattaaactatttanagattaananacaggcaggtggaagtgatgcctaacatggcttataacagtcgaataacacacttacacaaaattctttcctaaaaatatgcataactgagaatactggttcaactcttaatacatgat

SEQ ID NO: 281782 - DNA, 521 bp, Glycine max
  unsure (1)..(521): unsure at all n locations
agggcnnnnnggggtctagtactgnactancgacntcagaacntaaactctgctcantggcgaagaggtgtctaatcaagatgattttatcatcttcaacacangccaccatgcagtattcagagatacatgcatacatcaatactacatgctactttgtactctcacagcacacgttcacacatactgacagggtagagggtactgcttactcttaacaatacatcgtgtcacaccaactaacaatatgcggcatgcccataattcacgatatatgtcttctaatgattgcatactccttcaaagcatacgatctaatcatcgtcatacactccaatcgtgcgatccatcaattggaatgattcacaaacacaacttcttcacaatatacgaccatatcataatcgatcatactgcacactgttcacaggcattcacgtttactgaatagacaaacaactcacatacaactataagtaacaacatgcattgaatactaaatgatcacacgcagcagacan

SEQ ID NO: 281783 - DNA, 361 bp, Glycine max
  unsure (1)..(361): unsure at all n locations
tgcttatgtctctnggctttttctttaaaactagtcacttanaaaaaagttgtgactttttgaaaaatatttagaaacaagtcacttgaagattgtgactcttgaaatgatttttcaaatcagtcactggtatcgataccattaagtgtatcgatacacatcatagatgcactcttattttgaatttgaaaattacatgttagagctctggtatcgatacaagtattgtgaatcgattacacaagttaaatactttagactatntaacataagttataactcttaaattgatatcttaacgttcgaacactggaatcaatacatgatatggaaatgattcaactttgtaatcagtttgaaa

SEQ ID NO: 281784 - DNA, 149 bp, Glycine max
  unsure (1)..(149): unsure at all n locations
ttatatataccattctctcatagaatgcaaagcatggaaagagaaagactgagtagaacagactggganagaggcagtagacccctcanatnngtcttcttttttgccttctcagtattcctctttaactctaggtgctacagatctct

SEQ ID NO: 281785 - DNA, 174 bp, Glycine max
tatcttatctcccacagagtaattggatattctctctctgcaaaagttcaattaggaagcttgtaaaattaaagtattaatttgtccaaaataggtggatccaacacaaaattcttcaaagttctggctaaaatggcattggttggtggagaccaaaaaaaaaggaagaaaaaa

SEQ ID NO: 281786 - DNA, 439 bp, Glycine max
  unsure (1)..(439): unsure at all n locations
ctctcaatgtaatgctactaccctattcagtgtgtactataagtcattgctacttctaacagagtctagattcaagttaattaatataacccattcaatgttaactaatgttgaatactcttctctctttcttttttcttgggtattatacctctgatctctctgatcgctctctctctctgactctcattgataaaattatagatccctcatgtattctacttgtctttaaatagacatgcaattcagctgcaacatatactatatgctaaaggacttacaaattaagccaaagtcttgtttgagttctgattattaaaattcggtgtactttcttccatcacggatcctttccactntaataaaaaataaataaagtggagtgtccagattacatatcttacaattcatacatattnttccaatactttatatatta

SEQ ID NO: 281787 - DNA, 353 bp, Glycine max
  unsure (1)..(353): unsure at all n locations
agcttgtatatatgtactttactactattttaaaccttatcanaggattaaatgggaggtatttatgttgtaggagtatcagaacantcttgtttctgcagtgtggcanggcagaatgatggtaatgcccttgtaaaataaaattatatgccttttggtatttaaaggagtttcttctaggtggtgcaatgaagcctactacacatggccagtgggctcatttagcttgtgccatgtggataccctagtttgtttgtgtatgactntattcactcttttttacccagtttggttatttttaccaagtgtcaagatcatggacatgacangtatagtagcattctttacaccat

SEQ ID NO: 281788 - DNA, 465 bp, Glycine max
  unsure (1)..(465): unsure at all n locations
ctgcatgatttacaaaatacaaccaggagaagtatattcatatgtgcacgcacacacacatgttgataatagtttctggtgacttattacagtatatagtagatactntaataaagtgggggaacaaaatatattgtgatgtgatgaatgaagttgattggctacctacatagactacaaaactaggatgaagttgattggctacctacatagacaacaaaactatgtgtcatgaccagcacaccaacatgtgtttcttcagggggaaaaatcatgaataggctaattgaacagggatcacagttgaagtaacatgaaatangtgctttctgtgtggngggcttatatgattgcaacttatattaaaggttgccctaatntataatatnttnttctgaatataaaaatatttttttactggtagttgaataacttgaaatttctaatttgagaaatgaatggatg

SEQ ID NO: 281789 - DNA, 460 bp, Glycine max
  unsure (1)..(460): unsure at all n locations
gcgatgcattgtcttctattttnctcaattnntgaacngtnnctcgatgatatnnntagcgcgatntcatgatcgagaccatttccaatgctaaaaaggttatttggtgcgtttgggaatttcctactgagcccttcggtttgtcaattnntggagccatcnntcgatatattacanggaaactgaaccggacatttccgtgtataaagttattggtcatnnttaaattttcttagaagcttcggatctaaattttgagcgtctcgatatattacgggactcaatcagacatccgagtcaaaagttattttcgtttgaatttgatacgagcttccgtattcaatttggagcatctctcgataaattatgacactctgtcgggcatccgagtaaaaacttattggcgttagaattttctaagaagtttcattttcatattggagcgtctcgatataatacg

SEQ ID NO: 281790 - DNA, 411 bp, Glycine max
atatggagcatctcgatatattatgtgtactcttccggacattcgagacaaaagtgattgtcgttagaatttggtacgagctttcgttttcaaattggagcatctggatatattacaggactctgtcggacatctgagtaaaaagttattgtcctctgaatttgctacgagcatccattttcaatatggaacgtctcgatatattatgggactcaatcgaacatccgtgtataaagttattctcgattgataatgctcagagcttctgatctgaattttgagcgtgtacatatattacgagactcaatagaacatccgagtaaaaagttattgttgtttgaatttgctacgaacttacattatgaatgtgcggtgcctcgatatattacgggactcaatcggacatccaag

SEQ ID NO: 281791 - DNA, 316 bp, Glycine max
  unsure (1)..(316): unsure at all n locations
ttcttatgttctcaatttcaagcatcttgatatattacaggacacaatcggacatccgagtaaaaagttatagtcatttgaatttgctcagagcttctattttcaatttcgagcgtcacgatatattacaagactcaatcagacatccgagtaaaacgttattgctgtttgaattatctcanagcttatgttctcaatntcaagcgtcttgatatattacaggactcaaccggacattcgacttaaanagtaatgtcgttagaatctgctacgagcttccgttttcaattacgagcgtctagatatattacgggac

SEQ ID NO: 281792 - DNA, 398 bp, Glycine max
  unsure (1)..(398): unsure at all n locations
tttactcnatgtccgaagagtcccgtatatatcgagatttctcaaattgaaaatagtagctcctagcagattcataccataataactttntactcggatgtccgattgtgtcccgtagtatatcgtgacgctcgaaattgaaaacataaggtctgagcaaattcaaacgtcaataactttttactcagatgtccaattgagtcccgtaatatatcgagatgctccaaattgaaaatagtaggtccttccaaattcaaaccataataacgttntactcggatgtctgattgagtcccgtactatatcgagacgctcgaaattgaaaaaagatgctctgagcaaattcaaacgacaataacggtttactcagatgtccgatccagtgctgtaatatatcg

SEQ ID NO: 281793 - DNA, 288 bp, Glycine max
  unsure (1)..(288): unsure at all n locations
tctgcatgcttgcttctttatgtctagagatttctagagagagaaaggtccaagttccaaagagtttgagagattntgttgtgtgaagacctacagagaaccgagcttgaagaggaagccgtcctgaaagcttgagatgagtttgtgagtgattgtgaggttctagaggtggaggagacatcctcactgctgtgatttcttcaatccttcatctttctcttctctttgttgaaaggaagcttcccagttatggagagctatatcctctgttggttcttccttgcatgt

SEQ ID NO: 281794 - DNA, 354 bp, Glycine max
gacacataaatactcagcttttagtttagatgatgcagatgatttgtagatacctctatgctctcctctaatgactatagcatcatttctggtgctaaactgttgggagttggaagccatcttctcaattaaatttttggcttcagtaggagtcatgtctctaaaggctccaccactggcagcatctatcatacttctctccatattactgagtccttcataaaaatattggagaagaagctgctccgaaatctgatggtgagggcaactggcacataattttttaaatctctcccagtattcgtataggctctctccactgagttgtctaatacttgagatatccttcctgat

SEQ ID NO: 281795 - DNA, 341 bp, Glycine max
  unsure (1)..(341): unsure at all n locations
agcttgtcattagtcatgttcaaaaatctcatgaaaggttgagaggacatgnaaacattgtgggagattatgccactttttaacgttaagaatggtccggtttttttttttttctaatgaataaaaaccagccataattgattaaaatattataattttggacctttaaaagggaaccttaaacctttgggttcggtaatcccctccccttcaagcaaaaatctacataactcaatccccaagtattttctttcccatttccaatgttttagctctgataactntggntntttatatgattcttttgatttctggttcagaataaaaacattacttatacc

SEQ ID NO: 281796 - DNA, 403 bp, Glycine max
  unsure (1)..(403): unsure at all n locations
ccgatgtactagactagcttttcgaaacncagctgctaacttattatgttgcaacttgaactagagttttggttcttttgatagacacgaaatggatggacgcctgagattcaacctagaaatgattagtttctttaaaaggatatgatgctactcaaaattgtgatgatagctaggtgatgcaccagtacctgatagatagatccgttcttgcccataccaggaagctcgccaaagagagaaactcaactttatcacacttatctctcaagcttaagttctctattatggctngatntcttaattctactagaatattccctaaactaatccattgcttatttccacataaacccctaccatatatggctagagctaaatataaactgcccaaactatatgg

SEQ ID NO: 281797 - DNA, 492 bp, Glycine max
  unsure (1)..(492): unsure at all n locations
gcttttaannnaanaannnnannngggaggtgagctgtacatcgaaacccgacaggacacgggatccttagagtcacctgcggcatgcaagctaggcttttactttcnaagactgangggacacatagactgcgtacatactacgtcatgcgtgctaactgactttgcaccatgaccattgtagtcgtcatatatgactaactttgtattgaaaagttaataaaatgtatgtctcttcctcaagttatgggtctaattgtaggtaagtacatatttatatgtncagtttaattatatttctcagagatacttcctatatagtgaattaacgtggttcaacttcagattcacgtgataagatgaagaataacaatggtgaagtatctggtgtctcgcgtagagatgcatatgcgccgtatgagtcacatccactaagcgatgcactcagctcgactantgggttgagagaatcatgaagagaatcagaatacg

SEQ ID NO: 281798 - DNA, 358 bp, Glycine max
  unsure (1)..(358): unsure at all n locations
agctnctcctctcatnttctataaatatagggagaagtgaagtaaaaaaggggtcagccccttaggcacttctctctctttcgaatttcttangaaaattgtttccgtgaagaaaatcaacccaggcgcttctgtacgttccgtaacatttcctgagtgaattcgcgaaggtttcaaccgttcttcgacgtcttcattcgtcttcatcgtcttcagtcttaacggtaagtacctcnactaagctttcaancatctatgacccgggtggccacatttgttcatgattttatctcgttcattacttttatcccctttgcgtcttagccttattaatcttctccttaatctaaataaataa

SEQ ID NO: 281799 - DNA, 493 bp, Glycine max
  unsure (1)..(493): unsure at all n locations
aggccnnnnnnnccccagtagagaggatagcacgatctattngcaanactnctaagctnttaactgaatntacaacgttccaattaatgtcaaaatgttgtaatcgattacattgtttggggaatcgataaccaatggtgttgaatgttgaaatcaaatttaatttgtgaagagtcacattctttcacattaaaaccttggtgtatcgaatacacttaattgggaacccattaccaatgatagtttctgaaccaaattcaaagatgttactcttcccataattttcaaagttttcttgaagacatatcttttccaaatggttgtcaagggtttttcaaaggtatactcttcttatagtttcttccttgacttgagagctataaaacagggcttgattgcaacaaaacttttctacattcttagacacaactttgccactgattctaatctttgactctcttctcttttgcaaagcctcaagtnttgtttctaa

SEQ ID NO: 281800 - DNA, 402 bp, Glycine max
  unsure (1)..(402): unsure at all n locations
agcgtatacttcttaatnttttccaggannaatnctannnatnaacgaaacacagctgacttttcaatattcctttaagccattaataaatattgactannatctaagcacattgttttgttgcttagtattagaatntgatgtaagaatctaataatgacagaaagaatattagttaaaagataaaattactatagtgaaagaaataatgggaatcaaacatgaaaannacacgttcaacttncatgccaacaatactggtcggaaaacaccataacgatatttatttgcatgatcactgcaaggaaaagagaagacgttaattatgaatcattatataatcaacaatcagaatttatttgaattttagtcatcaactactagctcatattaatatgaatg

SEQ ID NO: 281801 - DNA, 472 bp, Glycine max
  unsure (1)..(472): unsure at all n locations
nccctaattgagcgaatcgnagtttgtacancntnnantactaagctncctctctaacatctaatnncatcatcctagtaaacatgaccatgtaatgatcatttggcctaggtccaaacagaanaaattaacaagtgatatcatgtccttgcattgggctcaaatattacatttacccanaattggaacacacacatacacacacaggttttacaaatatgcacatacatttccttaaacatgaaaacacaatgttaatccgcatcactagtattggggtcatgttaaatgatcttatcttacttactcatatgcatgtgaacactctactttgaatagttacgacactatgtcaccataaaaggaatcatgccttgtataactacctcactagatgaatcactagtgacatcagngtactaactttaagatgcctatgctcggacacatagccatgngtttactcagcttg

SEQ ID NO: 281802 - DNA, 282 bp, Glycine max
acaccacatattagtaacaccattatatttaatacacgaaaattacatattatacaaaataatacaatacgacatatttgaataataactaaaacctaaataattaacattcaaacttatatacctaaactaaaacaaatattaatatgaccaacaaaaataacacaaaatataacacttaccagttgaaaaccaattggcggaaacaccactaaagctttgcatacaagatacataccacaattaattaataaataccattattttatacaagaaattaac

SEQ ID NO: 281803 - DNA, 305 bp, Glycine max
  unsure (1)..(305): unsure at all n locations
tttcttatgtttaangaagtaagatgggngctcgagatgcatntaaaccttatctcaaccggacagcttgatgaagttgggatgatataccagttcggtgctggtagatggaagctatatagaggaagcatggtcattgctcaaggtaagaaggaatgctcctggtacatcgtgcaaggaaagatatgcatatggaagatgaatgttgctcaagatacaaccaaagaattatgacacaagagatngngtcacatgagtgagaaacgtttggagtttctaacataggatcactttccaaacataaa

SEQ ID NO: 281804 - DNA, 458 bp, Glycine max
  unsure (1)..(458): unsure at all n locations
tgactcatggtggaggagataggaatgaaattttgtgtttttaaatctncngnacgaaaaaagtgtgagttatctgccgacaatattatctaaatattttttgtccttcaattttatgtcacttttgtttttggtcctccaactcataaattatttgtcttagtctctcaatatttgtggtccttcaagtttatgtcacttttgtntattcattatgcatgcaaacttttatataatgtagctntctatacatgcataaccaacctaactaacaagattaacaaactctaacaaccaacaactgaattaactaactccacgtaactaactacacgtaactaatctgcacgtgtgttattatacttggctgcaatagtttcttcttcctaacatttcctaacccatcaaanacatcctgtcctagaagtgttaagcatatgctntgtggcacatgatat

SEQ ID NO: 281805 - DNA, 389 bp, Glycine max
  unsure (1)..(389): unsure at all n locations
tatcttcaattttaatgttttatcagancatgtcaaaaacgcgtatcaaattatggagatcgtggtatggtattgtaagtgacatccttggccagagtggatctgattgtgatggcactaagcacatgatcacagttgagaatgaanatgcttgngatgaatattgcactgtaagtattctttaatatgttgctatttgttattcaaagtagattggatttgacttttttttttccagtcgcatatatcggttaaaccgtttcaattcaaggtgcttcaagattgggatgatatagtggatttgtgtgctaaagatagagccaccggtcatggagcttaaactgctatggatgctgatgaagcgatgagtagagaaacaaatgaagtgg

SEQ ID NO: 281806 - DNA, 380 bp, Glycine max
  unsure (1)..(380): unsure at all n locations
tgcatcgaccgatgtcgggtatagacggtcaatttatatcttgtattatatcngangcnggctactagggaatgttcgatcggcgtcatcgggtgatgctttntattttagacctcgatcggccatctttcatggacgacatcggctatcattctcttttcgatcagtatcggagaataatgtttttctggcatagtaaatgagaacatgccggtgtcggccgaaacacaactntggttgagctctcacgaaaaaacctatccggcctactttgaaaattttatgggcgacgcccaactacataacttcctttactgcaaagaaatattgttggccatcgttagaacaaaattgcgcaatgtggctgaaaatatcatcac

SEQ ID NO: 281807 - DNA, 226 bp, Glycine max
  unsure (1)..(226): unsure at all n locations
aatctatgtcttatatgtttcccattctcttttcttctaatttacctaaggtaatttgttcttttataaaatatctgttttcaaaatctgctctattgttaatctatctttagatgatactttgttgttatgaaaaaggcttaaatttaaaatctaatcaattctattcttgtgaatctgccttacaaaaatccatagaaacaganatacaatttatcatttatgc

SEQ ID NO: 281808 - DNA, 330 bp, Glycine max
  unsure (1)..(330): unsure at all n locations
cccctctaatatctgagccatcatccacagggatcaacagtatctgaaaagctaacccttcngataaatggctcctcaatccttgttcctgaaganattcattccagaccaccatttcatggtagggttccattattggaaaacccgcatgcagatattcattgaagccatagatctaaatatttgggaagcaatagaattatgaccacacatacccactatagtagatgtaagcacaagcactacaacccataaacctagagataagtggacagaagaagatangagaanaatccaatacgatctcacagccaagaacattatcacttc

SEQ ID NO: 281809 - DNA, 342 bp, Glycine max
  unsure (1)..(342): unsure at all n locations
tttctntggttcaggnattcatgtnncatctaggccttttgagtatgtccattttgatttatggngaccatctagaggaaaaactcatggtggaagctcatactntctcaccatcatagatgatttctccagaagagtatgattgtatgttttgaaaaataagtcagaatcttttcaaaaattcagagaatggcatactcttattggaaatcaacttggtacaaaattaaaagttttaaggactgacaatggcttggagtttgtttcagagcagttcaatgagtnttgcaggaaaataggcatcanaaggcacaaaacagtccctcacacaccacaacagaa

SEQ ID NO: 281810 - DNA, 408 bp, Glycine max
  unsure (1)..(408): unsure at all n locations
tcattagccctgacanagagataaggaaataagttanaatatatcatttatactcaaaagaaaactatttttaacccacaatgcacggttcatgtgataaaaaaataaaatgaaatgtcaagtttcattgttaaccctaacataaccaaaaaaaatccatttaatgaaatacacatcaaagggagacggtcaaacatattaatgagaaaggcatangaagtatgtgtggcacttagacaccctttcctatttttatgaaagttgaatgcttgaaaaactgcataaacaatctttgaaacttggtttgtaatgtttatctggttcacatattttgatcagcttgatgaaatgaaagctacatgtttttttaaggttgattnttcatataacaatntcatattatttttc

SEQ ID NO: 281811 - DNA, 398 bp, Glycine max
  unsure (1)..(398): unsure at all n locations
ttcttttcttataaattgagtagcacatgatttttctcagaacatgtttaccaaagagtttttactctctggtaatcgattaccagtagcaaaatatttttgaaaaagttttcaaattgaatttacaactttccaattaatttcaaaaagctgtaatcgattacaatgttattgtaatcgattaccagtgcctttgaacgttgaaattcaaattaaaatgtgaagagtcacatccttttacataaaagctttgtgtaatcgattacactgatttggtaatcgattaccagtgtttgtttctgaataaatcanaagatgtaactcttcaaaaggtttttgactntttcaaatnggttttaagtttttctaaaagttataactcttctaaatggtcttct

SEQ ID NO: 281812 - DNA, 472 bp, Glycine max
  unsure (1)..(472): unsure at all n locations
ggtgactctaggcaatttctttcaaactagtcacttaaaaagttgtgacttttgaaagaatcttcagaaacaagtcacttgaagaattatgacttttggaaatgtatttttcgaaatcagtcactggtaatcgattaccattaaagtttaatcaattacacatcaacagatgtgactcttcattttgaattttgaaaattagaacgtttagaaacactggtaatcgattacaagtactgtgtaatcgattacacaagttaaaaatgtttaaacacaagttgtaactcttgaaatttgaaatcttaacgttntaaaacactggtaatcgattagtaccttttggtaatcgattaccagagagtaaaactctntggtaaagaaatttttgaaaacttcttgtgctactcaatgttttggaaaactntntttgtacttatcttgattgagtcttcccttgtttcttgaatcttga

SEQ ID NO: 281813 - DNA, 327 bp, Glycine max
ttcttgcctcttagaggtccaggaaggacaaggtggccgaaggaactagttccgccccaaagtacgacagtcaccgctttatgagcgttgtacaccagctgcgcttcgaagccattaaaggatggtcatttctccgggagcgacgcgttcagctcaaggacgacgagtatactgatttccaggaagaaaaagggcgccggcggtgggcaccactggttactcccatggccaagtttgatccagaaatagtccttgagttttatgccaatgcttggccaacagaggagggcgtgcgtgacatgagatcctgggttaggggtcagtgga

SEQ ID NO: 281814 - DNA, 386 bp, Glycine max
  unsure (1)..(386): unsure at all n locations
tacatgnncccaactctnncttgaataggcatttgtanttggttggttatcnttggttaggtgccattcttagtacanntttgatatatgtannttgcatcatgccatcatnncatggtttgtnntttgaaaaannagtttctanagttaagaannaaatttcttcagaaggggcagaaactctcttattttgatncgattacccaaccttattgtaattgatcacaacaaagttgtcttaagcttatagagttgagtcttgtatcggtttaatcgattacaactatctcataatcgattacattgttgtttgagagaatgactgatttattcaggagtcttggctttaatngattaccaagatcgattacttaaggcatctaatc

SEQ ID NO: 281815 - DNA, 386 bp, Glycine max
  unsure (1)..(386): unsure at all n locations
tnctttatatatatatatatatatatatatatatagatatatatatatatatatatatatatatatatatattcctttggcggatcaaaatatataaaaaatattgtgagcctcgtggacgagattctagagggtgatttgaagaagaagatcattgtcaacagttgtaccatttgttgctagaaaaatgagtttctggactcaccctggtcactgaaacacacttggctttatctctgtcagacaggcttataataagtccatgtttcattgtcaaatagatatgacgcacatgagcacatcttcacagttgtattatccacaaagatatcccacatgaatgatgtccttttatataccatgattttattacatgtgttcaagcg

SEQ ID NO: 281816 - DNA, 433 bp, Glycine max
  unsure (1)..(433): unsure at all n locations
ctttcanatgggtaaaaggttcacattcactttcttctacattatatncaaacttgtccaaataaataataaagttatctcgacacanagtaggtcatctaagtttcatacaattaatatagaacctatatcctaatgtcacatcctatcagagcgtggtgttcccgtgtcctctagcatgaggttcttcatagtcatccacctattcatctgctcccccgaacacaaagttcaatatcatcacaggatccaaacacaaatagcaaaccgggagtgagttatcacatttctaactactagagagaaacaacacaacatatagtagccaaatacaatttacttagcatatctcacattatttcatcactgtgccattcatcaatcacacttttcatccatcaatcacacctttcaatcatcaatacaatacaca

SEQ ID NO: 281817 - DNA, 412 bp, Glycine max
  unsure (1)..(412): unsure at all n locations
agctntntgtattntgtagagttgaatattaggctatttttcanatggaggacaacggaacactgatggccaagaaaataaccatttgctggaaagatgttggcactatagtttattaagcagaattgtatcaagaaaagccacaagagtttgtatgctctcatagttgaatttgaaaataatggtctaacagttagaacttagaaggatagtaaagagatgttttgcatttgaaacatttatttctccttttatagactacaaaaatgtacaattgatctatcactctcccgagtctaacgcaatcaagtctcttcggaacctcaagaaccgctactaccaacttatgatctttagatataccaattatttaaggccatatattgatataattatttgttgtgtaaaaatc

SEQ ID NO: 281818 - DNA, 414 bp, Glycine max
  unsure (1)..(414): unsure at all n locations
agctttnttctcatatctttcaacttatcccatgggtcgaactcaacggtctttactaccacccacacctntacctcaatgtggcaaaccatgcncctaccgctgcatgccaccaattaaccccatcttcttcattgttgcactaaaccacaccatccacgacgccttccgcggccatcgtgtcaaatggacacaccacatggagatgcggttcccttccgtcacccgtccaccatcaaaaccctaaccctcgagccagaactcaagaaactaatttgaaccacaagactacaagatatgtntgaaaaccatcgaagcactgttagatctgagatgccattaacatgcaccaagcaagactacgagatgtgtttgtgtggaagaaagatgaagatngagaaagagagaaagaga

SEQ ID NO: 281819 - DNA, 453 bp, Glycine max
  unsure (1)..(453): unsure at all n locations
ngattataaattttgcntgcagacancttgatactcagccttctcgactaatatccacccaccttgctccttctggtttaatttttcttagaatcttcttatcccctatggtaccagtggtcctaaatttaagaaggattataatttaatttctcattataaaatattaaggccttggaaccatatggccttaatcttcttgataatttaaggaattccggccacttattcttagggagccaattccattaatttggaattattcttaatccatattcctatttaattaccatatttactgggataaagatataattccatcaagataaatataactttctaaatcactaatacacgatttgatatttgatatatacatacatcctctctcatcttacactaacactcatatgatgtgtattggggtgactngagcatgtgtctatagactgc

SEQ ID NO: 281820 - DNA, 262 bp, Glycine max
  unsure (1)..(262): unsure at all n locations
ctctttacaagtaaaaacattgttctacttcaagaccccttgactactcacatagaactagtgggtcctataaactatgagtttgggtggtattactatgtctaattatagtagatgatactcaagttcatatggactttgatntgcaaaataaaaatgaagccttgatgctttcacaaactgccaagttattcaaatgaaaagtctcacattgttctcttagagtgatgtgaagtgaattcaaatgagtgtttgaaagttt

SEQ ID NO: 281821 - DNA, 319 bp, Glycine max
  unsure (1)..(319): unsure at all n locations
agctacttcttctaagttaccatgnagaaaagccgnnngtacatccagttgatgtaattccaagttaaaataagcaactaatgccattatgatgcgaaaggaatctttcatggatacaggagataaggtttctttgtagtcaactctatcccttcgagcgaatcctttggcaccaatcatgtcttgtgtctctcaatgttacctaatgaatccttcttggtatcgaaaatacatttacatacaatacgctttatcccattaggacatagcactagatcccatactgtattatttcccatagattccatatcatctttca

SEQ ID NO: 281822 - DNA, 345 bp, Glycine max
  unsure (1)..(345): unsure at all n locations
gggcnnnccgatttactgctgagtagaanccaactaacaaaacgtgcaatggtacggcacacttttcatttgacactctaaaacttgggagttctactggtgatgggtagagtagatgatctcattagtgattcatggaatggttctactatgatacaataataaaatatactctgaggggcatgttgtaggaaatcttatgactcttttgcattattgtgttagataaggagagtggaatctatttaccatataaaaaggatgtatctgaaaatgatccgatatcaaaagttctatactccttgctaacaaagatctatttcaaaccatttctactgaattgga

SEQ ID NO: 281823 - DNA, 405 bp, Glycine max
agcttgtattctgaattgagtatggctcacacattgcatgtctgatatgccttttagaggcttgaaaagtgcgagaaaatgagctgtgttttctggaaaacgcgatgaactcgctaagcgagaatgttgcgctaagtgagttcatcaatactcattgtatataagctttatctgaagaactcgctaagctcgctgactgtgctaagcgagttcatcctttgaggatgaacattcatcctcttgctgaactacctgtggctaagcgaggctgaatcgctaagcccgggtaacttaaccatttttttttgtgatagccacacgctaagttgagcattctggagccaagcgcaattggttgcggcatccgctgagctaagcgagcttcactcgctaagctcccatgac

SEQ ID NO: 281824 - DNA, 531 bp, Glycine max
  unsure (1)..(531): unsure at all n locations
agcnnaaaagcggatggaatgacctttgcanancnacacttagacactcagccttagtcaaccagaatntccccaaaatgtcaaggaatggggtgtggaanaaccatatcataactttctgngatgggttaataaatccaatctttccagatgagaatgcttcaaaaccattaaaaaacctaccagatggccctagaagaattgtattaccttgccagggatccaacttaaccaggtattctttttacttaaagccataagatgacaaaagtccattgcagagcaacgaggtcaccttaaggggtgaatctcaacacttcgcaagtgtgaatgacgccaatccttgagttgcttccatcccttactttgggttctttgatgacatttggagcttaactatgtcaaatttactatatgtgttctcaaatgtaaatgggttgacagcaacattggtgtgcaccccgatgatatangattcacgttggtagacctaaagaacttgggtaccacaatgaccctttcatcatggcg

SEQ ID NO: 281825 - DNA, 395 bp, Glycine max
tatcttcttatccaaggctcatcttggtggtgaagctccttcttacatggcttattccctagtggatggcgcctcctctcacctcttctcctttgttttccgctgcatctccatggtggaaaatcaccattaaaggatctcattgaagctcaaagatccagcctccatagaagccccacaagctaacttccatcacttattgtagtaattctgactttccgcagcctcatatacctcttccattcccacctagagccattccagaccaattgatggatgacgctaccgaagatatctcggagaccttcatgaaagtccaggtgaacatacccttgctagatgcatagggcagaatgtatcagcattgataggcatatatgtatctcacattcctg

SEQ ID NO: 281826 - DNA, 434 bp, Glycine max
  unsure (1)..(434): unsure at all n locations
gcgctgtatgctagctatcagtgatttcattngtatatctcanattgtattctangatatccttaatagaatgacatgaatntgtttccttanaaaaatatctatagcgccatgtaactaatatgaaagtcacaagaggtgaagaatagtaaagagaaggttaaaaagtggttgtggaaactgaggctcttcatttacttttgtaatggccaaagatgggatgtaaaagttttgattcatcgctctcgatccaacctcctgtttgcaccataattgttgaacataatgataacaatgcccaaccaaaagaatcactgcgtgtgtgtgttggacatacaattgaaacaacttatcccacaccaaaccaaaggcgctgtccatctgatcacatgaccatgcgccactatttaacgtaccttgttattcttgtgatc

SEQ ID NO: 281827 - DNA, 360 bp, Glycine max
  unsure (1)..(360): unsure at all n locations
atcttgttcttaaaaacctatttagttcctatgatgttcaagttattagtacttgttatcaattcccatacatctttcctttaaaattgattaaactcatcatgccataacataatccaaactcatctttaatgcatcatcaaaattaagggtcaactnaagacacaaaaccatatgttcacaaaacaaactaaagagtgctagtagtactctctttcatataccaatgatatgcatatatgattctaggggtaccatctttggaagactgtgatggggtcttttgaattattgtcaccacatttattntaggaatgttcattgagacctatatatctatcaaaatccttcttctttggg

SEQ ID NO: 281828 - DNA, 418 bp, Glycine max
  unsure (1)..(418): unsure at all n locations
tctaaggaggtgagcttagttatgagaggggtgtgtgtatctaagctctatcttctcaaggaagttttctcaaagaagcttctcaaggaagttttctcaagaaagcttctcaaggaagctacctagtctataaatagaagcatgtgtaacacttgtaactctgatgaatgagagtcttgtgagacacaactcanagttctacttctctccctttttcttccttcaatttcgtgctcccccctctctctttctctccctttttcttttcctccattgaagcatcctctctaagcttcttatccaaagctcatcttggtggtgaagctccttcttccatggcttattccataatggatggcgcctcctctcacctctnttccattntcttccgctgcatctccatggtggaaaatcacca

SEQ ID NO: 281829 - DNA, 380 bp, Glycine max
  unsure (1)..(380): unsure at all n locations
ttcttcacttttggccttattttattttaaagaacaaatttgattaaaaaaatcagaatggtggaggttgctggagcataaacaagtggaaaagagaaacaatataaagcanagcagtgaatgatggtttggtcgtcagagtacagagcacgacacaagaactagtggagcaaacaagtcagggagcatgacaaatcacagaactaatgatggaacacaacttgagaatgacaaaggctcattgcactggtttgggactccgggcaagcgattagggactgaaataaaatgagaacagattgcangactaaccagatggngtgtcacaggtttatttttccaaaacccaactgccaattcanaatcattggttcaccctt

SEQ ID NO: 281830 - DNA, 312 bp, Glycine max
  unsure (1)..(312): unsure at all n locations
ttaactttgctgatggtgttgcgactacactganatatttgaagccgngaccctttcaaggtacctcattgagtgcaactagtaccatggcaaagataaagtgcggttttgggagcagacccactccttttcaattgaagttctgcatatggtatcttgtgctgctcatttttgtgccttggcatgactntaagtanctatgatcaaaaatgattatagactnaaaaaaaataaaattatgataaactctctaccggagtgaccccaaccagatatttatactccttgtttttttatatatttgttttataa

SEQ ID NO: 281831 - DNA, 385 bp, Glycine max
  unsure (1)..(385): unsure at all n locations
agcttgctcttgaggatgtaaggatatttgcagctaatgaacaactttcttaactatttgtccttcggattttactgtttttttcttatatgtaaatataaataatataaggctatggcttatggacatggtcatttttacccctaacaatcttagaagtaagtatagaccatgtttttacgcgatacccttataccatttatatttacatattagcaaaaagaaatctggatacaaaccatcaatcttcttccactgggagcaatcagccggatgacgaaccattccatcagaaatccttccatttgcatgccatgttaggtgttttgcgtcgtcctcgttagcaaanagacgcttaaaccttggaatgattggaagataccac

SEQ ID NO: 281832 - DNA, 432 bp, Glycine max
  unsure (1)..(432): unsure at all n locations
tacctccaacctanacagtgacaatggcagtgagatgtaacttaatggcatgaaacttgaagctntcctcgtacctcaatcagcaatactgcaacagaagacgtactattattattatcatcaataanacatgaacacccaaggaaacttagcatacaccaagtttacgtacagtgtatgtagggttttcttcgagccacacttcgtagaacagtgtanggggttctgtgggttcgatcgaagggtttccggcagtattgagaacaatgtgggacaatgtgggtgtcgacggagcggtttccggcagatntcaggtgggaggagaaagagaagaaccgattcaagaatgangagaaagagaagaaggagggcaaggttttcgagcgcgcgggttatgaaatgtcatgttttaacttataaacataacaaaat

SEQ ID NO: 281833 - DNA, 387 bp, Glycine max
  unsure (1)..(387): unsure at all n locations
tgctttttgttgtcatagtgtgacggggcttgaataaaaatattgggggaaggggtcaaaaataagatttgaataaaaaaaatactcctaatttttttatttaataatttcatttaaattttctaactttttttctagtttgaaaaaaaagaaaagaaaaaatattaaaataatttaattatcattcaataactttttttaccaaaatcatcagcctatcatactaaaactagacaaaaaaaattgagaaaaagttaaagaatcttgtagtaaagttgtaccaaaaaccaaagaanaagaatatatatgaagaggtttgatctattcagtaaaggatagcacagganaatcaaagaatctattgaataatgggcaagtagagaacta

SEQ ID NO: 281834 - DNA, 467 bp, Glycine max
  unsure (1)..(467): unsure at all n locations
ctcagcttgtatttgtntatttaatccctggaacatactccattgttataatctgcattggaaacatagataatagataaataagttcagacataaaatggaaaatatgtgcattactacatttggcataataagagccatgaaggttaaacctgtggtgtggtataatcccagtagattgtaggaactttcacataatccatgttcttaaagttacttgcaaacaattctgcattagcagcctccttggtgtaatcaatctcctgaaaattattaatccatgttgcagtaacaggatcggagaatgttatttgctgagaacacgtgcatacatcataccaaaacaacagattcacaactcaagcaggaactgaaacaggaatgaccactcttatgtgtgatgatcttaagcccatatttgtattgtgtagatggttttcttacatcaagttttcctatacataaac

SEQ ID NO: 281835 - DNA, 302 bp, Glycine max
  unsure (1)..(302): unsure at all n locations
tgcttggttctaggtacttacccgttgaagatcgaagaacgatgaagaacgaatgaagaacgtcgaagaacggttcanacctttgcgagattcctcacgganaacgttacggaaacgtttcggaagcgcttcggcttagattttcttcacggaaacgaattttccaagcaaattcgaaagagagagaagtgcctaaggggctgggatccttttccacttcacttcctcccctatttatagcaaaataggggagatgcttgccgcccagctcgcccaggcgagctcagctcgcccaggcgagc

SEQ ID NO: 281836 - DNA, 150 bp, Glycine max
atatgtgcgagtgtccacatggatgtgtgcatggatcaattttgcatgaagacctaatcatcattatcatatgcgtgtcatggaagagattagggcattcccgtatacctgagcgcacttactatacaaatgttccaacatacatgatgg

SEQ ID NO: 281837 - DNA, 284 bp, Glycine max
  unsure (1)..(284): unsure at all n locations
tagcttgcatanatatatattngggtgggcttagagacgtgtacttcaaccttaaaagcatgcttctaaagtcttagacaaaaccgaaacttggttgtctcttttaaaaattgatcttctacctcanataataataaataaaactattaacatgatggagagaagataataatatgaaatatgtagaaatatcatcaatcgatatcatgctgcaaaacacagaaccaccacgttttgattttaatatgtaataaagtaacatatatatgcacattcaattaact

SEQ ID NO: 281838 - DNA, 260 bp, Glycine max
  unsure (1)..(260): unsure at all n locations
tatnccaaataattttcattgagtttattgtgtcacctgttatcggaccatctgcaaatgtctagttttgcaaacttacgcacaagatatcacaatcctcagtatgaggggtgtgcgctggaatcccacatttactagtattatggccacaataatgtgtatataactggaggcaacccatatttggggttgagtttggcccaaactcaaaattgtaaaagaaattattaatgaaaatgatagatagacaatctttagct

SEQ ID NO: 281839 - DNA, 340 bp, Glycine max
  unsure (1)..(340): unsure at all n locations
agcataacgttttgtctctcttcaatgttagtatnatggcttgcctttcttgttcccatgcagatcttctccatataaataacttgcgttcaatgtgtgttgtctttcccatccacacgtctccattctccaacatatgtaatatcaacaattatctccttaaatattttgaaatatctcttctaatccaggaaaacaaatgtgtgtatagctgtagcaattgtcataactttgttgctacaacaatgacccccatgacacaaagattgtaccaaaagatcatagattcgtgagggtgttgtctgcattcaaatttataacatgaccagtgcatggttag

SEQ ID NO: 281840 - DNA, 202 bp, Glycine max
  unsure (1)..(202): unsure at all n locations
gcatcttcagtgtttcttttggaatattatatgtaccaccaccataatctgcttgcatggggacaaaattaaaactggaatcattcantaagtgttgcattattggaatcactttagatgcgtggatcttttatgggcaataatgatgatgatgatgatgatacatatttcctttgagataacaatcttctaaatatgctca

SEQ ID NO: 281841 - DNA, 412 bp, Glycine max
  unsure (1)..(412): unsure at all n locations
agcttatattctccaatgtacagattataaagcaagttccacatgatatatgcatgaaaaacaaagataacagaaattaaaattgggtttcctcccaggaagcgcttctttaacgtcattagctngacacatttacctgaatgggtgatatcaaataaacagtgttatgtgccctttcanattcttcaccatggtacaattttaacctctagccatttactacccatgttctgtcaggattctgagattgtgggtcatatagctctattgcaccataagaatcaaatttcttgataacaaagggtccagaccatntggacttcaacttaccaagaaataatttcaatcttgaattaaaatgtagtacctgttgtcccggnttgaagtctttcttcaacaaatttttgtcatg

SEQ ID NO: 281842 - DNA, 263 bp, Glycine max
cgctacgcccaccagtaaatttttcactcatgggtggaaaaaggaaccccttcatacaacgcttaaccacacctatcatgaatgaacatcataatgactctcctagtgatcacacctacactcactcactcaaaattctctaacacttggcaactaatactttcttgcattgaggtaaactcttctactagtcttactctcactctacatgatacaatgattactacgaaactatatgaaaagctagtaatcctctctctatg

SEQ ID NO: 281843 - DNA, 403 bp, Glycine max
  unsure (1)..(403): unsure at all n locations
aggggtggcggaannnagttgatgctgtacatcgagacctgacnagcaccgngatctcttaagcacctgaggcatgcagctgatgtgttggttcaagtttcaaacactagagntcattagactccacgaataagtgcttagcgctgtcagttatattgacgaaagaacttgacgattgagtaacctagctctgcaagtacaagttcattgatcaactattgtgaccattcttgagtatagaaacttttgtcaacattatggttggaagccagatgggtcggacaagatcttggtctatctcaggaagataaagcatgccaatggctaaagactcttgaccaagtggctaagatcttgtctatcaaactgtaatgaccctcagtttgagaactggcgacccaat

SEQ ID NO: 281844 - DNA, 117 bp, Glycine max
aaaacttcagaattttgtctccaagactctcatgctaacttaactccgttaagacatcatcttccctttcctaacaacctatttctaacttaaaaaccgatgacttatatcttactt

SEQ ID NO: 281845 - DNA, 357 bp, Glycine max
  unsure (1)..(357): unsure at all n locations
agggaacggtggaatatagctcagctctgacnctgaantaccncncanaccnnncggaggggaaggaggtttaaattttacnnccccaaggggggggggatggagagaacacccccaaccccgaagaacaccacgacggcagaccaacgccatcccggcggacaccggagtactcggagggacctaaaaacaacaacttagagaataatcaagatgaacagaagggccgaagcgcgtggagcgtaaaaaaggagaggtacgcgcggaaagaagcgagcagcgaccgaagcgcaacgagcacaaaagaagggcgacaggggaagaggcatagcacgaaccaaaaagccggcggcggag

SEQ ID NO: 281846 - DNA, 411 bp, Glycine max
  unsure (1)..(411): unsure at all n locations
agcggatgtttcttgtttatgtnnncttacnaanngnngggatttgagtattgtattaattncttttataataaactcatccctcgcaatttttgtaccgtgtggttggtacctgtgatgatcgcgaactcttgttcatgggagcagaatgacagcagtagagtatgatatgtgagattcttttgtggagccaccgagccgacatgatgacgttgagattattttatgagagagttgtgttttgttaatcaactcctccatagctagttccataattcttttgttgaatcgaggatgtanatcacaattctaattatatgtatgaacanatttattctccattatgtgaatgatgtgtactgagttactatacctatatatatatatatatatatatatagtaaattactt

SEQ ID NO: 281847 - DNA, 404 bp, Glycine max
  unsure (1)..(404): unsure at all n locations
agagaccatcacaagcacatagcagggtcttgaaatttggttagctgctngctcaaggtccaaaagaaacttgtctcagcgtttatgcgagacagagaccaacatgttagccatcgtcagcaagtaccaagaagagctaaatctagccacggcccacgagcataaagtggcgggcgagtatgcccgagtgtacgcataaaaggaggctagaggaaggtgatcgactcattacatctagaggcaacaatgtggatggaccgatttgctcttactttgaacgagagtcaagaacttgcctgatttctagccaaggccaaagcaatggcggacacctactctgtccccgatgagatccgcggacttctaagctattggcaccatatgatagacttaatggcccatat

SEQ ID NO: 281848 - DNA, 330 bp, Glycine max
tgtgctagctgctctcaccactatatttctaagcaactccttcttcaatatttctatgagggacttagcaacatggagaggagtatgattgatgctgccaatggtggagcacttggtgatatgacgcctgctgaggctacgaatctgattgagaatatggcttccaactcccaacaattcagtgcacgaaatagtgctattgatcttagaggagtccatgaaatggccacagattgatcttcatctactgaaaataaaaagcttgaatgataacttgatgccttggtcaacctggtaactcagcgtgccatgaatcagaaatctacacct

SEQ ID NO: 281849 - DNA, 410 bp, Glycine max
  unsure (1)..(410): unsure at all n locations
ttctngactttcaacccttcttaaagtccccattgctcatcaatttcttgccttgtgctagtgataacaagttcagcagcatctagggaaagctcttctgcttctattctcctcattatcttatatgttgaattgatatcctccttcgattgacgcccttgcttaagaagctgttctagcttgtttcttccaagtgaatgaccagtgagcaccattggcacattcaaggcacctgaaagaagagcagcactatctccagcatcagcataatgtccatgaataacgtgtggccacactggtttccccccgctaacttgttcacccaatacttatgacatatngagaatgtgagctaaagccccatctacaaattcttgaatatggggccaaagaagttctttctgtagata

SEQ ID NO: 281850 - DNA, 354 bp, Glycine max
  unsure (1)..(354): unsure at all n locations
ttcttgctttctagctcgcccaggcgagctaggttgcttcctccagaaggcggtgtcttctggagaacttcctagaaggcccaagtgggcctggttgctatttgcaccccctgtttactaaatacaccccttgcctttatttgttgattctttttccgtaacattacgaaactntacgaatttcgtaacgatacttgttttctttccgtaatgttacgaaaccttacggattacgcaatcatcccttctttggcttccagaatgtcacagaactttacgaattgtgcatttacacttcctcttgactttcgacatgtcacgaaaattcacggggtgtgcaaccatgctttcttt

SEQ ID NO: 281851 - DNA, 447 bp, Glycine max
  unsure (1)..(447): unsure at all n locations
acacaagacactcagctgaagtgtgtccacaccattgtcatagaatttttggtatgtgttactatatggggatcatttctttccccgtcattggagtgccacttgagctccaggtctctcctctttgggcgtattctttaaagattcgtgccccttttncacatgctctgtagttgcttcctatccagaaccatatcaaaattgtactgatactgcctaacgaaagcaaccattaggtccttccaagattggactcgggaaggctgccagttagtgtaccaagtagcagctactctcagtagactttcttggaagaagtgtatcaacagttcctcatcttttgcgtatgcccctatctgtcaacaacacatctttagatggttcttggggcaagtagtccccttgtacttgtcaaagtccggcaccttgaactcgggaatgaccatg

SEQ ID NO: 281852 - DNA, 399 bp, Glycine max
  unsure (1)..(399): unsure at all n locations
ggcgtgctttcttctctttttccctctttccaancgcgctagcagcggtttagctcctggaatgtacatctctgtaagcttcttcagatacccaattgctccgtatgaaatcatcagttacttacatttcttacttggagaaagtgatccaaggcaagaaactgcatacttttttgcagtgttctgggggcttggatcaagcaactggaccatatttggcacacttttatcattcttcttaacctctctccgattctgggacagaaccattacgcttgaattcgcttgagcagcgacctctctagcattatttgctgtatccttaagcatctatataatataagggatgccaccggctacaccaactatctttttcatctccattgagctgcaaacact

SEQ ID NO: 281853 - DNA, 209 bp, Glycine max
tagcagcacatttaatacattctttatttggtttttttaacagctttatttgacacttgttaagactcataacatgcatggtgcgagtttcacttctttcttaagttattaagtgtaccactcattgtttttctgaattcatggcaaatgtctaccaataacaaaaaatgttatgaaaagaatttgtggtaaaatttgtgaggaatctc

SEQ ID NO: 281854 - DNA, 411 bp, Glycine max
  unsure (1)..(411): unsure at all n locations
tttctntactgtanatnttattaatgacccactaacctagaattaaaataacttaatgccattaacctanggaattaaaacaaacttaatggctgagtgtaactgaaattgttggcaaccaaaagtcacccccaacagccaacaagtcagccaccatttggtctcccaaaaggctgatgcctaagttgccaattgggcccttattacaacttgaactaaagcccttttagttgattaacccaaaacatatttttggtcagccaactttacaaggattgngccattatttatacaaactaaacactctaacattgaaataaagtggtgtcatttagtcctccatttgngccatgatacaactcacaaccttggacttttcttcttgaaacttgggcttgtattcaaataata

SEQ ID NO: 281855 - DNA, 428 bp, Glycine max
caattcaaatggtcataacgtttcactctgatgtcttattctagcgcataatatatcgagacgctcgaaattgaacaatggaagctcttgagcaattccaatggtcataacttttaactcggaggtccgattcaggcgcataatatgtcgagacgttcgaaatagaacaatgctagctcttgagcaattcaaattgtcataactgttcactcggaggtcagattcacgcacataatatatcgagacgctcgaaattgaacaatggaagctcttgagcaattcggatggtcataactatttcactcggacgtgcgattaaggcgcataatatatcgcgacgctcgaaattgaacaatggatgctcttgaacaatacagatggtcctaacttttcactcggatgtaccgttcacgcacataatagatcga

SEQ ID NO: 281856 - DNA, 293 bp, Glycine max
tgccgttcctacatggccaaatttcccaccaactacacaatgtcattactcagcaaatatctacccttcttattaccaccaccctatcaccatgaacacccaatcatccacaaagggacaccctaaagtagccataatgccggctgccaacatccaatgccaacaccacccttaataaaccaaagcaccaccaaggaagcattgtctagcagagaacctataaattcacctcaattcggtgtcgttcctaacttactgcatatctactcgataatgcatggtaccatacccta

SEQ ID NO: 281857 - DNA, 159 bp, Glycine max
ccatgtatccaaagcccgtactaaagcatacaactccttatcataagttgaatagttcagggtaagaccacttaacttttcactaaaataagcaattggatggccttcttgcatcaacacagccccaatcccaacatttgaagcatcacacttaatttc

SEQ ID NO: 281858 - DNA, 381 bp, Glycine max
  unsure (1)..(381): unsure at all n locations
tctgcatgctagcttattctaaggacatatgcaattactgtaaagagtcgggtcattggaagtgagactgtccaaagaaagcaaagaaagattatgtagttgctcttgtttaaaatgactcctcatcgaaaagcgatttggttttggttgttggtgaacaactacaacaacattttgaacaatgagtactggactcangttgttcttatcatgtgtccacacagacaattatttgtgacatatgagaagaaattgatggaatgtcctcatcctcttttttgnggggtggcgctaagcgccacatggcagcttaatgcctcaactatttttttgctttgctttgctaacattatncttactaatcatgttcttgttatctta

SEQ ID NO: 281859 - DNA, 385 bp, Glycine max
  unsure (1)..(385): unsure at all n locations
tggaagtgacttanagcananaagaaggtttctgctattcgttgacagattggatgcagaacccgattgtttcgggtgtagaaatttatgaaaaagctccaattntgcaggagaaggttgaatgttgatggtggttttgtcacgggttttttaatcatgtggcgagcttgggagatgctggtagattgtagaatgtactgaaatgtggctacggacaaaaattatcagaacagaacacaacagtcttggttttgtttttaatttattcatgtagagaagttttattatgggagtagaattgatgctgttggattggtgtaaggagctgtctcgttaaatggcaggactttgttatggtttgaagcatatggtagtatctaaagta

SEQ ID NO: 281860 - DNA, 402 bp, Glycine max
  unsure (1)..(402): unsure at all n locations
atgcaagctcgtttatttgattaaatatttctcttttatggtaaacattataaaaattttcaatatacgtaatacgttaaatatatagcataaaccaaagagtcaccctaattccatgaacacatacaaatgcaagatagtggacctagatgatttatcaaaggggtatattagaagcatgtgtaagtaactatgtacaagaaattttcttaaaatgcaaaacatgtatcatagtaagatgatgtatcaaagcataatatgtatattagagcaaaaagattgacatgaatgaaaatgcatcanatgtataaaccaattataacaagaaccaattttttccatactattnttttgtcatcaaactaaaaggaacgagtntcatcattgttaaaataaacaaaa

SEQ ID NO: 281861 - DNA, 508 bp, Glycine max
  unsure (1)..(508): unsure at all n locations
agggcaannaagcggcttttggtgaggctatnactacgtacacctgagcaattacccggngatcctctagattctatctagacgcattcaagccatactatcatgcttactccacaagctgactcgnggcttctttgagaagctgtctcaagaagcttctttgagaagatagatccttatctattcacacccctctattaactaaattaacctccttaaaaataattacggatgaaaataacgcaacaaataatcaaacatcaaacataattactaataatatatatatatatatatatatatatatatatatatatatatatatatatatatatatatatatatatatcagggtgttacagtaattgaaggcattgtatttggccacacaatctttgttcgtggcacacaggttgacacagccaatctggaagtcatctaaaaatcgcctccaccaacacaatgtcaaaggcattataagctctcaagacataatgtgttatatacn

SEQ ID NO: 281862 - DNA, 353 bp, Glycine max
  unsure (1)..(353): unsure at all n locations
tcagacctgaacagtaacagtctcatagtaagctttagaaaatatattcaatctattgaacaaaatccactgatttgaatggctaagtaaaataagtctaatagtaattggttntactactggagaaaaggtttatgaanaatcnaacccttggacttgattcaatccagtggcaactagaggaagcttatacttatttattggaaccatttcatttttttcatcctaaatacccactggccttccaattagatgaaagaggtactagtttccaagtatgattcttcatcaatgcttcacaatctagtggcatagatgaacaaccagttggataagtaaggcatgtttcacat

SEQ ID NO: 281863 - DNA, 496 bp, Glycine max
  unsure (1)..(496): unsure at all n locations
aggggnacnncccgcgagggggtgaagcatgacgttcgatagcaanaccnctcaagctgaggatatgacggacccatcacatgtggaactaggaggttgtcggttaatgttgcacaccaggttttcaacatccacaatgcgcgcataaaccaacaatcccttgtggccaacttcaatcggagctaacgtattccaacggtgccaatatcctggttnttctcaccaccgggtccccatcaatctctccaagcttccacaaattccattcaaaacaccatttaaccagaacaagctatcacagccaagcaaaacagggcaaagggcaaaaactctgctcacacaccacccaaatcacagctttcttactcaagacccaagacatttccttgatccattcgtaacattgatcactcaaatttactgcagtcatatgcttaacctcatgtgaccgtggattactacaacatcagactatttgactactttcacagcaccg

SEQ ID NO: 281864 - DNA, 416 bp, Glycine max
  unsure (1)..(416): unsure at all n locations
agcttgacatctaaatgttagtggcactacttacctctccaacccagataatatgcattaacaatactaacataaagatcaattgccagagtcactataataacgctcccctggcttttttttacacccatattattgtattgaattagactctgttgtgtatttaagagggttgggcgttgaaatgtctcccttgcagattgcaaccaatgaattaaccaataattattcgaaacaaataaattaaatgaccccatctgaaccaaatatatctcaagttagattntatttcctccaattcttattatttgactnttttggatgaaatgtttatattatatatncgattttatacttacataaagatcaatngcccgagtcactataacaacgctcccctactttttgttggcacc

SEQ ID NO: 281865 - DNA, 477 bp, Glycine max
  unsure (1)..(477): unsure at all n locations
ngtagtgctggaactatccaccatcgaaacataatcagtaagtgattcactagttcaatangtatgcaacatgtaaaattggagttgactganaattntggagtcacagtttcaaaggtaagaaactntaatcactccatagcttctttntctatttttgacgtcaaggatgctggaatattattgaagataaaaggaatttacatcattagcaatatttggtccaattgatcagggaccttatcaatccagcatctatctaataaagaanaagccaaattggctaaacaatgggcagctttatttccttgcctcttatcaaaattaagtttctgacttcctgccactgngtccagtcttcttgtctcctccaccagaccatgaaagagagagcgacctcctttgtctgatctgttccactcattgtacaactgcatgcaatctgtctcatattctgctccanagatgcacaattcg

SEQ ID NO: 281866 - DNA, 251 bp, Glycine max
attatatattcaggaaattatgaaggagtgtacaaagatgccccattttacacaaatctatataatcatcctattactttgagttacttaaactccccttaaccagtttaatatttatttgaagtggtaggattcatgcattgccaccccatcatgtcataaacaccttgcatatactcatttattcacagatatgctaagtatttgacttttgattgcccacactttactgaccattgactttgatcatt

SEQ ID NO: 281867 - DNA, 299 bp, Glycine max
ataatctaacgagccgctcgaccgtgatcaatagatactctcgagcaatatggatgcattctctgggtgtcatgtgctggtatcaaaggagtccgattaagataggactgtggttagtatcattggatcagatggtatgttctgactatatatttagattactttagtgtgttgattgtctatcatactttacataatgcgttgtgacatgcaatattgagattgatcacctcaatactgtgggcattgtaactatgaatgatggcagatagcaatcgatgcctatagcagctgtcctt

SEQ ID NO: 281868 - DNA, 368 bp, Glycine max
  unsure (1)..(368): unsure at all n locations
ctcttgcatggcttttacccagttcttatctttcatagcatcatcaatatgcttgggttccacttttgaaatgagagttgtgtaaccttgttttctgagagatccttttgtttggaccttggttgaggggttgagggatctctaatgatttgacactctggatggttcttccttagaattaatctagttggttctctttcttcttgaggttgttctgttacttgattagacacgtctgtttctggatattgntctatcagtggtccaatgccttcgtccagtcttatatctataaaagattcatcaagctgtggccattatgtatcntactntgtgtcattaaatcttacatgaatagcttattccac

SEQ ID NO: 281869 - DNA, 397 bp, Glycine max
  unsure (1)..(397): unsure at all n locations
atgctgtcgcagacttgccaggtgattattttgttttggtccacacattnttcaatgagaagtgatcatggaggtgaatttcaaaatgagtcttttganaacttttgtgaagaaaatggaattcaccataattttcaaccccaagaacacctcaatagaatggcattatggagaggaaaaatagatcccttgaagaaagtgcaagaacccttctaaacgaaaccaggttgcctaagtacttttgggcagatgttgtacatactgtttgttacaccttgaaaaaagtacttattagacctattctgaagaagactccttatgaattgtataaaggaagagaaccaaacactttacacctgagagtttttggttgtaagtgtttcgttttaacaatggt

SEQ ID NO: 281870 - DNA, 410 bp, Glycine max
  unsure (1)..(410): unsure at all n locations
atcttaatgtatgcccgcgtcattcatccctatgagatgttgttgaagtattggcgatcagaattgccattccttggattatagggttgaaccaagctcatgcttttacaaaaaggttcatcaagtcaagttgaaatatggaagtaaccgtcttgcaaaattgnggcaaaagatgaatcgagtcacatcactgcttcgtctactgccaaacatatttaggattgttgatgtccttgttacttccagtttcaccttgacaaagatgtcatggaccatgttgaaaatctaaattgattcaaccccatatcctgcgtaaaaattcgcaatcttcaactgtacatcattcgcatacatccatgcttttcattggttgcattgctcattgcattctttccttgaaaaataaaata

SEQ ID NO: 281871 - DNA, 467 bp, Glycine max
  unsure (1)..(467): unsure at all n locations
tccacaacatccaagcaaaacaatattcaaacagttcaagctatcacaaccaagcaaaacagagcaaaggcaganaactctgccaaaacaccaaccaaatcacagcttttctcacttaaagaccccagtaacaattccttcgatccaattcgttaaccgttggatcgactccaaaattttactggaagtctgtagtacataatcctacattgtgaccgttgggatctactagcaaacatccagaacccattttacattactctttccacaaccagcaaatacatagcatttttctgcacttgtgcaaaatcctgctgcacaatttcacagcaaaaatctgcacaaagtgcagatttcgaanatcacacttcctctcatccaatcttgctcanatcaatccctacaagtcccaaatcatgtatcaatcatgtctaacccanaatcaagctntacagcacagcaacata

SEQ ID NO: 281872 - DNA, 343 bp, Glycine max
  unsure (1)..(343): unsure at all n locations
ttcttgtgctctcaggtgacgggctagtagttagctcttatcacttcttgcgccaccccctgatattggagggcgaccaactgtgcaagtacaaccagaggaggaggcacgtctccagcttcgacgaggaggctatcgcatagctactatgcataccaaggcaagatttctctcagaccgctgcgatgagacgagtacggatctgcataccaccacaactctgatctcctcctgccgaacagttaactggtttatgccatcatgacatatgtaagtatgcacgtggctcaatggatntctaatgtcatatattgtttgcanggattgcacccacaagacactc

SEQ ID NO: 281873 - DNA, 371 bp, Glycine max
  unsure (1)..(371): unsure at all n locations
acacatagaaactcaagcttctcttggaccttgagcaagcagctaactcctcttttaagactatgctatgtgctcgngattggtctctctcttcctgatgtgccatcattntcttctattttctaaacccttttttgcaccattttaatcattgattgatcttaattgtcaattaattaggtagttttattatttgggctcatttagctaatttgatgtttttaatctaatttcaggaattaatgaaacattgagcttaatccggattttggttgtggacttgaagagggcaaataaagcagcgcttaccttagttaatttctaattaagaaatttcgcaattntattttatgttgttcagtgtttatttc

SEQ ID NO: 281874 - DNA, 406 bp, Glycine max
  unsure (1)..(406): unsure at all n locations
ttctnttgttatcaaactttatcgctggtaatcgattacaggaaactggtaatcgattaccagagagtaaatactctggtaacttataaaattttgagaaaactcttttgttaaaaaaaactgtgctatgtttggtttttgaaaaaacttttcaatacttcccttgtgaagtcttcttgatttcttctcttgaatcttgaattcatcttctctagaatctttgaaatcaacttctcttgaatcttgaatcttcttgatttcttctaatgaatcttgaaattaaccttgatcttgaacttgttgactcaatcttgaaatcattctatttggctttctgtcatcatcaaacctacttgatatgtacttgaatcaccatcatgatacttgcttatacacttactgactc

SEQ ID NO: 281875 - DNA, 450 bp, Glycine max
  unsure (1)..(450): unsure at all n locations
actaagctgcacctagtctcactaggtcgacatgctttcatttgtctgattaagttagaccacagaacagggtttcggtcttatcacattatattacttgatgtccaggaagatgcttaatgcttgnaccaagtaaaagaatataggagaatttgcctggcacggagactcaacgtgatattatttttttcttgcatcaatcatatacacattttttttttataaaacttgtactatttgttctctctttatcacattagttaatcattgtatctctgcattttttcttcttatctttctatctgacataaaaaaattatagaaatataatctctcttctttcctcattnttagacaagccattctaccattttcataacacacattcaaatgttcattcattgctgatagtattacgctaaacacacacgatcaaatgttaattaaaac

SEQ ID NO: 281876 - DNA, 386 bp, Glycine max
  unsure (1)..(386): unsure at all n locations
ttctngaatctgttatacatgattgaacatgatttgggacttgtaggatttgatttgggcaagattggatgaagggaagtgtggttttcgaaatctgcattntgtgcagatttttgctgtgaaattgtgcagcaggattttgcacaagtgcagaaaaatactatgcatttgctggttgtggaaagagcagtgcagaatgagttctggatgtttgctagtagatcccaacggtcaaaatgtaggcttatgtactagagacttccagtaaaaatttggagtcgatccaacggttaacgaattggaacgaaggaattgttactggggtctttaagtgagaaaagctgtgattttggttggtgttttggcagagttttctgcctttgctc

SEQ ID NO: 281877 - DNA, 453 bp, Glycine max
  unsure (1)..(453): unsure at all n locations
tcttgactcaccataaaccttgatccanggttagaatgtcaatccttaccctcagaaccaaaaaaagaagagaaggaaaatttccaatcaaaggaaaaaggagaaggaaaatttccaatcaaagaggaagcaaaaaaaggaaagaaggaaaatttccaatcaaaggaaaaagagaggaaaggaaattcccaatcaaagagtgggagaaagcaaaaagaaaagaaagaaaattcccaatcaaagaatgggagaaagaaaanaagagaaggagaagaaaganagaaagctcatgatcaaggatcgaaagaaaacaaaagaaatgtgcagagaggtctntggaccagacaatatctgaacaatacggaattgtcaccaaatgaacaaaagaaagaaaaggaaaccataacctanaagtggtcttctccttttgataccaaccaaaatctgtgtgtc

SEQ ID NO: 281878 - DNA, 383 bp, Glycine max
  unsure (1)..(383): unsure at all n locations
tatgcttatatattaaaggttgggaatgaatggatataaatcaggatctgctctccttgtaaatgctgagggtgattctattggtgganagttgtgacggtggaattggtattaggttgaagatctctccgcgccgaaccgcaattggagaaagcgcaagcagagctcangtgacgggaaaacccttcatgtgngttgcattttgcgtttgatacctttttttactgccatccattccattctattcataaagataactagccatgtcatatcaagaggagatgatgtcgtgaaaaagaagngagagccttgattcttganaagtatgaaagtttgatctttgcattcatatctcacatacttgatgtaatgatggcacctgt

SEQ ID NO: 281879 - DNA, 428 bp, Glycine max
  unsure (1)..(428): unsure at all n locations
gacactataaaaactcaagcttcttgagatgccctttggtaatatcgctataggatttggtatattccacaatctcattagagacatcaacattgaagtagtcaatgaatcttgaggcaagcacaacatacagaaattcataatccaccaagcgatgactnttcatcataatgtcttcaatcagtagtacctagttcatcttgatacctggtttcagatcataaactatttgtaaatcatcatccgttacctgagcatgatttcttgacctcgatgtgagaatgtangtaattaggtaaactaacatcttgtcctctaagtcattccaccaactgctaagcgattccttaagttcgtagcatggtcaagaagcattcccctataggtctacatcttattgtacccatcaagcatttcatcgaacttgc

SEQ ID NO: 281880 - DNA, 355 bp, Glycine max
  unsure (1)..(355): unsure at all n locations
agcttattattgattaaaacgtaccatacaagagattcatatataaaattattntatttaataggtgatatgaagaattgcttanatatcatcaataatcaattatataaaaattaaaatgaagctcacgagaatagtatgaaatcctaaaagcatgtattcttatacaaaatattntattttatataacanatntataataaatacatatttttaaatgtataaattttattataattaaaatttataatacaaaatattttttaatatataaattatattttagagttttgatangttaaaacaatttgaaatttgaaataactataaaatggaccttaaaattcaaattaaa

SEQ ID NO: 281881 - DNA, 440 bp, Glycine max
  unsure (1)..(440): unsure at all n locations
tcaacgtggtaaggcttgttaatttatccacttttagttaatttttattagaatattaatcacacatctttattttaaaagaacttaaaaaagggttggagcaatttgttggcccaaaataacaatatacaagtataggtattaaactcttatgagaaaaaaaatttatgcactgattgatatttacagtataataagttttatacaatcattcaattacaatcaatcatgtataatagattntttgatttttaaaataattataaagtaattcaaacgataattntgtgtttaactaataatataaaattgttttacattatcaatgtataggtattaaagtctaaaagataaaataaagattgaatatgtgcatcttgagaaataatgagtttttaataattatggttattttgactgcataattatgaattactata

SEQ ID NO: 281882 - DNA, 414 bp, Glycine max
  unsure (1)..(414): unsure at all n locations
agcttcttgtatcacttccaattccttacctttgtactccttgagcttgtcaattaacaatttacggctgctttcaatctcaaccaaggcaatntctctttcgtaccgttgttgttgttgcagaacctgtaatttgcacataatacatatgattcccaaattattatcttattcacattnttattatttcctcctggcaaagcataaaaataaatcagaaaaactntcaaaatcatcttacaagcactaatacaagctcaatgctactatcctcatagttctaagaaacaaaatcatattcttgtagtggtacaaagtagccaagagtgtgaaaccaatgaatcanatttcagttcacattgtggatntgctagatcaagaatgangaaaccattcatttagaatgtaaatgta

SEQ ID NO: 281883 - DNA, 201 bp, Glycine max
  unsure (1)..(201): unsure at all n locations
gcatcatgactctgttcanatgttcttgtcatagaaactacccttttgctcatcgtgatagggttcatacatatgactctccaaactcccacaagagtgagagccttgtgcactgngccattatttacaatagaagtgcaagaatntgagtagggaccagggctttctagtangaaaattgaatccctatgcatcatattc

SEQ ID NO: 281884 - DNA, 236 bp, Glycine max
  unsure (1)..(236): unsure at all n locations
ctactatganaagctgatangatacatgccagctaactttgcggatctcgtcttcgccggagaaagaattgaatccggactaagaaaaggcaagttcgaatatgcctccaacgtggcccccaacaacaatagaagagccccagtggtgggcgcgaggaataatgaaggagatacccacgcagtcaccaccacctcaacatggatgaaagcatcccaaaatatccaaagctcatacc

SEQ ID NO: 281885 - DNA, 432 bp, Glycine max
  unsure (1)..(432): unsure at all n locations
ggatccttagagcacctgcggcatgcaagctattttatgacttttcgnnatcatgcacagccgggcaggagttgactcacaataggccaatcatatctatggagcattntctttgagcaagtagcctggcctgaagctcaacttccattggtgagacnccaacgaggttgcttcgcgctgagnccacacttgtgcangtcaattcagagccagctgacccacaatctccattagtgaatccaccttcttcacctatgcttgaagcagttctgccatctcctcctctaattgtaatttctgacgcatcatcagatgatgcagttgcccctcctgattcaccaattgcaaaaatagctgacccctctgtttcctaattggaggaattgcttatctctctaattatcatctagagaagctgttgctctcaccgat

SEQ ID NO: 281886 - DNA, 350 bp, Glycine max
  unsure (1)..(350): unsure at all n locations
aaggacgtgactcttcgaagggatttggacttttccaaatcggctttaagtgcttctaaaagtcataactcttctaaatggttctcttgattttgattattgttttctgcctaaaataacctctggtaatcgattaccataatagtgtaatcgattacaagcagttatctctggcaatgttgatctctggtaatcgattaccatatttgtgtaatcaattacaacgcgtccctgcacctatatattcagatttcanattctgaaacctgcaactcttctctctctcgagaaccctcgcccccaaattgtcttccagccatactcactcaatcttgtccanatcactcccc

SEQ ID NO: 281887 - DNA, 327 bp, Glycine max
  unsure (1)..(327): unsure at all n locations
gagatgcagcggaagacaaaggagaatatgtgagaggaggagccatccactaaagaataagccatggaagaaggagcttcaccaccaagatgagtcttggataacaagcttggagaggatgcttcaatggacgataagaaagatggagagaaagagagaggggggagcacgaatgacgaacaatgcagagaagttgaactttgagttgcgtctcacaacactctcattcttcnaagttacaacaagtgttacacatgcttctatttatagactatgtagcttccttgagaagctgtcttgagaaaacttccttgagaagaatctttg

SEQ ID NO: 281888 - DNA, 312 bp, Glycine max
  unsure (1)..(312): unsure at all n locations
tatcctatgtgtcgaatgggttttttaagcttttaaaagattcctttaaaatatcaaaaccaaaaaaagggggtcgttaaggtgtgaacctttgaccaatctcaatgactttgaataaaaaaaattccagtatggggtgaatttatcctgggtttggttaataaccttcaatctctttaaagacaaccttacagcacttatgattggttaaggtaaaaattacaaaaacaatgagataacgatgataaaagaggagatgatatgcacaaacaacagggggcccctaaggtgcatanatacattcaatcttaa

SEQ ID NO: 281889 - DNA, 323 bp, Glycine max
  unsure (1)..(323): unsure at all n locations
actaagcttgaggattggtcttgccaggaaggatcatgtgggtctttaaaggcaaatttgtcatcctgcttggacgaatgagaaaactgnggcaaatgaagagggtgagaaagagggagaaacccatgctgtgactgccattcctatacggccaagtttcccaccaacccaacaatgtcattactcagccaataacaaacctcctccttacccaccgcccagttatccacaaaggccatccctaaatcaaccacaaagcctgtccaccgcacttccaatgacgaagaccacctttagcacaaaccaaaaaacaccaacaaaaa

SEQ ID NO: 281890 - DNA, 498 bp, Glycine max
  unsure (1)..(498): unsure at all n locations
aggtcaaaaccgcaanaagctgatcctatttcctgatnactcgananncnatnnngnacatngngacncnnnnnacccggacgcgcagggacgctatcagcgtgtttttcagctttcaggacccacgcgacaaggagacacncgtgatgcaatgaataccacgactttgttgcaggttgtgtncattcacgtgtttaccactaaatttaacattctatgtatcaggtatttgtcacacactaagttctggatactaactcttccttccatcgtggacgaaaacagaaatctcataggacaatgccaacggtattccttttcaacaagcagtctatgacttattccctgtactctgttactaaaattcttatccttaacatgttattccataacatgagtgagatggtgcaaggtatttaataaaaaaatggcacgtttgtcctgatcatagaactctatatggtttgctgatttcacgatcccggcatgctgatgttc

SEQ ID NO: 281891 - DNA, 362 bp, Glycine max
tgcttcgttcgtagatccctcatgtaagactaggcctaaactaaacagcattattgtaacaacataattaaaaccaaaacttaactcgtagatcccttatgtaagactaagtttcgatcccgcttcaattaagttctaaggcaacagtacatttcccaatgctaatgtcacctaactgtgcacacaaatgggtgatcagaccaaaagcatacaaacatcaaccattgaacacaaaaaacagaatcaattagatattaagtatttacatcagttgttcattagaaatccccaactagggtgtttagcgagccattacagaagaaatcctaacaataataagcttacaaacccaaggtatctct

SEQ ID NO: 281892 - DNA, 458 bp, Glycine max
  unsure (1)..(458): unsure at all n locations
actcaacttcgtangtaaatcaagtgcatccatgtccattttattctctctcacggngtggaggttgcgccatgttctcagaatattcaaaatcagaatgttcaaaattataatgctcaaaaggtactaaatgatgtctaaataatctatgaaatgtcctatctatctcangatcaaaggattgtaagtcggatggatttcgtctagtcatacactaaattcagcatgcacaattagttgccttcttatgcaagtaatagtataggtttgaactacaactaccattaaatgttgtccaaatgactagaaattntgtgagcaaccttataaaatgatgagaagatagcacataaaatttcaaacaaaaattcaaagtctaaatatagaatctaaaattggtaagttaagaaaaataagagaataaaacttggataataacaacattntgacagaatcac

SEQ ID NO: 281893 - DNA, 389 bp, Glycine max
tttctttgtctttctaacttgttttgaaggtttggttaaacttaaaagttttttttttatggataaatgcttacgagtctacttacatgatctagttgatttgaaggcttaataataatgagatcatgattttttatttttctaaatattcattatagacttaatttatggtgtcatctttaacttaccatcacttatgactatcacccaaaaaattataaccaagattatattacatattacttttcatcaaatcatgtttgacttgaataagcctcacttgttaaaaaaatctaaaatcaaagaccatcaagtatttatcatatatttcacttgttaggcttgacttaatcattcttagcttatatagttatgtatgtcaaactact

SEQ ID NO: 281894 - DNA, 426 bp, Glycine max
  unsure (1)..(426): unsure at all n locations
aatgaactctctgtcttgttgccggttttatattttgattgnnatgcataaaatataagcatattgtattgcggtttaattctcaatgaatgtctggtttgtcattggagatgccaattgtcagtttattcttaattcttgatgaaatcattaagactgttctaatctttctgccaggttctcctttgctatcttcgaatatgctgaatgaccaagatcagttaagggagttggaaaatgcagttgtcanagaaactgaagctaaaatgaactacagaaaaagggtagttgttgagcatacaaatgataacagatagtatggaaggacctgaacccagaatttgtctccataatatattttgtaaatcctgagctggcggaattgtaatctactgtttataactcttattctgttccttgttaaaa

SEQ ID NO: 281895 - DNA, 403 bp, Glycine max
  unsure (1)..(403): unsure at all n locations
ttgcttcatctaangaagagaataagagagagaggggggtgcgggaattgaaggagattatggagagaagttgaactttgaagtgtgtctcacaagtttctcattcatcaaagttatgcaagtgttacacatgtttttatttatagcctagcatatgggaagcttccttgagaagcaaggaaggtagcttccttgggaagctagaggaagaaagctttcttgagaagctagagaagggctactcatacccctccaatagctaagcttacccncatgccaaaatacatgaaaatgtgaatgtatgtatacaggttttgatgatgccaaaagaatntacttgataatggttgtaatcataaaaaataaggagaatgtgaatgtatgtatacaagnttttgatgat

SEQ ID NO: 281896 - DNA, 339 bp, Glycine max
tttaagccaaatcctaactcaccatagactcttgactctgtgtgagaatgcccatccttgctctcagaagaagacaaaaaaaagaaagttcccgatcaagggtcggaagaaagcaaaagaagaaaactcccaatcaaagattgggagaaagcaaaaaaagaaagaaaattcccgatcaaagatcggaagataacaaaagaaatatgcagaaaggtctttgggccagacaatatctgaacaatacagaattgtcaccaccaaataaggaaagaaaggataccacgacctgaagtggtcctctccctttgattgccaaccaaaatcctgtgcgtcagtgac

SEQ ID NO: 281897 - DNA, 381 bp, Glycine max
  unsure (1)..(381): unsure at all n locations
gaaatcaaagaatggaggtcaattataaaataagtttagtggaacaaaggggagtcgttatcacctttaattcaattacttgtaaaactcttctttctatatataaaaggtggtatacgcgaggtgggggacccagaataatttagtcaaacaaaataacacatagtactataagctactcagatcacttttctttattttntaactgtgcccctactttntgttatatgatgtaaatggaatggttgtcatgtgggttgactggcctctttccttaaatataatttgcaggacantgaagcatacatagctccaatngatcgacnntttgtttttgcgcttgcgtttagtttcggatattatgaataataatgggttgcn

SEQ ID NO: 281898 - DNA, 357 bp, Glycine max
  unsure (1)..(357): unsure at all n locations
tctatataagctgaaccattgtatcaatattcacatgttgtgttttattcagaaaattagagtttatctcttttatcttagtgagagtgattctcctaaattcttgagtgattcaagaacaccttggctgtatcaaaggactttcacaacctttgtgtgttgccctcactggaaagagtgattctttccttccttttatcttcacccttgatctttcaaaccacaattctagataatccacctctgcccagaattatctcgtggccataactcccatgttactcactcatattaagtgattcttgagcctaaattgaatctcaaaacgagaccttncacctcgttntggaatcacct

SEQ ID NO: 281899 - DNA, 175 bp, Glycine max
  unsure (1)..(175): unsure at all n locations
ttctttgtttaataagaagcctgnggcaaatggagagagtaaaaatgagggaggaacccatgctgtgactgccgttcctacatggccaaatttcccaccagctcaacaatgtcattactcagcaaatatcgacccttctcattacccaccaccctatcaaccaggaacacccaat

SEQ ID NO: 281900 - DNA, 409 bp, Glycine max
  unsure (1)..(409): unsure at all n locations
tgccttgccccttgatatatttgaaggactcatggtcactattaatgacaaattccttgggataaaggtagtgttgccatgttttcaaagcccgtactaaggcatacaactccttatcataagttgaatagttaagggtaggaccacttaacttttcactaaaataagcaattggatggccttcttgcatcaacacagccccaatcccaacatttgaagcatcacacttaatttcaaaagatttttganagtttggcaacgaaagtatgggggcattagttagcttttgcttaagaacattgaaagcttcttcttgtgtctctccccatttganaccaacattnttcttgagcacttcattgagaggtgctgccaatgtgctaaaatccttcacaaatcgtctataaaa

SEQ ID NO: 281901 - DNA, 419 bp, Glycine max
  unsure (1)..(419): unsure at all n locations
gcagatgacgaatgtagtctctgncgtgtcaaaccggcctcgctttgccttcttggcttgaccaaaaagggtgccnggattaacccataaanggtacccttccgcattgtcattcgggacttcgcccgtcttctggattgacaaaaaggtgcaaaaagacgatggtagtctctgcgtgtcaacaaagctcgctttgcnncctgttgacaaaaggtgtagatgacgatgttagtctctgcgtgtcaacaaacttgcttgcctctggtgggcaaaaggtgcagataaccataaggtacccctgtatgtcatcngctcactgtctctggatgacaaaaggtgcaaaagacgacgttagtctctgcgtgtcaacaggctcgcttgcccctggttgacaaaaggtgcagatgacgacgttagtn

SEQ ID NO: 281902 - DNA, 511 bp, Glycine max
  unsure (1)..(511): unsure at all n locations
nccagtgaccaaacatgacgtgcgatgcaaaacctcaagctgaagaaaatagtaataatgtaagtaaagtagaaattttgtgggaattaaaggtgattaaaggtgatctagattccatagaattagaanaagaattattgagtcattagaaagtggagggccttttcattaatgactatattactagtttaaaaataaaattntattttaactaattggtgacttattaaagtgtctaattatatgatatagaattatttaaattagttaaagttgtaacactctaaaaattacaacttagacttgacaagaaaactctatgttgtgtcggttgtgcatgtatgaatttaatctcaatagatatatgttcttaatcataaaatttcgtggtatgtatgtgtgtgtgtgtgtgcgcgcctattgattattaaaagcttgacanagaaaataaaattatctaagctagatttccgtctgcgcaagagttgcatttgcattgagtcataatgtn

SEQ ID NO: 281903 - DNA, 318 bp, Glycine max
  unsure (1)..(318): unsure at all n locations
agcttcaattttgcaacttaggagttgagcaggtaaaaaagattcgtcttcaaactcttagaggtgactttgagcgtttgtntatggaggagtccgagtcattttctgattttttttctcgagtattgcccgtaatcaatcaacttaaaagaaatggtgaagatgtngatgaagtgaaggtcatggaaaaaatacttcgaactttatatccaagttttgccttcattgttaccaacattgaagaaaacaaggatttaaagaccatgactattgagcaactcatgggttccttacaagcatacgaagaaaaacaaaaga

SEQ ID NO: 281904 - DNA, 390 bp, Glycine max
  unsure (1)..(390): unsure at all n locations
agctggctttaaatttacatggatgttggaattaatgggaggaggttgtatgccattttggttttaagggtagcatttcttggtaaaactaacttttccaaatgtttgccttcgcaggaaatggccccgaggaagcttgtctcaaagaagtccaggaaagacaaggcggccgaaggaactagttccgctcctgagtatgacagtcaccgctttaggagcgctgtacaccagcagcgcttcgaggccatcaaggggtggtcgtttctccgggagcgacgcgtccagctcanggacgacgagtatactgatttcctggaggaaatanggcgccggcggtggacatcactggttactcccatggccaagttcgatccagaaatagtccttgag

SEQ ID NO: 281905 - DNA, 323 bp, Glycine max
  unsure (1)..(323): unsure at all n locations
agccttatgaacttctatttttgcttgagggcatatcctcnccatccactagggtggaaattgctccatttaagggtcaccttttcctgaaatcctttgtcctgcacccaccaatccatgaccttgaaaggcttangaccccaatcaacactttangatcttagaaggatanggcaatgatctgaaaaatctctgtctagtacaaactgtgttgtgtcaggccactgaaatgatcctttgctaccctgcaatgagacacacacataanaatgcaatgattcttgcggatagtttgcattagtcattgtatttagtcttgaatt

SEQ ID NO: 281906 - DNA, 403 bp, Glycine max
  unsure (1)..(403): unsure at all n locations
tctgcatgctttcttgtcttcatcgttgtcgctcatcttcattgttgttgcttgtggaaggaaaagacagaaacaatggaaggagatattttgagaaaggctatggcacaaataaattaaagggtgtatgaggaaaactgagcgagactaatttcaaatatggttttaataaaaaaaatgtctttaaatacttgatttttaaaataattttattaaaaccgtctttcaacactcaccttctaaaacggtttttataaaattgttgtcatacatctcttgttatttacaaaattgttaccgcctaacgttctaagaatagtttatggtaaccgtcttataagggtcatcataaaaaaacaantttttttgtaatgtcaataccaatgataaaanacaccattca

SEQ ID NO: 281907 - DNA, 368 bp, Glycine max
  unsure (1)..(368): unsure at all n locations
tcaaggctaagtctccatgtagctccgtctatctctatacatttcttatcatnaggtatctaagctgtggttcttgaaatcaagtcttgcaatgcttgattcatcctcttagtcttgaaccttgtcataggacctccaatcccatgtaaaggatcattagctaggctggttgcacctctatcagttgttcataaaagtataacctatgacccttgaggaggcaattaaagatgaaaagtggatgactgttatgaaaaagaagttgaattcaattgataggaatcacacttagcaactagttccattggtttaatgaactattgcagtaaaatgtgtttataagattaagaggatgcctgatggaacta

SEQ ID NO: 281908 - DNA, 409 bp, Glycine max
  unsure (1)..(409): unsure at all n locations
ttctntgttataaactatgtgcggcaaaacttcattactattattcagtatatacaaatgagcttgttgcaattcttctagagttggagtgataacatgcaatccncttatacctttacctctcactctctcgtcaaggcgagactccagaatcccaacagggtttgccttttccatgtacttagaacaaaactcaatagcttcttctgcaatgtacctttcaataatagatgcttcagaacagtgtagattctntatatacctttntaagatcttcatgtatcactcaatcgggtacatccaccgcannataatggaaccgcaacatttaatttccctcactagatgaacaattaagtgaaccatgatgtcaaanaattaaggaaaatacatctccaaatgacacaag

SEQ ID NO: 281909 - DNA, 444 bp, Glycine max
  unsure (1)..(444): unsure at all n locations
tgtgtgtgcctatgtttctttcacgggattcaagctcattaaatgttttctttncattagatacttggtgtgagactaggacatcatttattatgatatgctcttcgcgattaataaagttgtcaatgctagtggcatttggaacttgtgacaaatgctcactttcttaatactaaatttttttttgctgtgcaaaaaaaatgaatcaagttgtcattttcttcctcatgcacaacattatccagcagttggaaacataaggctattaatcacatggcatactttaaggtcaattatagaggtgaattttgatttttaaggtataggaatgaattgaactcttatagtaagtttttgacaacacgagtgacaccttaaacagatgagtgtaactcaagatatgacataatctttctaaaagtttcatacataacactcaacacc

SEQ ID NO: 281910 - DNA, 394 bp, Glycine max
  unsure (1)..(394): unsure at all n locations
atcatccatattcaatactatttaatcatcattttaaaaaagagtgcggccaattaattntaaaaataaccaaataccttatttaaaatatatgtataccttanacatgtgtaatttgttggatcattgattatgtgtttatatattcaatagatattaactctcctttaatgtatgttttttgtcaacatgtttttcttggcttcggcttaattntattattcttcanaaaagagtgtccgggactttntgacaaanaaatggatgttntttatataaaaaanaacaatattctcaaagagtgtagtttggaaacaatntacaagacatatnttttgtcacataatatgtangagaaaccaatctcggtgtcactttatatttgttttatgtc

SEQ ID NO: 281911 - DNA, 466 bp, Glycine max
  unsure (1)..(466): unsure at all n locations
ggagantnctaggagatctcacaattatgaatgtatatattttttaataggaaatcaacaactatggtcaaattccttaataagattcaactcaatacccaggttccaattaagagattggatctcattatgaacagaacaatccactcagttgaatgacaaaatcaagaattaacatgaaacaaatcaaatcacatgagaattgataggatgancgcttttgtgctatggtatgtgccttacggtatccaaagtacggtcctctctgcttcctatgattgaagtgaagattcacaatgtctgctttccatactctgacaagtaagcaagtcaactaacttggtaagaagaanacaaanagtatttcacaatagaacttgaagctcgaagcgtctncattgagaaaatanagtatgattaaaaaatcaaaccattgggtaagctggctcggatagacnatcaacat

SEQ ID NO: 281912 - DNA, 409 bp, Glycine max
  unsure (1)..(409): unsure at all n locations
tatcttgtgttttggtacccacatcatcttctttctgctgttgctactttgagttccatgatgtggatggccatgtagatgatagcaaaagggctntatgtgaccatacttgccacagtagtgacacctccacttctttcttttgctccttttctgctgcgttccatgatgtcgagaccgatgttgtgacatcgtggctccagtgctgtttttggcaggaacaaattctgtcatggttgttctgccagcagacttaggattaaatccaagtcctctctggtttccaacattctttccaagctgcagcacctcatcaagcgtatctgagcctttattcagcatctttattgattctgtcatgttttccagtttagagttcagaaaaccaacttctcctttaagctcagag

SEQ ID NO: 281913 - DNA, 393 bp, Glycine max
  unsure (1)..(393): unsure at all n locations
cactcaagcttgcccaggtcgagaaggagcttgtccgaacaatttagctttatcaaaganaacatgtgggccatcatcgaccaatacaaggaaaagttaagcctagcggtaactcacaaacaaaggctagaggacgagtacgtgaaggtataagtcctgcaagtggaaagggaagcaagggaaagggtgatcgattcattacacagagaagcaatgatgtggatggataggttctcctttactgaaattctgatactgtggacagatgtcgtacaggatgtcacgacatcgcgcttcagaacatgcagctagtatatgaccgtatgaacagaataaacaagtaaataacacaagagaattgtaacccagttcggtgaaacgtacctacatctg

SEQ ID NO: 281914 - DNA, 378 bp, Glycine max
  unsure (1)..(378): unsure at all n locations
ttcttgtatctctccttgtattctattacatatgtcctttacacattgtgattgcatgtggatgggttgactgcatgcccgaatatgtgcttctagtgcgaagctcagagtatgcttctcttaggcttanattcactatgaaccctatgggtgggtgcctagatttcattatgtaaggagaaatcgaaagtgcttgcgatcgctggtgaaactcaccatgcataatggacatctaatttgtgctgaatgacacaactggactagatccactaatgaccctatggttgggtgcctaagttgcgttttctaagtagaattccatattgctagagaattgtgtaaaactcacactgcataatgaaaatctaattcgggttg

SEQ ID NO: 281915 - DNA, 420 bp, Glycine max
  unsure (1)..(420): unsure at all n locations
cttgctgctggatccatcaaataatcatgaaaaacttataaatttatgcatgaatcaactagatntaagggtagttntggaagaaaactattacaatcaaaggataagtgctaacaatntaaatcccaaaactacttanatntggcacttatcaatgcactacaactngtaaaaaagaaatcaccttgaatgaagaaggcaacctattgngccagatgaanagacactntttgaattncaatagttttttggaactatagcaagaagttcagaattttgtcactcaattacactaattggaagcctctagacaaagaccctatatgggatttgtgtcaatgtactaactttatccatttgaacatgcatcttagcatacttaanatgaatnggatctttctaaatatttttctttcattg

SEQ ID NO: 281916 - DNA, 356 bp, Glycine max
tagcttgcattttcaatatattgattcctacgcgtcggggctgtggatcgttgatggcttataagtgctacacatactaattacttatataagctgaatatatagactgcaactactttatccatttctatccggaacttatacactgatccgtacctctcgccttgatgaacatgtatcaccatccatattgagagatatgtcagtgattcaaactacgatgtctaccctgggaacactgtactatgatcccatgagccatagctacagcatcaacgagcctggttctcaaatgcgatacgaactcgaacattgacattgcatctcagctacacaaagtctctaaactaacacat

SEQ ID NO: 281917 - DNA, 286 bp, Glycine max
  unsure (1)..(286): unsure at all n locations
tgcatagctcagagacttctattgcatttgtgcataccactttgcgataactngatgagttaggactagcgttcattccattgctgcatatcagatagatatcacgctgtacatcattgagatagaatgagacggtcacttggcactgagggacattgtntcacaattacgcactatatgaagaggtgagatccattcttgatatggcaccnagacgtgaagccagcctccttaaacctattataactatactagttgcaatcaatattcaactacatacactgcg

SEQ ID NO: 281918 - DNA, 388 bp, Glycine max
agcttcatcattcaatttcgagcgtctcgatatatgacgggactcaatcagacatccgagtaaaaagttattgtcgtttgaattggctcagagcttcaacattcaatttcgagggtctcgatatattgcgggactcaatcagacatccgagtaaaaagttattgtcgtttgaattggctcagagcttcaacattcaatttcgagcgtctcgatatatgacgggactcaatcagacatcctagtaaaaagttattgtcgtttgaattggctcagaggttcaacattcaatttcgagcgtctcgatatactacgggacctcatcagacatccgagtaaaacgtattgtcgtttgaatggctcagacgtcaacattcaattcgagcgtctc

SEQ ID NO: 281919 - DNA, 312 bp, Glycine max
tgagccattcagacgacaataacgtttactccgatgtcttattgagtcccttcatatatcgagacgctcgaaattgaatgttgaagctctgagccaattcaaacgacaataactttttactcggatgtctgattgagtcccgtaatatatcgagaccctcgaaattgaatgttgaagctctgagccaattcaaacgacaataacgttgtactcggatgtctgattgagtcccgcaatatatcgagacactcgacattgaatgttgaatctctgagccaattcaaacgacaataactttttactcggatgtct

SEQ ID NO: 281920 - DNA, 397 bp, Glycine max
agcttggagcaaattaaatgctccagcttgaggggaagtgttaaacatatatattgtagagagctgtattgtgtagacaactatgtaggtaaaaggctattttgagtgtgtgtgtgtgtgtgaggttgagtgtgtattaagttttatgtgttgtcatgttgagtgtgagggaaactgagtatctaatccttatccaaaggcagtctctctttctattttatatataaatatataagcagtggctgagaaataaaaaaaaaaaaaataactcagcacttctctattgtattgtgtaattcaaatttcttagcaatgtagtcacttcattttcaacaattacatactcaccataatgaacccaagccttaatgtcataatctaatttggtcacagatca

SEQ ID NO: 281921 - DNA, 453 bp, Glycine max
  unsure (1)..(453): unsure at all n locations
tgaagggatgaacacttctaagtgttgttctatgtggatttatagtccaaagagaaaatacattgacaaatccaaaatcctaaagtcaatagagatgatttattttaaataataataataataataataataataataataataataataataataataataattattattattattattattattattattattattattattattattattattattattattattattattattattttattgagtccttacacttatactattattatgtgntggtcttaagattatatctagaaactacgttgtaatctatacatgtacttttaattccattataatctttatttcattaagtgtatactaatgccaccaaattgtaatttatggtggtacaaagccaccacaaatntattactaagatgatcattgttgacaatgtaacaatcctta

SEQ ID NO: 281922 - DNA, 184 bp, Glycine max
catctgtagagtatgtaaacggcagtgtctactgctttcgcccagaaagtgttatgtaatcccttattcttgagcatcgactagccatttctataactgcgccattctttctcttggacactccattttgttcatgagaatatgcgactgtcattttgtgatccatacctttatcctcacaaaa

SEQ ID NO: 281923 - DNA, 245 bp, Glycine max
  unsure (1)..(245): unsure at all n locations
aaaaaaagcacatgcattgacgaagactcaaaatagggagcacctcacacttattaanaggaatgtccagattacgataagatttgtcaagctgttaagttattgatgcataattattagtgttaaacaaatggtaagcatcacggatgtatgtgtcatgctatgattactgataaagtgtaaaattaaaagatttggtctgggttaggtgtaatacgatcgttattggttttttctaccctccc

SEQ ID NO: 281924 - DNA, 330 bp, Glycine max
  unsure (1)..(330): unsure at all n locations
gctttanggaaaacttgtgcctgggcaacctgtaactcagcttgcctaaatcnaaatctcatcntgccctgttctgtttgtagagtctgggtctatgttctttgctgatcaccatacagatctctgtccttctttgagtaattggagtcatagcaacctgaacctatgctgaacatttatatagacccctcacagcaaaccacaataaatattatactttcagcacagatcaatccagtggagaatatcaatctgaatggaaatctccaacaccattctccttcaaagctgtgtcaacagcatatgtctctcatgacatacatactcaca

SEQ ID NO: 281925 - DNA, 312 bp, Glycine max
  unsure (1)..(312): unsure at all n locations
tttcaganaatattctcaacagtcacatctttttatgtggttcttgaatggctatcaaaggcctatatatatgtgacttgagacacgaatttgctaagagtntttcagaacaaaaaggtcttatcctcttataaagaaaaatcgttttatcctcttacaaattccttggccaaattacttgtgattcaataaggaattatttgagtgctcaaattgttcaatctatctctttcaagagagatttcttcttctcttcttcttcattctgannagggattaagagaccganggtctcttgttgtgaaataattc

SEQ ID NO: 281926 - DNA, 255 bp, Glycine max
accattaaaaaaagctgtccctccatccatctgttgcaactcaaggtcaaaatgagcaactaatgccaagattatacgaagagaatctttcttagatactggagagaaagtctctttataatctattccttcctttagagtagatcccttacaacaagacttgccttgtatctctcaatgttagctaatgaatcctttttggtcttatagacccatttacatccaatggccttcgccccattatgcgactctaca

SEQ ID NO: 281927 - DNA, 469 bp, Glycine max
  unsure (1)..(469): unsure at all n locations
aggaaacgggnnggaatgagccatcgananctgagacnttcggannctcgcgagttcctcagagccgacctgaggcatgcaagctattttggnggtttanatttttaccagaaggacggcaatggatccatagtatttataattagctgaccatcggatattgctgatatatatacataaggttaaattggatagtggatacggtggaatatattaaactacattgaaatttgccaaaaccaanaagcctataaccattgtcttgggtgcattctcattcaggaacaggtttcacttctgacaaaacaaaattcttacataaaagaaacggctctgttcaatttgcctatctgatctgctgtgtctcattaccatgattacaggtcattcagtgacacgtgacagtaggaactcatccttctacatggattttgagacccccattggtgctatacccgaatcttcctag

SEQ ID NO: 281928 - DNA, 401 bp, Glycine max
  unsure (1)..(401): unsure at all n locations
ggcttgtttctacaatttccctctttttgatgatgacaaacctgaaatcaagaaacacatacacattctttttcctagtcgatcactcacttaattctccatattctccccctttgtttttgagtttaagcttcacttgaaattaaattaattaattatatgagttcttgatttaatccctattttctctccctctttggcatcgacaaaaagccaaagtgtgtaagaaatataaaacatacatgatttanaaacaacatacacatagcatccgttgtaaatcaatcataaaggatttctaactaatcatgaagcanggcatgaaaccaaatataaatgtaaaccacatagtcatataacagaactcataaatgttcactcatactaagcanatattaaaa

SEQ ID NO: 281929 - DNA, 318 bp, Glycine max
agcttttatccaattggactaacctggaataaatgcctttgatagcccttttgagccttgtttccttttccttgtttggaagctactacaacccttagggaaaaacatgatataccatatccttaggaattttgagctttgaattgtttgggaattaatgtggggggtttttgttcattgacaacttgtttgtggctatgctcatgatgattttggccatactgatgtacatgatattgttaaatgttgacatgctgaataaatgttgttctcaaggctaagagtaaaaaaaaaaaaaaatcgaaaaaaaaaaaaaaa

SEQ ID NO: 281930 - DNA, 289 bp, Glycine max
ttaataccactgcttgagtgattaactagtttttaattttttatccataaaataaatcgcagaaatgttgttattactaagatttatatatatatttcccctttggttccacctgtacggatgttgacggcgattattttacaaataacggtttacaatcaatatcgtgaattttttatttttatagcggaaatgctagtaatgctgaacacgtcaagggtcgaagtaagaacagataaatcgcaacaatgggacacgggtctaatgatgaaatcatttggacttcgtg

SEQ ID NO: 281931 - DNA, 244 bp, Glycine max
  unsure (1)..(244): unsure at all n locations
ggagatgaaaaaaatcatgaggaagcggtatgtgccggctagttactcaagggacttgaaattcaagctccaaaaactaacccaaggcaacaagggggttgaggagtatttcaaggaaatggatgtgctcatgattcaagcacatattgaagaagatgaggaggtaactatggctcgatntcttaatggtttgactaatgatatccgtgatattgttgagctgcaagagtttgttgaaatggat

SEQ ID NO: 281932 - DNA, 167 bp, Glycine max
tactccaatatataaacttagtcaaagatgaatatttttttactgtcccactactgacttgatatcttttttggggtattacctctgggtggctagtattaccattattgcgtttcattttatctgtaaaaataagacacttggcaaaagataatacattgaagtct

SEQ ID NO: 281933 - DNA, 401 bp, Glycine max
  unsure (1)..(401): unsure at all n locations
cttgcgtagccgctcttggtgctcagagatttccaaaatttattcctcttatnactagctattttgaaggctttagttcctgaatgtacaaccttcaaattgttgctcgttcccctctttcttttctgcaaaaaagaaaatcaaatgctgtcaaaacatggatgaagtcctaagaaaatcaatatcaaagaaaacatggatgaaatcacaattaaaaagcacaactacctatctttcagagtcctttggttaatttgtcttgtctccttatgtggtggagttttgtttaataatcttatactatctgccttccaaaaaaacttatcactaatccctctttcattaatccaatattgtatgttattgtataaaagatcatgggttcttcacctgcctccact

SEQ ID NO: 281934 - DNA, 398 bp, Glycine max
  unsure (1)..(398): unsure at all n locations
tgcattcaggaacctaacaaacaatacaagatgcttcacttccagtcctgctccaatgaataaatctttataagtaaaacatgtatgtttattctaactcaccccatcttggagcttgtcctctacagcagtggcaccaagaagaattaggttcttctcaatcttatctgatacttcctcaatcattatatcctgatcagcactgactacattcttggccctagagaatttactatcaaactccttgtattcttctgcatcaagttcacgataggccagtataaaggttctcaaacccgcatcagcatactcatgcacatngctcatggttttctcttcaaactccttcctattcttggcaagcctttcaaacatggtgctgcatgaaaacatcactc

SEQ ID NO: 281935 - DNA, 329 bp, Glycine max
  unsure (1)..(329): unsure at all n locations
cttaccataaaacggtaatgcttgcaaaccggactttgtacccatgaccattgtaagtctccattaatgacaacctttggtatggaaaagttaaataaaatgtatgtcttttcctcatttaatggttcttttggtaggttgtacattattntatgtttaggttaattttttctcagtagatactccctatattgtgaataaatgtggttcaacttcagttcacgtgaaagatgaagaatagaagttgagtagctgtgtctcctaatgaggctatgccctagtgagtacatcactaacgaggcctcactcgctagtggttggagatctgg

SEQ ID NO: 281936 - DNA, 226 bp, Glycine max
tttttcttttacccactgtggaagaggcttcatgtcttatgcgcttaaagatggccccgtgttttccactaaccattcgtgccaacctcgtaggttacgtattgcagttggagaacccattggtgtgttctgttaggaacaattattgcataccttaacctgtcaagctcgggccattggctggacatacaaatttacttgtgagggtcattaaaaagaaaaagca

SEQ ID NO: 281937 - DNA, 403 bp, Glycine max
  unsure (1)..(403): unsure at all n locations
agcttgttggtaaactatatgccttgtttaacccggtaacccaactggccatgaatcaaaaatctgcacctgtcgctagactctantggttatgctcctctgacgaccaccacacagacctttgcccttgtgtgcaacaatctgaagcaattgagcagccctaagcttatgctacaaacatctacagtaaacctcctcaacctcagtagcaaaatcagccacaacagaacaattatgacctctccagcaacaggtacaatctgcggtggaggaatcataccaatcttaaatggtcgagtacttcacaacagtagctacaacaccagccttatttgtcaaatgttgctggcccaagttgaccatacgttcactcaccgatccagcagtaacaacaacaacagca

SEQ ID NO: 281938 - DNA, 362 bp, Glycine max
  unsure (1)..(362): unsure at all n locations
atgatgccacacatgatcaacagctatgctacttcctagtttctttactgtggatagctgcgattcagttcggaaaacctgttatcctcttacacgttgaacacttgatgcgtgctagctagtcattcttccatatgctgtaccatataagatccaaaagaaatagtttataatgatgcatgtacacttgctctactggtccatgctagaatttgcatgcgctgcatactanaatcatttaaagagaggaaaggatctatagaatagagacaagcgtgtctctgttctatatatncagtcatttaattaaatacacgcaatggatttctgcatgttcatattttaaataactatattaagtc

SEQ ID NO: 281939 - DNA, 388 bp, Glycine max
  unsure (1)..(388): unsure at all n locations
tacaacgtatgctgcgtgtgacatcgtcttttccgactatatataaataaacaaaatatataaaaaatattggtaaacaaattcacgtgggtaaaaggttcacattcacttcactattaccaaataaaacttattaaaaatatattcgactctaaacaaagccgtcaaaatttacaaaaaacgttttgttaaatcaatgaggtaaaataaaatagactaacatcatgcaattaatatagagcttatgctccaatgtcacatcctatcagagcattgtgtaccgacgtctttcagcacaaggttccttaaagtaaattacgtagtcatctgctcccccgaacacacagttcaagatcatcacatgatccanacacaaacaacacacatg

SEQ ID NO: 281940 - DNA, 264 bp, Glycine max
  unsure (1)..(264): unsure at all n locations
catgttgttctgaaaatctaaaatgtaactcttaaaaatgtttgacttttccaatgggtttagctttctaaaagtataactcttctgattggcttcttgaccagacatgagagtctataaagcacgctttgnttcgcattttctatcaagtctttctaacattccatacatccttacagccttgatctctgtgaacttcttcttctcttgtccaaagcttatgaaatttctggttttcaaacctgaaacttggctatcatcctt

SEQ ID NO: 281941 - DNA, 300 bp, Glycine max
  unsure (1)..(300): unsure at all n locations
ccactctcccaattttacaaaatcatattcatatatcattggggcatttcaccgagcacttggtgggcgcatgtttggacataaattgcaagagaattggggcaatgtggcatgccccattgcttcagaatacaacacaggcctaaggccttctcacacaaatcctcaactcaacaaatcaagcatcanagcaacccanaactgcctcacaaatataagcacgttctcacaatntagagcaccaaaagatgaagaaaacacatcaatgagaagctaaaaacctcaggattgaatacttac

SEQ ID NO: 281942 - DNA, 353 bp, Glycine max
  unsure (1)..(353): unsure at all n locations
ccttgctctaaattacatggaggttggtatttttgaaggatgtttttgccatttttgttttaagagtagcattccttggtaaaactaattttccaaatgtttgccttcgcaggaaatggccccgaggaagcttgcctcaaagaggtccaggaaggacaaggcggccgaaggaactagttccgctcctgagtatgacagtcaccactttaagagcgctgtacaccaggagcgcttcgaggccatcaagggatggtcgtttctccgggagcgacgcgtncagctcanggacgacgagtatactgatttccaggaggaaatagggcgccggcggtggacatcactggttacttcca

SEQ ID NO: 281943 - DNA, 392 bp, Glycine max
gctttatgtaaactgatgccttggtaacccggaacccaactgccatgaataaaaattgccctgtcgctagctctatggttatgctcctctgccgacaccacacagacctttgccttgtgtgcaacaatctgaagcaattgagcagcctaaagcttatgctacaaacatctacagtagacctcctcaacctcagtagcaaaatcagccacaacagaacaattatgacctctccagcaacaggtacaatctcgggtggaggaatcataccaatcttagatggtcgagtccttcacaacagtagcaacaacaccagccctattttcaaaatgttgctggcccaagtagaccatacgttccttcaccaatccagcagtaacaacaacaacagcagc

SEQ ID NO: 281944 - DNA, 355 bp, Glycine max
  unsure (1)..(355): unsure at all n locations
agatttaagccaagcccttactttcgaggggcaactcccaccttatgaagactatcccgggcaagacgatggggaatgagatacccatcttggccccctgctccacctcaaagatccatccccgcatgaactaccccagccgaacatagtccactatatcccggcctcacccacacccgtaaaagaatctgttcccttcgcggaagataagggaaagattgacgcgcttgaagagaggttaagagcagtcgaaggccttggcaattacccattctcggatttggcagatntatgtcttgtgcccaacatcgtcattcctctcangttcanagtaccagactgtgataagtacaaa

SEQ ID NO: 281945 - DNA, 435 bp, Glycine max
  unsure (1)..(435): unsure at all n locations
agggaggggtnagatagctttaaaccgatgcttcgacatccggggttngagccgccncgggatccttaagngacttgagcatgcaactttttgggccttcctgcaaacaaacattgggagtaagtttaccaagaataatgcctaattttacaccaaaaatgacatgcctaatccctccggttaaaaacgaactcatgcccacgttaaaagtacacatttatgcacatgcgtacgtgtaaaaatatcctactattatgtcacttacaagacacccacacatctaattgcctacattatgtgcatctgaaagacacacttctatgctcaggcgtgcgtcaacttacactaatatatcctaatttgctattcaactactaccatattgaatatattcatcaaatttatgttactcctttattattgctatggaaacta

SEQ ID NO: 281946 - DNA, 348 bp, Glycine max
  unsure (1)..(348): unsure at all n locations
tatagaagctagatttgattttctatggtncaatatttttgttcttgttcttgaaccatgaatggtgttgagtttaggttcctttgatttttgtcttgttattttttgtggctganacctaaaccatanaattcttacaaaaatatacaagtagaaaaaacctcaaaatctagagtgacttgttcacgtattggtagtttgtcatagaagtcatgtctagtcatgaaacttgtcacataagaattcttatgttgggctgaattntattttcttggttctttcgctaactcatttggtcatgagtgtataaattatttagcctattatttgattgagtccatctttcat

SEQ ID NO: 281947 - DNA, 459 bp, Glycine max
  unsure (1)..(459): unsure at all n locations
aggggncaagcggganaatgaaccttcgatanctttcgaaatctagctcggacccgggatcctctgagtcgacctgcggcatgcnagctttatctggattatttgtattgntncgatggtgaattctgggtggtcctggtgcggaaatgatggtacagcgggtgaaccaggagcggcaggttcttttggtgaaggaaccatgggaaaacagaccgttggaatgaattctaaatctcagatactattgggatatgctgataaaacacgaatgcccaccgatatattttgaatgagcatgtatagggcgtgtgaagcaccgtcgaattgcttgtgggaacggctataatgttagtgattcgtaggcacgtcagatagcataactgcttaattctctaccgacaatgccacttgccctagttttcaactgattgctccagccttggaaatattgctttgtcn

SEQ ID NO: 281948 - DNA, 241 bp, Glycine max
  unsure (1)..(241): unsure at all n locations
ggtattggtttttaaaagggggaaaaagaggtttttaatgttaaaacccccccccttttctcatttttaatatttcgtcccaaggtagcttcgcccagcgaacctacctagcattatcttattatttctgttttttgaaggggaacatnaccatgaccccttccttctaatgaataacattttgctaacttgacctaactaggttgaaatgagcggtgaaacttatttattatataccctt

SEQ ID NO: 281949 - DNA, 403 bp, Glycine max
  unsure (1)..(403): unsure at all n locations
agcttgttaatggagaattgcactaatcaatcactacgcatagctgcaaactcgaaggtggaggacacatgaacgaaaacacaattcatggggctccgaaaaaagggttgataatggagaattacactaagcaatcactacgcatagctcacaacttggaggtggaggacacatgaacgataacgcaattcatggggctcccacaagatngaaaatggagaattgtactacgcaatcactactcatagctacaaacgcgaaggtggaggacacatgaatgacaacgctattcatggtgcttcaacatgattgataatggagaattgcactaacaatcactactcattagctcaaactcggaggatgaggacacatgaatgaaaatcaattcatgcggctccca

SEQ ID NO: 281950 - DNA, 488 bp, Glycine max
  unsure (1)..(488): unsure at all n locations
ggcncggcggcggtcnnngnaactggccatgaanctncgacnacgaaacnatgctnaagggagcctaccattctgctgggaccaatggtttaataatttcatcanggcgaacaatcttccactactttgtggtctatattacacgcccgagtagatcctttagaatctgaatagttcgttcagtctgaccatctngttgaagatgaatagctgaactaaagcttcagcttttggtccccaaggctttcattgtagaactttgtccaaaatcgcgaagtgaaccttggatccctgtcaatacatactagaggaattcctgcaccttctcttcttgattacaactcactagctnttgcattctatacctcatattcactgggataaaatgagcagatttggtgagtcgatctactatgacccacacggcattatgcncacgactagtcttgggtaaactagatacaaaatccatagatatgctcttccat

SEQ ID NO: 281951 - DNA, 318 bp, Glycine max
  unsure (1)..(318): unsure at all n locations
tgcatgtgaattaggacgcattatcaagaatcaagccaatgctattgtgcaagcaatcaatggggcataacacacccaatgattatgatgatggatggctcaanattatcacanacgtaaaatcatcactttcaaattgagctttcaaactatcatgacatgtagagaaaaatcaaagatttcaagtcacaaaatgtcaagaactttattttccaaaacaatacccatttcttgaacatatcctataattcaaaagaaaacatgctaagtcgtacgtgcacacaaaatttgaccctaattattatactaaaaatctga

SEQ ID NO: 281952 - DNA, 227 bp, Glycine max
aatctcgcttggaactctggagaggttgcctttctcttctactactactctggagctcttaaaattctagaactgacttactccaacctttatgctactcacctctggagaagtgagctctccccccttatgtagcccccctgcaaacatgaatacaaaaagcctttcaaacactaatgccatacagtaaccttctctaaggcaaacagctgcgagatcttttattt

SEQ ID NO: 281953 - DNA, 280 bp, Glycine max
  unsure (1)..(280): unsure at all n locations
tatcgagacgctcgaaattgaatgttgaagctctgagccaattcaaacaataataacgttttactcggatgtctgattgactcccgtaatataacgagacgctcgaaattgaatgttgaagctctgagccaattgaaacgacaataactntttactcggatgtctgattgagtcccatcatatatcgagacgctcgaaattgaatgttgaagctctgagccaattcaaacgacaataaactttttcacggatgtctgattgagtcccgtaacatatcgag

SEQ ID NO: 281954 - DNA, 370 bp, Glycine max
  unsure (1)..(370): unsure at all n locations
agcttctatcctttanttacatttcaattnattgaactaatgatctttgaactaataataattaataatattttaatataatatattaaaaaatatttattggagttgaattaagaatgccgattcataaataaattgagagaaattggaatggtaatgtctatacaaacataaacagtttatgagaagtggtggttacttacaaatattttgacacacaagaaaataattgttacctataaataacaatcttgaatttactagtagtgaattaataattattatctataaatattaatcttgtaatgtattagggttgaaacttctgccctacanacttgtacaaatcccgacacattntgtactcatc

SEQ ID NO: 281955 - DNA, 324 bp, Glycine max
  unsure (1)..(324): unsure at all n locations
aaactagttttatatgtgattatatattgtaacaattattgtacaccaaaaaaatatatcgtaacaattaatgagtaggggttttcttttttatattcaacaactagattgattttatttctttttggtgtcccccggatataaaggatttggtttcattagaatgtccattcttttttgccaacagtatgaatttttatttcaatcttaacgaataagtgcattaacattnttacacgaaaatntacttttaagcatcggaatttgaatgattccttaagaataatgtaagagggtccctgcttatattctaactaaacatac

SEQ ID NO: 281956 - DNA, 364 bp, Glycine max
  unsure (1)..(364): unsure at all n locations
agcttgttgactataccttcgaccgaacacgaccagtgttctgtctaggcccggattcaaggcgggctgcaacacccgctctgcttccctaactgtactggaggcggttgtcatggctntatcctctatggttttctggaagtttaacatgacctccgagatggaagccatttgatcttttaaggccgatagatcggccttcatctgttcctgcacgccctcttcattatccatttttctggatcgagtgttatangggtgccttggtggtttcttaattatgatgaaattcctaaagaaataaacaacggtgagtatgccaccaaaacatgagtatgccaatggatgatcggaacacttggat

SEQ ID NO: 281957 - DNA, 282 bp, Glycine max
  unsure (1)..(282): unsure at all n locations
tgccttgttccctttggtaatgtagtctctacttctagtgaccatttgttatccctatatatgtctgaatagttagctaataaaattaaaactctctagatggtggatcccattctntaatgttgncattttcctaacttgtgctcaaaacatcacaagtaaattagatcgttatcctcgaagaatgaggataaatgagtaattatgtagatctaataagaacgatgataattaattatgtagaattgctattgatgatatactcccttatgataatggata

SEQ ID NO: 281958 - DNA, 335 bp, Glycine max
  unsure (1)..(335): unsure at all n locations
agctttatcatcagaccacttncagggtgctggaactacttcacatggacttgatggggcctatgcaagttgaaagccttggaggaaagaggtatgcctatgttgttgtggatgatttctccagatttacctgngtcaactttatcagagagaaatcagacacctttgaagtattcaaagagttgagtctaagacttcaaagagaanaagactgtgtcatcaagagaattangagtgaccatggcagagagtntgaaaacagcaagtttactgaattctgcacatctgaaggcatcactcatgagttctctgcagccatcacaccacaacaaaat

SEQ ID NO: 281959 - DNA, 177 bp, Glycine max
  unsure (1)..(177): unsure at all n locations
caccaccatgaatgtgccttggataagaagcttgaagaggatgctntaatggangaaaagaaagagagaaagggggagcacganattgaaggaataaaagagggagagaagtggaactttgaagtatgtctcataagactttcattcattcaaagtacaacaagtgttacacatgct

SEQ ID NO: 281960 - DNA, 373 bp, Glycine max
  unsure (1)..(373): unsure at all n locations
aaagaaccaccttcaggtccaaaaaagtgaccaccttagggcctggcttcaaatccaaattgaccaccaaggttagggttcaaaccattgaactcaattgcaaaagcatttagggttttttgaactaaaatttttttttttattttgatttacgacggttttttatattaacttgcataattntataacacaaaacattctanggtggtttcaataacccgctanaatgtacgtcgtgaattccaatttcaatatataattacaaaattgcaccgtatcactttctanagcggttccctataacccgcgtagaaccgtgtcgtaaaatttttttttgagtagtgataattaatactttcacattagtattacg

SEQ ID NO: 281961 - DNA, 497 bp, Glycine max
  unsure (1)..(497): unsure at all n locations
aggggnaagcgggggatgagctatgagccccttgaattcgananngnacacggaatccnttaaaggcaccttgaaggctggcaagctggttatttacggtatttacctanngggaccccnagaagcgattcttaagaaatatctctcanattaaataataataaaaccacattgggggtcattcgcaagaaggaaattaagctcaaaaaaaccataaccaataagggataattacttaccattggaaatcaaccaaaaaacttttaggaattaaacaaaaagcttctattgtgtgggtttcacaactaccacctcttgagagaaagggctttaggccacaatggatacatgaagaattgagatgatgagacaaattgaaataggagaaatgaagttcttcatgttgatagggaattaagagaagtaagtgatcctttatctatccactacctctttttttattcccaccctctctaatgtttttggactaaatattn

SEQ ID NO: 281962 - DNA, 437 bp, Glycine max
  unsure (1)..(437): unsure at all n locations
agggaggggaagggagctgtgcgctganncctgaattctgangnncatgggatctntgagncacctgaggcggcagcgtgttgttagtgttgggcggtctcctcacggtcttgtcgggactgcgagctttggccactgcatttccttccgcgagcttctcttcataaccggcctgagtgggtttatagcctaacccatactcccacgatttcctttggcattataagctattatgccgctggagctttgccccaacccattcggagtcgaaccggttccaacataactcgaccattattatggtgctcggacaacagcttgcccaagaagaacacggagaaatgctccacctaaagacagaagcgggtcaaagaccctctgcggctccaaaagcataaggaggcagctaccaaaggttctcccgcacaaaacaaagc

SEQ ID NO: 281963 - DNA, 240 bp, Glycine max
ccgcacgtaaagagaaagaattccatccagaaaagaagaagaattccctcaagggaaatccacaaaaaaaaatctatcaaagggaaaaaaaagaagagaagaagtgaactctgtcagacaagaacaaaaattcaaaggtttgaccaatttacatcgatgcccatgcaaaaaaaagacctacctaatggctccttatacacaaatttcctggactttcgctctcacaacaaagaaccccaa

SEQ ID NO: 281964 - DNA, 384 bp, Glycine max
  unsure (1)..(384): unsure at all n locations
agcttttaatgtattgacaaaaaagagaaaacccggaacccagggggagcagnggagacagannnaagccgagcngaaggccaaanggacactntcaatcgacaaggacagtgtcgatgacactgtatacaaaaagtatgacataagataagagaaatgggcccaattttatcaaagccgcatagacccttcatgggaggtaactttgtgatcttcattgttttcaaatctaaatcgacttattattatccattgtaatgataagtctcaatggtgtttaatatttgcaggatgtgcgaaaaaagcacatgccatccagaaacaaaatattgtccctcacatgttgtctcgtgagagttatgaatatcttgaaaacaagatgat

SEQ ID NO: 281965 - DNA, 325 bp, Glycine max
  unsure (1)..(325): unsure at all n locations
aaattgagtggggagaaaattttcactaattatgattagtgaattttagctatggttcagcccaccaatccaagatcaattccaagattctccactaagtgtgcttaggtgtcatgaggcatgtaaagcatgaaggacatgcacaaagtgtgactatatgatgtggcaatggggtgtagcaagcaaatgatcacctccccctctaatatttaattggattggtcttctcccaattcaattaaatntattgctcaacacacacatcaaatatggacttaattaacgtgaaattacaaaactacccctaatacacaaactatagtct

SEQ ID NO: 281966 - DNA, 259 bp, Glycine max
  unsure (1)..(259): unsure at all n locations
ctttggaaaaaatcttcagaaacaagtcacttgttgaattgtgacttttggaaatgtattttttgaaatcagtcactggtaatcgattaccactaaagtgtaatcaatnacacttcaacagatgtgactattcattttgaatcttgaacataaaacggttagaaactctggtaatcgactacaagtattgtgtaatcgattaccaagtttagaacactgttaaactatttaaacataagttataactcttgaaattaaa

SEQ ID NO: 281967 - DNA, 415 bp, Glycine max
  unsure (1)..(415): unsure at all n locations
cgaatacgctcttaatccgtagcacnccgcnnatagntattctccnncnacncanagaggagagggggtttcatctttattgtannangangacgggatgtgggcgtttaataccacttcctcctctaatggacgcgagatgatgtgcccaagtggggtcgcatgatctcgttttgtatgcacggagacacgttcctctgttcacaagagttctttgtggcgaagcggaaagaacactttacattaaaaagcttcgattggaccattatgaaattacttcccttcacagggctcaagttgataggacacataagtgacctcttctgaagaaccggaaaaggggcctgacccatcaacaattagttttacacctcccatttttttatatgcggtgagcgggctttggttggtatcg

SEQ ID NO: 281968 - DNA, 455 bp, Glycine max
  unsure (1)..(455): unsure at all n locations
nggggaaagggagatgatggcttgaacttgacacaagacgccacggatccctgagtccctgagcaccaccgatgtaactttataccttggggaagcctaaaaggatcaaatattatataaaaacctatttcaaagttaacctttacctaaataggtaaaaaaaaatctttacctaatttggacctacggggaatttacacttgaaaccaaatactacacctgcgaaaattcccaattccacacttgaaccgttgaactttttcccactatcttgactggctctagcttttttcacttagtagaattaccggctaatcctcctttcatttaccttttttatttgccttnttggactgacctacactttctctcgtcctttctgttctatctcactttcacgtgccanattgtnttgggtgggtatnttttagaataattcataatttgattcttag

SEQ ID NO: 281969 - DNA, 494 bp, Glycine max
  unsure (1)..(494): unsure at all n locations
agggaacgggcgttttaggctagtgccatcgaanactgagancnttcgacnnncnnccggngtatctctaanagcccacctgcaggcatgcaaccttgtatataggaatggtngattggtgaaactgcctgctttaatggtggaccacaaaatggtacctgaagatatgtcacgggggtcaggaaaccttgaggacgtcaggtggggtgctatggcccaaaaccaaccttgaccaatcccgacccaacccgggcatagtcggtcagggagaccctgtgatgtatctaagcaggcgagctccttgcagtcaacagataaaaggaaaacagaccacaaagcanggatgcttgtggtggctggccaactgtgaattttgtgaatatgtgagatattgcctcttgtaatcgattaccaagggtggggaatcgattcaaggcttanaaatgagacaggaggctaaatggtctctggaatcgataccacgngtgtaacga

SEQ ID NO: 281970 - DNA, 241 bp, Glycine max
aaaatggttggcttctggttttatgtcaatacatcaaaatcttatgttttacttgtgtcatcatgtaatgcttcctctactatagattccatcaaacagaaaaaaaacactagtatatgagacctatatcatcaccacataaaccaaatttttggctgctggctttggcccattccccacatttgatcttctatgatcccatctacaaatcttctccccgccccccatgagaatgaattaa

SEQ ID NO: 281971 - DNA, 268 bp, Glycine max
tttgagcctatgtccccttctatgttggaagcttatacaagccttagtgaaaaccatgaatcaccttacccttaatgtggaaggggggtatgtcattggaaaaatgattctggcccgcttaagaatattttggcatgctgaagatataatatgcctaatcttgtttaattcaaatcgactgtaataaatgaaaaaaattattgtgcaatttgaattgattgtcaaaaaaaaagagtgactgaataatgagcttgtatgagattgtttg

SEQ ID NO: 281972 - DNA, 388 bp, Glycine max
  unsure (1)..(388): unsure at all n locations
gacgcgaanganacggcgagatgaggcactccatgacacgaggatcacanggagaaaagagaccatatgaattgctccagagcttccatttgtcaatatcgagcgtctaaatatataatgcgccttcatccgacctccgacatagaagttctgacccatttaaatgctcaagagcttccattggtcaatttcgagcgtcacgatatattatgcacctgaatccgacctgcgagtgacaacatatgacccatttgaattgcttcatgagcattcattcgttcaataattgagccgcaacgaatatatatgcaacctgaatcggacctgccagtgacaccttatgaccaatttgatttgctcagaacttccattgatcaatattcagccc

SEQ ID NO: 281973 - DNA, 232 bp, Glycine max
  unsure (1)..(232): unsure at all n locations
ataanatatcgagacgctcgaaattgaaaatcggaagctcttgagcaattcaaatggtcataacttctaactcgaaggtccgattgaggtgcataatatatcgagacgctcgaaattgaagaatggaagctcttgagcaattcaaatggttataacttttcactccgaggtccgatacacgtgcataatatatcgagacgctctaaattgaacaatggaagctcatgagcaa

SEQ ID NO: 281974 - DNA, 369 bp, Glycine max
  unsure (1)..(369): unsure at all n locations
agctttttcgtatgtgctccaaacanaagcgggcatggtggtttaataagaaacctaggggaaattactgttcatgctgaagagactgttgcttcaaagagtgcagttgagatggtcttgcgttgttctcacttggataacagggatgtcttttctaaaagtgtacgtattctatatcccatattaatgtcccctatttaattaaatacatttttttttgtttgtcattcgaaacatctctcatatattgttttctcgtangaccctcttctaagaatatcaagaatggttgagagtggacgttatattcctatatgcaagactgaagttatcgacgacaatttaaattccaaatggaatcatttgtct

SEQ ID NO: 281975 - DNA, 265 bp, Glycine max
  unsure (1)..(265): unsure at all n locations
cggatgcgatgaacggagagcttgctcgtagtgaaatgaagtttgcctgattttgatggcggtttgagacttgagagtgtacaatggaattaatggcaacccacttatggtagtaactttctgcacctcacaaattgctttctgctccaatgcgtaaaanaggtgaaagaaatcactaattttgtgggaaatttagttggatgaagttgagaaaagaaccaataactatctttgtttttattcatatttattagttaattgcaga

SEQ ID NO: 281976 - DNA, 429 bp, Glycine max
  unsure (1)..(429): unsure at all n locations
acaaacgttctcttgctcaagactttctattaaccganaaaaatgcacccatatacaatcaaggcagcttcgttacctagattatttacacgtacttccaaggtgtatttgttacttacatcacacacatctccttggctaaattcacatacatgcatactcaaagcattttggggtaccaaaaattgcacatgtgcacatcttggtatttctaatacctatacatacacaaacttcatgatgaatcttgactatctacacaataaggtgctacatttcatgctcttttcaagtttttgctacctaaggccgcatgcaaattcaagtatattttccttcgctggctaaaattgtattcaaattaaaaaggatacattttttttggtaatgtatcttctttacatagcatgccacatatttatgtatata

SEQ ID NO: 281977 - DNA, 496 bp, Glycine max
  unsure (1)..(496): unsure at all n locations
agtgggaggggnnnnnagtttgacgcctttgancccctgatgcactcgtanacctcagggcgaatacagctcggacccgggatcctctaagtcgactgcagcatttatctttccccaactcgccaggcgagctaggtgcttctttanaaacacccgccttctgaggaaattttctgggaaggcccaaattgggccttgggtgctattatgcaacccctattttttactanatacattcccccttgcttttttttgtgattcttttccgtatgttacaaactttacgactttctaacgatgcatgtttttttccgtatggtaccaaaccttacggactatgtgatcaacccctttttggttttcgggatgtcatggaactttaccgattgcgcacgaacacttccttttaatttcaccatgtcaccgaacttcacagattgtgctacaatgctttcttttgactttcggcatgtcacgaaacttcacgaattgcctt

SEQ ID NO: 281978 - DNA, 297 bp, Glycine max
ctgctggtcgggtcatggacatttgattatcacatcttgcactatatcattgtaagaattatgatgcctcgttcttctaatctagctcaagcctctgaggaggatttgattctgatgtgggatttcttgaccgatcgtcaaatcgactgggcccatttgatttgtaccgcatgcataaggcattgcggtctagtgcacctttaccctatcctcagttaatcactttatttctgcgtcatttcaatgtacctcttgcttcttagcctttcattcaagttaaatgatccttctctattg

SEQ ID NO: 281979 - DNA, 399 bp, Glycine max
  unsure (1)..(399): unsure at all n locations
agcttgtattagtatacttcaccttgctgcggtggcacttaacctggctctaatcctggctgcacttgacccaattggggtttttcagtcttaacctcttcctgaaccagggatttctgcttctccaatgattgaaacttctttggggtcttcttttccttccttgagacctcttgatagcttgtggctgattctgccgctcgtaacttaagcagcctcatctctttcctcagtgcagcattttccacctcaaatttccggacatcaacattggttcgttctacctgtgcacttgctttagacaggcattntccatctcagaaacttcttcatagtgttttcctctagagattgtttttctttnttaagacgttcaactcatctttctcttgtctcaat

SEQ ID NO: 281980 - DNA, 375 bp, Glycine max
  unsure (1)..(375): unsure at all n locations
tctcatcggagggagaaaataggttcctatgttaggttaacctttggctttctttttgctaatttcattaccatggtnggactatccataagtgtttccttggttaaagtttacctttctaataccaatttggaattctaactaaaaaacttcaggaacttcaactagtaatcaaaaaatggtatccatcctttgaacctgatggcaggttcatattggatgtaatggatctttatttttggggcnacaaaaggggaggccaattgggtcttggtccttgtgaggcccagatcatgcaggtggactaatatcccttccaagtaaaagagttaccttacatattgttctatatctgtggcgatttctcatagcatg

SEQ ID NO: 281981 - DNA, 287 bp, Glycine max
  unsure (1)..(287): unsure at all n locations
agcttgtaatctnattttataggtttccgcanatcgggtcaatagctcaaggtatgtactctgtctaatccagccaacttatagttgtatacactagataagaagtggagcgttcatatttcgacatttcggcgccctattgttatgcagtcaatcctatggattcattcattactgatgatcgcagaactgctgctctagccatattatctctcaatggaaggcatcttgtagtgtcgctctttacataaatgttacatagattgaattctgattctaattataat

SEQ ID NO: 281982 - DNA, 106 bp, Glycine max
  unsure (1)..(106): unsure at all n locations
attgctgcatccatacgctaataacacttattcagcgctaaaccaagcgtttatagcaccaaaactgtctttaaaattacgcccgcctgcactcatacagactgtn

SEQ ID NO: 281983 - DNA, 398 bp, Glycine max
  unsure (1)..(398): unsure at all n locations
agcttttactaagttcatcctaccatcctcagactgatggtcaaactgaacggaccattcattccctggaggaccttttgaggtcatgtgtcttaaagcanaaggggagagctttctttcattgatagagttcacttacaacaacagttntcactctaccattggcatggctccctatgaagctntgtatggtagaaggtgtangacacctctatgttggctaaagccctgagaagacctcaccttatgacttgaagtggtacaacaaaccaccgagaaggtcaagttgatccaagaaaggatgaagactgctcagagtangtagaaaagttatcaggataagaggangaaagacttggaattcgaggtggtgatcatgtattcttgagagtcactct

SEQ ID NO: 281984 - DNA, 251 bp, Glycine max
tatatatggccatatatatatatatatatatatatatatatatgtgcagggagaaagataccttggatatgcatgtatgtagcacacaaaatttcacacaatatatatatgtatgtttaggtagcaagataccttggatatgcatgtatatagcaaaaatatctcacaaaacatatatacgtatgtttaggtagcaagatatctgtgacacacatgtatatatcacaatacctcacacaaatatacgtatg

SEQ ID NO: 281985 - DNA, 512 bp, Glycine max
  unsure (1)..(512): unsure at all n locations
nnnnnnggcggagannnaagactgagngctagagannctngcannanctanggngaacngagcgnggcacccgaggatcctctagagtcagaccggcaggtttgtatgctctatatgnncactagaacgagagtcaccagtgatcgctctataatttagatcaaagaccatatttgtgctaaacaaaataatgcaaagctgtacctttagaatagtacaacactcacgttttccttgaaaatgcttttaacacaatcactttatcattacggagcatatcactacaagtagtaagagtcaccaagacaaggtaaaaggtatcacaattgatatttgcagtacctgcataacttcaactaatggtttcgaaaactttatatattcaataaatagacaaagataacttgggctattatacagatcctataaacagcctaagaatgtgaggatatattgtatttaattcactgtcacacaaaanaaaagctcaataatttgagcagaacgacaag

SEQ ID NO: 281986 - DNA, 355 bp, Glycine max
  unsure (1)..(355): unsure at all n locations
cacaggcgtttctatgggttattcttaaattaagactctgaagatatttgttaacgttcttctcctctttattttcctttatatctttttgcatccgaacaatgcanttaatagttttgaagatgggtctgcaggcaacctattagagtaaaaaagtgtgggtgtgaacattatgcaagcaaattatgtagttctcaatacgaaattcaatcactgtctttagtttcgtgagtagtgtaagttgtaaagaaccgtcaagtgtattggatggaagtcaaggtacgtattatatgcttggaataanatcatctcctacttanaagaatcattcatcaataactcttgaacattttga

SEQ ID NO: 281987 - DNA, 256 bp, Glycine max
  unsure (1)..(256): unsure at all n locations
gggataaaaggagtttggatttacaacatggtagaaataaagaaaattgcgatgatactagaagaatacagagaagatttgggtttaggatattcttttttcctcttatttcaactcataactagctatgttatgggcctcgntggttctggatttcacataggttatttcctgcacctacaagctacttcctgcatctcttttttggctttaaaatgaccattctgaaatgaaaattacattttggaatgattat

SEQ ID NO: 281988 - DNA, 376 bp, Glycine max
  unsure (1)..(376): unsure at all n locations
agctnattattttctctgaagcaaaaccaatagcgtanagaagaagaaagttcggtaaagaaaggagacgagtttgccaaaccttacatcttcacctctaagaagcacaccaaagcgatagacatcaacagtgttggaggagtcacaccgagcagctaggtcgactttgacccgaggaaagataaagaagatggaaggccagcaccgatcgaagagttatgtttattccaactcgaaaaaatcctcaccaactcaccgaatagggcagaaacttgacaaacatcttctgaaggagatcgaggaagtgttgaaacagaacactgattttnttgcttagaatgtcgctgacatgctcgacatagaacccaatttcata

SEQ ID NO: 281989 - DNA, 334 bp, Glycine max
  unsure (1)..(334): unsure at all n locations
tggccaattagagatcaatgtcaatattattgacaatgtatatcatcaacaatacaattattataactccgcanatgttgatctacaaataatgtctcaccagtcaccatgttttaccatttgtcattctgtttataatctcacatggtacactagtcatgatgtagggattatttctcctgaacacgatcctgcatctctacttttacagtttagttaccaactcgtttatctctttaaatcaaaatanattgcactaagtcaaaacactataaaaaaattgcaacatgaaatacagaaatacccgataaactcatgcatattgaagaacatg

SEQ ID NO: 281990 - DNA, 279 bp, Glycine max
  unsure (1)..(279): unsure at all n locations
acatgttgagaattacgtcatcttccgcgctctctttatctgtcatactgactntngagtctcgccgacggccgaatatacccgagtggttatccgtataaactttatgatgtctataagacgaatagcctgatagcacgcagagactaacgtcgtcttctgcgcccttcgtcgatcgcggacgacaagcccgttgacacgtggagatttacgttatcttccgcgctcacacgatctgtcatactgacttatgagtcgcgctgacgggcgaaaataccc

SEQ ID NO: 281991 - DNA, 403 bp, Glycine max
  unsure (1)..(403): unsure at all n locations
attgaacaagcggaagctctgcgtgtataatcnagtgtttttaaattntcacacagatgtccgatgcggggaaataatatatcgagacgcacgaaattgaacaacggaagctctcgagaaatttgaatggtcataacatttcactcggatgttcgatccggggacataatttatcgagacgctcgaaattgaacaaccgaagctctcgacacattagaatggtcgtaactnttcacgcgaatgttcgattctgggacataactcatctagacgctcgaaattgaacaacggaagctctcgagaaattcgaatggtcataagttttcacaccgatgttcgattcggggacataatatatcaagacgctcgaaatttgacaccggaagctttcgagaaaatcgat

SEQ ID NO: 281992 - DNA, 250 bp, Glycine max
  unsure (1)..(250): unsure at all n locations
ggttttaattaaaaaagggggcctattacccgggttaatggaaattaaaggaatggaggtgaatctatcatcatgctaaggtttcgacttgctttgataatagtgaaaacctcgtctagagctttctctctttataatatgttgncgctggtattccatacccgcacatattattatattgagtgatgatacctctagaaaacagccgtgtgagttatgaaattgtggggaaatagtattanggacccct

SEQ ID NO: 281993 - DNA, 378 bp, Glycine max
  unsure (1)..(378): unsure at all n locations
catnaaagggggcaaaacatatttcaaagagtgatcatttaacaaagaaataataacccaactgagtaaattctgcttacagcggcactttcctaccagttgagtgacaggaatgggtccttgtaaatttcattatatatcacttatcagatatagccactccacaaatgatccaacatataatacccanaagcatacagaacgaacatgataaagaagagcatgtgtaaatncatagnagattataggtagtgcataattcttatactattagttacaacanacttcattaatgactaagtactcagaactcttgagaaaaagaaaacaaatgttctagggacaatctaatcaatatatgacaatcagcattaacag

SEQ ID NO: 281994 - DNA, 469 bp, Glycine max
  unsure (1)..(469): unsure at all n locations
aggggnnnacggaggganaaaactgatccttacgagnnctaccgcactnctgagaangttcgccgaggatcctctgaagncaacctgaaggcttgcaacctttatttaatggtttgtggagacccactagaggaaccactgataaacctgtgaagtcaccaccgtgaggtaccataacctttttttccctaattttaatctcggacttaataatggaggatgaggtaatgggttctttaaacaataatgccatatgcatttcaatgtaattaacttcatgaccaatcttataaactgacataggtccataggtgaaaattatgcttaattagctttatttacttacgtgatgagcctgatatcaggagcaccaaattgaatgagatgaccattgatgatgagaaattttatgtacttgtntgacattaaagtgtattaccatcatttctcaataactatcgcaagttaa

SEQ ID NO: 281995 - DNA, 393 bp, Glycine max
  unsure (1)..(393): unsure at all n locations
taagcttatcaccatcggaagccatggataaaagcttgaaggtaggagaaaatgagtagagggagagggaaagaagggaatgaaatnttgagagagaaaagagggagaatgaggtctgaactttgaagtctaatttctcanaaataaaagttgcaaaatacacatacaaggtctctatttatagcataagtgtcatacaaaattagaaggaaatttgaatttctattcaaatttcacttgaatttgaatntgaatttatggagccaaatttggagccaaaatttcactaattatgattagagaatttcatctatggttcaacccactaatccaagatcaaatccaagattctccactaactgtgcttangtgtcatgaggcatgtaaagcatg

SEQ ID NO: 281996 - DNA, 216 bp, Glycine max
  unsure (1)..(216): unsure at all n locations
ttaaagcaaaaaccaaggttaggagttccaatacgatatttaaagattctcttatcaacaattaagtcaaattctcttggttnttttcttgaaacctatcacacatgcatacactaaacatgatattaggtctagacacaatgagatataggagtaatcctatcatagctctatattgggtaccttctttgattcctcatccattccaagatatgt

SEQ ID NO: 281997 - DNA, 467 bp, Glycine max
  unsure (1)..(467): unsure at all n locations
cgcttaacctggggctagtggcctnnganatcganagnnatcgaacnngccnccgggatccttagagtcgacctgcggcttgcaagctttantagtgaaaccnggngcggccatctcgcgagagtcctctcacgaggtggaggtggacccaggtcctccatatgaaaataataatggatgctcataatcagaatatccaaagtacccctcaataaaaggctcaaaatgctcaaaatgcacagaatgacctggatgcacactatctatgacaggttctatctacttcaagatcaaagggttgtaaacacctgtattgccctagacatgcactatatgcagcaatagagtggttctcaacaagcccctacaatggggtaaactacactatactcgaacatatcaaatgagcaaattttgtgaggacaccctaaatcatgatagatagccacaaatttcaacaaaattcn

SEQ ID NO: 281998 - DNA, 437 bp, Glycine max
  unsure (1)..(437): unsure at all n locations
cctccgnaatggccaaaccatganntcggaatagtaaatccncggngganggggagtcaagagttttatntttggttaaaactagggcatgaaggtccttatctcttggctaatcaaatcttaaaggtgattcgccatcagacttaatgtagctttcctcttcttcttcctcatcagacgaggtttatccagatcctccccaagtctcatgagtcatttcttatccttggacttgattacttcttcttgtcctttggatttttcagatatggacattcagatctgaagtgtccgatttctgctctctagcatatgatgaactcttctccttaaacacctgtaagaagaattcttcacatctttacatcttctgggatgaagagagttctcttctcctcatcttactttaattcatcttagatgatcttcctgcttan

SEQ ID NO: 281999 - DNA, 319 bp, Glycine max
  unsure (1)..(319): unsure at all n locations
agcttatggagcttactgtaggacacgacaagtctcaaacgacaatatggccctccttaaattccgatttgatttctctgcaatgcgagcagcaaaaccaggaggaagtgcagtccttctttctaccaatgaattctaaaacttgaacaatctgccatatagatntccaaagattcaatagagatcaatattcaattcagagaatgggtaagctaaacatgatcactatatataatatataataacgtccatttgaaatggtatattttggttgttgcataatatatgataaaccttggatgccattggtatacccttt

SEQ ID NO: 282000 - DNA, 268 bp, Glycine max
  unsure (1)..(268): unsure at all n locations
ttcttctttctgccttatcagagctagataaagcatcacttgaatgtgatctttagttaaccacaacatcaagaaccttcttttgcactaaagaagcttcatttgaggtatcagcctacttagatgcaggtttaagttgacatgttggaacaacctcatcatccttggttgcattgaacttactagagaatgatgctngcttatcaacttcatgcattgcaccagagataatgagatcaacaacgaccttattaatcttggcgatatc

SEQ ID NO: 282001 - DNA, 325 bp, Glycine max
  unsure (1)..(325): unsure at all n locations
agcttattgacatccgtgactngatcttaagcgaagatgttcgcaagagagatntangagaatcttccaatcatgtntccanttcagcatttgatactgaaggcangggaagtactacccaaaatgatgcaatcctaccccgcaagggcattggctagaagactccaagtagattgggctagagatccaaggaaaggccctagggttctcatgagccttanggtagatntcgagcccatgggctaagtatgagcccgcttatctttgtaatattagatanggtattccttcgtctagccctgtattttggctattctagtagtat

SEQ ID NO: 282002 - DNA, 323 bp, Glycine max
  unsure (1)..(323): unsure at all n locations
agcgcgggtctgagagacgaaagttatgtggtcgttatatacgaagatgatgtnccgagtacattggatntggtacgaccatgccctcctgatttccagctgggaaattggcgagtggaggaacgccctgacatttacgcagcgagcataatgtaaacctttacggttttaaaagctctatagtagggcctaggctttagagtttttccttttgttaaagctgtgtgtcttttgtctttgaatttataatacaaggacctttcttcatctgttcctacgtctctacccattctcattcatttgcatgtttacttctttttcta

SEQ ID NO: 282003 - DNA, 378 bp, Glycine max
cctatatccgatagccgatgggtgagtcccgtccaggtagtccccaagaagactggcctcacagtgatcagacatgagaatgaggagctgattcctactgcggtgcagaacagttggagagtctgcattgactataggaggcctgaccagagcaccaaaaatgaccattttcccctgccatccattgaccagatgcttgaacgcctggcaggtaaatcccactactatttacatgatgggttttctagttatatgcaaattactattgctgctgacgatcatgaaaagaccacattcacctgccccttcggcactcatgcttataggaggatgcctctcggcctgtgcaatgccctggtacattccagcggtgcatgg

SEQ ID NO: 282004 - DNA, 285 bp, Glycine max
atccaatatcatgctcaatatgagctgccctgacatactctatatgcatgggaccatccaagaaaacctaacgtgtccacaacactttacttagaaactagcataagtgtgagtaccctgtctgcacatgcactcccccgtcccctcacgagatacctgatctaaggagttctaacaatgaatgccctaaacatattctctatgagaaatacagtcttatgacaagtatactattctgtattgaatataaacatgcacataaatgcctgatgtgatataaagatc

SEQ ID NO: 282005 - DNA, 504 bp, Glycine max
  unsure (1)..(504): unsure at all n locations
agggggacgggngnnnnnggtttagtcctaactgannccttgatncttacngnananctnccggnnatttgnaanggccccccggngatcctntanaggcgacttgcaggcntgctttctttactaatngngaatatgngagagaggaaatgtgcanacggtgaaggaagaggaagtaaggacactaccaatcaccaatttaaagggctccacaagagcccaaaaggtgcgaagataaatataaataaacgatatatatatatatatatatatatatatatatatatatatatatatatatatatatatatatataaaatttctctaactatgttttttcatatacatcatgccacttatcatatattcactcccatctatgctatntctctcaataggcattggatagaatttagtatccaccaaactttccctatttttgtataaaaaacacacgggcatattacagtgttttatattgtacagttctcaagagaaagcaac

SEQ ID NO: 282006 - DNA, 376 bp, Glycine max
  unsure (1)..(376): unsure at all n locations
atgctcggaatgtaatatgaaatgagatgccggagaaacaccctattctattaaccatgctttaggtccctgttcaatattttgttttaatgaacgggttatgacccaacacggaggctcgggggccctacacatgaaacttaaaatgtagtgtgaagtttcacgcttnncccttttttgttttgttttgtcgaggacaacgcgaggatgnagcaacatgaaaacaaatggtatgcaattttgcagatcaaaaagtttgttgaacgcatatgcatgatgatgccatgactcatggcaaatgtgaggctggaatatgataaccgacaaatgcaggatatgtccattatgatgttatgaagagatgcctatgccatgn

SEQ ID NO: 282007 - DNA, 188 bp, Glycine max
tgaggtccttcaatggtgattttcaaccatggatatgtagtggaaaataaaggagaagaggtgagaggaggcgccatccacttgggaataagccatggaaggaggagcttcaccaccaagagagtgccttgataagaagcttaaagagaaaacttcaatggaggacaagaatgagagacagagagaga

SEQ ID NO: 282008 - DNA, 399 bp, Glycine max
  unsure (1)..(399): unsure at all n locations
ttagcttatctcatgtcagacaccctaatatcagcagttgcaaacaatcacagtttacttggtgccaacttaaagtggaattaaacaaggaatatacttaaagtgcataaaaaagttaaataatgctcaaaataggcaatcctagcttaaatcttaccctttccttgatgtcacccaaagttggcaagtacagcttatagaattcctctctgaatgcaaccacaaacctaaataaagtttagaaaccagctagaataagacaattagaatctgtntgattttgaataaatttaagggacaacangatacatctactatattatagtatcttcacttttaaaggactaaagacgaattattgaccataattgatatattatcatttgtatatcactaact

SEQ ID NO: 282009 - DNA, 281 bp, Glycine max
  unsure (1)..(281): unsure at all n locations
aaacaccgccctgtgaatcatattgttgcaaaaaatcagcaacaactcttgtagcanaaatcccgaaaaggtatttatttgtaaaaaaatgaaaaagaacagaagagaaagagaaagaaatcagcaccaactcttgtagaacaaatggcagaagataatttaaaaaaaatgagaaagaagagagtagtaaccttaagttggcatcgacggaggagcccccgaagacgatcaccgtagaaatcttgatttttgatatcgaaaacattcagatgacaaaaaat

SEQ ID NO: 282010 - DNA, 235 bp, Glycine max
aaacggaaaaattaagagagaaaaattacaaattcctatataatttaaccctcaaaatatactcctaattagaagttatcagggggtgcatcttgattttgttggaccctaaataagagtctaggaagctcaacaactggaagccaaatgcgttgtccataggcttgtcgatgctatgcagaggatacgtatctttgggacacactttgttaaggatgatgtagtcagtgcaaat

SEQ ID NO: 282011 - DNA, 309 bp, Glycine max
  unsure (1)..(309): unsure at all n locations
gtttagaaccaatatagttcattagaccatattaccacagaccttataatagtttaccctttgacaaagggattatggcccaaaacatttatagaacatgttaaaagtatgagcattattggtattgatgatcattaagtgtaatttatcttatgccatttagtgacactctgagctcatttatgatatggttctgagtacttgttctctatgtttgcatgcatatntgtattagaataatgttaataggttttggattgaataaagacattatactgaccaattatgtactcctaactaatgggcata

SEQ ID NO: 282012 - DNA, 259 bp, Glycine max
atggggcctatgcaggttgaaagccttggaagaaagaggtctgcctatgctgtagtggatcatatatccagatttacctgcgttatctctatcatagagagatcagaaacctttgtagtgttcacagagttgagtctatgacttcaaagagaaaaagactgtgtgatcaagagaatcatgagtgaccatggcagagagtttgaaacaacaggttcactgaattctgcacatctgaaagcatcactcatgagttctctgc

SEQ ID NO: 282013 - DNA, 307 bp, Glycine max
  unsure (1)..(307): unsure at all n locations
gaaattattgaaaaaatttggttccgtgaagaaaatccaagccgaggcacttccgtaacgtttccgtaacgtttccgtgggtgatttcgcgaaagtttntgaccgttcttcgacgttcttcattcgttcttcatcgntcttcggtcttcaactggtaagttccctagatcgaacttttcaattcattctatgcacccttagtggtcctcattgttnttacgtgctctcatttacatttcatttattttccgtacccccttttgacgtgcttaagccatttatttaaagtcatttctcgcttaatcta

SEQ ID NO: 282014 - DNA, 193 bp, Glycine max
  unsure (1)..(193): unsure at all n locations
actcctctttcagaaccatgctatgtgctcgtgactggtccctctcttcccttcgcagcttgagttcactattgctaccccatagagctccgcgaaatatattccggccatactcttccttgcgagcnctcttggtctcttgttcaacggctcttgcggtaattgcattctctttccgttacccggcacactc

SEQ ID NO: 282015 - DNA, 357 bp, Glycine max
  unsure (1)..(357): unsure at all n locations
caaatcccttgggataaaggtagtgttgccatgttttcaaagcccgtactaaagcatacaactccttatcataagttgaatagttaaaggtaggaccacttaacttttcactaaaataagcaattggatggccttcttgcatcaacacagccccaatcccaacatttgaagcatcacactcaatttcaaaagatttttgaaagtttggcaacgcaagtatgggggcattagttagctnttgcttaagaacattgaaagcttcttcttgtttctctccccatttgaaaccaacatttttcttgagcacttcattgagaggtgctgccaatgtgctaaaatccgtctataaaaacttgc

SEQ ID NO: 282016 - DNA, 186 bp, Glycine max
tatttatgacctctccagcaacaggtacaatcccggatggaggaatcatcctaaccttagatggttgaatccttcacaacagcagcagcaacaacaacatacttattttcaaaatgctgctggcccaagcataccatacgttctttcaccatccagcagcaacaggcccaaaaacagcaaacagtt

SEQ ID NO: 282017 - DNA, 272 bp, Glycine max
  unsure (1)..(272): unsure at all n locations
caaatatgcatgtgaattatgaagcatcaacaacactcaagccgaagatattgagcaagcaatcagtggggcaaaacacaccataagatgatgatgatggatggctcanattctcacaaaagtgaacatatcactttcaaattgagctgtcaaaactatcatgacatgttaacgaataacaatgatttcagatcacaaaatgtgaagagacttgtatttgtagaacgattacccatttcttaaacacatcctataatttaaagaaaaatatg

SEQ ID NO: 282018 - DNA, 349 bp, Glycine max
aggccctgatcaattctggcaattgcaccatttgtaagttttgcttcttttgatgcttgaacatcattccatttttccttgcaacattcatgaacagcatgcatcatctcgtgatgagaagtatacgctacgcagatcaaaagaactctctggttgttgcgagcagtaactctcattgccttttgcacagaacatgagaacattaaattcaaccttatggccataaccttcttacatgtatctcttctttgcatacctttgattcccatccatgatgaaagcaatatgacttggcataggaaccaccgataaaatgggcaacatgcatcttcttatataacaatataaa

SEQ ID NO: 282019 - DNA, 517 bp, Glycine max
  unsure (1)..(517): unsure at all n locations
acacgctcgttganacttttgtatangcgaaacacagaanacnacnccngcgcgccagtcngacgggaggacaggtgaaggagannctttttttatctgcaccggcnngacacaagcgggctaataatcatagaaccgatcagaatctggaaaaccctgcttcttcacgagtcaatgaaaattgctttatattttaattctgcgtttataaaacgaaggatcaacctacactattgagttgtgtatttctgaaacattctttttctagtttagtcatgagatagtccctaaaacatctcatatcttatataattatcactctattacccgcgtggccaggattcaccctctgaacccataccataacctggttcaatgaccttttgagtgtttaaaacattgggtgagtactctggttggccttcctcataatgaattgggtaatgttgtggcgttgcttatgagttacaaaccacaatttaaccattcaggcttttactcttggttgtccaatccg

SEQ ID NO: 282020 - DNA, 390 bp, Glycine max
agctttcattataataaactaagcaataaactacttcatattttccctgtgtgtgtggttgtcgtgcaatcccttctacaacttgccatgcaacattgccttgatcaaacccaagagcaagccctatggccaatctatcaataataacagaagcaacaaaaataattagattcatgataattttcttgtaacctaaatatgaaataaagaaataattaatgatataattgatcgggtaatcatgacttaattttttaattatcaagatttatcttattaaagtaattaataagagttccaaattgaaaataatagtagttattgaatactaccaatgaggattccaacatgcttgaacttatgaaattgtattattgagacacacactct

SEQ ID NO: 282021 - DNA, 478 bp, Glycine max
  unsure (1)..(478): unsure at all n locations
acataatactcagtagtccttgctacaagggaaaccttcgaaaaagaaaccanactgncttacatattcgataaaaaaacagaccaaatatttttttcaggggaaagaccacaaaccaggattggagttagctgcccctctaggtcaagaagacctttggcaaaagcagctgcagacatctgtttaatatgggtcatgaaaaaatggctcacatatgatgccaaaggacaaattaggcttataaacaatgcctagacatcaaacacttccaaaatgtataaaaatgtagcaaccaataatgaaaaccacttagccttcttatgattaaggtgagcacaactttaggccatacctgcacacgaccctcatcagagctgtaaatcttgagatcatgacggtatgtactatggaggcgaagaagccctgtaccttcttcttgcatttaaaccacacaaaaatttgcctttatacatactac

SEQ ID NO: 282022 - DNA, 361 bp, Glycine max
  unsure (1)..(361): unsure at all n locations
agctnttttaatcagaataatccaaaaatgtcaaagaattgtgtgttgaaaaagcataacaagactttctgtgattggtttaaagatacaatctttgcagatgagaatgcttcaaaaacattaagaaagctagcagatgggcctaaaagaaatgttataacttggcaaggatacgacataaacaaatattcattntacacaaaagcataagatgacaaaagtacaatgcagaatatccgggtcaccctaagggctgaatcttaacactttgcaagtgtgaatgacgcccattcctatgttgcttccattccttactttgggttcatcgaagaaactttggagctcaactatgtgaaattta

SEQ ID NO: 282023 - DNA, 329 bp, Glycine max
  unsure (1)..(329): unsure at all n locations
ngagacatatagattgaatcctagtgagctctaggacttagnttaatatctgtcaactggtcatgagaattgatgaacccagtgataatctccttggacaataatttctctcgaatgaaatgataatcaatctctatgtgtttagtcttttcatgaaagactggatatgaggcaatgtgaagagctgcctgattatcacagtataacttcatttgcaccacttcacaaaattccaactcttggagaaattgtttaatccacataagttcacatgtaaccatagccatagatcgatattcagcctctgcactagatcgagcaacaacagt

SEQ ID NO: 282024 - DNA, 460 bp, Glycine max
  unsure (1)..(460): unsure at all n locations
gagagaatgatgacttagtactaccggcgaantcagctcgggcccgggagactctatagacgacctgcgcgcgtgcgcgcgctatgtgaggtctcatcagagacgcgggcctcgtgcggcacgtgatacgtaccccatagtcctacaagcttgagattaggagatgtggaccggagaaacgctctgcatttgtcgatcaccacgaagtggcacctaaagacatgtcacatgaggcaagaaggcttgtggagcgggtgaggggcgctactgccacaaacggtcttgtacgatcccgacgcaacccgtgcattaccagaaactgataacgagtgtttgatatatccagtgagcatcctgcgaggcgcgggaccctagggaacatgacgacaaccccccgcagcttgttgtggctgggcaacttgtattctttggaacaacacgactgtcgcgcttaagaaaa

SEQ ID NO: 282025 - DNA, 501 bp, Glycine max
  unsure (1)..(501): unsure at all n locations
agcgattattatactttgtanancngccgaccaagaaactcagccgtggcggcataaaagcggggtccaaggagccccacattttttgtccacngncacnccacncggcggaacttgagaagccaaccgaaatataatccaaatgagctaaaacatttatgcaccgtcaactaaaactatataacaaatcaccttgctaatataatgcacagctcaaaacactaaccgcaattctttattaactcacccccatgatatatacataattataagagaatatgactcctcgttaatagagcatctctttatcactccttacacatgacgcaaccgcgttgtgactatactagtcagaagtcaaagcgacaccgaatgatgatgacgatctatatttgacgacaaatcattcgctccttcactctctcaaaggccggagtctaccaagggtccaactaaaacactcatgacatttgatcctggcaccaatactcaggccgtacg

SEQ ID NO: 282026 - DNA, 226 bp, Glycine max
ggtggatgaaaaacaaggagagaatcttcgtgatggatacggacaaatatctgtctgaaatttctgggctgagtgacgagagagaatacttctttttggttttaaataaagggtctcctctttttctattattttatataagctatgccacatgtccccatttgaatggaactataagggcccactttctctttgattgtgacccattctcatccgccaaaattga

SEQ ID NO: 282027 - DNA, 316 bp, Glycine max
tgccgctcccgagtacgatagccggcgttttaagagcgctgagcaccagcagcatttcagagccatcaagggatggtccttccaccgagagagacgcgtccagctcaaggacgacgagtacacagattctcgagttttacgccaatgcttggcctacagaggagggcgtacgggacctccagtcatgggtaaggggccagtggattccttttgatgcagacgccctcagtgtgacatccttgaaatttctacctgagatttttggagacgatgtatttggaattattatatataatatctgtaaggattattcagc

SEQ ID NO: 282028 - DNA, 207 bp, Glycine max
atgcagcagcttttttctatgcgggagcgcctctagttcaacacccgctcagcctaagcactccccacaggaagctcccaagttccaactccgaacgcgactctaccggccggtaattccaacacgacaaggaatttcccttcgaggccgttgccggaattcaccccgctcccaatgacatacgaagatcttctaccatccctcatc

SEQ ID NO: 282029 - DNA, 267 bp, Glycine max
cctggagtaatgggttattcaatcgaatttacctgtactcgtcctccttgggattcttggctacatttccaacatacactaaaattgtctgaaaggcccttctgactctggcatcctcaccctatacagacattttaacttgatctgatgaacatttgacggataaacgaagacccaacgattgtaattatcatctctatcagaaaagtaacgtcacaattctattaccactggacaggaaaataatatacgtgagctcttatactt

SEQ ID NO: 282030 - DNA, 288 bp, Glycine max
agcttgttgtgcaccatcgcccgaccgccacctagtaccacatgtgatgggtaccccataatcctacaagcttgagatgaggaagtgttgaagggtgaaacttcctgcttttattgttgaccacagagtggtacctggagatatgtcgcgggggtcaggagaccttggggacgtcaggtggggtgctattgcccaaaaccaagcttgaccaatcccgacccaacaccggcatagtcggtcagtgagaacctgtgatgtaccttagcaagcgagctcctggcagtcaac

SEQ ID NO: 282031 - DNA, 455 bp, Glycine max
  unsure (1)..(455): unsure at all n locations
tctntgaganaacttccttgagaagctagagcttatctactcacacccctctcataactaagctcacctccttgagaagcttccttaagaagattcctaaagaagctagagcttagctacacatacctctctaatagctaagctcacctccttgagatgagaagctagagcttagctacacaccccctataatagctaagctcacccccatgacaaanaacatgaaaataataaaaaaaaagtccttattacaaagacaactcanaatgccccgaaatacaaggctaaaaccctatactactagaatggccaaaatacaaggcctagacgaagganaaacctattctaatatttacaaagataagcgggctcatacttagcccatgggctcgagatctaccctaaggctcatgagaaccctanggcctntccttggatctctagcccaatctact

SEQ ID NO: 282032 - DNA, 235 bp, Glycine max
tatctaacgcttttaacctatgacttggtacaaacctccttgcccggtttgaatttgttcccatgccttgctaaagtggagacaacaagctggtgccaaatcaaaacttccgatatctcatggatggatgcatgaaggaatgcatataacacagatgcaatctaagaatgcgggggtccggggaattcgtccccttcttagacacaacgtctaggggtagcaaagtgccccaacg

SEQ ID NO: 282033 - DNA, 334 bp, Glycine max
  unsure (1)..(334): unsure at all n locations
cggttcccaaaaatctagtgcttcaaaatgggtagtcatccttgcagcccataggtcgtactcctcaccatcaaaaactggtggtggtattatgtgtgtngtgtctgcttccattatggtttctctcaactcacagatccctcaagatgatgactctgataccaatttgttgaatattagatcaaaaacagagaagagcacatatatntatgaaggatacatagttgttattcatttgctcttggttagagttaaatatacaaaacnaaaaatccctaggcatgactaaaacagtttctagtctgataaaaaacaatatcagaactcctacaaa

SEQ ID NO: 282034 - DNA, 170 bp, Glycine max
ggaaacctgtctgccactgcaaaatgaatcgccaacgcaacccttgccgccgccaggccgtcaccaatacttattataaaccttatcctaaattatgcgtactacgctattatatttatcaggctatcaccacccgttaatggcaccaaaatgcttaaaaaatacaccct

SEQ ID NO: 282035 - DNA, 306 bp, Glycine max
ctccttcttccatggctaattccctagtggatggtacctcccctcttctcttctcctttgccttccgttgcatctccatggtgaaaaatcaccgttgaaggacctcattgaaactcaaagatccatcctccatagaagctccacaagcaagcttccatcaagtggtatcagagcacaagagcttcaagtaggtgctccttaaacctccattaaatttttgctttaccttctctttcattggtgtttcttcatttttctccatgtatctcctcacatgtcttgtgctaaatgtttttaacatgattc

SEQ ID NO: 282036 - DNA, 392 bp, Glycine max
  unsure (1)..(392): unsure at all n locations
ttaattncttgcatggcttaacatgaaatatcaaatatattgattggcgtaataaagttaatttattgtatagcttaacatgacttcttatgctagatttgtgtgtattatttggaattattgtatttcctttatgtttttgtgtcaaggttaatttcttcaattgtctcatttttattaatcagagtcgtttccccctctttaggtgcacactacaatgggaagccaaatatctattcttatgagggagcaactgtaaacgatctaaactgtaagtactaactactaatcctttntgttgtagtgattntgatactagaatgggcttaacttgttaaagtgactctagcatgtaagatgaataaanaaatagaaattgctaggtgacattc

SEQ ID NO: 282037 - DNA, 317 bp, Glycine max
agtgctacacagctgggaatgacagaaagctcgccgttcaacattctctctctaactccgattccgatccccactctatcttcgatgacgagctcaaactcgtgcgtattcactctcgtcggttaatttaattcaatgtaatttggaaaataaataatgacttgattgcggttttctatgaatggaatgaatcactatgcttggtgatatatttaagtggagaatgcgtcgaggaagaaattcaagtcttacagggcgtggcatcatagaaaatgggtgctcaacaaggggcgttcgtccatagacaacgaaatgcg

SEQ ID NO: 282038 - DNA, 413 bp, Glycine max
  unsure (1)..(413): unsure at all n locations
tctataagcacggaaaagaggctagaaccaccctgttatcacataatagagctaatggaaaaagaaatatccttgacaattgttgcatttctcttgaacttctaaattgtcgtatgataaattgattcactctggattacagaagtttataggctcggctttcaaacttctaatctttcctctcatcacattgatatcatctttacagacctgagtgtgtgtaaacgtnttttagatggatattntatgggctgaatgacagtgaagtatgaatcttttactgtatgtgctatactgcttttaaagcatggttttgaattatggtggagatatatttcattgaatcacatctgactacgtacctcattgaatcaactagatgtgtctacactgaaatcctcataccttttcaa

SEQ ID NO: 282039 - DNA, 613 bp, Glycine max
  unsure (1)..(613): unsure at all n locations
ngggcttatatggggnaaaggtttcanagnnnactnntgctganagcncatannnanaacataccagcangctgggcantngcgctcgtcatggtcagaccttctatgatagagtcgcngacggngtacncagtagcnntcgacatntcggccccgtattagtcgaggtcggtngtgnaccanatntcacatggagccccgtctgttcttacanacccgtcgtagacctggnnngaaaacctctggcgattacgccaaccttaactcgcgcttagcagtcacgatcccccttttcgccaagctgagcgtaagtagcgatagaggggcccgcaccgagtcgcccttcccaacagttgcgcagcctgaatggcgaatggcgcctgatgcggtattttctccttacgcatctgtgcggtatttcacaccgcatatggtgcactctcagtacaatctgctctgatgccgcatangtaagccagccccgacacccagccacacccgctgacgcgaacctcttgtggcggaaacaatatatacttagtaaataagacggatcggaacgtctatacgtagggtccccgcctcccgtctgctatgcacggtgagaaaaccg

SEQ ID NO: 282040 - DNA, 341 bp, Glycine max
  unsure (1)..(341): unsure at all n locations
agctntatctttacactaagtaagttgccaactcaattgcgtgcaagtcaacctttaccttcatctgttttgcaggttacaggctgcacactttgtggtggagctcatgggtcagcttgtgtattcccactgacgaaacatttcatgaagttaattacatgggaaaccagcctagacaaaattttaatgcacgtggattttctggatttcaacatggccaatcttaccagcaatagaatcaatggagaactcaccctggtaatcaattcaataaagaccacggtgggtacctgacatgccacagcaacaatggcctaacttatctgagagaacaacaaaac

SEQ ID NO: 282041 - DNA, 483 bp, Glycine max
  unsure (1)..(483): unsure at all n locations
gacactataatactcaagcttaaattgaattaaacgttaataaatgctggaatcttattctcatatatgtgtaatcgattacacagtgcaaattttgaattcaaattttaatagctgttgcaaatcagttttggccactggtaatcaattacatcctctggtaatcgattaccagagattaaatttcttgtaaaagactttttaacttaaatttcttggccaaaccttttgctacttcaattggaattcccttcctatttaatataccctttctaagactctaaagactgtcttgatcattcatcttgaataaagctttgagacgcatgtgatcctttggcatcatcaaaacatcagcttgatcctttgtctacacatgtgatcctttggcatcatcaaaacatcagcttgatcctttgtctacaatctcccnctttntgatgatgacaatcctganatcaagacaagctatatgcaagatga

SEQ ID NO: 282042 - DNA, 336 bp, Glycine max
agctttatttctttaatatagaacttatatcctaatgtcacattctatcagagtgttgtgttcctgtgtcctctagcatgaggttgttcatagtcatccacctattcatctgctcccccgaacacatagttcaagatcatcacaggatccaaacacaaacaacacgcaaggagtgagttatcacattcctaacctatgaagagaaacaagataacatgtacgtgtaaatatcatataaaaagatacaacttactttagcatcactcacgttatttcaccactttgtcgcataatattaccctcgcacaccacacatttcatttattttcacaacat

SEQ ID NO: 282043 - DNA, 396 bp, Glycine max
gacacataatactcagcttatataacctttaccatgatagagataactggtggattgttgcatcaattgtagtggttctctgcctattatgggttggcatagaggatgtaagctttcatagcaaagggaccacactcaatcttgcaactcttcctgttgctgttggtctttatggttactgctactttggacatgctgtgttcccaaacatttatacatccatgacaaatccaaaccaatttccctggaatcctcttagcatggtaaatgacttttagctataatctaactcagcttccactagtccactcactaaatattaaatctcctcaagtcctgtacaaattgcaatttacaaatatagtcaaaagatataattatttggcttacgtcaac

SEQ ID NO: 282044 - DNA, 211 bp, Glycine max
  unsure (1)..(211): unsure at all n locations
gctgtgcttgtcaaataatngngaaagacaagtgaaagacccgataaatacctacaaaatagttcacgggaaggtctcacaactattctcctcttgcgatgaatgatacaagtagaaatccttaataaagaggtgtacatcatagagatattccaagtctaacatccaccaactttgaaacaaaactcaagtgagatgaaaaaatattatg

SEQ ID NO: 282045 - DNA, 325 bp, Glycine max
tgccagtcactgaggaggcgtgtggaaatcaaatgactgaactacacgagtccaagttaaaggaggcaaatggactagaacatttgatggtaaagccttaaaggctttagatggagtgtgctcatagtcaaaatgcgttcagatggatgcttcaatagatatggtttcctttaccactcgttcagtgaataagactttagagaacggagaaagcggtgtatgattaccgaggatgaaggacagagggaaacactatgcatccatcaatgggtcccttgtagttttccttctgaacctatcaaggtgttataaacatggaggtgga

SEQ ID NO: 282046 - DNA, 331 bp, Glycine max
aataatatttttattcctaaatactagaaacatagactctttcaaatatattaattagacatttatagaagaaacaaatagatgcattttttaaaatgattttccataattataaatgtacacttacacattacagatatcttattattatctttaattcctgtgtagcgcactttgtactatcacattatattacctattatacatacacttctctttcttttttctgtttgggatcctaagtgtgaactaagatgacatgtagtatttttcagtatttctgtcataattgtaagtggaccgaatttttctacatggatttaaatacact

SEQ ID NO: 282047 - DNA, 290 bp, Glycine max
cacgaagataagtgcgatgtatatatttttttaattcttaatatatctattacttactaccagtattttttttttctaagaaaaaaaaaacttaagatatccacaggccatgtacatcgtgtcacaataggatgcttcatgggtatcattcaatttcatctaattatattgggtgagattataagtattcggattaatttccacacaaccgaattaagattcgattataattaagttggtaacgagtcttatgtctaatattgtacctaatctaatccgtatcatataat

SEQ ID NO: 282048 - DNA, 260 bp, Glycine max
  unsure (1)..(260): unsure at all n locations
gctttatataagccnactccctttccaaatctgattcaggcttaaataggtggctttttgttcgtgctcgtacacttagcgcaattctgaaccgcttagtgcgcattaatgaatnttggcttagcgcggattttgttgctcatcggatggactgaagtggtgcacttaactggaagacccttcgctcaatgaacatggacaaatcatgcttcttccagattcttactaaaacttagccgacgaaacatgcgctcaacgga

SEQ ID NO: 282049 - DNA, 303 bp, Glycine max
  unsure (1)..(303): unsure at all n locations
tcatgatgatgaatcaagattgatgcaagtggtnttgattangattacnaagatgatgacaaaaagcccgagagaatgagttcaagattgagtcacgaacacttcaagaatcaagagaaatttgatttcaagtttgaagaatcaagaatcaagaataatcaagttgaagattcaagaatcaagaaaagactcgataaagatgactactaaaaagtttttcaaaacattgagtagcacatgattttttcacacaatcttttaccaaagactttgtactctctggtaatcgattaccagagtatt

SEQ ID NO: 282050 - DNA, 274 bp, Glycine max
  unsure (1)..(274): unsure at all n locations
agcttgcntttactatcgtaagtcattntcaactaactattagaattatatttcaatattttgtgaatggcatatacaactgtgtgttttctgtgcaggattcctttgaggagaaagcgacacagggatcctttgtcccccatggacgtcaggatgttctcaccgctgttattggatgtccagagcaccctgtacatgtncgtgctgctggagccagtgtcaccatcaagcaatactctggatctgctccacggatgtcccgcagctcttcctc

SEQ ID NO: 282051 - DNA, 413 bp, Glycine max
  unsure (1)..(413): unsure at all n locations
ntagttatgattaagacctcaatcgacaattagtcgcanattctacccaatgggttgaagtttgtggagatactatagggggcatcaaatgtcttaattatggtgattaccaatttaagggggaaaaaaatctaataacaatataatgccaaaagaaaaaatataaaaaaaataaaaaataacaaagaanagaaagtaaaaaaaaaaaagaaaggaaaagataaaaaggaaaaaataataaataaatgttaaaagaaaaaataatgtaaaaagtataaaaaaacatgtatttataatagaaaacatatgagctattagattagttgcacatatttgttttaatgttgaaagtatatttttaaaattgaaagtgggatatatnttttaaaattgaaagtaaaatgcctttttag

SEQ ID NO: 282052 - DNA, 331 bp, Glycine max
  unsure (1)..(331): unsure at all n locations
ctggtccgcaactagttgctctaactaagttcatttgcattatgggcaaaaaacttatttagttaaagatgtatcattaattaaccataaagatatgaaatagaagcgttgtaattaataatgaattntgcaatataattgaagatgaatattgaaaaagatgatcacatgtatgcatggacggattcaaggggatcgagcgtatacacagaccagtaaaaaaaaaaggcgtatacacacacgtatactttttattttgtttacatagacccccatatactatgttactaccacgtagtaatattggtgtattataatataacaatcatat

SEQ ID NO: 282053 - DNA, 343 bp, Glycine max
  unsure (1)..(343): unsure at all n locations
ttatcaaaccactgctgtttcacactttcacccccaaaaatatttgagtactttggcatgagtcaacatgcatctgaccttctctgtagcttgaggccgggcgtgaatatcatgcatttgagtaagagttttcgtataccagtttataactatcagcattttacttngaaaaattgtttattattggaatcaaatgatacgtattacgatcttctgtttttctgttatataaagataattcaatntgaaattgctttgaagcatctatttataaattctaaaatgtggactgatatagtgtcatttcaacattcttattcagccacattaacacttattattt

SEQ ID NO: 282054 - DNA, 346 bp, Glycine max
  unsure (1)..(346): unsure at all n locations
ctagagcggttcccttatgttatcaaacataaaaagggataaggtaatattgtagccgatgctctttctcggcgtcatgcattactttctatgcttgaaacanaattgattgggcttgaatgtttgaaaagcatgtatgaaaatgatgaaacttttggagaaattttttaaaatagtgaaaaatattcagaaaatggtgtctttatacatgaaggctttcttttcaaagaaaacaaattgtgtgtgcgtaaagtctactacaaatttgttgtttgtgaacacatgaagaagttaaaggggcattttgggtccaaagactctaaaacattaaaaacattttatggct

SEQ ID NO: 282055 - DNA, 225 bp, Glycine max
  unsure (1)..(225): unsure at all n locations
atattatgcacccgaatcggatatccttgtgaagagttatgactatatgaatnttccgagagtttccgatgtttaatttcgagcgtatcgatatattataagctcgaatcggacatccgtgtgaaaatntatgaccatttgaatttctcaagagcttccgttgtcaatatccagcttctcgatatgtgatttgcctgaatcggacatccgtgtgaaatgtttacc

SEQ ID NO: 282056 - DNA, 341 bp, Glycine max
  unsure (1)..(341): unsure at all n locations
taattaacaagtgggtggataatggccacccataccctttttagtagtatttttgcgtaattattgtatatctgctatacttttaaatnttgtttgtgctaatttgttgaataaattattttttagactagaagtatagtctttatacttgttgtatttgatctttgcttggttatgtgttattttgaaggaagtactttggagagatgatttgatgcgctatcattggagcctgangaatttgaaatctccgaagcactagctcgcttaatgactaaaattttaaacctggaccttatatttgtgctcgcttaacgagcaaccctgagagtctggttgtt

SEQ ID NO: 282057 - DNA, 331 bp, Glycine max
ctctcagccactaatgatagccgccgatgatcccattactgcttcccctaagctctttgtccttcttttgtaccaccccccatgccttgcggaccttctgaagtgtctccacgttggtcttattgaagccttatgaaatgacaggcgcgagcccatcctctagtggcgcccctctcatagggtagccaagttgtcttattgcaagaatgggattgtagctgatgcaacccctcgtcaccatcaagggaacatttggaaatcctccgcatgaaataagaactccgattcttccttccttccatcgagggaaccagttgacagatgctccttc

SEQ ID NO: 282058 - DNA, 369 bp, Glycine max
  unsure (1)..(369): unsure at all n locations
aaaaaagaaatgaaaaaaaggaaaataagagaaagaacaaaaatcaaacaaaaaaaaaaaagggggtgacctgaaacccanaanananngggganaaaaanaaggagaaganatttttgaaaaaaaaaaagggggggggaaagaaaaaggaaanaaagaaaaagaaaaaagaaaaggaagaaaaaaaaaaaaaaggaaaaaaaaagagggaaaagaaaaaagagagaaaaagaaagaaaaaaaaaagagaaaaagaaaagggaaaaaaaagagaggaaaaaaagaaaaagaagaaaaaagagaagaaaagagaaaagaaaaaggaggaagaagaggaaagaagaaagagaaaaaagaagagaaaaaaaa

SEQ ID NO: 282059 - DNA, 310 bp, Glycine max
  unsure (1)..(310): unsure at all n locations
caggcccggagggaattatgatgcttactgacggtccccataattccgaagagtttgaaggaaataaatgaaataatgggggagacgttatcagcacaagacgaggaggagattctagcacaatctgatgacttggaaatccacgnacatggattgccatgtttttctcaattttcgatctgttctactcaccccaatataaaaatcatattgaaactgttccaattgacctgttgcctaatcatagtatactatggaaaggacattcattattcctcaatttaacccctctttacatactgttcctctg

SEQ ID NO: 282060 - DNA, 387 bp, Glycine max
agcttgtaattattgaatcatcaaccatgctcgtcccagcagactacgcattctttgtagggcccatttcattctcgggcccatactgtaaacccagcatcgttttccaggtaacatatcaaacccaaagagagaaagtagcaggaataaacagagagagaaagagagaaaataacaggaaaaaaatgaaaagaaactaaataacatgatagcccacaagtgtgttcataagccaaatgtgatttggcatcaaaaaataacgtcaaccttttgtcattcaagtaagacagaacacatgtctgtcatttcccatgaatcatttacatttagttaaattttaaatatcaataaaatatttaagaaatattatagtttatttaataaata

SEQ ID NO: 282061 - DNA, 281 bp, Glycine max
  unsure (1)..(281): unsure at all n locations
ctcagctagatgtcatgcttggagtgagtagcacctgcctcnatactcttaaaccttcaccacaaccctgtgctccaacacctccacctactcaaactccaccaccaccgcataaaaaaattcaaaaaagaagaggaagtatttcaaacaatggatcaacataaataggagacaggaagggaaaaccaagtaaccaacttatgcctaaagaaaaaccttagtgagactatcaccatggtcctgataggggataagatatctcaaatggggggggggggggg

SEQ ID NO: 282062 - DNA, 207 bp, Glycine max
  unsure (1)..(207): unsure at all n locations
agcttgtagtangtctagacatganacatgncagaggggggtttggttcaaggataaaaatggatgccccacattatttccatgacacacatgctaaaatgatgatttggaaatnttatgcaaaactggtcatgcatgcacctatgtggacactcaagcgtcatatatttatggtcatgtgatgctagggctcaagattcatttcct

SEQ ID NO: 282063 - DNA, 367 bp, Glycine max
gacacataatactcagcttccttgagaagcttcttgagaagcgtgacttgaaagtttttatcttactacacacacccttctaataactaagctcacctccttgagaagcttccttgagaatattcctagagaagctagagcttagctacacaccccctataatagctgatcgaggccgtatctgaatcaaataaacattaaaaaaatgtagtatctaggaagtgatcctaagtcgtctcccaacgagcaatggtcaaccaaagttcataatagatagtgataaaacagtaacgaattgggggggttgtctgttttgtgtaattatacagcgagcaaatgttaattagaaaataacataatctaaaca

SEQ ID NO: 282064 - DNA, 212 bp, Glycine max
  unsure (1)..(212): unsure at all n locations
agcatttcttgtttctattncatgacccaggcgagctggatgcttgcctgtgcgagcttatgtctaataaaatccaaaaaaagacccttttgcccccttacttggtatctttttgtattcctgatcaagacactaagngattccttgctttgtaccggaattcgggtacaacatcgtaatttgactagcgagaatcaaaatatcaatgaatg

SEQ ID NO: 282065 - DNA, 303 bp, Glycine max
gtcctgctccaatgaataaatctttataagtaaaacatgtatgtttattctaactcaccccatcttggagcttgtcctctacagcagtggcaccaagaagaattaggttcttctcaatcttatctgatacttcctcaatcattatatcctgatcagcactgactacattcttggccctagagaatatactatcaaactccttgtattcttctgcatcaaattcacgataagccagtataaagggtctcagacccgcatcaccatactcatgcacatgccccatgggtttctcttccaactccc

SEQ ID NO: 282066 - DNA, 170 bp, Glycine max
agcttttttttatattatgcacatgaatcggacctgcgagtgacaagatatggccatttgaatttttcgagagcttccgctgctcaataacgagcgtctcgatatactatactcctgaatcggacctccgagtgaaaagttaagaccatttgaatatctcgagagcttcc

SEQ ID NO: 282067 - DNA, 241 bp, Glycine max
  unsure (1)..(241): unsure at all n locations
ggcgatcagaatngccatgccttggattatagggttgaaccaagctcatgcttttacaaaaaggttcatcaagtcaagttgaaatatggaagtaaccgtcttgcanaattggggcaaaagatgaatcgagtcacatcactgcttcatctactgccaaacatatttaggattgttgatgtccttgttactttcagtttcactttgacaaagatgtcatggaccatgttgaaaatctaaactg

SEQ ID NO: 282068 - DNA, 228 bp, Glycine max
agctttatctacatgggctatacgaaacattggataaatgttgcaaaaatatattaataatatgtattcataattttgcaatatttattctaatgctgttaaaagtttttaataacacttaataatttatattaagtgttagattaaaaaaaattactaaagatcacatgtattataatgaccacaactagcatacgtggaaactacggagaacaaagaaaatgttgc

SEQ ID NO: 282069 - DNA, 318 bp, Glycine max
  unsure (1)..(318): unsure at all n locations
tgcatttgagaagacacaacaagcactaggtgaacatgttcctatcctacaactaggagtngcttctttaccttgacttgtggaagatatttgtttctcatatataggatttaacaaccttcttgtcctgcatttcattagttgtagcaatggtgcttattgtttgaaagttaactatcaccttgaggacaaggtgcttttagatggcataggggatgataggaaaggaaccatggcccaataagatactactgtggacattaataaaaggcccanaaagaagatcactccaccaaagcatctagaatattatgtgtg

SEQ ID NO: 282070 - DNA, 319 bp, Glycine max
  unsure (1)..(319): unsure at all n locations
agcttcttantcgcaagttaatttttaagacttacggattaagttgatctgtaagtcttttacggatcaacttgatccacaagcttcttacgaataaagttgatccgtaaagagagaaagaagaaagaggtaatgttgccatttttaaagaagactgggtgcacctagctacactccacataataatgcagcaaccagcaatacaacagtgcactctgactcactataagtgatgcactcactgcactcctcgctggctcattgcgtattaaccagaagcatcaatggtcaccaccgagccggagcaccggccgcatga

SEQ ID NO: 282071 - DNA, 258 bp, Glycine max
  unsure (1)..(258): unsure at all n locations
tgcaactttntgttgtcaaaatagcttcctaatggtagggtggtgagagttacttgtcaaaccaaagcaaggtatgttattgcttgaatagcccttgtaacacaattatgtcatgtatccaattgctatggctgatcaaggagatctttatgaaagggatggaattgttttggataggagcaaaagggataaaagcagagtttcaaacccattaatgaaatgggcactactaactacaacttctgaggaataaatgca

SEQ ID NO: 282072 - DNA, 321 bp, Glycine max
  unsure (1)..(321): unsure at all n locations
tccttccattccaaggtggatggaggggtctggtggaactaaatggtcctaatcaatcacctataattcattaatctagatttgaaacttaacatgtaacttgtaattgtaagagctatatctccaaagtagtttcacacccgatgtggcgatgtccttatctcaagaagacacatgtccttatctcaagaagacacatcattctatattggaatttcataatttctatttaaatttctgctttaactgcataactctaatntatcatcactacttttcaattttctctatttctctacatatnntacttggtaatattca

SEQ ID NO: 282073 - DNA, 381 bp, Glycine max
  unsure (1)..(381): unsure at all n locations
caaggagntttaccattgcatttttatggcttattattntaatgacatcttanattagttttaaatttaaaattagacaaaaatatatgtgcaactatattgttataaattagtagtcatttttagtggacaaggatgagaatgagctgaacatatgagcacaaatttaaccctttctaaaaatggcagttgtccacttgtgtttggttaaaatgtaatttaatcaattntgtcattcagcatcatcttatctaagagaaatataatgatagaaaaaaaatcttatctcatagaaagaaaatattagaaaaaatacatttcactcttagactctctatcaatctaatgtagctccatgtagagcttgtaggccttggatct

SEQ ID NO: 282074 - DNA, 333 bp, Glycine max
ctataaatagggggagaagtgaagaagaaaagggttcagcctctaaggcacttctctctttctcgaaattgctgaggaaaattattttcgtgaagaaaatccaagccgaggcgcttccgtaacgtttctgtaacgtttccatgagtaattacgcgaagattctcgaccgttcttcaagattcatcgttcgttctgcgttttcttcagtcttcaacgggtaagtacctcaaaccaagcttttcaattcattctatgtacccgtggtggtccacattttgtttcatgtatttttattctcattttcatttactttttataccccccttttgacgt

SEQ ID NO: 282075 - DNA, 373 bp, Glycine max
  unsure (1)..(373): unsure at all n locations
gtatatgtaaatcaaccccctggatttgaaaactcagacaagactaatcatgattntagattaaaaaaggctntatatggctcanagcaatatagatactactcttttcataaagagaaaattacatgatattttattggttcaaatttatgttgatgatattatttttggatctactaatgaattattgtgcatggaattctctcatgacatgcaaagtgagtntgaaatgttaatgatgggagaacttaatttctttcttggattacaaattanacaaaccaagactggaattnntgtcaatcaatccaagtactgcanagagttaattcacatattcngaatggaaatgctancacatggctacccaatg

SEQ ID NO: 282076 - DNA, 237 bp, Glycine max
tggcttgcttgtgtattagttaattaggtagattaaatgggcctaatcaaggcccatccctttcttttgagtagtaaatgtatatattagtggaagttagttatttagtgagttagttacttcattttgtccaaaaacagatttagttacttgttgtgcaagttttaaaaaaattcttttatcttttttttccctctcaatcattcttcatttttcttcctcttttcgcttcttctc

SEQ ID NO: 282077 - DNA, 301 bp, Glycine max
  unsure (1)..(301): unsure at all n locations
cctaggatcttcttcatcaatggattcctttgcttcttggaagataaatggcngcggaatggagataggaagagagagaggagacgccacttcaaagagaagatgagtctagaagaagctcaccaccataggaggccatggataagagcttggaggaagaacgagatgaatgaggggagagggagagaagagcacgcaaatttgtgctctaaatgagcctctgaatctgaagtttaatatctcaatgatcaaagttgaaaaaaatgcacatacatgacctctattatagcctaagtgtcca

SEQ ID NO: 282078 - DNA, 198 bp, Glycine max
  unsure (1)..(198): unsure at all n locations
ctcctaaagcatgtcatcctctgccccattaggaccctatagctntgggagccaagtgatgccttgcgttctagacttcaaccatcggtgatagacgcctatgacaccattgctacttgccgcctactctatatcttttatttccactctattccacgcttgatggatcctctaaagtatcttcgcattagcttcatc

SEQ ID NO: 282079 - DNA, 301 bp, Glycine max
  unsure (1)..(301): unsure at all n locations
tggaatttttgattcgtgcccctgcaattcttgaagcagagctagaagttcaagtgttggctgattatcctataccttctagcagattgttgagttctgattcctctattaaagaccaaatggttagttaataacatagttgtctataggaagctttcagctttccttggtatgaatataagataaaaaaaaataagagtgctatgtgtgtgattttctaacttttgactaaattggaaatacgtgactgactcannatttagagtgtgatcatttctcaattctagttttaagttgctag

SEQ ID NO: 282080 - DNA, 132 bp, Glycine max
atgtctactatcatcgagataatctctttctctataatcggaggcgctacttgagctgccaagatctatccatctttgggcgtatcctttgaaagatccgtgccctcttttgcacatgttctgtagttgcat

SEQ ID NO: 282081 - DNA, 506 bp, Glycine max
  unsure (1)..(506): unsure at all n locations
aggtgatggggnnntnanncccctttgcacttccgagactccactaggantctncangcctctcacagaagggagacctaanttatgagaggggagagcgtttttttcttctcgctcctcaaggaagtnttctcaaagaggctcttcaaggaggttttctcacgaaagcttctcagggaagctacctactctataaatagaaacatgtgtaacacttgttgtaacttgttggaccttgtggcctcaataatcttaagagggagtggctcacaatatctaagaagcacaacaatcaatttaacaatgttctttaacatgcgcgacacaattgattgaacaccctaatcagattagggaagagagaatgcaaacactgtttatactgggttcggcacttcctggcctacatccagtcttctgaacccacttgagattacactttcttcgtaaaccattacaatctgaacccaccggacaccatccttgggtttatgctttaaaagaag

SEQ ID NO: 282082 - DNA, 213 bp, Glycine max
acttctattcaagctcatcttgggaggaagctccttctttcatggcttattccctagtggatggcgcctcctctcacctcttatcctttgtcttccgctgcatctccatggtggaaaaccaccattaaaggacctcattgaagctcaaagatccagcctccatagaagctccacaagcaagcttccatcaatgcacacacttgcatttatttg

SEQ ID NO: 282083 - DNA, 251 bp, Glycine max
  unsure (1)..(251): unsure at all n locations
tctagccaaatggactgaccttgaattaatgcctntgattgcctctttgagccttgtttccctttccttgttttgaatctcactacaagccttaagtgaaaaaccatgatatcaccatatccttaaggaattttggagctttggaattgttttgggaataagtgtggggggggtttttgtctcattggataacattttttgcaggctatacttcatgatgtattctgggccatacttgattgtcataccct

SEQ ID NO: 282084 - DNA, 307 bp, Glycine max
  unsure (1)..(307): unsure at all n locations
agctttaattttgaattaaaatgttcagaaactgctcgtaatcgattaccaaatatgtgtaatcgattacatagtgcaaattttgaattcaaattntaatagctgttgtaaatcagttttggtcactggtaatcgattacatcctctggtaatcaattaccagagagtaaatctcttgaataaagctctttaacttaaatttcttggacaagccttttgctactttaaataggaattcccttcctatttaatatacccttcctaagactctagaaactgtcttgatcatccatcctcgatatcttta

SEQ ID NO: 282085 - DNA, 411 bp, Glycine max
  unsure (1)..(411): unsure at all n locations
tagcgtaagctntcgcactaagcgtgtgtgtcatgggtcttttttcgctaagcgtgtgttgcacgctgagcgagaatgcgcgcaaggcacgtcttgcatgttaagcgggctttccaattctttcatttttttcttcaaggttttttcttccagtttttgcatcaatttttcctctaaagcacttgaaatctttttcttttaaatttttctaatcaaaaatagcaaagatgttaatttcttcattatttcattaaaaacaataataaagtaaaaaattacgcccacttattaatccaaattgactatcacattagcttatatttcgcaactatcanagggaaagagaattagcaaaaatggcaacgaaaatggcagttttctttacaggtattccaatttaatcttaataaa

SEQ ID NO: 282086 - DNA, 204 bp, Glycine max
  unsure (1)..(204): unsure at all n locations
agctttgattcctattanacaacaataactttgtactcgaatgtctgattgagtcccgtaacatatcgagacgctcgaaattgaatgttgaacgtttgagctaattcaaacgacaataacatttttctcggatgtctggctgagctccgtttcatatcgagacactcgaaattgaatgtggaacctcttaccttgattaaacga

SEQ ID NO: 282087 - DNA, 237 bp, Glycine max
tctacattcaatttcgagcgtatagatgtgtgacgggtcgtaatgagacatcccagcaaaaagttatggagcggttgtataggctgacatcttcaacaattaatatccagcgtctcgatatgttacggtactcaatcaaacatccgagtaaaaagttattgtcgtttgaattaactcaaagcttgaacattctatttcgagcgtctcgatatatgacgagcctcactcagacatccg

SEQ ID NO: 282088 - DNA, 388 bp, Glycine max
  unsure (1)..(388): unsure at all n locations
cttgttgtgattttcacnagnggcaaccaacgggaggcggaacctcggtatgaagaacagacaccccacgaagcctcaaacccgcttctcggtgtgtggatcaagcatatcaaggattgccttcaccttgtctcagatcacctctacctctttctggcttattataaaaccttacaacatttcccaacttgagcccagaagtgcacttttgcgaattctacccttattcgatacgtacacataacctctcttataagtttacgcaatgtcgattaagcgtttcctcctgttttattgaacctcgcgaattttcttaattacataacccttgcatctttttaggagtactgtgggaatactttcatctagaccgtcttgaagtgccccc

SEQ ID NO: 282089 - DNA, 103 bp, Glycine max
ccctttacccaagcccagcctcagcccaacaactcagacggtatgcccagactcatagcatttctcctctctacgagataacccacatgccaaacgccgtaac

SEQ ID NO: 282090 - DNA, 155 bp, Glycine max
agctcttgcgtaattaactaaatgtcaacatcaaaatgacctacatgtgataataggccaacatgatctcagaatcagggtaagggtaatccctaaattggctccattttaattacaatgtgacaatcaatccccttgtcttatttaagtggaat

SEQ ID NO: 282091 - DNA, 299 bp, Glycine max
  unsure (1)..(299): unsure at all n locations
tatcttgatgaggatgtgccatatgttcnttangactggactaatacattngctgcccaagtttcatggtcttgcaggtgaagatcctcataagcatcttaaggagttccatattgtctgttccaccatgaaaccccctgatgtccaggaagatcatatctttctaaaggcttttcctcattctctggagggagtggcgaaagattggttgtactaccttgctcccaagtccattactagctgggatgaccttaagagggtgttcttggagaaattcttccttgcatctangaccactt

SEQ ID NO: 282092 - DNA, 158 bp, Glycine max
agcttgttttctgattaagatcgcgactttggcggacggtggagatgggttctgggacacagctgctagctatttgctcttggctgcacttgacgtgcttcaaacactattgtggtagcgtagcgagtgtgaaacgacatgctactgtgcaaaggaga

SEQ ID NO: 282093 - DNA, 335 bp, Glycine max
  unsure (1)..(335): unsure at all n locations
taagtattctaaagatgtgcgtgacgcgagcaaagttctctttntcgtcgatctggttcaaaccagagacagtgttgttgaagatgataaaaagctcgagcagctactttatgaaaccatctttagggttcttaacaaaatacgtagagacatcgttgaagtgatataccttggtcggacacaacaatggactaaagtccttatgatcatcctctgatggctaatctgtatatttggaagtggatgcactcaatgagtcaaaccacatagcatgactccatgaagggtatgcatcattgttgcccaactccctcctaaatctatagttactaaac

SEQ ID NO: 282094 - DNA, 183 bp, Glycine max
  unsure (1)..(183): unsure at all n locations
tcacaaaacnaacaaagagggggagattgtaattcacatactccctctaaagcgacaaacccatagcagagcctatacctatgcttctctgcgacaaactatgcatgtgcaacgagtaatacagtcatacattgcgagctatgctatgaagggggtaccgcacttgagtggcggatcaatata

SEQ ID NO: 282095 - DNA, 352 bp, Glycine max
  unsure (1)..(352): unsure at all n locations
cttcgtcaagtaagtgacagcttgatattgattttttaggccacattggtgcaagttgctgccactgtacctcttaactgttcaagtcaacaagatggcttaagggtgtggttggataaacaacttaattaagtgcttattagataagtacttatcatgtaagcccttatgtataagctatntctataataaaagtagaaataggattaaactctctcaatataagttgttagttattttcatgaggtatcatggagattggagatcttatngataagctgaaaacaacttatggacaaattataagctatgtccataagctctcccaaacacttacaagttcttatgtgac

SEQ ID NO: 282096 - DNA, 244 bp, Glycine max
  unsure (1)..(244): unsure at all n locations
aaatgaagcaatgtatagaagtaaatataaagaaatgaanaacggacctatacttgttgggaatggttttgatcatgacagtagttctagtatctttgggaccagattctacaatggcaccctctttgattagaaacctagtttcttgtntcttcgcttgttttcccttccagtgcctacttctangtacttgttgttgttgttggtgctgctgctgctgcttggtggtggttcctactactac

SEQ ID NO: 282097 - DNA, 305 bp, Glycine max
tcgataatgaccaaccggtgggcaattaaaataaagagttttagctatagaaacttttttctaactttagaacttttcttttaactcctgtatgatgatgcatgatgcatatatgaaatgatatagactaagatgcaacacacaatacaacaatcaatacaaatgccactcaagagagttgggcatgtaaaagaaaaaactttttgtagctcttcttgaagcttcaaggctaagtcttcatgtcgctccccctatctctaatagtaaccgttggaaagaagccaacaactagaatgattgttgtc

SEQ ID NO: 282098 - DNA, 353 bp, Glycine max
  unsure (1)..(353): unsure at all n locations
acattggtatgggtggtgatcttggtggtggcatcttantacatttgatatctgtgttgcattgctcatcatcatagtttgtgtgaagaaaagtttctaagttagaaaaatttcttcagaggcaaacactctctgttttaatcgattacatcctcactgtgattgattacaacaagttgtctgaagtttgtagagttgagtctcatattggtttaatcgattaccgatatcttgtaatcgattactttgttgtttgagaccatgaatgatctattcacgagtctctgctttaatcaattaccaagtggattaatcgatcacttctctctcatttagatgtcagacgtgaacaa

SEQ ID NO: 282099 - DNA, 248 bp, Glycine max
cccggagggcaaaaacaccaccccccaaagctaaaacagaaaaaccacgaggcccaaaaaagcaaaccgcaggaccacacacagaccacgcacacaaaccaaaaaaaagacagcaacacgggccccaaggcgaaccacaccccaacgaaacccaaccgcgacccacccactaagcaccagaaaccgaccaaaaacaaccccacgccccaaagaacgggacaaacccgaacaccaacagacaccgcaac

SEQ ID NO: 282100 - DNA, 359 bp, Glycine max
agtatcgatgaggtatacttaacagaaaatacttataacattacaaaataaccataaattgggagagttggatacatatttatacaaggttttatacacaaaaataagtcattttcaccgactaacaactcacccaaatttacagttttgcttgtcctcaagcaaaaagagaacaactcacttgttctcaagtgacaatgacatacagtgactatgtacaaaggtgtatgctacacagttactgatggcatgataagagaatgcgagtaaatgccctcatcacttgtgtttaataaggtatgcagttatgcagagagaaaaatgaaatggttacttgacagatagatgaaagtatgcat

SEQ ID NO: 282101 - DNA, 107 bp, Glycine max
  unsure (1)..(107): unsure at all n locations
ctatgtagncaatacacatggggcgggtcccattagactttttcaccattaccacgtttgccaaccacttggtatactacacctctctaatgaaagcaacacttagt

SEQ ID NO: 282102 - DNA, 322 bp, Glycine max
cacaagatactcagcttatgtcatagctgctgagagtagaggcgttaacaatttctttctcccctgctttgacctagacaggaattagtttacagtaaggttcaaacataacttgatatttagattaatacgcacttgccatcaagataaggaaacatacactctagctaatatgtatattccttgtcaaagcattcatactgtgccattaatgaacaggttcctcctgtatgtcgcctttcttgagattatggatcaaacatatgaacccctctaataatctactctctatgatataagaggtttatgccatacccaaata

SEQ ID NO: 282103 - DNA, 323 bp, Glycine max
agctttatttgttgaatcaagttgattcaagtcgttgtgataatgacaaagatgatgacaaatagcccacagaatgatttcaagattgagtcaacaagttcaagatcaagtttcatgagaagaaatcaagaagattcaagaatcaagagaagtttgattttaagattcaagagaagatgaattcatgtttcaagagaagaaatcaagaagacttcacaagggaaatattgaatagaattttcaaaacccaacatagcacagttttggttttccaaagagtttttctcacaatgttctaagctacatgagtttttactctctcg

SEQ ID NO: 282104 - DNA, 331 bp, Glycine max
  unsure (1)..(331): unsure at all n locations
ccctctggaaatgattnctatacaaaagtagagtcgataatgctactaacacggagtgatgatcaatcgatcatgggcctagcacctattcgtaccagcccctaagcttggacaaagaaaatggtatcatgcaacaagtgtgaaagaatattacaagatgtttgcattacccttcgcctgcccctagtgcttatctcanattggtgtggtgttgaccatcactcaactcttcatccatcttccgatttctaggatcctggataacaagatgcaaatgcctgcatgattatgatcggatgttgaatgtgataattaaacaagcgttatcatg

SEQ ID NO: 282105 - DNA, 242 bp, Glycine max
aaaaaaaaaagggggaaaaaaaaaaaataaaagagagaaaaagaaaagaaaaaaagaaaaaagaaaaaaaaaagaagagaaaaaaaaaaaaagaaaaaaaagaaaaaaaaaagaaaaaagaaaaaaaaaaaggaaaaaataataagaagaaaaaaaaaaaaaaaaaagggaaagaaaaagaaaaaaagaaaataaaaaaaaaataaaaaaaaaaaaagaaaaaaaaaaaaaaaaagaaaaaa

SEQ ID NO: 282106 - DNA, 73 bp, Glycine max
cacttaccataacgatggccatagcacatgaacgcacactctctctaacccattctatcgggaaagaagctct

SEQ ID NO: 282107 - DNA, 184 bp, Glycine max
gtcattgtagtcaaaatcaagattctacttaggatcaaaaggttaaggaactataaattgtgtacttaatgacagctatcaggtcgattcgcgagatcctacttataagatatagtggtgcttaaagatattcatatgcatagtgaagagcattaatccgcgccaattatcttatgataactac

SEQ ID NO: 282108 - DNA, 147 bp, Glycine max
atcatcatcataggaacaacatctttaaaccgtcaacttcttcgcgagatccctcattgtagactaagctgcaaccctgctgaattgacgttgctaagcaactattcactgtccaatgcttaattctcctatccatgcacacaaatg

SEQ ID NO: 282109 - DNA, 319 bp, Glycine max
gctcgaaaagcgcgagagaacgagctgagttttctgcgtcttctagaaaacgcgatgaactcgctaagagagaatgctaagctaagcgagttcatcaatactcattgtatataagctgtatctgaagaactcgccaagcgcacttactgcgctaagcgagttcatcctttgaggataaacattcatcctctagctgaactacctatggctgagcaagggagaatcgctaagcctaagtaacttaaccaaatttcgtctcttaagccttgcgctaagccgactgtagctgagctagacgcatttcatcactggaaacttt

SEQ ID NO: 282110 - DNA, 83 bp, Glycine max
atgatgccgagtacaacaatgaagtcaatgtgaacgggagttcctagcataactgagggcatggatgaggatcataagactat

SEQ ID NO: 282111 - DNA, 332 bp, Glycine max
  unsure (1)..(332): unsure at all n locations
taccagaagcctctctcctccagatcgcgtatgctnttttctctctgatccactgcacaataactcgccgattaaacacatacacaacacagctatctcatgtgcctaggactcagaaaccagcttccaacaactctcaaactccccacaccggtgccaccccatcacacacccatcagaccctactccttctacccatctcccatcatcacaaacatcagcgtgcttaaaagaaacatctatatgacccatcagaatctccttcaaagcatgccgccccttaccatctgttcacccccaagccataatctgttcatcagcacatgcagaat

SEQ ID NO: 282112 - DNA, 456 bp, Glycine max
  unsure (1)..(456): unsure at all n locations
aggcttttgaccttttgtaccnacnggcgnaatgagctcgacccgggatcctctagagtcacctgccgcgtgcaatcttttgtantgaccagcagaaacaaacggccagcgggcagtggagccagacatatactggtcacttaacttttcacagaaacaccattcatggtaggtacgatcaaccaattcggacaaaggaagatgatgcacgaggcttaaacacatggccataccgaaaccatcttggacaagatccccaacgggtcgccagtgaagtgatactgacgcccttctgcttcacttgcccacatctgcccatgatatcagaaatgttcactatttttgagaccgagattacctacaccaagaatgagagacaaatccatgcatagctcttcccttctaaattataacaaattccaacgaagtctgctttactaccggattgttccttcc

SEQ ID NO: 282113 - DNA, 179 bp, Glycine max
gttgaattcaagaatcaaaaatcaagaatcaagtttcaagattcaagttccaagaatcaagatcaagattcaagaatcaagagaagactcaatccagataagtattaaaaagttttttgaaaaacttagtagcacatgaaattttctcaaaacatttttaccaaagagtttttactctc

SEQ ID NO: 282114 - DNA, 502 bp, Glycine max
  unsure (1)..(502): unsure at all n locations
cccttatctgtagctagtattcccggaccttgaaactcagcctggagtaacagcaggtagttcttttgatttaccattataaattactggaacattctgctatatctgtgttttggcaagcacacaatatattcactggggattaacaacactttaattcgatcaccatttgatatattatgtgaaacttgtgtttacccagcgcaccattaaaaacttcaaagccttccttttcacttttaataaccctttcctttgggggccgttaattaattaaaaatttcatgattttaatctaaataaatgaccctgattaaagatttttgttcaaantaatttaaatttagtattacaatacctgaaattaattctatgttctaaccaaacaaccaggaacaaagtgacanaccttgcactttgaagacctgtgttcgcggtttgtgtgcagatnttggtggagtnttgttggtttaactatctcatattactttacaatacaaag

SEQ ID NO: 282115 - DNA, 263 bp, Glycine max
tccaacacgacaaggaatttccctccgaggccgttgccggaattcaccccgctcccaatgacatacgaagatcttctaccatccctcatcgccaatcatttggccgcggtaactcccggaagggtcctcgaaccccctttcccgaagtggtatgaccctaatgcaacttgcaagtaccatgggggtgtccacgggcattccgtcgaaaaatgcttggccctcaagtacaaggtccaacatttaatggatgctggatggctgac

SEQ ID NO: 282116 - DNA, 383 bp, Glycine max
  unsure (1)..(383): unsure at all n locations
gccaaattttcctgtcctggccctcctgggaatccttgccaccatttccaccataaactaaaattgtttgaaaggcccttctgactctggcatcctcaccctatacagaatnntaaacttgatatgataaacatttgaagganaaaagtaaagccattgattgtaattattatctctatcagaaaagtaaggtagtaattctattaagtttggaaaggaaaatataatacattcattcttagacttcctgccattacttntagtgatgttctcatgtgttatgatttcagatgtactgatttataaagcttactcgaagaccatgcatcaagccaagagttaagttgagtgtnatcatgcatataagcctagatccatctaat

SEQ ID NO: 282117 - DNA, 62 bp, Glycine max
ctttttgcacatgttctgtagttgcatcctattcagaaccatatcaaaattgtactgatact

SEQ ID NO: 282118 - DNA, 374 bp, Glycine max
  unsure (1)..(374): unsure at all n locations
cttgggctgattgaggaaaaaaaaaacctttttggttttaaaataaaaagggttttcccttttttccattattttattcaagctctgccacatgtccctattcgattggagcaaaagggcccactttctctttttgactgtgacccatactcagtcacaaaagtgagaaaaatctgacctttgaaacgctaaaatcctgcctcggtttgcgtgtcatttctctgattccagtttctcgcgtntctctgcgtccgccggggccagttttcgaaagcaagcaatatatatatcaaaacgctcagaatgaaaccccgagtgtggtttagaggttgttttcgttaaattttaagtccacgcaacacgatgatttttac

SEQ ID NO: 282119 - DNA, 361 bp, Glycine max
  unsure (1)..(361): unsure at all n locations
caaagtaaacttagggatggagcaaacggttccccccatcataattcacagtcatcagtccctccttaatgagatccctcgattctgaaagttgagcaggcttgcccatgagtttctctctagacgacttatcaccaaaagcaccatctggtggtttcggtgccagactagcattcgctcctttccttctctctctaccatatcctattgatnttttttcttccaaaatatagtttctctagttttttcaatgaaataactcacaatctctccctcaaaaaagaaaagaaaggaaataactctaaatctaaaaaaaagaagcaatttgcggcatgtcattgttttatggacaagacctata

SEQ ID NO: 282120 - DNA, 354 bp, Glycine max
  unsure (1)..(354): unsure at all n locations
ccaatggaggtagttggcaatacaagttcagaagtgtcaccattcaatacttatggagcagatcgggaaacataccagattntgtgcaagcaaagtagaagcaaaatgagcatctnaaaatgttgaagatgaaaattaaatttaattgagggaaggattgttaggaaacaattcatatttttaatttcaaatctctaggatattgcttanatttaaaaaaagaatattgtcttatttctaggatgctctttagaattaaagatatattctgtaaattagagatntgttttctcttttaagattatgatgttagggttatatatagagattcttaagatgagaagaatcaccagt

SEQ ID NO: 282121 - DNA, 324 bp, Glycine max
  unsure (1)..(324): unsure at all n locations
cttgcttgttgcaaaacaagcaaacagcatctctaatncatcctgaaacaaaatcaacatttagattcaacaccaacattataatttccnaacactcattaatcccaatcctatttacattatcttgatttgggtaggatacgtcaccccaaagctagctaatgaggtgaggattgtcatttttttacagttctactttagccatatctaacaccctcccatgttaggattagcatctggacaaagagattgaggaatttttctgtattactgtaattccataagacaatacaaactatctccattttacataactcttacaca

SEQ ID NO: 282122 - DNA, 328 bp, Glycine max
  unsure (1)..(328): unsure at all n locations
ctcatcgcattatggttagtccctttnttctctctcctggaaggcattggactcaggttagtctgcatagaattctctcttacttttctattaattgtcaaaatgattctgacttgatgaagatagaaaatagtaaaaaaaaattaaactccactattatgcaggatattccttccttaagtgcagaggcagcaaaggaacatccagatgtgtcatacattgtaactgcaccccttggattacatgaactacttgtggtatgaattctcttaagcatgttntattcatattaagtatcctgagttgaatttgtttaaatactcactat

SEQ ID NO: 282123 - DNA, 142 bp, Glycine max
  unsure (1)..(142): unsure at all n locations
agcttgctcnatattacatngatgtnngnatnnatgggaggaggttgtatgccgtttttgttttaagagtagtgtcccactggtaaaactaactttccaaatttttgccttcgcaggagatggccccgaggaagcttgcctc

SEQ ID NO: 282124 - DNA, 457 bp, Glycine max
  unsure (1)..(457): unsure at all n locations
tagagaagaagcttcaatggaggaagagaatgagagagagtgataggatgggggaggcatgggaattgaaggagattaaagagagaagttgaactttgaagtgtgtctcacaagtttctcattcatcgaagttatgaaaagtgttacatatgtttctatttatagcttagcacatgggaagcttccttgagaagctaggaaggtaacttacttgggaagctagaggaagaaagcttccttgagaagctaaaggggggctactcacacccctccaacagctaagctcaccccatgccanaatatatgaaaatacaatgggaagcttccttgagaagcaaggaagaaagctttcttgagaagctagaatggggctactcacacccctacaatagctaagctcacccccatgccanaatacatganaatacataaaaagtccctactacagagactactc

SEQ ID NO: 282125 - DNA, 227 bp, Glycine max
agcttcccttatgtcgttgaagcctgactcggacgagtggactatgggagactcggcgcgttccgctgattcgccgcgtgctgctggcaaaaactacaaactacacggtgtaagttcttccactgccaagcgagcttcgtcgtcagccgtgtttacggcgagcatggtgtccggaattgaacctttggtgccgtttaaagatgttcctaatgctgagaagatgaacc

SEQ ID NO: 282126 - DNA, 418 bp, Glycine max
  unsure (1)..(418): unsure at all n locations
tgtagagctngagttgtagaactagaaggagtagtgataattacttagaacttgttaaatntagtagaacttggtggtttatcaagaactacacatactctcggtggttaagatgaaccagtataactttttgtgtctcacaagttttcatttttctttcgctttaaatcgacctacggttcaaatttgattctgtctttggaaacgttatctatcttatgaaatcgtgtctatcgcgtcaattgttttatgaaaatctgttatatactttttgtcacacttctcatcacacgataacgttgttttgttttaagaaggcatcaaaattgataacatcacgcttcaatcccttctcttgtgatatttctctttgtaaatagctaacacgatgcctttgaattggttgcctagcttcact

SEQ ID NO: 282127 - DNA, 352 bp, Glycine max
agcttcttcttcattttcctataaatagagggagaagggaagggataaaatgttcaaccctcctggtaattcaagatcacttgaaattagtgaaaaaaattgtttccgtgaagaaaatccaagccgaggcgcttccgtaacgtatgcgtgggtgatttcgcgaagattttcaaccgttcttcaacgttcttcattcgttcttcgatcttcaaccgataagtacccgaaaatcaacttttcaattcattctatgtacccttaatggtcctcatttggtttcacatgcctttactctcatttcaatattcgacccccctttagacgtgcttagtcatttatctaagtcattttc

SEQ ID NO: 282128 - DNA, 398 bp, Glycine max
  unsure (1)..(398): unsure at all n locations
tgcctatccaaggcattctctaggagccgaagctcctnattattggcttattccttagtggatggcgcctcctttctcctcttctcctttgtcttccgctgcatctccatggtggaaaatcaccattgaaggacctcattgaagctcaaagatccagcctccatagaagctccacaagcaagcttccatcacatcccttgtggatctttgcttgtaaaggattttacaaggttattggaaatctaaagaaccggtggttgcttggggactggatgtangcactggttgttgccgaaccagtataaacttgtgtttggcttcttcttccctacactctataattctcgctgtgtacttttaattccgctttacttaagtctaacgtattagttatgttc

SEQ ID NO: 282129 - DNA, 223 bp, Glycine max
  unsure (1)..(223): unsure at all n locations
agcttcttattttcagtcggngaagatgaatgcggggcgagcttcattcactcctctaatgacaatatcatcatttctggcactaaactgttgggagttggaagccatcttctcaattaagatcctggcttcagcaggggtcatgtctccaagggctccaccactggcagcatctatcatacttctctccatgttactgagtccttcataagaatattagaga

SEQ ID NO: 282130 - DNA, 314 bp, Glycine max
  unsure (1)..(314): unsure at all n locations
gcttcnattgtgctggatctttgagcttcaataaggtccttcaatggtgattttcaaccatggagatgcagaggatgataaaggagaagagttgagaggagacaccatccactatggaataagccatggaaggagaagcttcaccactaagagagtgccttgtataagaagcttcaatgaacgaaaagagtgagagagagtccggcacaaaattgaaggagaaaaagagagagataagttgaactttgaagtgtgtctcacaagtttcacattcatcaaagttacaacaagtgttacacgtgtttctatttata

SEQ ID NO: 282131 - DNA, 437 bp, Glycine max
tgtaggattatggagtacccatcacatgtggtactatgtgtcggtcgagcaatggtgcaagacaattctgcacatccacaaatcacgtataaacccaccatcccctgttgcccacctccaattgagctcacgtactcccacgtagcccttatcctcgttcctctcaacgccgggtccccatcaatcctctcaagctcccacaacatccaagaaattcaacatcccatcatcacaaactaaccaaaccaagcaaaacagggcataggcagatgactctgcccagaacacaaaccaaaaatcacagcttttcacatacaaatactccagtaacattgtcttcgttccaatctgctaaccggtggatcgactcgaaaagtttactggaaggctctagtacatgagtgtacattctgaccgttgggatctactagcaaacg

SEQ ID NO: 282132 - DNA, 326 bp, Glycine max
agctttagtcctgacccggtctgcacttgtaatgtgcgatgctcttgcccagtttccaccattatcggacaaagaaagcttgaagaccgagctatgcaatttctgagaggtctgaatgaacagtatacatacattcggtctcatgtgttacttatggatcctataccacccatatcaaagatcttctcatacgtggcgcaacaagaacggcaactgttatgtaactgctctcctaatctcaattttgaatctaaggaaatctccattattgctgcaaggtccgtttgtgagtattatggacgaatcggtcaccacaaaaatgtgtg

SEQ ID NO: 282133 - DNA, 228 bp, Glycine max
ccttgcttctacattccgctgatgaaactcatagtttcctagggcctgctgcaggacccatcgtaaaaaaatgatcaaaagagttactggtctcatgttttggggtagggttggttaggttttgactaaggttagagacatttatgtttgggttagggttgaggttctgtttggtttaagtagtgtgtgtggacgagtggcttaaggcattattcggtgtgttgtgtg

SEQ ID NO: 282134 - DNA, 315 bp, Glycine max
gtccatccattttcgataaacgccacttccttcgctgggtaaattggagtctccttgaatggtcaatgtgtgactatgtaaagggatatacttgggttaatcactaaaagggtgaaatttccatggagtaaagtttgtcgttggtgtttatgattagtgtacatggtgatgatgattgatggactgatgatgatgcttgatggttgaattatggtgatgatgatcaattgagtgataatgataatggcatatgatgattgaacccttatgtgatggttgatgaattaaggattattatgatatgctcttgtatat

SEQ ID NO: 282135 - DNA, 234 bp, Glycine max
  unsure (1)..(234): unsure at all n locations
agttagagcaaataatgaacttgcaagagaatggaaagcctcaagagatcatcccctcgacaacattattggtgatatatcaaaaggggtaacaagtagacattctcttaaagatntatgcaataatatggcttttgtatctataattgaacctgtcngaacctacccttcggcgggagggcgacgcgtgactcgcgggatgcgtgttccccgaaaggaatacgcgcagagtca

SEQ ID NO: 282136 - DNA, 463 bp, Glycine max
  unsure (1)..(463): unsure at all n locations
nnnttagatgangcttgtatnncagggactatagaagaagacggngagcttctatagagaaccggaggaatgaaagctcctaagtaaatacncnaannnanacaaanaggggagagtaacttaagtncgacgagctcgacatcgaatgtataccgaacaaaacctaaatccacaattttctttctatggaacaactgctgagtatcacatcacataaaactgctgccatgagtctattaactgcatcctttatcattatctgatattccggatgagcttgaaagtatacgatctaccgagaacgcttgaaatataaacaatgggccgataaattaaataatttaggacccaatttgaacaacaagtaacgggggagatgaaattgggccgatattcttcttggggggcaaatacgcaagatgtagaagaccaaatctcgaagtaggacctcaaccagctagac

SEQ ID NO: 282137 - DNA, 358 bp, Glycine max
  unsure (1)..(358): unsure at all n locations
ctattagtccttattcagccttatccttccttgaattaattcactttgaaccttaacatgattatgttttatcttgatcaaaatttatatggtttgtcatcatcaaaaaaggggagattattaagtntgaacggtccactatgtcaaaattggacaatccatccgcaccanatgtnttgatgataacaatgatataaattntttatggactaatagtatattcttaagtcaaacaacacttactttatatgagttcacattaaaaaaatttatcctatttctcatattagtaattgtccaaaggtcacaggaacttgtgtntattcatctttatccaacgtccaacatgttgttgtaa

SEQ ID NO: 282138 - DNA, 325 bp, Glycine max
ctgcttcaccacagcttggataaaaggtgagcgaagtatagcaccagttttcttatcgtgtttttttattatcttcactaaacctgcacttaaacatgcatcatcaatcaaaccccttctcaatccaagaagaataaataacacatgacctcatagttatcacaaatcggtatccaagaaaataaatgacacatgaactcatagtatcacaaatcgttatatatagtaagtttgtttacttttataaaaactacataaaaaagtgttaccaattctgatcatttgatagaacatagttaaaaaactttcacactgaaagtatatg

SEQ ID NO: 282139 - DNA, 367 bp, Glycine max
  unsure (1)..(367): unsure at all n locations
ctattcaacgactccgttccgttctctttcttcttcttcgaaaccctaataagcttctgcacttccttctgattccacttttggtaatataagcccctcctcttcttctcagatctgaaactacttgttttaactttttctttcttcgcattgaatgatttttacgtttcttaaacatgattgcacgactccttttccgaattccaatctacgctaaattgttaggtttttatgttctatnttatttgtttaatcgtgtactctagttggaaattgaaaatcacgaggttcaattgacggaaatcattctcctgaaatgcttttagatagatgtntagttatggacatgactagatcgttgagaagt

SEQ ID NO: 282140 - DNA, 200 bp, Glycine max
  unsure (1)..(200): unsure at all n locations
gggtgacaaataaaaaaaaacattcatttgaacttttgggagcatgctaaaggacttattcttatcattgattctcaacttcaaaaaactgacaagtgtgaaaagtagatatgggtgatttgtggaagaaatgtatcagtggtactgtatgtgcnatacaagcactgaaatgtgatcgaatgaacattgtttgacccctg

SEQ ID NO: 282141 - DNA, 401 bp, Glycine max
  unsure (1)..(401): unsure at all n locations
ctcaaccaaccaattcaaccttaccaggacattcatagtcgctgtttgaatacctcacccactcaagtgtagcacagaattatggcttttctctaatgaaacactcttgccttataccactctaaggctaacaatgtttttaggcacaattgaaggaaataaaattcagaatttaggagttcaagtaacaatccttcatacaatcaatatattaccttaaagagattntttttaaagttcttcaagcatgaaccattcagcccaattnttttttaattntgcttatacgaatntctgttttttttataacaaagagatcaaaaggcttaacttttgcaatggttcagcctataagaaaaaaagaacatgaacaagaatgtnatctaaatggaaaagaaaat

SEQ ID NO: 282142 - DNA, 347 bp, Glycine max
ttaaaacaaagagtttttgcctctaaagaaatttttctagcttataaacttttcttcacacacactataatgatacacaatgcaaaacagatatcaaatgtactaagatgcaacaaccaagataacaaccaatacaaatgtcactcaagggagttgggcatgtataagccaaaacttcttcataaatgcctaaaactctttaactactctatttctcccaccacatcatggtcactgcactccccatgtacatacataacatacattatcacaatgacgttttcaatgtcaacaacatctcatcttaattgtcttacccacatcaacatcatgtcatctcaatatca

SEQ ID NO: 282143 - DNA, 324 bp, Glycine max
  unsure (1)..(324): unsure at all n locations
tcaaacaaagctcacctcgtggagaggcttccttaggacgattcgtaaagaagctagagcttagctacacatacctctctaatagctaagctcacctccttgagatgagaagctagagcttagctacacacccnctataatagctaagctcacccccatgacaaaaaacatgaaaataaaaaaaaagtccttattacaaagacaactcanaatgccccgaaatacaagggctaaaccctatactactagaatggccaaaatacaagaccttgacgaaagaanaacctattctaatatttacaaagataggcgggctatacttag

SEQ ID NO: 282144 - DNA, 234 bp, Glycine max
  unsure (1)..(234): unsure at all n locations
agctttgctagctntcaacaaatttcttcacaaataactatcaaaaggcataaacctagtaaaactacccatcatatctcccaaaacccaatacccatgaacatttatgtgagaagaagtctacccaaacctgaaatctgaagtcccactatgtagaggtgcactntacgactccgaaaatggcttcttttcgcgatttggaacagaaatggtgagcaaaggttggagctttga

SEQ ID NO: 282145 - DNA, 318 bp, Glycine max
  unsure (1)..(318): unsure at all n locations
atctgacacataaaagccgaaggggaaatgacatagatcataaaacaactgcanataaacgtaaatgttctgaatgcataaatttaaatgtcctgctcctcctgtggctgatcttcattaagatccactgtggagctgctgatgaatcctatataagctgctcaagctccatgactggtgtggatcatcaggaataggtgcacgggctagacatggctttggaataatctttggagaagtttccttctctcgagccatatgtacacctgcatcataatcatagggcttaagaagagtcagctcattctcaccctctac

SEQ ID NO: 282146 - DNA, 327 bp, Glycine max
  unsure (1)..(327): unsure at all n locations
agcttgtgttttatacactacatcatccaaactgcagagaataactcaagttcttgaggcttgtcattgcatgtataccgtacaaaacctgaatccaaaatttccttcctaggtagcaactgctgagtatcactcacataagaactgctgccatgagtctttatctgcatcctttttctttatctgtttttcctgatgagcttaaaagtatccatctaaccaagaaccattgaaataataaacaatgggcagataaattaataaattaggatccaatatgaacagcagttaacggatgggatgatatngggctgatanttctctttg

SEQ ID NO: 282147 - DNA, 413 bp, Glycine max
  unsure (1)..(413): unsure at all n locations
gtacttcatcctctgcagtgttagatgagaagtnaaaaccatcaatntatcatanaaatgttttcaacaaaacaaattgacatacatacaacacaacaatgtaaaaatgattagtttttacaatatgctaattatgttaagtgaacttagtttgcacttatcattatttttatcttttgtctccatcatcagtgagaaaatacacagaacattaaataaattcacggtatttctatagttacaatgggagccaaagttgaatgcacaaggaccaaggagtcgagtatgactgtangggcagggaaattaactgnggtcaacggcccattcttgtttgggtccccgacgcatgtgttttggatgccaaccacttgtgtttgctttagttaaaagttaaggatacatttaatatg

SEQ ID NO: 282148 - DNA, 339 bp, Glycine max
  unsure (1)..(339): unsure at all n locations
agcttgtgttactcttaaagaaaaagagtcaaagncgcgcattgagatagagacatatgctactgaaaaagatacccttcttaagaactttcaggagttggaaaacaaactaaaagatcttcaaaaggatataaaggaacttaatgaactacatattcatcataaaagaaaaaagatgtgatctttggagagaatgcgcacaagcacacaaagattatgatgaactcaaagtgagtaaacatgattttttggtggaatgtgaagaactatcttttcttgaagagttatacaaacttcacatgtctacatggactcggacaatgaaacatctacttgatc

SEQ ID NO: 282149 - DNA, 406 bp, Glycine max
  unsure (1)..(406): unsure at all n locations
tgaaggtgtgtagtccaccatctggtgatagnagaatattggattgtgtctactatcattatcattgggtctccgtcattgaagtgccacttgagctgccaggtctctccacctttgggcgtattctttgaaagatctgtgcccctttttgcacatgttatgttgttgcatcctatccggaaccatatcaaaattgtactgatactgcctaatgaaggcaaccattatgtccttccaagagtggactcgagaaggttcgaggttagtgtaccaggtaacagctaccccagtaagattatcttggaaggaatgtatcagcaggtcctcatctgttacgcatgcccgcatcttccgataatacatccttagatggttctttgggcaagtagtccccttatacttgaca

SEQ ID NO: 282150 - DNA, 353 bp, Glycine max
  unsure (1)..(353): unsure at all n locations
agcttgatttcttagcataatcactngcatcgcacatggactcaaattcttgcccctatctggtgttgtaattcctggtgcaaacactaattgtgttttcaaatcattaaatgctctcatacattcttcattgaacacaaaagcaacatctttattcaacaaattgctcaacagtttggctactttggagaaatcttttatgaatcgcctagtgaaccctgcatgtgctaagaaacttcttattcccttgacattcangggaggaggtagtatgtcaattacattgtacacctctttccctcttactgacattttatgccccaacactattcgcttctgaaccatgaaatgac

SEQ ID NO: 282151 - DNA, 386 bp, Glycine max
  unsure (1)..(386): unsure at all n locations
tgcctctgaagaaaatggtcgtagcgacattaaaaaatgtatttatgcacatactnctncatggggagaaaccactctccatcactagtgtgttaaacactactatatgaagccacttccttttatgtctgagcaggtctgtgtaaaagagctcttcttttgatggtgattgaggaatcttagaacttagcttcatttattcttcataagattcaaaaattcctatgagaatgtgtctgcaaaatagatttcaaacacatggtattaaatgatctttaatttgtatcaaatcataattctatcttgctatcatctgaaacatcagacatcgacttcacaaatcatgttccgatagtgcatgagacataactcttaatctttgtatt

SEQ ID NO: 282152 - DNA, 414 bp, Glycine max
  unsure (1)..(414): unsure at all n locations
agcgnntgcaagctnntgagtccattatatcctgacttcacncataannnaccttgacgccaggtgtggagaaatagtnncaatccttaaccctttcggaagccagaaaaaagaaaatagaggggnggaaatttcnncacatcaaagaaaaacagaagaagggannaaatttccaatcgaagagccaaaaaaagaaaaaagaagggaannaattccccacnatcaaagaagtgggagaaaagcanaaaagaannagaaaagggaaagattcccaatcataagaaatgggagaaaagtnnaaaaaagggaagaagaaagaagggaaagaaaagctcctgatcaagggatcgaaagaaaaccagaagaaatgtgcagagaggtctttggaccggacaatatctgaacaatacagaa

SEQ ID NO: 282153 - DNA, 354 bp, Glycine max
agggtgatgttgcgcgtactgatgggtaccatgatgtgtttgctggagtttgacccacgcggttgttgaagagacggcatgggcatctccttctttcctttttgcccctgtcgccccgattcttttggcattcacgtttgtggaggaaacgtaatcaaactttcctctcttcaatccaacctcgattctttccccggcaaacgccagatccgcaaagctggacggcatgtaacccactagcttctcatagtagaacactggcagagtgtctaccatcatggtgatcatctctctctcaaccatgggaggagctacttgtgccgccaaatccctccatcgctgcgcatattcttt

SEQ ID NO: 282154 - DNA, 262 bp, Glycine max
  unsure (1)..(262): unsure at all n locations
acgatgcaagcttcgcattctnttactcaaactcttcacacaaagtcgcgtgccgcgtacagcgccaatacttgcttctcttgtcacatccttctttcgacttacacacgattagaatatccaactcaatacttcatgataaatggcgcgagaccatcgaatgaagagacaatggagtcatcctccaccactcgatgctgctgcccatcaccgacacggaccatccggagcacccacagcacctattcatacctctatgtca

SEQ ID NO: 282155 - DNA, 393 bp, Glycine max
  unsure (1)..(393): unsure at all n locations
gacacatagatactcagctttagccaatggactaccttgaatgaattcctttgaatcctcttgagcctatgttcccctttctgtgttttgaagctcattacaagccttaagtgaaaaaccatgatatcaccttacccttaaagaattttggagctttggaattgttttgggaataagctgggaataagtatggggggtatgtttcattggaagatatgatttttggccatgcttaatgtnttattttggccatgcttgatgtatatatatattgcctagttctttctttaatattcaatttcgtactgggcaataaaagaaataaaaaatccatagaatgaacaatgacaaataaatgcagttgctgcaaatgctgcaatttcgtacttcaaa

SEQ ID NO: 282156 - DNA, 180 bp, Glycine max
taaacgccacatccttcttcaccagctcattgacaggtgatgcgattgtcgataaattatgaacgaaccttctatataagcttgctaacccatggaagctcctaatatcgtccacactctctggggtgggccattattggatggccttgattttctcatggtccacttggaccccatttc

SEQ ID NO: 282157 - DNA, 497 bp, Glycine max
agggagcaggattcagcgacgttagcagcacgcgacgccaatgacgagcgtcgcgatctataatgcgcctgagtcggacgtacgagcgattatggtacgatcattgcacttcctcgagagcgacggtggttcaataacaagcgtctctatatataatgtgccagaatcggacctccgagtgaaatgttatgaccatacgaatctctcgagagctaccgtcggacaataccgagcgcgccctcgtaagatgcgcctgaacctgaccttcgagagagaagtcctgaccatgcgcattattcaacagcacgctcagtcaagaccaagggatctataagaatgcgcctggatcaacatccgagtggaagaaagacagggcatttctaacagcatccgtggacaaatcacgcgactcgacaaaaatcgactggaacggacactcagaggaaagtcagacccgcgcatatctagagaacgctcggtcaaataacagcgcccgc

SEQ ID NO: 282158 - DNA, 391 bp, Glycine max
  unsure (1)..(391): unsure at all n locations
cagctcggacccgggatccttgagtcgaccgcaggatgcaacctctatttttgatcctgagtaccttctgcagttggttacctcatggctgattcaagctttcactgcccatcctctcaaattgaactctgactcatctcttcttcttgagctataaagaagtggttcagctgttgaggccatgaatattagttagaaaataattcancagagtggaatggcgttgttgttgttgttgtaaataatcccccaaaagataagaaaataattattagcaaggatccaaatgcataacctacaaagcgcatattgctatgaagttttggctcacatcaccaagaatgctagaatcctttttctgaatatgtgaagcatcaggcatcatttaatc

SEQ ID NO: 282159 - DNA, 427 bp, Glycine max
  unsure (1)..(427): unsure at all n locations
ntggatctttgtaagcagtagaagaaaactatgatgctcctgatttatctttagatccaacggtggctcagatgaagaatcacagagaaaggaagaccaaaaagactaaggctaaaaattgccttttctctactgtgtcaaaaattatttttacaagaattatgaacttcaagtctgccaaacagatttgggattatctcagatcagaatatcaaggctgtgaaagaaccaaaggcatgcaagtactcaacttgngcagagaattcgagatgcagagcatgaaaaagactgaaacaattaaaggctacgctgaccggctgttaagcatagcaaatagagtgaggcttcttgggaaagactntcctgatgaaagaatagtgcanaanatcctggtcactatacccgagaagtatgaatcgaagatatc

SEQ ID NO: 282160 - DNA, 277 bp, Glycine max
caaaagccattcatgatttttctaaacctttgatcaacatgatgaaagcagctgggtgggaccttgatgctgctgccaactcaatcgaacctgatgttgtttatgcaaagagagctcataagaaatatgcatttgagtcttacatatgccaaagaatgttcagtggctctgagcaagaaaacttctctgtcaaatcagacaatattactgtaactaaagagagcttctttcaccaagttctcgcattaagagagatggatcccttggacatgctggg

SEQ ID NO: 282161 - DNA, 333 bp, Glycine max
caaaaaatcctaggttgagatatttaggatcaagaatttgtcaagatgaaaagagagaggagtaccggagacgttgttcgtcagatgagaacagtgttgaagataacaaggagggtggaattggtgctgggggtgctccattgtgtttttgagaattacaatcggtggaatcaagagagaattgaataagaagaagattggaagttgtgggagtcgatttggtgcagaaatgagagagatatggtgtttggaagattggggaataaaaggggcgtcgccggggttgcgagttcgtcaactgaagttttgtatttataggcgaggacgttctgt

SEQ ID NO: 282162 - DNA, 377 bp, Glycine max
  unsure (1)..(377): unsure at all n locations
cctcaccaaatcccttatttccagaagggaattctatcaatagacctccaatctttaatggagagggttaccactactggaaaacccgaatgcaaatttttatcgaggcaatagatctaaatatctgggaagccatagaaatagggccttatatacccaccacagtagaaagagtttcaatagatggtagttcatcaagtgaaagcataaccatagaanaacctagagatagatggtctgaagaggatagaaaacgagtacaatacaacctaaaagccaaaaacataataacatctgccctatgaatggatgaatatttcagagtttcaaattgcaagagtgctaatgaaatgtgggacactctttgattaacacat

SEQ ID NO: 282163 - DNA, 359 bp, Glycine max
  unsure (1)..(359): unsure at all n locations
ggcaaatataaccattatgcttggataaatgcaaaaaaactggggcaaatgaagagggtgagaatgagggagaaacccatgctgtgactgccatttctatacagccaagtttcccaccaacccaacaatatcattactcagccaataacaaaccttctccttacccaccacccagttatccacagaggccatcccttaatcaaccacaaagcctgtctaccgcacttccaatggcgaacaccacctttagcacaaactcaaacaccaaccaagaaatgagnatttgcagcgaaaagcctatagaattcaccccatgtgtcctatgctgactngctcccatatctactngataattcaat

SEQ ID NO: 282164 - DNA, 159 bp, Glycine max
agtcttcataatagtgatgaggtacaagccctaaaggcagagcttgaaagagcccgagtagtcgaagagaagttcaagtccatagccatcaaagtctggaaagagtatgatgaactaagggacgtcaatatggccaccgctgatgccttggaacgagaa

SEQ ID NO: 282165 - DNA, 264 bp, Glycine max
agttaagctgttgattcagaacacttcattcttggtatacttgcatctccttcccttgagtggtgccaatgtggtgctaggagtccagtggcttaaggctctaagacccattctcacatattacaacaccctctccatgaaattcttctaggatggccaattagtggagttaaagggggaagatgcatctaccttgcacctcctttctcatccccagcttcgtcgccttctttgaaaagaatggcgcgagtgcctactttcaca

SEQ ID NO: 282166 - DNA, 295 bp, Glycine max
  unsure (1)..(295): unsure at all n locations
tgaattgactcgagggaagaaaattgaaagagaacaaactcttgggtgtctataaggggttccgtttagacttagggatcaagggtcgctacgtctttgaaagttatagtgcacaagaataaaaaacaattaaaaatatatgattatacactgagtaggttgaaaatataattgttnctttaatgtgcgtatcattactttttaattaattaattaataatttataagtttaattcttgaatactttaattttcttattaaagatattggtttataaattaataatacgtttgat

SEQ ID NO: 282167 - DNA, 351 bp, Glycine max
  unsure (1)..(351): unsure at all n locations
agttgtatggttaagttattatctagttcgatagntctaatttttctattttcgcgtatgattagtcatgtatgtatggttttatatttcttacgcactttggctttttgttgatgccaaagggggagagaaaaatgaatattttagaaatcaagatattatatttttcaagacttcaaattaagcataaattcaaaaacaaagggggagaatatggagaattaagtgagtgatcgactatgaaaaagaatgtgtatgtgtttcttgatttaagggttgtcatcataaaaaagggggagattgtgaaagcaatgtcttccaagggtaatttgatgatgcccaagaatcaag

SEQ ID NO: 282168 - DNA, 333 bp, Glycine max
  unsure (1)..(333): unsure at all n locations
gctgagcgcgtgcttcagggaaatagaagacgagcgcgtgttttgcaagcttaacgcgagctnctgggagagggcggtcttagcgcgcgtgttgcaagcttaacgcgcgctattgttggatcatgggctcagcgtgtgacgcgcgctgagcgcgcgtataggattgagctcgcttctgatattcttcttttatttaataatttctgcctttctgcttgctacacctgcacgtatgatatctgcaggctaaattcaacaaatcatcaattctctaaaatagaagcgcaaatacctgcgtaataattatatttaaagacaatatgtgcttattga

SEQ ID NO: 282169 - DNA, 240 bp, Glycine max
agcttctcgatatattacgggactcaatcagacatccgagtgagaaagtgatagtcagttgaactcgctcatagctgacacatacaattctgagcgttacgatatattacgatactcaatcagacatccgagtaaaaagttattggcgccagagtatactcagagcttcgcgattcaaggccgagcctgtcgatatactaccggactcaatcacacctccaagtcaaaggctattggcgc

SEQ ID NO: 282170 - DNA, 397 bp, Glycine max
  unsure (1)..(397): unsure at all n locations
gacacttagatactcagcttgagcaattcagcaaaatcactttttactcggatgttgattgagtcccgtaatatatcgagacgctcgaaatggaacaccgaatctctgagaaaattcaaacgacaataactttntactcggatgtcagattgagtccagaaatttgtcaagatgcttgaaattgaagaccaaagctctgagcgaattcaaacgacaataactttttactcggatgtgtgactgagtcccgtaatatatcgagacgctcggaattgattatcgaagctctgagcaaattcaaacgacaataagtttttactcggatgtctgattgagtcccgtaatatatcgagacgctagaaattgaataccgaagctctgagcaaattcaaacgat

SEQ ID NO: 282171 - DNA, 253 bp, Glycine max
  unsure (1)..(253): unsure at all n locations
agcttggttgatgtacttacccgttgaagatcgaagagcgatgaagaacgaatgaagaacgtcgaagaacggtcaaaacctttgcgaaagtcctcacgggaaacgttactgaaacgtttcggaagtgcctcggcttaaattttcttcacggaaacaatttttccaagcaaattctaaagagagagaagtgcctaaggggctgaacccttttcttcttcacttccttccctatttaatagcaaatangggagat

SEQ ID NO: 282172 - DNA, 298 bp, Glycine max
  unsure (1)..(298): unsure at all n locations
tgcatagatataaacacanatgagagctatgatgtgttgctttgatagagaacgtaaccaaaagcatagtaaaacaacttcagctgttgataccgtcaaaacaaccaattctctcatgtgaagaatatggaggcaaccaccatgcctgttactatatggaggaagtagccaaggaaaccaaattcatgagagaatgcactacaaagttagaagaaattgtaatcaaccttagcatcacatcttactccaacctcgagaacaccgtgaaggtaataaattttttaaaagatcaagtaaa

SEQ ID NO: 282173 - DNA, 422 bp, Glycine max
  unsure (1)..(422): unsure at all n locations
gcggntgcaagcttcttcttttgtcgtcggcgaaagaaagtagtagtagttatgtcgtgagatagagtannttgacatnnnaccacgccgagaaggaagaacgaaatgagcananntcgtggtggggaacccacgttnntaagcgccgtgnngctggnnngaaggggcattgnngaaatannggtcgcttcnntgatccaaggggaagaattatcttctcttggcaaaatnntgggtcttgcntttgacnncattctctccctttttgaattntcctcanagaaaacccttcgccgatatgagcagctacttgcgtctgggccattctaactgttgtcgtagtctttgaattcaacataggtatataacaactacaactttacgtctataactaactaaaataccaatactcttcttttcat

SEQ ID NO: 282174 - DNA, 336 bp, Glycine max
acactataaaactcagcttgccttcctctgatacatttctttggcaggggatgttttcattttggtgcagggtacagttttaaccccttacaaataatttagtcatgccattctttctaaactgagctgtgaatatttaaaatgttgttatattcttttttcaaggttttcctccttattcaattgataagcataatcagcttcattacatggctgaatgaatgttgtgagtcagaaaaaattgcagcaagatggtaagatttcatcagttaaagaactaacagaataacatgcttcctgagcacgaacaatatgcttgagaaaatagtagctata

SEQ ID NO: 282175 - DNA, 293 bp, Glycine max
  unsure (1)..(293): unsure at all n locations
atttaatttagtcggaaaaacatttcatttaattatagttttgattaagttttcatggctcatgtaagtgatttttacttagccaagcttaagaaaactaaacacttaatatatattgctctagcanacataagcacacaaatattacaatgaatcatcacatcaaatgagaggccactcatctcaagcctcattatccttacacttactcctcacatcgacgccaatntctatgtgtatttggatgacacttannataaacattatactattattaagttatcacatgcttt

SEQ ID NO: 282176 - DNA, 184 bp, Glycine max
  unsure (1)..(184): unsure at all n locations
tgtcagatgtttactacttaacanacaaatgatcatcttaatcactaagcgttttacttactgccaccaaatcacttngtaaactaactcatcaacatgtgagaaggatgatgaatgctcagacatacatttactaaagcctttccttcaccactgttctgatgagatctctgctgtccacaca

SEQ ID NO: 282177 - DNA, 516 bp, Glycine max
  unsure (1)..(516): unsure at all n locations
nnnaacctagtcagcgcttgatgccccttagtagnncnntttgatccatttgagaccagggaactcgagagnggacccgggattgcaagactctcttgaggcatgccgcgacaataggagctatctacacacacccctcgtgtactcacctcggctccttgagaagcttccttaagatgattcctaacgaagctagagcttagctacgcatacctgtctaatagctaagctcacctccttgagatgagaagctagaacttagctacacaaccccctataatagctaagctcacccccttgactaataacataacaatacaaaaaaattccttactacaaagactactcaaaatgccccganatacaacgctaaaactctatactactagaatggccagaatacaaggcccaaacgaaagagatacctattctaatatttacaaagataagcgggctcatacttagcccatgggctctgaatctacccttaggctcatgagaacactanggcctctn

SEQ ID NO: 282178 - DNA, 387 bp, Glycine max
  unsure (1)..(387): unsure at all n locations
agggatgccccacattatggccatgacacaaatgcaaaaatgatgatttggaaactntatgcanaactggtcatgcatgcacctatgcggacactcaagtgtcaaatttttatggtcatgtgatgctacggctcaagattcatttcctctattttaatcaacccaatgtttccaaaatatgttcttttatcaatgtgtgcattcatccgagtccatttcaggcgtccggagaaatttcacagcattcacccttcatgtgtagacacattntccaaaaattgattatgatcaatgaatgttttcacagaaaggttgganatcgtctcttttcaaagcatgttggtttttcagcttgcaacttaatnttttctttcttctccttccttt

SEQ ID NO: 282179 - DNA, 498 bp, Glycine max
  unsure (1)..(498): unsure at all n locations
aggatgtgaactgatccctttggaanccgngtgatcgctgagctactgaancccagagnngacagcgaggctgccaggctccttttggtcagatcgaagcgggttcttaantttggcgcgccaaccgaacggaccggggagagagaccgaccacacaaanncccccgaaccaacacgcgncgcaaacccagcggaaggcccnacaaggaccgaagagagacaaccgggggaaaaggcacacccagggaaaaccacgaaggcggccaaaggacaaccaaaagcacccggaaaacgcaggaccccaaaccgaaccacagggccaaagccaagaaccacccaaagaggccaagacgggacggggcgacaggacacacgaaccaaggaancaagccgcccaanccaccaacagcagcacacgaacggaccgagcaacaanccccaagcgccgccgcgggncagcaacaaccgcaccggccaaaaggaacacagccggacacg

SEQ ID NO: 282180 - DNA, 382 bp, Glycine max
  unsure (1)..(382): unsure at all n locations
aacacagncataacaatggagtagcgagatataagtatcagagtattaaatacaataagccaaactcataatcaataaaataatcaaaccagaggtcacataacataaaatgtcaacaaccacaaaatatccaagactgacacacaagagaaataagcagagtacttagcatactaatgtacattctaagagactaaaagccaaaatacacggcttataaaagataaataagcagaatctacaatctaagaagactgaggaggtggtggaagatcaaaactctgacgaatgtatccgacatcctcttcaagctgtgtaagacgaatgtncatacctggcaagcgtgaatctaacgagtcaaagctgtcaccgacatacgaac

SEQ ID NO: 282181 - DNA, 503 bp, Glycine max
  unsure (1)..(503): unsure at all n locations
aagagtgtnnnntttgannccctttgngggngccgatgatgcgtttgaaanccagggcgacncagacangacccgggaggctctaagtcgatttgaagttggaacaccattatattcctgtgttagaccacgctatgggcgcgagagtgggccctttcttcccttcgcaactggagtacattattgctaccccatagagctccgcgaatatggttcgggccatactcttcctggtgagccctcttgtgctctagtccaagggctctggcgggaattgcattctcttcccgtaacccggcacactccttccgaacgtgtgtagcagccaacttgaacttctctttggcgagtttggcctttcctaactcgctattgagagcttggacttattcttcacgtgcagttgcttaaaaataatcttgctgacaacgtttaactcggcgagccattctaaacctcgtatgcgacctgtcaaccattcgtgggtaccaacaatgatgcct

SEQ ID NO: 282182 - DNA, 330 bp, Glycine max
gcttgagggcgtgccaccatcttgatagtagagatctgtaatgtgtctaccatcacgatatcgtctccctttccatcattggggtaccacttgggccccaaaccctcccctttaggcgtgactttgaagatccgtccccctttctcaaatgttctatagttgcatcctatccgaccatatcaaaattgtctgatactgcctacaaggaaccattagtccttcaaaatggctcggaagattcaagttatgtccatgtacagctccccgaagactttttggaggatgtttacaatcctctctttggtattccccatttctgacatcatctta

SEQ ID NO: 282183 - DNA, 336 bp, Glycine max
  unsure (1)..(336): unsure at all n locations
acatcgacatgattgtctttgccaactgcaaatnctgaatcggtcaaaaaaatgctcgcgagtatgtcatggatgcctagggtagtctggttgatggtccttctgaacagcagttcgctgagtgccttcagaagtttcaaatggcttgctcaccttggctaatgttcgttgactatgttaacgaaacctagatactcccacacaagagangatttattacagcctgtatgaataaggtgatgcacttatgcaacacaacaacaaacgggtattaaaatgttacaatttttctagtaatgtctatttaatcatggaatgtaattgcagcctatttta

SEQ ID NO: 282184 - DNA, 232 bp, Glycine max
  unsure (1)..(232): unsure at all n locations
ctctgagcacatacaaacgacaataactttntactcggatgtacgatagagtcccttcatatatcacgacgctagaaattgaacatagaagctcagagcaaattcaaatgacaataactgtctgctcagatgaccgagtgagtcccatcatatatcgagactctcgatattgaatacagaagctctgagcatatgcaaacgacaatacagtttgagtcggatgtcaactgag

SEQ ID NO: 282185 - DNA, 523 bp, Glycine max
  unsure (1)..(523): unsure at all n locations
nnnncctatagaagactgattgntanttagtactaccnggctaatttcagttgagnacccgcgatcctntagagnngccctgaggcgatgcagcannggtttttataggcagcaccgacaagttatttcgnggggacgagaccacgcacggggngcgtagcccgaanncatggaggacctctgagcattttcaccgacaataacgtgttactcgggatgcttgattgagtccagcatatagcgagacgctcgaaatggaatgttgaaccttttagccaatccaaccacaataaatcttaatcggatgtctgattgagtcccgtacatatcgagaccgctcgtacattgaatgtttaagctctaagccaattcaaacgacaataactttttactcggatgtctgattgagtcccggaatataacgagacgctcgaaattgaatgttgaacctctgagccaattcatacgacactaactgtttactcggatgtctgattgagttccgaaatatatcgagaccctg

SEQ ID NO: 282186 - DNA, 471 bp, Glycine max
  unsure (1)..(471): unsure at all n locations
nacggtctgtttaagctnntannnctncgnannnncagngcccaacnttggagacaaggtggttctccctgataaatataaaaaaaaatggcagagcaatgagggggaggaggccggccnaaaagaaacgccgcaaaaaaaggcgcacagcatcaacattgaatttcgagcgtcacgatatatgacggaactcaatgacacatccgagttaggagttatggtcattcgcattggctcacaggtgcaacatgtaatctcgaaggtctcgatatattgcgggactcactctgagattcctaacacgacgacattggggantgaattggctcagacgttcacatgtaattcgagcgcctcgattattatgggctagaaaaacattcgagaagaaggattgggtttgatatgctaaaggtgcaaattaattcgagcggtggtgtttatggactacattgaatccagataaggtgn

SEQ ID NO: 282187 - DNA, 348 bp, Glycine max
  unsure (1)..(348): unsure at all n locations
tgctgtcttcgtatatggccacctgataatcctatcgaaaagctctccacctgcacataattccatcacaacatgaacagccacggcatccttatatgcacctttgatggatataacattacgatgccccgccaagtggtgcattatctgaatatctcttctcacatcctccacatcatcatcggtgacgagcttcctctttgcaatagatntgcaggcgcactccagccctgttgccttttccacgcacaagaacgttgtcccgaactgaccctgtccaagtttctcccagagtaaagaactcttgaaatatcggtctctctttgaacacagaataacacgaaccct

SEQ ID NO: 282188 - DNA, 416 bp, Glycine max
  unsure (1)..(416): unsure at all n locations
aaagaattattgcatttgacaccgctcatgtcttacttatgcacatgcatatnnntatcttgtgaatcaaaagacaggaacaggatcgctttaagcgatgatcaaatactgtgccaaatccaagacagagatgaaccgaggtaagtggtagcatagccacatttttctacgcaatgtcatttcctgttttcaggtgctcgagaacgggtacaagtaaacgctaggcccgtgatcagcgaatcatcgtcccacgtccggctccgagtgattaggaagcacgactgggaggcagcctagtatcctttaaatatctgcctattatcatttttatttctctaaggagatgatcggatatgcctaacttatcctatgggtgtcgagtaaacgagcaccgacccatagagaacacgtatttt

SEQ ID NO: 282189 - DNA, 296 bp, Glycine max
  unsure (1)..(296): unsure at all n locations
tgctaaaacagaacattggcatagcaaagatcaaagagtagtgggttaaaacctaacaacttcaaagagaacatagtgtgctatgaacacttattgaacaaatcaacatgggtaacaacttccaagtttaagtcttctcaaactgcctaagcaagtcccaagtcctttaacacttcgttgcccatcggtgtggggacaagggtgaaataacattangcccacttgctcacaagtctcaaatggttagaactaagtcctatatacatgctctggcaacatgagctacaattcttaaa

SEQ ID NO: 282190 - DNA, 387 bp, Glycine max
  unsure (1)..(387): unsure at all n locations
tgtaagtggntcatgatgaagcagaatatcaactgttggatttatctattttatatggnnccaatggacaccactcacactagatttattgcttccttcctagcaaccttctgataaccatttgctgttgtcgaagtcaatttctggcaacagaatttttttaaatcttttccttaccacctttgttcctttctctccccatcaatcccttgtcttcgactgcaactgtctttcacaaaatattggcacccctaaaatatgaaattaaggccattccaagattgacaagtgaaacacgacataaacatcaaaagtgatgcgtatgaccaaaagtgcattcaacatactaatcttcaacacacatacagaaaagtgagatagtacaaa

SEQ ID NO: 282191 - DNA, 397 bp, Glycine max
  unsure (1)..(397): unsure at all n locations
agctgaagtttcttcatttgcacaagacgctaataggngaagagtatccttgtggaaccttcacccgacgaagacactgacaaaaacttatcttctccttcttggacaaggtatggcaggctgggggcaagtaaattttcttcccatcacaccttggatgcaattgtgatcgtatacccatatcagctagatcttgatgggtattcaagccatccttcgtcttgccttgaatgttaatgagcgtaccaatcacattgtcacaaacatctttctccacatgcataacatcaatacaatgtctaacgtcaagatcacaccagtacagaagatcaaagaaaatagacctcttcttcatatgcaactctgactcttatccttcttttgggcttaccaatac

SEQ ID NO: 282192 - DNA, 614 bp, Glycine max
  unsure (1)..(614): unsure at all n locations
cccgcctgtcgatgatncganagtcagaagcanntncgagacaccncacaacnacncaagccgtgagaccnncaagcgcgcaggagagacaagaagaggaagagatatganttctccgcctatgtcaccaggggcncgctagagttngacaaagtgagaatggatacaagaggacaaaancntatagcacaagctctcgtccttcacgaccagatcacatagacagtcgcacttttacacctttgttgcataacgaatgagtctcagcaccagaaagatcgtgtacccgaatacggcacatttaccaatgtgcgccactactcccaaaatttagcacgctacacataggcgcttgaggtggctctactctagtgagcgaggtatgtgttatcgtcatctaaccactagtaccacacgctctctgcagtaggtctcgaagcatgaaaatactctatgcgacagagtagagcgaagctttaacctcccatttatccccgatatttcaacagtggctatccaaccctctagagtgatctttgttcccctaataccaaactatttccactctctatcacaaaggaaatattaccctttgtctcttacaatatcaaacg

SEQ ID NO: 282193 - DNA, 446 bp, Glycine max
  unsure (1)..(446): unsure at all n locations
agctcggacccgggatccttagagcgacttgatgcatgcaagcnnnnatcatatagtaagtacacttaaatatgacataccagttgtttggtctcccaccattcatttggtgcatcaatagtgttcctgatattgtctcatcctaaaccagtttcttttctaaataatttgtatcatacacaccaatcttttctcaagttatcatacttattttttaattgtgccttggtataagtccttccagttaattgtgtaaacttggattgaatacctttccgccctaccttagtaaagctagaaccaaggcgttcccctctagtaatatgctccaaacataagcttcataaaagctgcatttgcttttggatcccaagtagctttttctgtgcaatattttgtgaaagatcgcaatagctattctctaatatactcataatcaaataaat

SEQ ID NO: 282194 - DNA, 106 bp, Glycine max
aaggccgactgtagcaccttctgactactgtcacaagttggacttttataacggcaaccgacactcgtctgcgatatgggataattacttagactgcgactgaaac

SEQ ID NO: 282195 - DNA, 327 bp, Glycine max
cctcatgcactcctctcatgactatggcatcattactggcgctcaactgctcacaagaggatgccatcttctacaacaaaggtctgcgcttcatcacgagtcatgtgacctacggctacaacactcgcagcatctatggtacttctgaacatattactgagtactccctaaaaatatagcagaagaaaccgttctgaaatctgatggtgagggcgaccggcacatagcttcttaaatctctcccagtactaatacaggctctatccactgatcgtgctaatacctgacatatctgaccagatggctgaggtcctggaacatggaaaa

SEQ ID NO: 282196 - DNA, 436 bp, Glycine max
  unsure (1)..(436): unsure at all n locations
ttcaatacaagaaagcatgacttttgcctatgaatctaagtnntggttttgaatgacaaaaggcatgaatattatgacatgtttgagaggttgttattacaatttaaatctggctgccccatgaggaataccttgcacctangtagcatggaaaatacctttcaacggtatgtatatatgtaaatatatatagcatggaaatgccttgcaaaatgttgaataaaatgccttgcagaaagttgaataaaatgccttgcacaatatgaatatatatagcatgaaaatgccttgcataatatgaatatatatagcatgaagtgccttacacagtgttggatgggtagcgtacaagtgtttttcaaaatacgtgtatttgcgagtaggtaacagaagaagccttccanacaatgtgtgtatatatatatgatgtagcatg

SEQ ID NO: 282197 - DNA, 287 bp, Glycine max
  unsure (1)..(287): unsure at all n locations
tttgcttgcttctacaatatgnacaaagataaatgggctcatacttagctcatgggcccaaaatctaccctaaggctcatgagaactctagggccttctcttgcatctccagtccaatcttcttggagtcttctatgcaatgcccttgctatgtaggatcgcatcacttcgaatgctttgagatgtactacatacccagggagagaaactccatatctgacttgctctccaagctggccagctccaccaggactgggcaccttatgactatcgtccactagatgctc

SEQ ID NO: 282198 - DNA, 449 bp, Glycine max
  unsure (1)..(449): unsure at all n locations
tcagaccacagcaacacagaatctaggagttcaaaatccctctattcaatgggttttctaggtttgaaaagtgaaatttagaatgaggtaaatttgaagcaaactctcacctcacaccagtccataacatccatttagacttgttcaaactggatttacacctaaaatctcaccgaatcaaaatttgactcttcaacacccaaatttgccctagaaatggctctttgttcactttggtcatttattnttctctctagcacagtccaagctttctcataagtcctaaatgaaatttcaagctagtattaactcactttaacctccatttaccacagaattcagacttagccttccaaccctcaaagtctcactctgtttccactcataacatcacattctcactttctaaccctangttagttctaccctttgtctctaacagatttgta

SEQ ID NO: 282199 - DNA, 247 bp, Glycine max
  unsure (1)..(247): unsure at all n locations
nggtgctgagctgagcttgactagctgaccgagacgcggcagtttatcaacacttttattagaaaagggtacaattggatttgaagaatttcataagcacaaatggaggaaatgggctgaaacggatcgtaatacttcctggttttacgtgatacgctttactaaaatggcatacatgtcctaatttagttttttcaaccattcattttgtaaatccgataagatatataagtttaatatattctta

SEQ ID NO: 282200 - DNA, 429 bp, Glycine max
  unsure (1)..(429): unsure at all n locations
atacatggctgaatgtagatctgctactatagctagtcaaattggaaagcacctcacatcatagcattgcacacgaaagcaaaataactataatatataaccaaagtaccaaacgggtttctaaactagagaaacccaggcactaaatcatatacaaggaggaaaaactaccagattagctgcaatggtccctttagttcaaactattacactatttgaagtttaatntactttcagccatgggcaagaacacattcaaacaaagtanttcaaatttgaactaaacaactacaatgaagcaagagtgcaatcagattcacaaattattggttggaatcatacatataaattacaagcacacactagttacatatttcaaaggtgaaaagtgaagagtacagtgatatactacattattcctgtaaaaat

SEQ ID NO: 282201 - DNA, 408 bp, Glycine max
  unsure (1)..(408): unsure at all n locations
attccagccnggattaagggcaagacaggnaccttgtctgggttggacngggnccanggangagaggattgcccaacataattcccttgacacaaagccaaaatggatgattgggaaccttcttgcaaaactgttattgcttgccccaatgtggacactcaagtggcaaattttaatggtcatgtgatgctaaggctcaggattcattccctctattttaaatcaccccatgtttccaaaatatgttctttatccattgtgcatcatccagtccatttcggcgtgcgggaatatacagcattcaccttagtgtagacacattttaaaatcgttatgacaatgaattttttcaagaaaagtgaaatatctctttcaaaagctgtcggttttaactgacaactattttct

SEQ ID NO: 282202 - DNA, 368 bp, Glycine max
  unsure (1)..(368): unsure at all n locations
tgaaaaagttccttcgccggtggtttcaaaattgatacaggccttttgaatcaaaagtacaagaagatgagcttgagacagacagtagggattccagtgatgttctgtcatcatcaaactcatttattatgttaactaaagagcaaattggagatnntgaaaaattgctttcaaagtggaacctgaatgttcagattgcaggtacattattcaatggggagcgagatgatcggaanactggtgatgcaaagtacagtgatctcaaggaccagtttgaacattggaaccacattgctcagatttggaagcatcccacattgaacttgcagttcaatatgaaactgcacagcaacttctgggtgatattc

SEQ ID NO: 282203 - DNA, 264 bp, Glycine max
  unsure (1)..(264): unsure at all n locations
gggttttggcctgatcattctgagctgaacatnaacgngnccnntcttttacgagatttctgcttcaacacagcaaggctattgatggcaaatccaagccaactagccttctgtagcacatcttgatcatgcatcctctgggaccaccgaagcatccccctaaaaacccgtaaaacccctgatattggcacaactgccaacccgcagatcctaagccttctagatttgagaaaaagtagacacttgactacaaaggtgctatcc

SEQ ID NO: 282204 - DNA, 116 bp, Glycine max
tgctagaaaaaatttgacatttgaaatcgctagtgttggaaacttgaacatacgaacttacataaattactgggaagtggtcactacggtttttggacctgaatttctacttgaat

SEQ ID NO: 282205 - DNA, 495 bp, Glycine max
  unsure (1)..(495): unsure at all n locations
nggggcgtggancctgatncctnctagtagtctnatgantcatttgagnacccgngatcttcanaaagaacctgcagcttccaacctggccttaccttcggattccaaggttctatangtgtccgcgcggcctaacctggaccatgaacgctatggtggcaaggccgtcggccttctgattttcctctctaggattgtgatgaaaggatatgtcttcaaggaatcctatcacctccttgatgtaagcctggtaaggcaccaatttatggtctctggtctcccattcacccttcaactggggaattaccaaggccgagtccccgtatacctggaccaacttgaccttgaagcgaatggctgcttggatcccanggcacatgccttatactcnctatgtcgttatgcagttgaaacccacctacccgtgaaagtatatatngtcgtctgggaaaccatactgccccactccatggctantgcatanacgtgcgtcan

SEQ ID NO: 282206 - DNA, 254 bp, Glycine max
  unsure (1)..(254): unsure at all n locations
ggcatagtcggtcagtgagattctgtgatgtacctaaacaggcgagctcctggcagtcaacagataaaaggaacanagaccacanagcaaggaggcttgtggtggctggccagctgtgaaatttgtgtgatatgtggattatggcctctggtaatcgattaccaaaggtgggtaatcgattacaanggcttaaaatgaagacaggaggctaagatggtctctggtaatcgattaccactgggtgtaatcaatta

SEQ ID NO: 282207 - DNA, 247 bp, Glycine max
tgaccaaggctggctcagcgtttgaagaccctccgcttttgacagattaatactattaaaaatggggctgttaaaaagaactatgctagcagttactgataagaaagtacaggtatgctttacctacttgctctaaaccgatggcgccctgtcacctaaagctcgctcatgggctgcgtatgaaaggcaataatagtgtgtatgtgtacaccttctatgacagcgagttgggaactctgtgcttcac

SEQ ID NO: 282208 - DNA, 321 bp, Glycine max
  unsure (1)..(321): unsure at all n locations
ctcaattaaatttctggcttcagcaagagtcatgtatcgaaaggctccaccactggcagcatctatcatacttctctccatattactgagtccttcataaaaatattggagaagaagttgttctgaaatctgatggtgggggcaactggcacatagttttttaaatcgctcccagtactcatacaggctctctccactgagttgtctaatacctgagatatctttcctgatggctgtggtcctggaagcaaagaaaantttttctaacaatactctcttaaagtcatcccacctcgtgatggaccttggacaaggtaatac

SEQ ID NO: 282209 - DNA, 271 bp, Glycine max
ggcgaactagcttgagcgtatcatgaactgaacaaggcgaggagcgggattagagagaccttccctgaggcaagaaggggaacacaaacgcccaaaggaaggacggaacaagcagaggagccagaggacacagcaacccaaggaggccggggcccaggacaaagaagagacgaaggcagccaacagagaaaagagaggaacccacaccaggggacaaacacgacaaacaaaaaaagggaaccaggaacacgaaaaagaagaggcaacaagg

SEQ ID NO: 282210 - DNA, 471 bp, Glycine max
  unsure (1)..(471): unsure at all n locations
nccccggaaactgnnnagnntactnantnagcaaaanncgaaaaggaangaggcgggcttagaaggagagaagaaanattaantttctccataacccggccacaccgagagggttgttaatagatacaagcgtccaccacaacaacaacnctaaaatgatcatgcaacagaaactacggcttgctgagactgtagtatcctcatcaactatgctctattctgtgtacgtaaaacccatcagatatccgacagaggtgctttttataaacgaatctcccagttcaaagagcatgttacattttccatggggaccaagacacccgacaacgggtgctgctgttgccaagatctcacgaccaaatagaccattgatcatattagttattgtggacgtcactataactcgagccacctgaacagctgtcaacgaggtggatgcacaaagaatccctttgtgaggtaaagctctta

SEQ ID NO: 282211 - DNA, 510 bp, Glycine max
  unsure (1)..(510): unsure at all n locations
aggggctgtnaantttganncccctttaggagacacctgatgcgactganatcatggaaatcgaccacggacccgggatcctctgagtcgacttgangcaacaagcgcacgttaccttattttacacngncggncancgcgtgttgtcaatggcacaatgcccgctgagaaatatcaaaggggctatataactaccagacgctggtactgctcgttctataccacccctgcactttactttgactatgtcggattacgagatgtccgatcggagacatacggtcatgctgctttgtgatacctcgctctgtcatctttatctggccgacttcagctggcattatagggatcaatatcggcgaatcatgcatctagcccatgtgggctaacgtcttcgcggctgatgatatgagagcatgccacagtcggccggaacacactctcgaacgaaaaacctatccgtcctacattgtgaatntagangctatacccgacagacgggacctatct

SEQ ID NO: 282212 - DNA, 308 bp, Glycine max
  unsure (1)..(308): unsure at all n locations
ntcagcaacttcaaacgacaagaacggatgacgcggatgtcttatngatttccgaanacancgagacgctcgaaattgaatgttgaagctctcagcaaatgcaaacgacaataacgtttgactcacaggtctgattgcgccccggagtacattcagacgctcgaaattgaatggtgaagcgatgcacaagctcaagagacaataactctattctcagaagcccattgagtcccagaaagagtcggatgcttgaaagcgaatgtcgaagctgtctgcatactcacgcggcaaataccttgtactcggac

SEQ ID NO: 282213 - DNA, 494 bp, Glycine max
  unsure (1)..(494): unsure at all n locations
ngggacgtggcaaatgatncccattgnagntcnnatgatctatggagcncagnggaaatcatctaggaccnnnnanncnctaanncnccttncggcaggcancangatttttaacngagccggcgggccaaacacgcacgtggatctctattgagaaaatgacagctgacctctgaatctcatcgatagagatgcgacgaaatacttgagtgactcaagaacaccctgactgtatgaaatgaccctcgcaacgtaccagtgtagccctcgccggacacactgaacccttccttccgtgcatcatcaacgtcgctctctacgaccactatgccagacaagccattgctgcccatagttgtctggaggccatagctcccgcctatgcatccatatgaaggattgtcgacctacccagccttcacgaggagagctatcacctcggttggagtacctaatctggacaccgcccgggagtagcgtatacctcctccagc

SEQ ID NO: 282214 - DNA, 374 bp, Glycine max
  unsure (1)..(374): unsure at all n locations
ccatatgaagcttagacacctctacacacanaccgagctgcagccggccgcgagacggaggagatttcgtgttcccacagcaacccgccatggaagcacggacacaacccaaagcgagagagcgcctcactcggaaaacctggaggaagacgacctccgcagaccttgatacaagggggaagatgttcaagctgaaaaaagacggagcataagagggggcaccaattcccgggagaggaaaccgcctggaatgagccgaacaatgagctcaagaccacaccgccgcgtcccatcaaaacgagggcccggaacattccggatagtatcagaacaagctattcaccaccgcctgagaggggacactgaacctctag

SEQ ID NO: 282215 - DNA, 494 bp, Glycine max
  unsure (1)..(494): unsure at all n locations
aggggcgggggtttgatnccctttggaggtcaatgatctactganccctggannatccagcnaggtcccgggatccttagagncgacttgaggcaggcaagcgaggttaatataatgcgcccgaaccaaacgngggacgcgggacggatgacganatcacaccccccactgtcggccgtgtgacaggaaagaaccataagaagctctcgacaacgtacgcattgaaaccttgggcgtatcgacccagtatgcgcaccaaatctgtaggatcgtgtgacaacttaagactcccaattatgtacccacacggtggaagatgtgcaggaataactcgagacgacctgtggtggaaaaagaaccatactttcatcccgaggcatccacctttgaccaaatcgcagtttgggacgggaaccaaaaaggttggacagcttatacaactcgagcgaatggcgccgctccacgaggtgctcaaaaacgggcaacggtgggcg

SEQ ID NO: 282216 - DNA, 488 bp, Glycine max
  unsure (1)..(488): unsure at all n locations
ccagacaactcgcanncantgcacaccnaanccnaagactccggccgnngagncagagaggagagagagagtgtatatttattatcaacaagcaccccccgagagcgtgtggctgatcagttgaacagagactccaatgcaatgcgcctagatcgagcttgcgacctcaaacttgagaatacgaagatcatgggccccttctttcgcataccaagaccggtgacttaaaagattggcggaagaacgactaccggaggctaaggaaggctcttggaactatataccaatgggatgtgtgcaaaaacctggctgagaatacgtgtctcgaggaccaagtagcctttattgagccaagtccaccctctgttgacagtgcactaccgaactggagctatagtgtgctcctgcgaagacttataatcccttaccgatatcgtgtccgactctttaatattcaagactcggcagaatggaacgcgacttggtgg

SEQ ID NO: 282217 - DNA, 402 bp, Glycine max
agctagccttttgcaagtgccatttggcccatgtaatgaactacatttccactatcagtgggtcctaaggagatggaggaaagtgtttctacaagagattgttgcaatgcttccaagccttgagataaagcatcctcagcctgctgggaagactgttgcagattataaattcccatcaactgctgatctgttaatggctcaaggtggttcttgatgatctgaactccaaaagacgagaaatgagtcaacaacaaactatatacacaagtgaagttactagaaaatggaagtacttaattggcaatcaccttgagaagttcggatgaacggaatccaccaagccacataaaacatctttccacaggtgtcttccacatcccattatgtatgtgtaatacatca

SEQ ID NO: 282218 - DNA, 95 bp, Glycine max
ccttgaaatatacatatgtcttctctaatgacttgcaaatcaacttcaatcaaatcccatgcaccaaacccatgttatccatgacattcaacacc

SEQ ID NO: 282219 - DNA, 405 bp, Glycine max
  unsure (1)..(405): unsure at all n locations
ctntgatataagcagncccgggtatatggattggcaatggaataaagcctttgatgtagttctcaaagtttcctaaaatctcagagactagtggatcatctggattaatattcagtatgcgcttcatcataacattaatgggaaactgtttcacttgaaagaaaaataaatatcatgtgtttgaaattgacaagcaatctctttcttagcaaaaactctaaaaagttggaaaaagtggttatttctccaacataagttgaactaaatgcatattcaattcttaaaatacgattatatatatagttcttctatttcattgtctgcaaaatactataagagtagaagaaggaatccctttgaaacactgagtagagacaaattagcaaattgatggcaccataccct

SEQ ID NO: 282220 - DNA, 464 bp, Glycine max
  unsure (1)..(464): unsure at all n locations
gacacctgatactcagcttgagaatggctagacatgaacatgtattggttggtttgtttcaagataaaagggatgccccacattatttccatgacacaaatgcaaaaatgatgatttggaaactttatgcaaaactggtcatgcatgcacctatgtggacactcaagtgtcaaattttttatggtcatgtgatgctaaggctcaagactcatttcctctattttaaatcaacccaatgtttccaaaatatgttcttttatccatttgtgcattcatccgagtccatttcgggcgtccggggaaatttcacagcattcacccttcaggtgtagacacattttccaaaaattggttatgatcaatgaatttttttcaaagaaaagttggaagtcatctcttttcaaaagcatgtcgattntttagctagacaacttatttttctctttttcccatttttttcttac

SEQ ID NO: 282221 - DNA, 367 bp, Glycine max
  unsure (1)..(367): unsure at all n locations
tttancttanantccaccagcatcaaggaatgagggcgggtgatggaacctctccaaatgcaagctttcggcaagacttatggaaagatcttagaattgaccttagcagaggtatccatagaagccattgcatcactcacccaatactacgaccagcctttgagatgcttcacattcggagacttccaattagtaccaaccattgaagaatttgaggaaattctaggatgtcctctcggnggaagagaaccatatctttcatccgggtgtctcccctctttgagcagaattgcaactgtggtcaaggattcagcaagaggtttggacagcataaaacagactcggaacggcatggcgggcctaccac

SEQ ID NO: 282222 - DNA, 413 bp, Glycine max
  unsure (1)..(413): unsure at all n locations
tgtaagaatttgtgatagtgattntgccgtagatgttgatgttttanaagtactaccggatttgtattttttatgggtgattgtgtttttacatggagttctaagaagcaagacattgtgacactttttacttgtgaagccgagtatgtagctgcaacttcttgcacatgtcatgccatttggcttagaagattgttggaggaacttcagttgttgcaaaaggaaagcacaaagatctatattgataatagatctgcacaagagcttgccaagaatccggtgttccatgaacgaagtaagtatatatatacaaggtagcatttcattagagagtgcattaccaaaaaagaagtagaattgactcatgtgataactcatgatcaagttgcggatattttcaccatgcctctcaa

SEQ ID NO: 282223 - DNA, 502 bp, Glycine max
  unsure (1)..(502): unsure at all n locations
agggctgttanaactgattgccattgggaacaccccgtganntcagctgatagctnttgnancncncagagccgaccggcaggcttccaaccttgtatggcagggatttaatccaatttccaaacatctccttgtccttttggaccttggggaaaggaaccttccagggaatatcccacggaggcctcctatcctcctctatatggacctttcttggaattcaaatgttagtaattcaaccgtattaaagacaaagggaatttgaataaacaggacatgtgcactttcctttctgtgatccccatncctgagagactagacacatgatttatcgtatgacagtgtgtatattgtatgaacaaactagatgctactaaataagagagctgacactagataaaatagagcaactctatctagttgtggcgatattccttaacataataatctttgtcacttgtcaanacaccatagaatatcaataattatacttatgttatcn

SEQ ID NO: 282224 - DNA, 441 bp, Glycine max
  unsure (1)..(441): unsure at all n locations
ctttaaaactagtcacttaaaggttatgactttggttagaatctncagaaacaagtcacttgaagaatgtgacttttggaaatgtttttttcaaaatcagtcactggtaatcgattaccattaaggtgtaatcgattacacatcaacagatgtgacttcattttgaattttgaaaatcttaacattntaaaacactggtaatcgattacatgattatggtaactgattacagctttgtaaatcagtttgaaaaaaatgctggctactggtaatcgattactaccttctggtaatcgattaccagagagtaaaacactttggtaaaaaatttggtgaaaacttcatgtcctactcaatgttttgaaaaagttnttagtacttatcttgattgagtcttctcttgattcttgaatcttgagtcttgaatcttgatcttgattc

SEQ ID NO: 282225 - DNA, 446 bp, Glycine max
  unsure (1)..(446): unsure at all n locations
agctgttttttgaaccttggaaggtctctgatctttgaancctgaaancacagngaccggaggagccaacnnggtgtgagagacaaacttangcccagccggaaacacaggggcccagggaagccgccaanaggcccaagcnaggagaacgaaancccgggcacnaacaaggcaacgcgagcnaacgaaannaacacaaacaagcacggacccaacaagagacaagaaagccnnccngcaacanacaaccanggccaggagaacaaccnangaagnggaaccagaaagacaaccccccaagagcncncaaccgggcanaggcggcaccaggacagagccacanccgcaagacgccaccangggggcaacaccccaaggaaccnngaccaggacagggacggcaaggcgcaaaacacgccncaacaccnagccaggggancncngag

SEQ ID NO: 282226 - DNA, 355 bp, Glycine max
  unsure (1)..(355): unsure at all n locations
tgcagatatgtcgcggnggtcangagaccttggggacgtcangtaaggtgctattgcccataaccaagcttgaccaatcccgacccaacccggcatagtcagtcagtgagaacctgtgatgtacctaaacaagcgagctcctggcagtcaacagataaaatgaacaaggaccacaaagcattgaggcttgtgtggtggctggccagctgtgaatcttgtgtgatatatgggttatggcctctggtaatcgattaccaagggtgggtaatcgattacaaggcctaaagatgaagacaggaggctaagatggtctcttggcatccattaccacggggtgtaatcgattaccaggctt

SEQ ID NO: 282227 - DNA, 499 bp, Glycine max
  unsure (1)..(499): unsure at all n locations
aganactgtagaacctggatgacaatttgtganaccnngtgattccattgtagcccctgggancctctggagccaacctgaggctggcaggctggacttggcgataggananaagcctannattacatcttaagaataagccaatggagttaggatggagaattcccacagagacaaggtccgatggattttggtgcttcatttaactanagaatatattcttttatcataatataataatgtaacctcttttttttaatttccaacgcggttatggcccgaccaaacggtgggaatcctttttaccaaaaattaacgaatactacaattcaaatgatcggtggatatgtattttttagattaggcgcgaattgacttaaataatggacggaagcacgtcaaaaggtggtcaagaggaaatgaaacgagattaaagttcccaaaaaaatgtggacaccacgggtcaggaatgattgaaaacttgttcgaaactacccgt

SEQ ID NO: 282228 - DNA, 304 bp, Glycine max
caatcatacttccactgttgccacaggtttgggtaaatttctggtatgctgtgggaaccaattccaaatttaattttggaaactatatcttttgatcaaactgttaagcattcagaatcttttgctatcaaattacccattgccttccctactgtattgtgtggcattatgttcagtcagcatcccaatatgttaaactacactgactctgtgatgaagagagaatctcctctatccctgcattacaaactggttgaagggacacatgtcccagacattgtctcgacatctgtctcgacatcag

SEQ ID NO: 282229 - DNA, 509 bp, Glycine max
  unsure (1)..(509): unsure at all n locations
agaaacgtgaaaattttgaaaccccctagtaantccggtgattccntttgagancggggagacctctaaagccaacctgcagccttccagctctggattcgttatatccaggagagttcacataattatctccacacggaccaccacttccacagtggccaaggttccttggaagatcctganacccctcttgaaggaccctccaaggtgagatatgtccaatggcacctttggcctccaaaattcgaaattctgaagatgaaggaggagaagggtttccttgacttccacatgaccatccttgaaatggccattgctggccttgcctggggagaaaggatgacagatganaagctggtgagaagatcctcagatctttgccttagagatttgacttgaaagtcactgcattagaggaggcccaagacttttgcaacatgagagtagatgaactcattgggtccttcaaaccttgacctaggactctcggatagactganaaaagagca

SEQ ID NO: 282230 - DNA, 397 bp, Glycine max
  unsure (1)..(397): unsure at all n locations
aatcaaaccacatgttgatttaagttatataaaatattnttaatttaactacatgtctttaaatttaaatcttaaatatataatcatattaaatatttagagaaagaaatttaccgtgtataataactctatcgtctatgattttaattcacaaaagatttcaatcctaagagcaacttaatagaaatacactacactacccaaatatacatggtggtatctagctcgacagatatttatcaaaataataataatacatgtcgtcttaatcttagattattattgattatgtaggctctagcttctcttaanttttttcctatcatgcatgtntcctttgttggtggtggtggtggtggtattattattattattattattattatcatagattatg

SEQ ID NO: 282231 - DNA, 148 bp, Glycine max
ctatcattgttattatttctttcttcatcattaagggaaacacttgggctgccagatccttccacctttggatgtattctttaaaagatccgtgcccccttttttacatgttttgtagttgcatcctatccgaagacattatactgac

SEQ ID NO: 282232 - DNA, 186 bp, Glycine max
  unsure (1)..(186): unsure at all n locations
gtttgggaaataagtgtgggggttttgttctttgacaaacttgtttgtggctatgcttcatgatgtattntggccatacttgatatacattgtatatngggttaaatgttggacatgctgaatgaaatgttgtttctcaaaagctatagaagtaaaaaaaaaaaatttcgaaaaaaaaagaaaaag

SEQ ID NO: 282233 - DNA, 438 bp, Glycine max
  unsure (1)..(438): unsure at all n locations
aggaactgtgaaaactgtatgcttttagacgacnnctgatctttgagnncntgggatncacccggacccgggacgcaaagncattttgagcatgcaaccattcattaagagcaataaanaaacggtcaaatggggggaacttctatcagccgaacattatctcattacagataaggcccacaaatgcatcatgtcagggaacttaacaaagctcattggtcaaaacgctatccctgaaagttgtatatcactcttatagagaactgcataaaacgaccaaagatataaatttttcctactatttaaccatttacagggtttgaaatagaaaaaacttatatgtggctctttagacgattctggtgctgttccgtcataagatttgcacgttcacctcaatgattctcataataaatggttactttaaaggttctctag

SEQ ID NO: 282234 - DNA, 402 bp, Glycine max
  unsure (1)..(402): unsure at all n locations
gctatctanatcggggatgaacaaaaaaacctgtttatattatgtttactccaaccaaatgcgtagattgcaaattgccagtccctcaactcatgcaaagatggaaatacagatattacattctttaaattgcattcaacaaacacaaacgcacatatatacgtggaacaattaatataatttgaatattgaatacataaatactatttttatgatgattaataacttgccttgtgacaatatatactacaacccagctgtgtaatatttcgcaaaaatgcttgatgactccttcttctctctgttcacatactgcaaaaattcgttgaatatccctatactagctgatttagacaacatctttcccatgggatccaagcaagtgctagctcttagacagaa

SEQ ID NO: 282235 - DNA, 607 bp, Glycine max
  unsure (1)..(607): unsure at all n locations
tgagatgtgnnnntttgaanccccttttnagagnncaaatganngcnnatcgatantcattcgagaanccacgcnncggtacccggggataccncnnagagncgatcttgcaggcattgcanacntnnggtttgtnngnngttgtaatgcaatnnaaaggnnaaccgagacaccaaagagcaagaaaaaataaagtggccatatannggcctacaggacggtctttgggaattggataccataccaaaacaattttgtggggcccattnttcattacacccctttcgttgggaaatggggttaaccaaatattttaattatcaatttcaatagacgggtnntactcctagaattatgccataccttgttttctttataccatgaaaaagtcacacatctctgggatgtgttcaaaaacatttaaaagttgaaagttgaaaaatcaaactcaacaaaaaagaaataaagtgtgtcaaaatctgacncgtggtggtgaatactatggcaaatatgacggttcaggtgaacaacgtctggggtctttttccaggtacctagaggaatgtggaatcgtcccacagtacaccttgccggggtcacctagcat

SEQ ID NO: 282236 - DNA, 450 bp, Glycine max
  unsure (1)..(450): unsure at all n locations
tatgggttagaagtaaatataaaacatgttgtctgaccatattcacttttaatngactgacactcaatttcttttttgttgctatctttattgctctgaagaaaatgttttgttttatttgattggttcctattttaactgactgcacatttttggtaacttgacaattggtgcctttgtgatgtcttgtcattttgatttattaatttacctatgaatttaactttctcatatgaatatttctacaatgttcagagttctttagtagttttctattgacacactaatctgttactgcttaatggcgtgtatatatatattttatatataatgaggaaatacctttccccaaaatgtgaggtttcgaagttcaaattcactctgagccatttactgatatgatgagaaaatagacaatatatatgtgcaaacaaaaaaatatgcttctga

SEQ ID NO: 282237 - DNA, 478 bp, Glycine max
  unsure (1)..(478): unsure at all n locations
gggcgtgattttgagccttttgnagtcatatgatnttttganancnccgaanncnanagngaccagaggtttgaagcnggatttttctattcaagcagnttaccttacagcgacagaccgaacaacaggggccctgagggcaacgacgcacggcacaaccagaaaaccaaaacgaaaaaccaccaagagaagacgcaccaacgcacgattgcccacaaaancgacaaacagaagaagaaggaggaagaganggaccangacaaccacacgaacactcccgaaaangccgacgccngcactgccacgggagaaaggacgacagangaaccaccggggacaaagagccccagagcccagccaagagaagggacccgaaggcacggccacagagaggcccaccacacgngaacacgagaacaagaacccagtcgcccgccgaccgccgagcaggaacccggaaggactgaaaaaacacgac

SEQ ID NO: 282238 - DNA, 386 bp, Glycine max
  unsure (1)..(386): unsure at all n locations
gcggtaagcttgtattgcacncttcaaccaacccagcggatgctggcgnagagggggggggggtagcttttacnggnccaccacgggggggtgagatgaagcttcaattaatccctagatttagagcacaaggtccgagataaaaccctatgcttgtgactctgttcacgctaagatcatcctgtaacacgtgcagaacaccttcactcccaatatactggggatcagcgcacagaatgttacaccgggagacatggcgctatctgaatatatgatatgtaggctgcgcgctaagatctctatatgcagctcctcttgtggggggcggggttatacctatgtatgagatctgtgtgaggcttcgcacgcgcttatatccataaggc

SEQ ID NO: 282239 - DNA, 500 bp, Glycine max
  unsure (1)..(500): unsure at all n locations
aggcgcgtaaantttgaaacccctggagaggccaatgatgcgttgtanccctggacanntccacacgnacccgagatccctagagtcgattgctggcgtgcaagcagagtttaataacattgcaacaagagnccacaggagcacggacgaccacgctggctcaactaatacaganacaccctccatagagcactcctacacagcaggcatatccgactgacacacacgtctgccacgacatctagcctgtgccacactgtcgattacacgtcatacgaactactccacggaactacctgctatactcaccgactacatattcttactcgaacggaagactccttagaacatgggagctacatcctgtcaaatgcgccctcaacaccagaatgagaagtaccggacctcactcagccacggaatcctgatgtgcaaggagacaactcatgtgagacctcaagcgttgacaaagacacttgtcggaggaaaataaaacatgg

SEQ ID NO: 282240 - DNA, 495 bp, Glycine max
  unsure (1)..(495): unsure at all n locations
gcagcaggtcangagttcactcatacaccnanaccnagacctagctgggcaaaacaaggcaggagatttaggcttataattgtcgctaaaaacgagcggtcgttaaatgtaaagcataactatatcttgctattaaatactcagagagagagatgtacacgagcataataactctatcgtctatgattaaaatccacaaaacatatcaatcctaacagcaactcattagaaatacactacacttcccagatatacatggtggcatcgagctcgacagatctttagtcaagataatcaataatcacatgtgcgtcttatgtcgttagagtgattgactgattatcgtagggctctacgcttgctctaagttctcacctatcgagcatgtatgcttagccgtggtgctgatgcagccctattatgactataatgataacgcacatacagtatggaggccctagctagatgccatttgtatgtggagatataggacan

SEQ ID NO: 282241 - DNA, 517 bp, Glycine max
  unsure (1)..(517): unsure at all n locations
aaacgtgaaatgtncctttgnactccggcgattccattgatanccgcganacncnaactcgaaccggagattctctacatcactttcatgcatgcacactntanttaagacaaagagatnaaagaaatccaagatggatgatcaagacagnctctaaagtcttataagaggtatattaaatatgaacggaactncaattgaagtagcaaaaggtttggccaagaattgtaagctaaaaagtctttgtcaacaaatgtactctctggtaatcgattaccacaggatgtaatcgattaccagtggcctaaactgattcacaacaggtattagatattgaattcaaagtttggaatgtgcaatcgatcacacatatatggtattcgattaccaccattctctgaacctttaattttaaaatttcgacccttgtattggatcacacacttacgtgagttgtttgcgcaagaaggttctcgagacattttgaaccacgcatttctttttgtgtgttctattg

SEQ ID NO: 282242 - DNA, 326 bp, Glycine max
  unsure (1)..(326): unsure at all n locations
agagagaccaatcacgagcacattcntggttttgaagaggagtnagctgcttgctcaaggtccaaagcgtttatgcgagacagagaccaacatgttagccatcgtcagcaagtaccaagaagaactaaatctagccacagcccacgagcatagagtgctggacgagtatgcccaagtgtacacggaaaatgaggctagaggaagggtgatcgactcgttacatcaagaggcaacaatgtggatggaccgattttcttttaccttgaacgggagtcaagaactgtcccaatttctagccaaggccaaagcaatggcggacacctact

SEQ ID NO: 282243 - DNA, 529 bp, Glycine max
  unsure (1)..(529): unsure at all n locations
agggggtgtgacnntttgaannccccttttagnngnccgttgttttcnnnttgnnncagcttgcanantcnnnccnnntnngnncnnggnncncgnggnncctnttttttgcgccngcnggcgttttttctcctttcgnnctngcccgcnncncggcgcccggggggngtntcggcggnncgcggcctgcggccnnctntcggctcnngcntttcctcgtttgcggtcgctttcnttcttcccctcccgntctgtnggcttctttgntgtttctcctcncccttttcctctgntcctcgtnctttgttccctctgnntggcccctgcctcccttgctctcgtctcgtcccttgttgcttgtgtttgcttgccttcgctgcttgnnnntggtccgtgtctcnttgccctcgtcntgtgggcgcgcgtggcttcttgcctctcgtctcgncttcggcctggggcctttgccngcctctccgtgggntcgcgnngtggttcctctccttcttgcctggtgtcggtgtgtgcg

SEQ ID NO: 282244 - DNA, 436 bp, Glycine max
  unsure (1)..(436): unsure at all n locations
cttgctaaaccaaaatctgcaacaactgcttcaaagtcctcatttaacaatatatnagcagcttcgaaatcacgatgaataatctttgggtcgcaatgatcgtgcaaataagcaagccccttaacagtggtggttgtgattttagacgatctacaaaaatacaatcaatatacataaaaacatttttacttttaaaaaacatgtcgaaatttaactacaagaaattttaattgcttttatgctattttagcataggagtttatttgtattctgtttcgactgcattaaatgagatactgttgttggttttgtggaggaaattataaaaaagagaggagagaagagagacaataagtatgcagaggaaatagaattattctattctaaattcaattgttctcaacaacgatacantaaatatctaaagataactaat

SEQ ID NO: 282245 - DNA, 359 bp, Glycine max
  unsure (1)..(359): unsure at all n locations
ctcccttgagtggcatttgtattggttgttatcttgattgttgcatcttagtacatttgatatctttttggattgtgcatcatcataatgcatgtgaagaaaattttctaagttagaaaaatttcttcagaggcaaaaactctaggttntaataaattacaacctcgttttaatcaattacagttacaacaagttgtctgaagcttgtagagttaagtctcatatcggtttaatcgattattgatatctcataatcaattacactgttgtttgaggcaatgactaatttagtcaggagtctctgctttaatcgattaccaagtggattaatcgattacttttctcttgttcaagtgttt

SEQ ID NO: 282246 - DNA, 386 bp, Glycine max
  unsure (1)..(386): unsure at all n locations
tgctcttatntacattgatgtttgtatttattggatgaggttgtatgccattctttgttttaagggtagcatttctgggtaaaactaactttccaaatgtttgcctttgcaggaaatggccccgaggaagcttgcctcaaagaggtccaggaaggacaaggcggccgaaggaactagttccgctcctgagtatgacagtcaccgctttaggagcgctgtacaccagcagcgcttcgaggccatcaagggatggtcgtttctccgggagcgacgcgtccagctcagggacgacgaatatactgatttccaggaggaaataaggcgccagcggtggacatcactggttactcccatggccaagttcgatccagaaatagtccttgagt

SEQ ID NO: 282247 - DNA, 215 bp, Glycine max
  unsure (1)..(215): unsure at all n locations
gaggactactggacttctactaaaccanngggcgggntttgggnnatttattggngngggggtggtgggngattcgggtcgggatttggttttctttngacngaaccaacttggtctcctgaaataaaacgcgaactattctccacaagaagaacgcgaactgccctcgtaagtaccgatgtacagaggccggcaaagctctgggagaaaaggat

SEQ ID NO: 282248 - DNA, 480 bp, Glycine max
  unsure (1)..(480): unsure at all n locations
ncttagaccgatcgnagncgtctacattngcacncagctgcacttgagacannggnaacagggagtgggggaaggtgactttccaattatanagangacacgggggaggagagggaaaaatcaaccacaccaacaccccccganaccagagaggacgacctncacgacggaggncgcgaacgagcccacaccaccgcaaggagcaaaagacacagggagaccccgacacaagacacagaaaacaacaacaagcacgaccgcaaacaggcacaggcgggggccgaancagcagacgaccgaaacccgatcccgagtccacagcggtcagagcaaagacgagacgggacagggcagaacccatgaccaaagaggcgactctttgacacttgactttcaatggtattaatccagtacatctggtttaaacggttacaatgtcaaatcccaatgacattcaatcctggtgtgttgatcgacccg

SEQ ID NO: 282249 - DNA, 427 bp, Glycine max
  unsure (1)..(427): unsure at all n locations
tggcagcctctttttcaatggaactaacctggttatattnccttggatagccctttggagcgtggtttccctttcctggtttggaacctcactacaagccttaagtgaaaaaccatgatattacattatccttagggaatttgggagctttggaattgtttggggataagtgtggggggtttttgttcattggacaacttgttttgtgactatggctcatgatgtattttgggcctacttgatgaacattggattttggtaaatgttggacatgctggatgaaatgttgtttctcaaaggcaaaaaaaaaaacaaaaaaaaggcaatagagttgagtgaataagatctttaatggcacaggaatgatgaaactcttggcctacccttcatggttaagtntaatcttacttctttttcttatttctaa

SEQ ID NO: 282250 - DNA, 449 bp, Glycine max
  unsure (1)..(449): unsure at all n locations
taactcttgaagaagttgtttgatccagactaactcacaagtggttgtggccatagccctacattttgcttctgcactagaccgagcaacagtgttttgttttttgctcatccaagagataatattacctcaatggatacacaatatccagtagtggaccttctgtctatggagcatccagtctttaacttgtcctcatataacaatccttgtcctggagccttctcaatgttcctgagaatgcgaatcacaaccttctggtgatcaacatgaggagcttacatgaatngactaaccagtcttctatatctttctggatctgagtatggatcaccttggtctgccattaacttttgatttggatctataggaatattaacgggtcaacagttagtcatgtctggttcttcttaaatatcaagagcatactnntctttgaagactatatg

SEQ ID NO: 282251 - DNA, 251 bp, Glycine max
gaaatgacctggaacgtgactagctgaacagagcagggcggacttagacggagtctatacgggaaagggccatgtgaaggggagacagagacttatataattttgatgccacacgaggtaaatgaactaaaaagggagcacctgataaaacaccttaatatgaacaagtggacgcatagcacaccggataatgaattatctcagtgtggcaacataagatttgtgtagcgagtacaacgtttgagagaaga

SEQ ID NO: 282252 - DNA, 245 bp, Glycine max
tcatacggacgggggcatgttagaatacctttccaggctcaaaaagtgcaagaaatgattggtgtttctgcgtatttctggaaatgcgatgaactccctgagcgagcatgtcgcgcataactagttcatcaggacttattgaatacatgctgttgcgaaagaactcgttacacgagcctaccttgctaagtaagtgcatcttttaaggatgaacactcatgctcttgctgagatgtaagtggcta

SEQ ID NO: 282253 - DNA, 234 bp, Glycine max
  unsure (1)..(234): unsure at all n locations
gaatgactgaggcatgactgaactgccaagacggcgacngttgagaaaattccggatcccaggcttataccaaccaatcccattaaaattataaatatagttattgacttaactacaacatgcggggaatgacaaatcttaccggtaaaattctacgtaggaagtgaaaaccaatgaaaaagaaaattgctatctaaggatggcccttttctgccattaaagtatgtagtgcac

SEQ ID NO: 282254 - DNA, 348 bp, Glycine max
  unsure (1)..(348): unsure at all n locations
gaccaatggaaaacgtgaatgccggaattaccatagactacattcaccaaaaaaaaaaccttaaggtccataccctcgccttctaaaaagcatgcttccttcttttttgccgaaatagaaattgttgtcacctaatctaaaaccaccatcctctcgaacctcatgattgtggtttgtggataacattaatggtgagtctaccgaggttgagtggaaatgaaagagccaattgtgagaagtgaaaaaacatataanagggaaagtgacatcaaaatgatgggttcagaatatcaatagaactcattacaatctctcataagttgatagataagggatcctgagaaaacg

SEQ ID NO: 282255 - DNA, 170 bp, Glycine max
  unsure (1)..(170): unsure at all n locations
ctctgattctgcttgctgatgagaagaaaaagctttggttaaaataaaaaggttccctttttcatatttattcagcttgccatgtcctattgatgagcaaaggcccactnttcttttactgtgacctactcagccaaagtgaaaaactgacttgaaacctaaatctgctc

SEQ ID NO: 282256 - DNA, 235 bp, Glycine max
  unsure (1)..(235): unsure at all n locations
actgggcgtgtgcatgaatggcagattctctntcagattcttccaactcgctaagcgagttgagtgccttgcttagcggatgttacttgctaagcgcatatgcctcgcttagcgagacaccagctacttcaaccttcttcttcttcatcctttagcctgaaactgaagttgaaccacattaattcacaatattgggaatatctactgagtgaaatgggactaaacataaatatgt

SEQ ID NO: 282257 - DNA, 407 bp, Glycine max
  unsure (1)..(407): unsure at all n locations
gggcgttacctgatcctttggagcatttatcgctgaacctggaaacccaccggaccgggatcccaagcgattgaggcagcaaccggttantcagagagggcccacaacagggacccccggcntggncaaaccccaccagaaaaanaaaaagcctttctaacaaaaattaagatgaccgaaatatataaagttaacttagattagagatcaataactatcagacagatttaaaaatcctccaaaaagtaatgataccctacactctaggttggaaatagatccacgccctatgagataaataataatattccctatattcttttttttcgactatatccttcgtcatataatatcatgaaagaaaattatccaaaaatgtatttagttttaaataaataattatttct

SEQ ID NO: 282258 - DNA, 458 bp, Glycine max
  unsure (1)..(458): unsure at all n locations
tattacaaatgtaganataagctgcatgataaatcatgattgtttcaaggagttntgatgataacagagatgatgacaaaaaactcaaaagtcaagatcacttcatgataacaaagatgatgacattcaagattaagttcaagattgagtcaagaacacttcaaggatcaaaaganaatttgatttcaagaatcaagattcaaaattcaagaataatcaagatcgagatctaagactcaaagattcaagaatcaagagaagacttaatcaagataagtattaaaaagtttttcaaaacattgagtagcacaagaagttttcacaaaatcattaccaaagagttttactctntgataatcgattatcanattatagtaatcgattaccagtggttttaaaacgttaagattntcaaaattcaaaatgaagaatcacatctggtgatgtgtaatcgatta

SEQ ID NO: 282259 - DNA, 408 bp, Glycine max
  unsure (1)..(408): unsure at all n locations
agcgtgtatctcttggctatttctttaaaactagtcacttagaaagttatgacttttgaaagaatcttcagaaacaagtcacttgaagaattgtgacttttggaaatgtatttttcaaaatcagtcactggtaatcgattaccattaaggtgtaatcgattacacatcaacagatgtgacttcattntgaattctgaaaatcttagcattttaaaacactggtaatcgattacatgattatggtaactgattacagctttgtaaatcagtttgaaaaaaatgctggctactggtaatcgattactaccttctggtaatcgattaccagagagtanagcactttggtaaagaaatcggtgaatacttcatgtcctactcaatggttctgaaaaagttntagtacttatc

SEQ ID NO: 282260 - DNA, 335 bp, Glycine max
tctaatatagttcttttctccgaccgattatggccttttgatgttccaaacggggagagaacttaagggtagaatctaggaataaattccaatcttaagggggagtaaggattgatagcacacattatcaatcgcatatcgcttatttagacctcagattattgtcatcatcaaaaagggggagatcgctcaagcatatatgatatgacagtatgatgataccaaagatgagcgtgattcatgtcaacaattcgtagatccacagaagaacgatgtccttagttgactagatcttatacagaattccttatgagatgccgcacaagtacggctaa

SEQ ID NO: 282261 - DNA, 390 bp, Glycine max
ttccaacctccttttcttgttagaatatcaatggttggacaagtggcctcaaatatcttaggaaggggggttgaattaaaatatcacaatctttccttattcaaaagttctattttgattttaacccaaaaacccaagatggctttcaaaatgacctcctaaataataatgcaaattaatcttactgattagaattattaagaattaaacattaaagaagtttaagggaagaaagattgcaaactcagatttatactggttcggcacaccctgtgtaaaatttgaatcaaatttctaaatagctgtataatcattttgccactacatcgattaccgagagtaatctcttgaaaaagttttgacaaaactcttaaaaatgagagaatgatg

SEQ ID NO: 282262 - DNA, 400 bp, Glycine max
  unsure (1)..(400): unsure at all n locations
tgcctcanagagatctaggaaggataaagcggctgattgaactttttccgctcccgaatatgacagcgcccgttttaggagtgctgaacaccaccagcgcttcgaggccatcaagggatggtcatttctccgggagcgacgcgtccagctcagggacgacgagtataccgacttccaggaggagatagttcgccggcggtggacatcactggttacccccatggccaagttcgacccagacgtagtcctcaagttttatgcgaatgcttggcctatagaggaggacgtgcgagatatgcgatcctaggtgaggggtcagtggatntcgttcgatgtggaggctctcagccagttcctgcgataccctttagtgctagaggatggccaggaatgtgagtat

SEQ ID NO: 282263 - DNA, 278 bp, Glycine max
gtcattaccctgagctttactgaacttgaacaccgccggtttagcatgagagcgcgttgtatgacggggaagcagttgctctggatctgactatgaggacactggaggggtatccatttattgaaatgttgctatcttacgactatcaatattgtccaatctctctatatagaagtaggcaactttttttcgtctcaggacctaaattaaatcatagatgagccaggtgctttttaacctttacatcgacatgctacacggactgagcgtcagcattt

SEQ ID NO: 282264 - DNA, 302 bp, Glycine max
caccatggagacgcagcggaatacaaacgataagaggtgagaggaggcgccatccactatggaataagccatggaacaaggagcttcaccaccaagatgatccttggagaggatgcttcactggaggacaagaaagacggatagatagacagaggggggagcacgaaattgaatgaacacaaagggtgataagttgaacttcgacctgtgtctcacaagactctcattcatcaaacgtactaacagtgttacacatgcttctatttatagactaagtagcttccttgagatgcttacttgag

SEQ ID NO: 282265 - DNA, 397 bp, Glycine max
  unsure (1)..(397): unsure at all n locations
tttgatgcatgcaagctagttttagatgttatggaatatatgctgaggcttcgcaacatgaacctgcgatactcatggtaacgaatttgttcttcactgagggcatttacaatggcagcaccctcagcattcttgggaggaaccctatgttgcagagtgttaaagaaatgccaattgttgggggtagtgggatcttcaaatatgcaaggggttcttctgtgcttaagacacatgtgcatgatgctaaagctggtgttgcaattgtcgaatacaacgtgtctgtcctgcatgtttgagtgaaataggttgaagttgctctttataatatangtttngtttggaaggtgagtttgaatctttctcttctaatctctctaattttaagtccattcgtctt

SEQ ID NO: 282266 - DNA, 356 bp, Glycine max
  unsure (1)..(356): unsure at all n locations
gacacaacatactcagcttctatccaagctcatcatggaggagagtctccttcttctatggcttattcctcannggatggctcctcctctcacctcttctcctttgtctttcgctgcatctccatggtggaaaatcaccattgaaggacctcattgaagctcacagatccagcctccatagaagctcctaaccccactaccacttcttcaaatacgagttctattaaatgttttaagtgtttgggaaatggtcatatctcctcccaatgtcctaacaacaggactatggttgtgtgtgtaatgggatatcactagcacatattcttctagtccttctaggaaactgatgacaaacc

SEQ ID NO: 282267 - DNA, 393 bp, Glycine max
  unsure (1)..(393): unsure at all n locations
angaccaagagaangaagggncatcatgctcagagctggagggcctcttccttgatactgaccatgtcttanacttcgtacttgatctgtaattccacccgtatatgttcttcgatctgttgcgcctggagagaaaaccttattgctagaggttccctgacttcgatagggatcgtggcatatgtgttcgttgtaaggcgcagaggggtcaccttagtcattggctgatgtgaacaatgatgagcatcaagtatattggaggagtgcttcttggacaaacccttcgacttgtaagatctcgtgcggagcgctgtaaagataaacttgttagttgcctctacttggccagtttgctggggatgttcagaaaaagtcacaaggtgctagacaccg

SEQ ID NO: 282268 - DNA, 661 bp, Glycine max
  unsure (1)..(661): unsure at all n locations
cgcattcctcccnnnnnnnaaggggcnaaggcnaacgatggggccgnttgccagnttnnctnctagcnattnnacgagacactccagntaatactcaagcctnttatatgccgcaagtagatagaaagttgctatatagntagtatccatgttgacgtanngccacataccagtgtgtgtgcctgaacgcanncgttaaacccattcatgtacttttcnntctctntctctcgtatctatctattcctctttatcttttaattcatatcctattacctacaccaacgtcatccttcgtcgcgatcgagatannatacgtangaacaccatagtgcgatagggaccttcataagtncacacgaatacgntctacaacgagaagaattcgtgcgcgtagatnattattaagatatgtgcaggccatagaataatgaaactttcactcaanaccaatgatagaatcaatagccatntacctgagtcaccttcacacaaatatgagacattatttcgggatgatattggagaatttacacggctcgatccaacatagttcatgtgatccaaagtgtgcatatgatgtccttactaatatgatagatagaaagccacaccatcgtataatgtagttcttagacgttaaatgatcactgcaataccn

SEQ ID NO: 282269 - DNA, 390 bp, Glycine max
  unsure (1)..(390): unsure at all n locations
taagcttattccgatatgggctcaaaacggcagcaggtatcttcagtttctgagtaagtggtctccatggtttgttcatcaattcagttggctgaacaaaatcatcctctttttcatttccaaaaccaccttcctttggccatatagcattgccatagccataggttccctttgttcaaagagccacctattatgatcaaaatctccagtttggctcctcaccagtgctgacttcgttgacttcatcatggacaatctcctctccattntagacattccacttggtggaggaagtagaaggggatgcccattatctatagccacttcatctagttctgtgttctgatatggctccttgcatcctgngcatatcccacctnctgttttact

SEQ ID NO: 282270 - DNA, 383 bp, Glycine max
atgaagtgcgtgagacaagtagttcaattaatgtttggtgatttacactcatgacaaggaatatcaggacgtgagagtgtacgacaatcattttcattcaatgaaaccaagctgcatccattctctggacaatacctcattcgagtcaatcctcaaattatacaaatataggccttctatgcataaatgcctgacaaaatgttgggtgatcgaataatacaagcatatattctatctacctaagtagagtattaagcaaataccacaagtttttttgtgttacagtttggtgaaactcattacttttatcaacaatttattatttacgatatataaaaatgtatgttgcctacaaaataattaacgctatgaataacttatga

SEQ ID NO: 282271 - DNA, 273 bp, Glycine max
agagttatgagcttgaacgtatcttgcctgaccttggctgaggggccctttttctaaatggaatggggaaaaagcacctctaatcaacctaattggaaaatgtccgagaaacaaccggcctcatgtccacgtcggggatccgaattacgcttactttggttcgcttaccgatcccatcacttcatatttgcctatgctatgttacgttattctcttctccgcccttgcgttacatctagcattttccatcaataaaatccgcttgagctcttg

SEQ ID NO: 282272 - DNA, 358 bp, Glycine max
  unsure (1)..(358): unsure at all n locations
acattcttgtgctttctttgtggaaaatacacacttgctcaaactcatgaaaaggaacacaaactccatcacaatcatgaattcaattcanaataaagacatacgccccattttcacanaaattaaaaataaaaaaataaaagtgttntactgccatgtcatagaaaacaagtcaaactattcaaaatgcttcaggatgagcaaactaactactaataaataaaactagtagtgtatgtagacataaaggaaatattgtactaaaaccataattataataataaaccanaaggcaaaaagtatcaccaagaatcaacaatgtcaacagtgtctaaaccggggaatcagtgagagcaac

SEQ ID NO: 282273 - DNA, 497 bp, Glycine max
  unsure (1)..(497): unsure at all n locations
tggatgannnttgaaagcttggaagacagtgattcattgagacccgggatctatgagncgacctgaggcatcaacctgtatgttaagtctaacaattttatcggcctgttgcaccaatggtaaggggaggtaatacaagacatcttgccaaacaaagtcaggttagcgataactcgcatggtgcttttttccttccatggcctatattgtagcanaagtcatttgatccagctcaaggtttgatgaagtttgaaaaatgatgccggaatttatacttgtgcacagttggagatgttattttctccctgctttctttgacatgatgattcacttgattgctcatctgggcagaaaaatcaaatgttgggtgctgttatctacggtggatgtaccccttgaccgaacatggacatcttaaacggtttgcaagaatctatatatccagaacctctattgttgaaagacattgcaaagaaccatgaattctttcaaaactg

SEQ ID NO: 282274 - DNA, 339 bp, Glycine max
  unsure (1)..(339): unsure at all n locations
cattctcctaacaaagtcgaacatgccataactcaatcgtgctttttcttcaatgtcatatgtagcaaagaccttgatcctgccaagttagatgagctagaaaatgaggctaccaatacattgtgtcgcatggagatgtatttacctcctgagttcttcggcattgcggcacacttaattgttcatctggtgagggaaattaaatgttatggtcttgtatatttgtggaggatgtacccgattgaacaatactagaagatcttacaatggtgtacaaagaatctacaccgttntgaagcatctattgtgcgaaggtacattgtacaataaactattgag

SEQ ID NO: 282275 - DNA, 530 bp, Glycine max
  unsure (1)..(530): unsure at all n locations
atgcgcgactcanaantttagaaacccctgtgagaaagacgntttgannccatttgatnaccttttgnacanncaatcagngnnncacaggagtgtggcgcgggnncccatctagatggaggggaggaggttttncccnttttttagccggcacgacacgggngacacagcggcttataattacctgattatacagcactctcctagattgccctataaatttatagtggaccgttaaaaaatatgagttatataaaatacatcaacacccactattcgttgcgacttaattaattatacgacaccaataggaactcttctatttaatagtcaactacagataaacaaaaattccattgtgttgccacaaagacctgctctcgaggattttatgctacacatcttattttcgttatcaacatcaccttgggtacaaataaaatggatagccaatttcatttcccctatctaaatttggtggtaaatgaggctccatcccgctacaactcaaaaccatatctcgatggccc

SEQ ID NO: 282276 - DNA, 517 bp, Glycine max
  unsure (1)..(517): unsure at all n locations
cgcagatggatattcgatgctanagcnctcgaanaacacncaancnanancacanggccnncaccgcnagaggaggagagtgggacttatnttatgctattctgaccancacgccgagatacatgcacagaagaatgtacaacctacggcttcttatcatggtgacaatgaggctacattcctcctgttcgagactcgccatctccatatacatccctaaaattctaacaaaccagacactgtatttattcacgcaataaacaaaccttctccttacccaccatccatctatcacaacagccatccctaataaaccacacagtatcgctaccgcactttcaatgacgaacatcacctttaacacaatcctaatacaccaaccataaaatgatatgtgcagcaagaaagcctgtgtaattcaccacaataccagtggtctatgctgacttgctccaatactactcgattattaaatgatggccgtaccctatccaaggttcttgaactctcatatttt

SEQ ID NO: 282277 - DNA, 451 bp, Glycine max
  unsure (1)..(451): unsure at all n locations
aggaggtanntttgaacccgttggaggccttgatccatcgaaccctggaacccaatanncactaaggtggcaggctaatgtagcagagaggccaacatattctnccaatttccatgggcggacaaaaggtcttccatggcacgcagggacccaaggggaaaacacagaaccccctaatgctcccctataaataaaatgcaactctggaaggcactactattatggcagacgatggctatgccggaaaccactaatgactgcactctgggcatccatgctacactaggaacatgtctgcaggatagtaaccaacgatcattgaatcgctaaaaatatcccacttgtggggcctcctttggatacatgctatgaaggggaacttcatttcaaatggagggtcccaactaaaggacatgccaacgatgttacttgaacatcgtatggaaagagg

SEQ ID NO: 282278 - DNA, 329 bp, Glycine max
  unsure (1)..(329): unsure at all n locations
tggaacatagtgtgggttcgagtagtatagcattaatantagcacaaagagcttcttcattttgctcacgtccttcaaacaaaacacctggcatagcacacaggacaatataaaatgtttatattacagtaagtccactcaaatatttctaacaagcagatgaatcttaactcattgcttcattcctgtatgagaaggtgatatgctctacctcatagacttcatggatgagactttacaatcttaaaacttatatgacggcatgtggatccacgcttaggcctataaacaggcataagctgataggattttggtttctattgaaccca

SEQ ID NO: 282279 - DNA, 226 bp, Glycine max
gcggatgactgagcatgactgaacagcaacacgccggagaaaattgtcacgtttacggaaaccgggcttaatccccaaagacgtcctgggggagcaccagccttgagactggcagtaaagcggcggagacatcaacagcccaccaaaaagaacaggaacataaaaaggcccatataaaggaagtttatgcaacgggaccgttaaataataccaccaacagtaggct

SEQ ID NO: 282280 - DNA, 452 bp, Glycine max
  unsure (1)..(452): unsure at all n locations
aggggcnncccgagcgttgactatggctatgcacncgccacaananaccaagcnctaccagcgangaggggagagagcttttctatgctctcccncaaggatagcggcgactctcacctcattaactttgtctcccctccatcaacatggtggagaataccatatgcagacctcttggaactcaaaattcaacctgcctagtacctccgtaccccactaccaacctttcaatacgacatctttcaatgtataaaagtccaggacatgcgcatattcctctcatgccctacaaaaagataatagtaggccggtaaaggacacactactcatttcttatattcacaaaggaccgggtcaaacctaaacgtgatccattggaaagaagatagggtgctgatcatgattacaaaatcaagcaacacttcctcatcggaggaatccaggacctgagg

SEQ ID NO: 282281 - DNA, 338 bp, Glycine max
  unsure (1)..(338): unsure at all n locations
agagtaattgagcatgagacgtgatcatgaancngacccatangncnggagaaagaatttaggggacacacattacgggggaaaaaaaagggcccccaacgccggcaaccaaaaggagaaaagcccaggacacgccaagcgagcacaaacgaagggcagaacaaaggagagacagaaaacaagaacggccaggaagagcaggcacacgagcgacaagcaccaaggccgccgagacagcaaacgccgaccgaaacgaagagcagaaacacgccggaaaagaagggggggaggaagagacggaggccaacggaggcaacaagaccctgacagcgagcccc

SEQ ID NO: 282282 - DNA, 653 bp, Glycine max
  unsure (1)..(653): unsure at all n locations
agggccccngaggcagtaacgttgngcannngcatcgnanncnnnatncatcnanatancnaanacacnnacacngnnnnagggnnaaggaagaggagggtggagagagttactactttctccgcncncccncncnccccgcncgggggccgtagtgtacaganannacacnacacacccacataccactacatccaccncanagcncaatgatctaataatctagaaacagcgtcagctgacacaagaataagattaaacctcnngcaatngactatgataacagagcaagacattgctgactccgatgtgagtatcgcgacctgaccgcctcgaggtatatacggacgctcgagagtatctcatccgatgtgcgtcattgtgtgacctcgatcgatttctgcatggacattgtataatctatcacatggtggtactactcttacacagaactgtatatatcactatcttcgcaacaatgcggatcggatgctacgatgcgtggctactacgacgggcatacgaagtacttnaccgaacgtgacatgcagcaattactgcacgcgagtgaagttatagagtaggtacaccacatgcgcgtgagagacaatgaacttgataaggacagaatccatcactcctggtgaaggcag

SEQ ID NO: 282283 - DNA, 510 bp, Glycine max
  unsure (1)..(510): unsure at all n locations
aggtgtcnatttgaaagctttggaagcctttgagccttttgaacccctgtgaaacccatcgngnncatgagatgggtgagggacacttcgagaggcgagcgagctttttacccttgtgacaccaacggggagagaagaaccacgagtgagaacacacacacaccaaaagcggggagaggccgcgaggaaggatgcactcacctaatgtttacattccaaacgatctgcaaaggcttgagctaggacagcatcaatgctggcaaagttatgtcttatagagataccgtagactcctttaaggttgtaaagacgactccaccaattctcatttattgttatagaccgaaaacataaattatcttcatggcccctatacctatgggtgagtacggctcttttgctcaaggttaacgcgtaggtgctgaggtaaggtaaacttgatcttccagacaacggagacactctactatgctcatagttatacttaaattcggcctgagttagccntcn

SEQ ID NO: 282284 - DNA, 280 bp, Glycine max
tcgatcactcacttaattttccatatactccccctttgtggttgaatctacgcttcactcgagattaactaatttaagcatatgaggtgttgaatcaatccctattgtctctccccctttggcattaacaaaaagccaaagtgcgtaagaaacataaaacatacataaatgattataatgcatacgaccgaatgtaagcacatatcactaaacatatattatcaagataattaagtttacaactgcatacaattaagagtgagcagatataatcatgttc

SEQ ID NO: 282285 - DNA, 514 bp, Glycine max
  unsure (1)..(514): unsure at all n locations
tgagtgacannanatttgaanaccgtttagtgaagccccggtgatngcaatcgtananccattgcgaanncatgctcggancctgaggatgctgtagagncgaccgtgcagtatgcangcatatcttttntttganttctacatcccccnanaaacaaagactgtttttcacaattctctgctataatagatcaccctgtgatataatcgactactttactttcataacagatccacaagtgatcaagagcactctcatctatgacattgagagtataatctattacattgctcatgaaagtctatcaattttatggaataacactttaatctattgcaatgatcaaataattcgtatctctataaatagtcaccttgtgctctcacttcaataacctcctataacttcttaatgaactaaagtaccagctattttctcatgatacgaagatagaaacaatgcttctaacagtgtgctcccacctataacttcgattttgagacaacttgcgat

SEQ ID NO: 282286 - DNA, 462 bp, Glycine max
  unsure (1)..(462): unsure at all n locations
agtgtatcttgcatgcacncntcacaacatccaacccnacacagcnggagaaggaggggagagatatctttttacnnccccacggccgccggggcctggctggagaagaccaacaagaatcccacaccgcgcactgcatcacagccaattcactccgactaaacctctcgttcacaacacacgcaactataccacgcctgtactgaggcgacgaactccctacaccgcaaacactgctacacgaccacccgaccatagctgatagaccaccgattaggtatctagctcacgatcatgaccaccacgcacgttaacatctcagtaacaacacatacaacaccacggagccaagcttggacataatcaactatacctatcgaacaacacacagacatatcaccacaatacgagcaacaactcagcgaagtctcaagagcgcccacaccgggaaaacaggagcac

SEQ ID NO: 282287 - DNA, 309 bp, Glycine max
  unsure (1)..(309): unsure at all n locations
gagganatgaacgtgaacgtgatcatgaactgaaacatgaanaaagagaggggtctttagggggggattagcncttttaggnggcgaaacaggaccccaagataggaggtccaaatattcctgctggattgaagaaacgaagcctgtactttaagctaccgggctgggagataaataattgtgcacaatgaacagaagaatttcgcctgatgaaacctggtatcctaaagcgtctttacatgataaagctaagagggtaatagatgaagacctattcacaaaactgaaatcgcccctctaaaggctagc

SEQ ID NO: 282288 - DNA, 310 bp, Glycine max
  unsure (1)..(310): unsure at all n locations
gcccagaggtgtgactagctcacacacacnatccnaccgccnggggggggggtggttaagttaccccccaggcgcgcgtgaaatggtcccttccattgagtggtagttatcaccgtctgctatgaatcaggggcataggagtaccacgtctgcgattccgggacgaagaaccaaaccgacgcttcacccactagactacccatgtctgaaaaaccatgcacctttgggacaaagcgctaccttaccgtttcccgacattataaaagtactttccgaaacgagcggactcagaacgtcgccgctcgctctc

SEQ ID NO: 282289 - DNA, 471 bp, Glycine max
  unsure (1)..(471): unsure at all n locations
ggatgaactgancttttgaacggtgtgcatgacttgaancaagnanaagaggagcnagaggattttatggagcagagcggttctcacattttaaaggacngaagaaggcgnatactagtggtgggggaacgtatcanaaaagaacaccaggccgatatacatacggnctattgctcttagcgcatccattatagaaaactattatgggatactgtcaagcagctaatagcagcacttgaggggttggggtgtatattgggcgattttaattccattaaggaccctgacgaaagatttgggaggtgccaaagattatccacaagatcgctgatgagtgaatttaatgaatggatagatgattggagatctgcaagaccttagggaggcggagatttattcgacataaccatggagcgctaaaaacgatgaccgtttttggatccttacatgctttgatatgcctgcagatca

SEQ ID NO: 282290 - DNA, 277 bp, Glycine max
gccccgagggtacatgatcttgaaccaacaaccaccggagggagagggaatacttattaccaagaggcgcctggttactagatacaaacggcttaattaggtgcataaattagatgtcttggacaccaagggttcaagagggaatgagaaaatttctccctaaagacactaattgtctccactgaaataagacttcttcagaccctaatcggaaccttaggtctggacgagctagcttttttttaaccgcgctagcaataagatttttaaacaatta

SEQ ID NO: 282291 - DNA, 431 bp, Glycine max
  unsure (1)..(431): unsure at all n locations
agacggcnnttcgaagcctttgtaaacggtgantctcgatgccttcggaaccnagaggngccaganaggaaggggaancatttgaggaaacagcagcaacaaagtgtggcgcacagaaaaggaaaccggggaacaaacaacccaacgaacaaaangaggaaaaaaangacgcccncgcccaccncaaacgagcccaccgacgccaccgggcaagagagacaagaacacaccggaggagaaaacagaaccggccccgcanaagacgacaaacgagcaaaaagaggacacggggcaacaacagcgacggacatacagaaacgccacaaaacaggcaaaagcggcccgaaaaaggagatgcacggcgaggcaacgaaaccgacaaccagcacggccagcacaagccattcgcgggcgatgaagcaggaaacccc

SEQ ID NO: 282292 - DNA, 405 bp, Glycine max
actcaagcggagcagccaactcctgaggtcatgcctgattattgaaaatggtgattaagcgcacaagaacgcctactctgcgaacactataagggacttcaagaatgtgttcaaggcatcctcatcaaacttcactaaatgacctctcaccctcacctgcgtaagtgatttatcctcagggtcatagaggttcgcataaaattccttcacaacaacgatgtctatactgctatcagacaaatcacccaacttctcatcccaatgtctactcttgagatcctccttcaacttagcaaactctgagaattaactaccacattcctttctaagagtagcttgccatgcaccacaatgtatgtatatctctactacacctctagggatgtgaatcaggatctataaatc

SEQ ID NO: 282293 - DNA, 342 bp, Glycine max
  unsure (1)..(342): unsure at all n locations
agagganntttgatacgttagagcgtgancttgancatgaancaagannnnaaagggcggaactttgtggcgaggatttcnnccttttcgggaggcaggaccggcctcacacagaatacgatggcacatcactgtgatggccgcatttgctggaaacaaagacgggacctctaaagctctgggcctggggagatgaaagaacaatgcccagggtgagaaaaacatcttggctctggtgaaagcattggcagctacaaacatctcgcatataatactctgaggggggagatgtcaaaaacttatttacaaaacatggacaatactctgcagaaagttatatcn

SEQ ID NO: 282294 - DNA, 409 bp, Glycine max
  unsure (1)..(409): unsure at all n locations
cttgagctntgagcacccacgactgtaccttgagcattgtangttttttttcgacccacacagttccaacagcagtgtagggttttcttcgacttttctttgatagaaggttctgtgggttccagccagcggtttccaacagtatcgaaatgaatgtggggcaatgtgggtgtcgaccgagcagtttctggcagatttcatgtgggaggagaaagagaagagagagtgcagcagggttttcgagcgcgcgagttgtgaaatttcaacacgttttaacttattaacataacaacatcaacatcagttttttaaggataaaaaatgttaggatgaatctgttaacatcgcgtttctaaaaatcgatgttaacttcaacaaggtaacatccgtttctcaaaaaccgatgttc

SEQ ID NO: 282295 - DNA, 260 bp, Glycine max
aaagatttaaaagtgaggaatggaagggatctgtaaaaaacaacgggaacccatggggataattatgattgacaattaataggatcatatattataggcatggttatgatacattgtaaaaaataatagggatggtataatgatatgaaaaatgttacattccagacagatgttaaatgaatgtgactaagagaataaggtcaaaaataactttttgtttcttatacatgagagctatttgactcataatgctgagctat

SEQ ID NO: 282296 - DNA, 342 bp, Glycine max
  unsure (1)..(342): unsure at all n locations
ttgcattgctcgggagcggccttgggtttataaatnttatagaactccttgactagggctaagttaatgtgattatctggttgcctggtcaaggctctgtgccacttgcacctcctcctggtggaactcatcatactgtgagaaggccaactccacattcctttatgggaggatgttcctgcaatggaccattttctcatatcgcttccaggcgaccttaaacatgaaccgagatgtgtcgtanggttcctgaagtctggaggtggaagcgcgtctctttcttgagaccatctgcaccaaaacacagcaaatgagtcaagttagacaggttttattgaaaaa

SEQ ID NO: 282297 - DNA, 484 bp, Glycine max
  unsure (1)..(484): unsure at all n locations
aggactggancttttgaagccttttnggagccaaatgatgcttttgaannccnggaacnnaaaannnaccggagagagttagncggatttgatagacccaaccagtttcttagtctacaacacnacaacggcgaaataaggacagggaatccataaccccacccaagagcactcaacctccatttttacaaggaccctactcaaacacaccatgtgcttataatggaggagtactgggcgcattaattgatcatggtgtgaccctgaaacatagaggcaaaacctgattgatgcaggctggctaaaattcaaggagggaattcgcttgaaaatcctgacattgggaaccacactatgcatggggcattgtgaaggtggtgccatatttctcaatgaatcttaggatataaagtttgccctctttgaaacaccagctcaatgtaataatatgataaataaaggccttgttttattctttctgaag

SEQ ID NO: 282298 - DNA, 264 bp, Glycine max
  unsure (1)..(264): unsure at all n locations
gaaaataacaccagtgactgtattttgttctcacgcttcggttgaaaatgttttggacaacataagtgttaacttgagttctatattggactggctctgctaacacaactgagcaattacagatcaagtggcccaacagagactgttgctacttgcacctctcccaatatttttctattggcatttcacaaccagaaaaagatgcatttgaatagtcattccaaaataaattagaattatngaagcaactgtgattgcatgaat

SEQ ID NO: 282299 - DNA, 247 bp, Glycine max
agggaatgccttggcgtgactgcctgaactaggctgggagggaattagaccccctttcggccacgagcgtccccgagacttaaacgggtaacaagagcgcagtctctggaagcaggaacgttaccccagagtcctaactgaggaagggcaccagtgaaaccgaagcccttgcaaggtcccccgaaaacatgaaggaacgcagggcaagttacagaaaacgataggggactgttaatctcgcggcgca

SEQ ID NO: 282300 - DNA, 333 bp, Glycine max
  unsure (1)..(333): unsure at all n locations
taccactactggaaaatccaaatccaaattttcattgaggcaatagatttaaacatttgggaagccatagaagttggaccttatgtacccaccatggtggatggaaatacaacaatagagaaacctagaaaagagtggtctgaagaagacagaagattactgcagtacaatttataggctacaaacatcattacctctgccctangaatggatgaatattttatggtgtcaaatngtaagagtgctaaagatatgtgggacactctacaagtacacatgaaggacaactgatgtcaaaagactangataatactcaactcatgagtatgaata

SEQ ID NO: 282301 - DNA, 261 bp, Glycine max
aggtttttaacttgagcttgatcttaacggaccaaagctgagggaccctggcttcggattactgggaagagacagaagcattaacaagggtacccctatacacactaggtataagaccgcctctcctcactcctccgaatcttcaaaaagccctccataggcctgtccaacatttactcggcgtgccacactgctctgtatcactcaccacactgttaaagcctcctcggttaactcttcactgagactgttaccaaggct

SEQ ID NO: 282302 - DNA, 312 bp, Glycine max
  unsure (1)..(312): unsure at all n locations
ggaaaaatnggatatggcactgttagcgaagccttggcatacaagtgtccttttgtctttgtacgtagagactatntcaatggaaaaccttttttgagaaatatgcttgaggtattctattgactttctccatgttagttttttgtgtcttcaatatattttggttatgagtgcctttcaagtaattatcttatttttttagttttatcaaggtggtgttgaaatgattagaaaggatttactgacttggcactggagaccttatcttgaacgtgcgataagnttgaaccctgctatgaagcaagcattaat

SEQ ID NO: 282303 - DNA, 318 bp, Glycine max
  unsure (1)..(318): unsure at all n locations
agctngttgtaacctgacacangaaaagtctctatatatattgattgcagnncaactgcagagccagcttttgaggttgcatattctattgcttttcctccttcatgtttttcaactatacataccatgaacattgataacanaacaaataagttaatccttaaaagctntaactgaagttagaacgtgcattggattaataagctttacattttcatcagtaatagtgttttccattattatgttacttatcatttttgttctgtaaataccttctaatgtttaaaaatactattttatttggngctctatttctct

SEQ ID NO: 282304 - DNA, 242 bp, Glycine max
tccacaccctttcccctaaaccttgactaaatggggggtagaaccttggacccaaagctattaatgtgtaaaattgtctttatacattactataaaagctatcagactttttcttagtagtcttggattaggcctactacccccaaaccacttaaaaaacactgtaattgagattgtcaactataagatacattgcatatttagtgatgtaacttaccactctcctagatggggactataca

SEQ ID NO: 282305 - DNA, 400 bp, Glycine max
  unsure (1)..(400): unsure at all n locations
ggatgtaaactgaagcattagaccnttgatcatgaancgggcatcaaaggaccgagattgtaaggaattagagaagcaacaattattgggtgaaaccaaaacagggaagggcactaaaaccccaaaacnancgcaaccncccgcacatgggaggccatacaacgcacgaaaaacccacagctgggctaaagttgtaaataatcttaaagttccaccgaaaactggtataaagctaaattaatttctatggtcaaattctggactggtctggaccaaaatgggtgagttaggtccttaagatggctggaattttggagctgaaataaaataaaacttacaaatataaagaaagaaactcaaaactaaggactgtcacctatgatttgcaacaagcagctag

SEQ ID NO: 282306 - DNA, 383 bp, Glycine max
  unsure (1)..(383): unsure at all n locations
catganggtgggctcatgggccactttgggatatacaagacgctcgtcttactcaaaggaaaagtttattggccccatatgaagaaaaatgtccttaagcattgcactaggtgtgtagcttgtttacaagccaagtctagggtgacgcctcatgggctatacacacccttacccatcccctctgcaccttgggtagacattagtatggactttgtccttgggcttcctagaacccaaagaggtgtagactctatctttgtggtggtggataggtttatcaagatggcacactttataccatgccacaaggtggatgatgcttaccacatctcaaaacgctttgttatggaagttgtgagactcgatggttcgcctggaccatt

SEQ ID NO: 282307 - DNA, 357 bp, Glycine max
atctgaagaaatgaacaaagtcaatatacaatatgagtgcaaacaacgctatcaagcataagcttggtagtgaagtataccaaatttcgcaaaagctagaccccaaaatcctaaatattggtcagttggaacactaaagaacgaaggggtttgaagaaacataaatagaacaccaatctcattcttaaaataaaacacccaacaataaatcatcatttgccttatctactttctttggcccaaggacaaatctgctatcaactagctgcaacacagaatacctttgaaccctaatctctcttttcattaagcttaataactaccaagggaaaagaacaccatagatcatctagttct

SEQ ID NO: 282308 - DNA, 426 bp, Glycine max
  unsure (1)..(426): unsure at all n locations
tgaactganattanatctatttctttcacacttgtgtcaatgtctctctggtataggctgnncaagtcaagcatttgtgacacttcagatttcctcaacttcttgttgccacaaggttgatcaacacaatgatcagaatcagtttctgcacttctctttctcccatcaacacttgtatctcccttgaatgctttaacttctgctggatgaatggaaatcaacggcaattcaactgaaacaccatcaaacttttgagggttgtctgcctcatccatgatgtgttgttgttcagagctttcagatgatgtcaaagagctntcaagtgaacacatggttcctctgtcttggtttctctcttcacagttcaaacttaaccctcgtgtttctgtgagttctgaaattggagaacttggacatgcattattg

SEQ ID NO: 282309 - DNA, 497 bp, Glycine max
  unsure (1)..(497): unsure at all n locations
agatgtnnnttgannnctttgtanancgttattcatcgaacnccggcacncaacgnngaccttagatggtgagagcaacctttgcgctgtccagcacgtttcntccancnaggggcngcagacaaacaaagagcccgctccagacaaccacgcaaacaannccacagaaacnngcggcagagaaaacgacggacacaacccagacagcaaaacgngagagagaaggcacaccacacaaacgacangcgccaccagaccaacagcaccacggaaaaaacacggccgccaagagaccccggaacacaggaaccgccacgggcgccgcgacgccgacacagcgcggccaaacaaganggaagccgagcgacaacacccaacgcacaaacagacggaaagcaacaangggccgcgacacgacaaagcgaaagcccccccaagcgaggggaaaacggcacgaacacagaacaacgaagagcacaaaacacgaaggaaaggac

SEQ ID NO: 282310 - DNA, 368 bp, Glycine max
  unsure (1)..(368): unsure at all n locations
agcncagcatgtatcgtttttcacncccacaaataccaccgnccccaagngaagaagggagagatttcttttgcncgacaccgagggggaggtgatgagaccaaccccccccaacggcaaatgcgcgaagagcacgaccatccgaaaccaaactgaacaagctagcgaggctgggctaccccttgtcctcgccagctccaaatcgagcctgcacgcctaccagaaggcttcacattccggaccggcaagtacctacagagacacacccgaccggcacccaaccgaccttaatcccacttgcccagagagctgcggtgatccttctctcgaacgccgcgtggcacttacgccattggaaacgtgactgg

SEQ ID NO: 282311 - DNA, 270 bp, Glycine max
  unsure (1)..(270): unsure at all n locations
gcgttactgagcttgagcttgatcttaactgaancacngcaagagcgacatttggcgcattaacttgaaacacggacgggaaancccaaccaaccccaaagcacacaccgccggaggaacccccgggcaacaggacgcaacncgccaacaaccacggcaaaagaaaaaccacccaccacagccaaccagcgcagcaaagaaacacaagaaaaagagcgacccccaaccaaccgcaaacccggaaaccgagccccacgggcaagaccaacc

SEQ ID NO: 282312 - DNA, 602 bp, Glycine max
  unsure (1)..(602): unsure at all n locations
aggccnccngagcagggggttgaatcgttactgangcaattgcancnacncnnattncncaagcnnggcaccngaagaccaagacgtgacgcgggcagaggtttgagttttgccttttacgnncnggaaggcgcccccaaggcagggctntacatgnagcacgcaaaaggcgcatcatccnccttgggcccaacctccaacgtgagcgtcacggtcctctcacgatatcgccagtatacatcgtantcttctcagacactcgaggtccggcctccaaatacctactagaggcttcccgcacacatcgaaaagttactttcgcccatttctcaaccagccnccaccactaccatccagactnaaaaatatcacgggtcagatagacagaaacacactttgcttctagcaacatccaacccagaatgctcgaagtttatggttatctgtaacgagtcccgagagaccaatgtaccttcactcgcaattccgtgaacccgttgctatggactcccagatgttaactgcccgtgtctaccccntgagacagacaattgggcgcgtgggggttactaggagacatcctgtaatctttattggatgcn

SEQ ID NO: 282313 - DNA, 428 bp, Glycine max
  unsure (1)..(428): unsure at all n locations
ggacggaactgagctttgaancgnggnaaatgtgctctcgaacaanganngaggggaaggggtttaggagcgagggtttatggggggggaagaggggactgacagngcccaaggaaacaaggaacaccagagcaaaaatgaaaggagcggtgaggcatgcggcaataaggccaaaggataggatgaaaacgagaacattccgataggaagcagcaaacccccaactgcatactacacataccgcccgaaccgccgcggaccaccaagaactagcgctaaagcggaacccaggagatgacgggcacgcgacgatacttccgttcccggcagatgaaggcacagactggggaattcgaccccaaccaggacaacaaagagagacggggaagaggcaccccacggcgccaacaacaaacggccaaagaaag

SEQ ID NO: 282314 - DNA, 240 bp, Glycine max
gatctgctatatctgaaccacaaccgcggccaagaagaaaattattcttccacccgggggagggtagcagcgtaggacaggagcgatgccattgcaatacaggtaattccctcattacacctattatctaagagggatatccagaatcttcccgcgaagagcgaactctatatcatcagggcgttccctatgaaaatgctaacaccaaagtgcgcccggctttgaaggaacccttttttc

SEQ ID NO: 282315 - DNA, 259 bp, Glycine max
  unsure (1)..(259): unsure at all n locations
aggggctgaccttgagcttgactagctgaacagancactgcgggactttttagggtttcgtaagaaaagcaccaagaccgggcacaagcaacgagacggacgagaaggggaccacagacaaaacaagcggaagccaaaacgcagcaccacaacagcaccgggacagaggggaccacaaaacaacgcagcanaaaaccagaccagcagagaaagacggagacggcgaaacggagcagcacacgaaggccaagagcaagag

SEQ ID NO: 282316 - DNA, 644 bp, Glycine max
  unsure (1)..(644): unsure at all n locations
ccgatgctggggacgtcagnntnctnatagcantnnacgcgacacncnagaaacactcaagcctntanggattgagaagaatatgagagtggaacatattctgtnttctanttgncntttcagcaatacgatnagagcaaatgagtagagcgccctatctgtatanntaataatatcgacccaaccctctacctggtagttacattgtcttcttgaattctagaaagaagatggtgggataacaatagcctgatgatagaagatatttatccatttaatacatcgcacagaaataaacatgtatacatactcaccgcacaccttatctagtcagttaggtctgtgagaaccatcattatatttcagaactctgaagagaagtacaaacgtattgtactttctcacacataattctctctcaccaagcatgatcgttatataagtgaagagacagtagaatatgtgaacagcaactagaagacaagggacgtgtaagagatacagatggagtcgaatgcttatatcatcatacttgcaagtgagcaagaacatatacttcagaaacattcggaggctaaacagaatatttattcatagtgaagaatttaggcataacacaaagcattattgtccatcatatgccg

SEQ ID NO: 282317 - DNA, 199 bp, Glycine max
  unsure (1)..(199): unsure at all n locations
aaaaaaaaacnatatgcatttatcaatatatntaagtaataaaaaaagttaatgaaaaaataataagaaattgtttatgaattattaaattgggattgattgaagtattgtttgaacgcttacaaattattatgattcctttaatgtgaagatcatggttagaaccaatggtttgggtcgggctttaggaagggttata

SEQ ID NO: 282318 - DNA, 438 bp, Glycine max
  unsure (1)..(438): unsure at all n locations
tgtacgattatggagtacccatcacatgtgttactatgtggttgtcgggcganggngcacaacaagttttccacatccacaaagcgcgcataaacccatcatcccctgttgcccacctccaactgagctcacgtactcccacatagcccatatcctcgtttctctcaacaccgggtccccatcaatcctcccaagcttccccaacatcaaagtaatacaacattcaaacagcacaaactaccacagccaagaaaacagggcaaaggcagaaaactctgctcaaaacaccaaccaaaatcacagcttttctcacttaaagatcccagtaacaattccttcgatccaattcgttaaccgttggatcgactccaaaantttactggaagtctatagtacataagcctacattttgaccgttgggatctactagcaaacatc

SEQ ID NO: 282319 - DNA, 252 bp, Glycine max
aacgtgatgactgaactgactggctggaccaagacgggggcacgctaatcagggttttagggggaaaccgtggtaaaaccccccgaacacttcatggctccgatgcccggactccaaaggcgaggaggccagacatcccccgagcacgacgttagacggccaacctcaactaggagggttcgacacccctagcaattcgtcaagaaagcccgggcctggtcctgcagtacaatctggtaccgctgccagggg

SEQ ID NO: 282320 - DNA, 364 bp, Glycine max
  unsure (1)..(364): unsure at all n locations
agacaacgttagtttctgtttgcttttaggctgagcgtcttacagacagcaataagcattgtctatacggatacgcactcgggtttttccgcccgtcagcgtgactcacattcagtatgacaaatattgtgagcgcggaagatgacgcatatctccgcgtgccacacggcttgtcggccgcgattgacgaaagacgtacaagacgacgttagtctctgcgtgctatcaggctttacgtctcactgacacctaaaaagaatgtttatacggataaccactcgggtatttccgcccgtcaacgtgactcanatgtcactatgacagatcttgagagcgcggaaaatgacgtacatctctgcgtgtc

SEQ ID NO: 282321 - DNA, 446 bp, Glycine max
  unsure (1)..(446): unsure at all n locations
gggcggaatgaacttgnagtcaatatgcactgaancacggaacncataangaccgggagtgcgaagggacttgatggggcnacaaggttgnccgagcggccaaaccaaacagggggactaacgaaacaananatcagaccaaggagaccaaaattanacggcccttatgaccgggacccaccatagtcatataatattaaagaattaactgaatggtcctttaaattaagtaaattaaaatatcaccataaaggccttgcctgtcaacaataggtgaactcagtgacccccgtaaactcgcccgcttttgtcgaaaaataatggttatccgggacagcaaagccataaatggtgcctctcacaaagctcacctaatgaaacgcgtataatccccggcaaaatccacaaataatgatcttcccggcctccgagctatagggacaaag

SEQ ID NO: 282322 - DNA, 488 bp, Glycine max
  unsure (1)..(488): unsure at all n locations
gggcccccnccggggtaaacttgcatgcagcacgtgcaactcagccacagcggacaangccttggagtagaagagctccttttacgttcntaagngcacangaagtgagatcacaagtagatgcatgagcatgtcgtgccccatgtctagcttatgcgtctaacattggatgccaagctatacatctaccttaggtactcctatataatatcctctccttacgcttcggacatacatgagcagcattggaatcatctctggcatctcgactatggcatagcattgttcaatcgcctcacgacattcatgacgttggacgctcacaatagagccccgaggcgctatggaatacaacactccatggcatgaggcacatcctattggaacgaacagacttctcaactntggccgcgttatatggatggaagaagatcggtcactactagaaaatagacgttcacgtcggntatagatcgatggtgacgtcg

SEQ ID NO: 282323 - DNA, 376 bp, Glycine max
  unsure (1)..(376): unsure at all n locations
agatggnnnttgaaaccttggaggccgttatcatgagccctgaacncaagngactgagcaggacccaattgtggaccggcatttgaactggaggcccancccaaacacggaacagaggaccaggccccacctatcacctaattggggccncccagcaccactttgggtgaagttttgtaccttttggagacactctaaggccccgggtattatgaagaacataagacatacccaatccagcttcttaagaaacacaacccgtggaagtatcaaaatctggaaggaaagccataatttcccctagccccttgtttacccacaggttttcacagcccggcccaaccacacaaagaagtggcaggaaaaaacctactaa

SEQ ID NO: 282324 - DNA, 296 bp, Glycine max
  unsure (1)..(296): unsure at all n locations
cttaaaatattaatgatcctcacaacaaattttcaagtttctttggagttttcaatctccttaatgaaatttagtttaaaaaccatccttagttgttccaaaactgtaaaaaaaagacaaaattcaccatgtgagaactatttagaaaacaacaaagctagcanaacacacttggcgaaatatttgtctatgtaggcaatatcctctttttcagcacgccatccacccaaccgatacaacaacgaaacatagtgtattaaataacaacacacataataatataacactttgcaaat

SEQ ID NO: 282325 - DNA, 501 bp, Glycine max
  unsure (1)..(501): unsure at all n locations
aggatgtgaanattttgaaaccattttgngacgacangctgatactatcgtancncnncgggaacnnnataanngcacttgaaggcaggcagccnggattgnattaaggcgctccaaatccattaggcgcgagattaccncggagggagagctcaaagctaggattaagggacataaagcnaagcttagtttactttggtttaacatttttgccatgtcctatgttatttgaacatggaatccattggttgatagtggttaataataaatcaataatcatggttaatgaggattaaaactacttgaaagcttaataaaatgtttaggattcactgggaccttccatggtgttccacagaaggccgtgcctaccatggtgttccaacagaaagcggtgccttctggcggaagcacacgggcgagctggccggaaccacctcctctttccctataattagggaaagggcggaagaatcgtnaaccctgaattatgatcacttg

SEQ ID NO: 282326 - DNA, 195 bp, Glycine max
  unsure (1)..(195): unsure at all n locations
ctctaatcctgaaaaaaattgattctctctattatcctttacggtggcgtnatctcaatcacggaataatccctgcataatttttgctacaaaaactgacaaattatcatcaaaacatgatttcatactaattgacatagatcatgattaaagaaattaagcatatctactactactttctaattattccgcacg

SEQ ID NO: 282327 - DNA, 482 bp, Glycine max
  unsure (1)..(482): unsure at all n locations
nnaactgtanancctgntggctagtacatcggttanncattgagacntggacctcagagcgacctgaggtctgcaacggcttgaagcaccagacgngttattttgggggaggnagangccagagggggtcaagaaaccgcccccccggaaaacgagctnnccaaagggagcctaccacgaaanggccccgaggaagctggcctcaaagaggtccaggaatgacatggcagccgaatgaactacttccgctccggagtctgatagtcaccgctataagagtgctgtacaccagcagcgctacgaggccataaatggatggtcgattctccgggagcgacacgtacagctcatggacgacgagcttactgatttccaggaggaaatatggcgccggcggtggcatcactgattctcccacgccaactggatcataaccaaacgtgtttttatgcaatgctggccacacagatgtgtgcggactg

SEQ ID NO: 282328 - DNA, 383 bp, Glycine max
  unsure (1)..(383): unsure at all n locations
ccggggatagtcatgctagantcnnaccctaacnccaacagcgacagggctagtagcaaaaggaattncttttacaccccacaatcacaaggggtcctaaaaaacacaaagcggcaacggacctcaagacaagaaaccttaacacaccctgtnaaaatacacaagaatacgcacccccccaaaggaatttgcccaaaacccgagggtacccaaatcgttgcaatgtaacttatccctattactgaaattcaagggacataccctaacaagtcataactcattttccagatacactaacgcacgtggctgcaggaaacccgggctccatgacatgaaggttgagcgaagtgaggctatgagcgctgcgaatgaggattggggat

SEQ ID NO: 282329 - DNA, 515 bp, Glycine max
  unsure (1)..(515): unsure at all n locations
aggggacggagatattgatagcttcttgtaagaccntnganntcattagaaacccgnggaaantcatacacgacccgggagacganagancgacttttaagcaagcaaccaggattanggacaagagcaacnnaaaaaaaanggggaaaaaccagagggggaccaaaacggccagggaaaggcacaaggggnaanggaagacanangcaaaaccaaacccngncaacccnnnagaggcaacgangcggcccccaaccggcagagnnacacccangccccaccaaacccagaaaacagggaacaaanncagancgaagagaggacaaggaanaggacgganacanagaaaggcnancaaaacannggccaaaagagaaacacaaccaaaacgaaagganacaccgcagncncaggcagaagcggacgggaggggccaaanacacacacacacacacgggaggcaaaaggagaccngncanncgcaaaccaagnncaaaacacggggangagagaan

SEQ ID NO: 282330 - DNA, 363 bp, Glycine max
tgtatatgctgaaattgctgatggaaaactgttagagatgaatggtagaactaacctatggttagaaagtgagaatgtgatgttatgagtggaaaaagagtgacgctttgagagttggaaggttaactctgaattctgtgatcaatggaggttaaagtgagttaatactagcttgaaatgtcatttatgacttgggagaaagctaggactgtgctacagagaaaaacaaatgatcaaagcgaatcaagagccatttctagggcaaaattgagtgttgaagagtcaaattttgattcggagagattttatgtgtaaatctacgttgagcaagattagatagatgttatggacttgtgtgaggtg

SEQ ID NO: 282331 - DNA, 412 bp, Glycine max
  unsure (1)..(412): unsure at all n locations
tgcaggcaggcagcctnnattatcctggtccccacaatatnacacaacgttggaccaccgagaccaacctattggatggaaagaataattaatcctactctcctatggtaggggacacctaaatttaaattattatattagaaattcctgtttaagccatccaaatcaagtcattttgaatctcaccattagtatcatgcatgtcaaagataaggagaatccggcatcgtaatgcatanacacacccaacatttaaaagaaaacatgcttnctaaagccaaccaaggtaanaatgattcattaatcatgcactttttcaaaatattagaccatattaccatatataaaacatggcagaaacatctcacacatgaacacatagccacacattcagaaatgagtgtanggaaan

SEQ ID NO: 282332 - DNA, 430 bp, Glycine max
  unsure (1)..(430): unsure at all n locations
tatcttacctatctatctcccagatgtctttgcaattattgattatataaaaaacatgaagttctaattcaagatgttttctttgttgcatgggcataatgcaatcactctatgtctagcattgattntattaagatgtccctacctttgagttctactaaaaattatcctctctcaagcgactaatccctaaaactgatgcatataaaaccttcaatgtatttctactaaggattaccctttttcaagcgccaaacccctaaagatgatgcaaggatgaagcatataatacatttgttggcattntaggcctcccaagccctaactaaaggggtttagccttccattgtcatgagagactnttacactntanggggttgatatggatggaagaagatggatggatagaggaagaaaagaggataatgga

SEQ ID NO: 282333 - DNA, 247 bp, Glycine max
  unsure (1)..(247): unsure at all n locations
aaatccaaatacatccaaaccatcaaagaaccctgcaagnaacccatccaaaccaccctcactttccttcaccgccactgccactgtggcctcctcttcaagcatcggcgaatgcccctcgaacagcgccacgtgtcccaacagcttgtccttcctcgaaaacgtagtcccgcatgagcacttccacgtggcctctccccgacactgctngacgtggctcctcaagtccgacagcaccgcgaaactc

SEQ ID NO: 282334 - DNA, 279 bp, Glycine max
  unsure (1)..(279): unsure at all n locations
tcaaaagacaaaaacccccagcaccnagcanggagaaaacactanatgtcagggtgtcctaagctagatcctttactgctgcacattngtctcatgtgacatgtgataactctacattaatcaagttcaacaaagtattcacgctgggcaggtgctagagatatgtcttcttctttgtttggtgaaaataagggacagatatatgtcttctaaatccaacagattatcctgattcctgaagagcgtggggaagtataatgattcttttacacgtgaata

SEQ ID NO: 282335 - DNA, 268 bp, Glycine max
  unsure (1)..(268): unsure at all n locations
gagtaactaacctgagcatagcctgacctgaacacngccggacaaggctttgagacagtgtacttgcgcccaggggcagaaacgccacaacaggacgaaggccaaggcaagctctctataagcctagtgtttccagaccaagctgcggtaacactacactgcctgcgacaaagcatgccccagatgcaagcccagccaagggaaccgcctcaatgacggagaaatgccccaatggccaggttaacgaaaagcatataagaagaaacgc

SEQ ID NO: 282336 - DNA, 490 bp, Glycine max
  unsure (1)..(490): unsure at all n locations
cccgcatgtattgtatcgtgtattgcancncntaatacncancnnnnggcccngcgagggggagacggggggggatttnttttggctttttaaccncgacangaggangagcgagggagacagaaacaaacaccaacacanacacgggcgccaagaccgcgacgaaccagacgaagaacacgcgacancatcgaacgtagangcaccaaagcagcaacccgcgacgaagacggagacnagaggaccggcccggcgacagcaagaccgacaaaacgaggaagacacacgagncacacgagacggnaaacggcacacaanagacagaaacgatcagaaagagagagccgcggagaacaacgacaggcaaagcacagcgaaacccgagagaacagatngcagcnagaacgacaggagaaagacaggaagccacaancgcagagaagggcgaggaaacagngaccgcaaaagacgacgggggcacaaaggagcg

SEQ ID NO: 282337 - DNA, 507 bp, Glycine max
  unsure (1)..(507): unsure at all n locations
atggagtgnnntttgannnncnttngnagagtcccatgannnctttgatgcattgcanancnaagcgaanacacgagggcccggganctttttagggaccggaggcaggttacncgcttgtctcacgcnccaaagcatgcatcctgtgncccttaagaccctatagctttgggagccaagttatgccttgcgttctatactccaaccattggtgatagacgcctatgacaccattgctactgtccgctaactgtttatctcttatttccactctattccacgctctatggatcctctgnagtatattcgcattagcttcatcgaaacctcgcgcgatgaaaggcgcgataatttcctccgatggcacacccctcatatggtcagctaactgtcttatggacaacacgatatttcgattaatacaacccattcgccctataaatggacatgtggaatccttacatgagcataacactctgctgctcttctttcaccgaggaaccaact

SEQ ID NO: 282338 - DNA, 442 bp, Glycine max
gggttttccgataagggctgcagttttaactatcaatttcttctaaaacctgcattgttttgggaatgatatcagtagttgaacttgctactatgactacaagtaagtgtgagttttggtgtttatatagattaaaaagtgagacttatggggggtggggaaactagatgctatattggtttgttaacaagtggtttgaactgtgtggataaaagctttagctagttatgggtaggataaaaatattttatcacaggaagggatttgaagtgagaaatttactagcaaaatctattcaagtcaccccttatattcttcattctcagcattcctcgccagctaagggatagaccctattttaatatgaattaatgtgacatgaatcatttctgcaagtcagtgtcttattataatgcacaccttcaatatttatccatgattg

SEQ ID NO: 282339 - DNA, 528 bp, Glycine max
  unsure (1)..(528): unsure at all n locations
aggggacctagtcgnnattgannnncnnttnngagnnggcattttagtgcgtcngaantcttcgnananacanagcgaanncgagctcgggacccgaggatccncttttttcganctgcacgcatgttgncngagtgcacganagnnacgaacncggagagagcagannganngnnanccgcacaaacagagaaaggacacaacagaccaacngggacggaanaagggaganggaggnagacgaacacaaacacagacaaagccagcgaaggcacgnancccgcaaaaaaccaggacaaacangcancgcaaaaaagcagacaaccgcagagagacangccancccacgaacaggaaaagaagaggaaccagccccaagacgacaggaaaggaaaaanggangannaggagaagaagaaaagcaaaaaaaaggacnccncnacacacanancagagcaagggcaaacacccgaccacacagacaaacnnggacaacacaagggacaanacgagaggaacggggngagn

SEQ ID NO: 282340 - DNA, 384 bp, Glycine max
  unsure (1)..(384): unsure at all n locations
gacacataaaactcaagctgtgaattgcctgtttggtgaattattatactcatnatgttttanggtncttgtgatgatgtttgtgatgtttatatgctgaaattgctgatagaaatctgttagagacaaagggtagaactaacctacggttagaaagtgagaatgtgatgttatgagtggaaagagagtgagactttgagagttgacaggctaagtctgaattctgtggtaaatggaggttaaagtgagttaataatagcttgaaatgtcatttatgacatgtgagaaaagttaagctgagctagagagaaaaacaaatgaccaaagtgaaccaagagccatttctatggcataattgggtgatgaggagtcaaattatgattc

SEQ ID NO: 282341 - DNA, 120 bp, Glycine max
  unsure (1)..(120): unsure at all n locations
aacaaacgcaggggaagccagccngncgaanagcacancaaggaaagcagagagaaaggcaccaccnaccacngcngcngccacnancncaagaacaaaagaagaacagagcagaaagac

SEQ ID NO: 282342 - DNA, 406 bp, Glycine max
tagcaagaagttgcttcagaagttggagactcactcttatagttgttggagctgtgcttgatgatgccgagaagaaacagatcacaaacaccaatgtcaaacactggctcaatgatctcaaacatgctgtctatgaagccgatgacttactcgaccatgttttcaccaaagctgccacccaaaacaaggtaagagacttgttttctcgcttttccgatagcaagatcgttagtaagttggaagacatagttgtcacacttgagtctcatttaaaactcaaggagagtcttgatttgaaagagagtgcagtggagaacgtgtcatggaaagctccatcaacatctctggaagatggatttcatatatatggtagggagaaagataaggaggccataatcaagttgtt

SEQ ID NO: 282343 - DNA, 225 bp, Glycine max
gggtctgactgagcgtatctgactgacaagacgtgcgactgctgcagaaatttctatcttccaggtatatcaaagccaggggccggagaaatgtcgcacatggtcaatgtgatgtggtgactattataaacttttcgactagtgagatctggtatgaagagattcatttaaaggaggggtacgtgtgctctatgaaaccactacttcttactacggcctcagcgc

SEQ ID NO: 282344 - DNA, 435 bp, Glycine max
  unsure (1)..(435): unsure at all n locations
ataagcactcanaagtctccttattccatatctttaactgttatgtataaatnataanatnnctagaccaattagaagtttcatggacgtgctcctatttcttcctaacanaacctagaaaatcttcatgcattaatcatgctgcttcaaataagaagagcctcatatgctagttctttntggtatgagaatctaacctcaagagaagaggcatgtgaccagacttcatccatccaagatggactatcatagcatcttggaacataagtctccaatcaagactaataaagctnttgtccaacctaacacccattcttccattcctccaagttatactatcaccttggtatcccatgtctatcanatntatgagacaaaggaaatcacggaaatcctcagtatcacgatggccctgagaatntgctcatcttatgc

SEQ ID NO: 282345 - DNA, 501 bp, Glycine max
  unsure (1)..(501): unsure at all n locations
agcggcgttttttgancccctttgnaagtgcaatgantcattgtanaccngggaanctnatgagcggactggagcgtgccagcctaaggttgntggccaanggnncctttcttattggagaatatgggaataaccatgggtctctttataatggaaaccaccctggcaatttggtatcaggtggtggacaccggtgaggaccgtgaccctggtcgcggggaccaaatggacaccagtagggggcaggaggtgaaatcctgttgaggagccgccaacccaacgtgatgaccctggaataattttgggagagagtggggtttggtaaatcaactcctccatagtgggttccatagatcgttggtggaataaaggatgtaaatcacaggattggaataatatgattgaataggtttaattccatatatgtgaatgacgtgtactgagtactatactatatatatggatccacttaagtatgtgtgtggntggtggactgatgcn

SEQ ID NO: 282346 - DNA, 409 bp, Glycine max
  unsure (1)..(409): unsure at all n locations
cgagtntattntagccttagtttcactgtagntattagcattttcgattaagaacgagaaatgccaaagagaaaacgtccgattgattttccgctttattatactaaaaaaaagatgttttttgattattatattatttttcatctctttttgttttccaacgtggttacggcacgaccgaacggtcgaaattcattttaaccgaagtttacggatcatacaattcaaacgttcggtggagatttattttatttttaagttaagcgagaaatgacttaagtaaaatggcttaagcacgtcaacagggggtatgaaaagtaaatganacgagaacagaaatacacaaaacacaatttggaccaccacgagtacatagaatgaatcgaanagcatggttcgaggtacttac

SEQ ID NO: 282347 - DNA, 485 bp, Glycine max
  unsure (1)..(485): unsure at all n locations
agggcgggantttgaanacatttgagaggaccggtgaatcattgagnacctngnanncncnatgagnccgaccggcaggcaggcaggcnncaattggtcagagctccagcctcttggcaaaatgttatgccacacaaagggacgaagcggctgctaatcccacggacacgaggaggggagggcanaaccagaacaacaaactgtgttggcggaaccgaccccctaaaaagaacaattacggccaagggacccatgccaagaaccagaaggaggcagcgaatggccgagaataaaagaaccaacgtgctacactcacccctatcagccaagatagacgggctgagcaggcgcacctaaagccttaggagaatagaccgagatgacggtgcctacaagacggcatgacatgagcctttgcctgatagataccagctcggccaactataatggggcaagccaattcctgagaaggatggaacggactc

SEQ ID NO: 282348 - DNA, 444 bp, Glycine max
  unsure (1)..(444): unsure at all n locations
ctctctggtaatcgattaccagtttattgttttcgattccagnggcaagnttggttttcaaaaagctttcaactgaatttacaacgttccaatcaatttcaaaatggtgtaatcgattacaatatattggtaatcgattactagtgtgtttgaacgttgaaattcaaattcaaatgtgaagagtcacatcctttcacacaaatgctttgtgtaatcgattacaatgatttggtaatcgattaccagtgataagctttgaataaaaatcacaagatgtaactcttccaatggttntcatgttattctaaaagttataactcttaatggttttcttgaccagacatgaagagtctatanaagcaagaccttaacttgcattntatagacattgaatacattgatttcaatcctttacaacccttgagtctctttgaacatcttctt

SEQ ID NO: 282349 - DNA, 67 bp, Glycine max
tttaaaagtgggtcccaatgggcttcctaattttcagctttcctatttggatgtgagatcatggaag

SEQ ID NO: 282350 - DNA, 312 bp, Glycine max
  unsure (1)..(312): unsure at all n locations
gctagagagatncccgatctgagagggtactgctccgtcggcatctttctttangtcaagatacaccaaatttgagagattcccaatctgaggaggaatcttccccatgattccagtatgagaagaggttgaggtgagtcaaggaagtcattgtcccaaggaaagaaggaattgacataccttctccaaggtattcattggcgctcaagtccaagtaattcaaatgctttatatcagccaaacaaggacttatctctccaccagagctccatctcctataagcttcccaatcatcattgaaaatagaatctg

SEQ ID NO: 282351 - DNA, 398 bp, Glycine max
  unsure (1)..(398): unsure at all n locations
actataccttcgaccaaacacggctgtgtttctatctccgcccggatttaaagtgggttgcagcaccggctccgctttcctaaccgtactggaagcggntgccgtggctttgtcctctatgggtttctggaagtttaacatgaccttcgagatggaagccatttgatcttttaaagccgatagatcggccttcatctggtcctgcacgccctcttcattatccaatttttctggatcgagtgttataagggtgccttggtgttttcctagttatgatgaatttcctaaagaaataaacaaaggtgagtatgccaccaacaaatgaatatgcanatgaatgatccgtgcacttggatcccacccaagggttttnggaaccgaatgagtccagaactttt

SEQ ID NO: 282352 - DNA, 446 bp, Glycine max
  unsure (1)..(446): unsure at all n locations
ngagtcattcaaacataaggcataactatatntaatgttctttaaatcaaaacatgaaagaattttgcaacgtacggacattactaaagtattctattgtatatttatttggaaatttctaagtgatgattttgcttccatgaatgttataaattcacttgttcaattattaatttagagaataaataattatttgaattagagcttaaaaaaaattaattgaatcagatataacattttaatccatttatacactaccaggaaaaaaaaaaggcacgaagtgccttttctaattttttttaaatatagaaataatattggataattattacgatgtgagtggaaaaatgtaactttggacaaaaattaggcattgacaaagtcattagatacatcctaccattaacatagttacaaaaagaatgaactaaatcaactattttttt

SEQ ID NO: 282353 - DNA, 508 bp, Glycine max
  unsure (1)..(508): unsure at all n locations
aggggacgtgcaactgagtgtgcttagtacggctngctgantcttcnganacccngggaactacagacaggacccgaagaaggcaaganngaacttganggcgaacgaccaccatcntntccanaggagnccaaggaaaccagagganccccgcacaaaacaaaaagcccgcagaagaagcgcaccccaggccgaaaccacggaacaaccccgaaccngacacccgccagcggaatgaaaacgccccggcaaccaagaccgcagaactagcgaggacacagccacacgcaccgctgacccaggaaccacaacgggaggaagccaaaaccagaagaagcagcgacggancaacggccgcggnactgatgacccaggaacaaaancacccagacgncgccccaacatggggacaaattgctccgatccataaaacggcgccgccagacccacagaacggagacccagcgacgacactcaaacgcagcccatggtcgaggacacatgcccg

SEQ ID NO: 282354 - DNA, 496 bp, Glycine max
  unsure (1)..(496): unsure at all n locations
cggacggtgttatttattttattgtacnncgttcacaanananncnncangccgggaganggaggagnacggagaggagcagaagagggttatnatttttatttgnggccccgcaaaccgggacgggcgagaatcgacangnncacacaaaaaccccaccaagagaacagaggaagccaangagtgacttaggagacgagagcgaaccgagaaaaaccaggggacgcgcancctcataggacgaggagctagtattcccgaagagagcagatcattcatagttgattgtctgtggagatctatatgatgatatacgtaaactagatgtcacatctcaaaaaaggatgcttctatatatcctagtgtcggaaagtcagtccgttcgatattatgattacttcagaccatcttggagtgacacattcatcaaatgaatcactgaatgctctcaggactatccgctgaaatctaaagtcattgcactcttagaatcgag

SEQ ID NO: 282355 - DNA, 510 bp, Glycine max
  unsure (1)..(510): unsure at all n locations
agggggcgtggncctgannccctttgnacgtgcnactgatctactgataccttggcaattcagctcggacccgggatcctctgagtcgacttgttgcatgacagcnangttcatatntctctacgaacgancactcgcagcagaccatccattaactaaagaacaattcacccctattccatcaagggtagctacttaccctaaatatttacatgtactttccaggggtatttgttatttacatcacacacgccttcctggcttaatttacatacatgcatactcaaagcattacggggtaccaaaaaatgcacatgcgctcatcttggtatttctaatacctatacatatacaaacgtcatgatcaatcctgactacctacgcaataaggtgctacatttcatgcctgtatttgtttcaagtctttgctacctaagagcccatgcaaattcaagcaatatttcctttgctgactanaattgttccaaattagaaggtatatttttctgn

SEQ ID NO: 282356 - DNA, 457 bp, Glycine max
  unsure (1)..(457): unsure at all n locations
ntcaacaagagtcttcacaaataaccatcatgaagtttnaaattatcattatctacccatcatatctcccanaaccccatacccacgaaaatcaaaggagaaagaagtccacccaaacctgaaattttgaagtcccactcgtagacacgcacttcacgaccccgaaaatgccctcctttcacgatttggggcagaaatgatggccaaaggttgaagctttgtgtggagcttcaatggtggaggaagaagaagagaatggcaacgtgagggagagagagagctgtctgaaataatgtggggctgagtgaagagagagagagttgctttttgattttaaaaaaaaggctntttcctcatttcttattattttattataaactatgccacatgtctccatttgagtggagcacaaagggcccattntcccttatgactgtgacccatactcagccacaaa

SEQ ID NO: 282357 - DNA, 242 bp, Glycine max
  unsure (1)..(242): unsure at all n locations
tgagaatgcccatccttgctctcagaagaagacaaaagaaagatagttcccgatcaagggtcggaagatagcanaagaagaanactcccaatcaaagattgtgagaaagcacaaaaagatagaaaattcccgatcaaagatcggaagaaaacaatagaaatatgcagaaaggtctttgggccagacaatatctgaacaatacagaattgtcaccaccatataaggaaagaaaggaaaccacg

SEQ ID NO: 282358 - DNA, 423 bp, Glycine max
  unsure (1)..(423): unsure at all n locations
ntatacgaaatgccactctactgcaagggtgaaatgtttgttaactaggaaacacaagtatatgcaccaggaaaacattgttgttgaaagaaattgtagtgttgtgattcacaagatccttccacctaagcataaagaccctgngagtgtaactattccttgttcaattggagaagtcactgtgggaaaggctcttattgatctgggagccaatattaacttaatgccactctccatgtgtagaaagttgggaaagtcagagatcatgcccactaggatgactttacaacttgctgactgctccattaccagaccatatagagtaattgaagatgtgttggtttgagtaaaacattttatcttccccgcagactttgtggtaatggatatctgtgaagataatggcattcctgtaatattggg

SEQ ID NO: 282359 - DNA, 286 bp, Glycine max
  unsure (1)..(286): unsure at all n locations
nagtaactagctcgatcatgatctgaactgaatcacggccggtccaagcatttgacacggttgttctggaacctcaggctttaagaatctcctcccctcaaaagattactttcaaatgacagagaatattgagaaacaagaatatacaagttcttgcacttaggacatgtacattaaaagactgtatatgaagattgaacatcgaactgcaataggaactttaataatatgcactgaaatacttaacacctttagaactcctacgagttaatacaagtcaaaatcc

SEQ ID NO: 282360 - DNA, 334 bp, Glycine max
  unsure (1)..(334): unsure at all n locations
cacttagaaactaagctaaagataactaaaatgatgatagaagatcggatcttatattctgattatatacnctatcaaatacaaactgattagttaggctaagaataccgatagaatatcttatcatatattttgataatatattctatcaaatacaaactgattagttaggctaacaatactaatagaatactgagactgtctcgaactggacctaggaccaccaccactaattnttttttccagaattcttgtgatatccagacggcttccctgttagatattaattagaaaaataattataacgagttttatgagccttaaattgtggaag

SEQ ID NO: 282361 - DNA, 239 bp, Glycine max
  unsure (1)..(239): unsure at all n locations
agtttatagctgancatgactgacttgaacagcgatatgccggtttttactgaggtttattanagaagtatcttgggatgtaaaacacgatttacgtttcttatcttaaatttgatcgagactaccctgggtgggttggattatcttgactgtaattgtgcaattccaatatatatatagtaatgattaggcctggcaatttgaactgtctaaatgagttgtctagttgaacgaatcat

SEQ ID NO: 282362 - DNA, 518 bp, Glycine max
  unsure (1)..(518): unsure at all n locations
agcnccccccccnnccgatggatganactgagactgttctgatcgcananccgcgacactatagactactcaagcctgtgtagagntgacaatcagtaatagtagttcaaatgacatatatacgcaaacnaagaaggataagcaactaaagttctaagctgaatgtaacatcaattccacatctcttgaaagataatgtgagcgagagagatgaatcgaaggaattgtaacttttgaaaaacaaaccatagagaattagtctgaaagggtgctatntggattaccaaagatatacttcatgcaccctgatttttgccaaacatatgataatcgcctgccacaccattggtaaatagagaatcatttgcaattttggtagatcaaagctaaaattcttgtgaaaccacataatgaggtggcctggagaatctgaatgcctcaaggcactcgcttctttgatacacctgcgattaaccaaaaaccaataaaataatttttatttaagaacaattcttaag

SEQ ID NO: 282363 - DNA, 518 bp, Glycine max
  unsure (1)..(518): unsure at all n locations
cgggagctgtcgattttgaaacccctttgnngaggnncggttganncccctgattgtcatgtananacacggcgaatncagctcggacccgggatcctcttagncgacctgccgcatgtttncncaattcatggagncancnnangagcnagaatgcatgatcttgacaagaagaccctctcttacgacatgccttgtaaatcctctaagaggctctctctaattaaagtgtggattttatcttgcacaagagtcacactagggaaataacatgatgtgtatttattatctaaaccattataaccgtcataatcgattaccagcacttagtaatatgttcttttgcttatatatccttctttatgcattatcagaacgttctaattgattacaataaacaggtaatcaattatttcaatcacaaagaacaatcttctaatatcacttagatataatcgattgcaagtatttggttgtcgattatcctacttgcaatatgtcatatttgcctttagttg

SEQ ID NO: 282364 - DNA, 409 bp, Glycine max
  unsure (1)..(409): unsure at all n locations
gacacatagaaactcaagcttctcaggaagctacctagtctataaatagaagcatgtgtaatacttgttgtaactttgatgaatgcgagtgtggtgagacacaactcanagttcaacttctctcccttttttcttctttcaatttcgtgctcccccctctctctttctctccctctttcttttcctccattgaagcatccttccaaggctcatcttggtggtgaagctccttcttccatggcttattccctagtggatggcgcctcttctcctttgtcttccgctgtatctccatggtggaaaatcaccattaaaggacctcattgaagctcanagatccagcctccatagaagctccacaagcaagcttccatcagtgatggcactcacattcttcagattctacaca

SEQ ID NO: 282365 - DNA, 404 bp, Glycine max
  unsure (1)..(404): unsure at all n locations
tncttatagatgctnctcaagaaagtttctcaagcaagctcctccactatagcttcctctttaagaaattattagaggggagtgtgtagctaagctctagcttctcaaggaagcttctcaaggaagtttctcaagcaagctcctctattgcagcttcctttctaagcttcttatccaaggcactctcttcgtggtgaagctccttcttccttggcttattccctagtggatggcgcctcctctcaccttttctcctttatcttctgctgcatctncatggtggaaaataaccattgaagaaacttctcanagatccagcctccataaaagcttctcaagcaagcttccatcaagtggtaatcagagcacaagagcttcaagtaggtactccttaaacctccatt

SEQ ID NO: 282366 - DNA, 451 bp, Glycine max
  unsure (1)..(451): unsure at all n locations
tgtctcagcagttgtgcaagaccgagaccaacatgttatcctttttcagcaagtaccaagaagaattaaatctagccacggcccacgagcacaaagtggcggacgagtatgcccaagtgtacgcgaaaaaggaggctagaggaagggtgattgactcgttacatcaagaggcaacaatgtggatggaccgatttgctcttactttgaacgggagtcaaaaacttccccgattgctggccaagaccaaagcaatggcggacacctactccgcccccgaggagatccacgggcttctcaactattgtcagcatatgatagacttaatggcctatataattaggaaccgttaggaagtttgtattgtcactcagatcttgactagttataacttcttaataaaatgagtttatctncgcgttttactcttaaaattagtacgaatcanatcact

SEQ ID NO: 282367 - DNA, 242 bp, Glycine max
  unsure (1)..(242): unsure at all n locations
ttctttngatattnggcaaagttaaaaataatgttttaaaaattatactaatcattaaactaataaaatacaaagttatgatttaataattacatagtaagtaataaagtaataataattaaaaattcataattaaatactatntttttattcatacagcttatatttaaagaactttatctatcttaaagtcattttaaacagaaatttaaaaagaaaaggggggaaataaagacagtgga

SEQ ID NO: 282368 - DNA, 321 bp, Glycine max
  unsure (1)..(321): unsure at all n locations
agtttaanttaacccactgatattcaaaaaaaangaattaggttaaaaactanatccannnnnnnnnccgggtgtattaatgggcccaaaaaaaanaaatanaaaatatctttattaaaactttatattaaatatatttatttaaataacacaaataatataatttcatcccttaacttaatttataaaaaaaaatttattacatataatttaaaatatttttaatattttttttacacttaacaatttatatatataaataaatactaaatttctatatattcacctattatatattttcattataaattcaatcaatta

SEQ ID NO: 282369 - DNA, 227 bp, Glycine max
aggcagaaaactcagcccaatacacaaacacataccacaacttttcttactcaaataccccagtgacattcccttcttttcaatttgatcaccgttggatcgactcgaaaatgttactggaggttcctgaaacataagtctacattttgaccgttgagatctgcatgaaatattcagaacccaatatgtacaaccctttacacagccagtcatgcctatacattttc

SEQ ID NO: 282370 - DNA, 480 bp, Glycine max
  unsure (1)..(480): unsure at all n locations
aaatccttttctcccaacgcnttttcttattgtannnntccccnnnnnnnnnntngaggtaaactatataggatccncctttacccttctcnnnnngannaaataccggganggcgganatgtgctgggtggctataacaacccctttgttacttaaatacacccctggccttatttggagagatctttatccgaacgttaccaacctttacgaattcgtaacaatactggttttctttcgcgatgtaacaaaaccttacggttcacgtattcttcccccttttgggcttccgggatgttactgacctttacaaatggcgcactaacacttccttttgacttccaccatgttagggaaattcacgggtggtgcaacattgctatggtttgacttccggcttgtacanaacttcacgatttgcctacgatgggtgccagtacttcgagtagtatacgatggtcgatcccacaatgatggtg

SEQ ID NO: 282371 - DNA, 403 bp, Glycine max
  unsure (1)..(403): unsure at all n locations
ccggaaaccgaccgatgaagaaacaaagaaagacgggaccaacaaccaaaaactataaaannnaagggagccgcaccganactcnaanncanagnacgagganncaaagaaaangaagaaggaaaaaattttgaaattgagggaaaaanggaggggagggggaaaaaaaggaccagaaaggaggaggggaaagaaaagggggaagaggaggagaangaaaaaaaagaggagaaangaaganaaggaaaaaaggagaaaaaaaggagaagaaaagaagtnggggggagaaaaaaaaaagaaaaanaagaggnggaggggagnaagggaaaagagagaaggaagggaaagaaagagagagggggaagaaaaaaggaaaggaaagagaaaaaggaggaaaaaggac

SEQ ID NO: 282372 - DNA, 458 bp, Glycine max
  unsure (1)..(458): unsure at all n locations
agannaannnggagtggtgatagcattctgacaacatanaatnatgcggaacganangngacgcggggcgcgggaggtttgccttcacttagacagaccaccggagaagcgggggtgcaagtaacgaatcattcaaccaataccactggtgccatgtctcttttggagcccagcccaacggaaagctccgcgaaagtctggaaggaccctcgcgggaagcattaaggaaaaagccttcctggatacccagagggggagctgctaccaccgtacgataacttaacggggcccctggcgaaatacatgagattacattgggacgacccatagtacgcaagaatgtagcttccttgaaagcagaggggacaccttctctgcccaaaacaaaattacccactgccgattccatggaatcattggagcccctgtgaagcagggtaaagtccattaaagcctaa

SEQ ID NO: 282373 - DNA, 450 bp, Glycine max
  unsure (1)..(450): unsure at all n locations
cgcaccaaaacaaggaggagcagggaacgaaaagcaaataacaaccaaccacaaaccaaaaaagggggggtgcttgactccaancacacgcccgggaccnaaaggaacgggagaggaagcggaggattaggggacccccacagggacaggggcacggcgagggcagcgaccccacccaacacacgaagcacccccaagggccaccccacggaccacgagcccacgacccctaaccgaaccaccacaccgggacccatcaagccccccaagctttcagaacaaaccancaaagcaaccaccaaacatcatgaatatcagaacaagaaacagggcagggcagaaaatctgcccaaacacaaccaaaccacagcttccgactcaaaaccacaaaacatacacggggccaaccggcaacgaggaacacccaaaaatcacggaagcccaagaaag

SEQ ID NO: 282374 - DNA, 489 bp, Glycine max
  unsure (1)..(489): unsure at all n locations
aagaagcggtaactangcatcngcatnaancantagaatatnaatagcttanactgccctcgtccctcngccgagaatacatgatacgctctgcctttataannggnggccanggaagtgangggcaagccttccaaacntcttaccagaatgctgggccacctggggcctccttcacaacctttaacaacacaaccccaagaaggctcgaacctaataattacctccaccaccaaaacctgtgccggggtttggtgagaccggtccatataaccctgagaatcccctccggtggaataataccgagaacctccttggcttctcttaccaacacctccttttaacaatccttttcttccgaaaggcctttggccggaaatctttatcaaaccgtgggggctccgccatctggttcctcaccactttcctttcccttgacatcgcgggttgactgtaggtcagaagcccacacacgaccctactgtcacc

SEQ ID NO: 282375 - DNA, 567 bp, Glycine max
  unsure (1)..(567): unsure at all n locations
cacaacggacgaacccgagaagaagcgagagccagacgaacaacgcatanaacaaccntatacaantaactncacactcaccacaaaaaaaannaaaagannaaagggagcgtcgaccccgtagtacaccnnaananaanananannnggggaannnnnaaannnaaangaaggaagagagacaagatttgaaaaaggtgaaaaaaaaaaatnagagaggggatgggtggaaaaaaaaaaggaacatgaaaaaagtaggggaagtaggaaaaatngggggaagtaaaggggggggtgtgaaagggggaaaaaaaagaaggataaagggtgatnggaangagggcataaggaagaaagggagaagatgtgagggatntaaaaggggaagaaaggaaggaataaaaaaagaaaaagaaaataaaggaggaagatagaggggggagaaagaaatagaagagaggaaaaaagaaaggggaagggaaaaaaaaaaaaggggggaatgaaaaatgggaaagaaaagaagaagaaaaagggaggaggaaagagaaaagggagagaaagaaagag

SEQ ID NO: 282376 - DNA, 271 bp, Glycine max
  unsure (1)..(271): unsure at all n locations
gaactactgatgaactcaaaatcagactngacccgagctgcgagcggttgttattttaaangaaggcgtggaattacgtcaaatatcccgatgttgcggaagtttacttaattctaactcctataatcactctttggaggccatcaactacgtaaattgaattattaaagtgagtcattcacattagttgcccgttgatggaagttaccttttatggactcgttaattagttttaggacccacgctggtaaagaaaacgattctcactgtg

SEQ ID NO: 282377 - DNA, 461 bp, Glycine max
  unsure (1)..(461): unsure at all n locations
ggactgtacatacgatcgatnnncttgnananacnanagcnaatnacagcgcgataccctagagncgacctgagggagggcaagtcttgttctaaattttttggncncacgcaagggcgggatcgagagtccccttatcctaagactaacacacgtatttatgcttggtatgcaaccgttacactcaacgtggtactgtgcctatgcagagattcaattgcctacgaaaattatagtacgagcagatcacatatatcagataacttcatcagatctccatggacgaagtatgccttcacagctactactaataagtatccacagacgcacttaaataatattaacaccgcacttagagtaagctacctgggataacagcatggtggcctcccggtaaccatatcaacccatatggttaccttgtacaggaaggggaaaaattactacgaggagccacaatt

SEQ ID NO: 282378 - DNA, 459 bp, Glycine max
  unsure (1)..(459): unsure at all n locations
naatacatagatgttntaccctgnnatnngatanancnnccnnnnnnnnnnnnanagagaaagagacaattttgtttctttaccacaaaanggggggggtaccttctctgccattgttgacccttcattnttcaccatgtatacttcctcacattgtctttgttgtaaaattatgttaacatgattctttagagtttccaccgattaaacttgctatagaagttagatctgatgttctattggtcatacttgtttgtcttgtacttgaaccatgaattgcgttgagtttacgctcctttgcagttgccctgtaatttttgtggctgaaacctaaccatatattcttacaaattattaagttgaataaacctctaaatctacatgacttgtcacctatggtattttgtctagaagtatgtctatcatgaacttgaccatagattcctatgctggcctaat

SEQ ID NO: 282379 - DNA, 307 bp, Glycine max
  unsure (1)..(307): unsure at all n locations
actttttgttgaaaaaaganacaaaagatggagataggtgcatgaaactgaagagaataggaaagagttaacttgaagtgcgctcataagttttcttcatcacagtgaacttgtgaattcatttacatttatgtgaatctaaaagaatattccagaatatccaaagcatctttcatataccctttaatgccacagcatggaagtgtgctctacacatgggaagaagaagaaattggcttgcccccaggaaaaggaggcaaaatcattggctggggagtcagtctaatgatctagatctccaccctca

SEQ ID NO: 282380 - DNA, 284 bp, Glycine max
gaccattggtaccaaggcacatgtcacatggaatagttaaatatatgaaaatccgtaagcttagtatctcaccttctatccacccttcataaaatctctccaactggatacctgatgatgaagtgtgttaatgtacacatcttcctttatgtgtgtgggtgggtgtgtgtgtatctttttatctttggaaagagataaaatactgcatgcaaacaaaattcactaatctttttctctctgtaggctagtaagacacttcaaacaatgtatcttactcatcaatt

SEQ ID NO: 282381 - DNA, 586 bp, Glycine max
  unsure (1)..(586): unsure at all n locations
cacacaccgatcgcaaaacaacgacggccgagacgcaactcaagacgacatcaggaagacaaccanactcactataaccaacnaaaaaaaanaaaaaaaaagannggagaggaacgtagccgtagtccctcganaanccnccaanannggnacnaggaganccannagagangaacagaacgcaagcaagcggattttatcaagtncaacaagggggcgaaacggcgacttgcagggctaaggcactagaggaagcagcggccacacaccacgacaaccagagaagaccgaaaaaaacacccccacgcccacggccgacgaggacggcattagcccaacaaagcggcgcaaaaacgaacccaaagaggacggcatgacccgcccctgaacaagagaaccaaggaccgaaccaagaagagaacgagccacgcacctcanaaacccgagggcgaagaggaagaacaaaccaacgcagcacgagcacaaatgaaagacagagggctcaaaaagaacagagcgaagagacagaggaaaccaaaagcacacacagagcggccgcgggaaaaacccaggaccgaccgcgaag

SEQ ID NO: 282382 - DNA, 172 bp, Glycine max
tgtcacgaggagtgtggcggtcacattcataacgaacgaactgatttgtcgatacggactccctaggaacatcatttctgacaatggcaccaatctgaataacaaaatgatgcacgagatgtgcggggatttcatgatcccaacatctaactccaccccctatctgccaaag

SEQ ID NO: 282383 - DNA, 407 bp, Glycine max
  unsure (1)..(407): unsure at all n locations
acatacgtagcccaggttaaaactacnnttaatnnaantttccangaagggatacagtaaagncgaagagaaggaagcaatcnatgcttaancccacaacaatcggaggattgataaaatgaaaaccatgattattgacaagttatacatacttcttgaaggaaaaaaaatttggnataatagcgccaccaccacaatggatgagataagngttgtatgtaattttatggcacttccccttctttcgttagattgaaaaatgattaattaataaacaaaaatttgagttggggtttgtattaagagagtagattttcaaaatagtcatagaacttttattggtgtaattttaaaatatttgaacaagtgcaatgaatatttttataactaggtatacattagaaaag

SEQ ID NO: 282384 - DNA, 372 bp, Glycine max
  unsure (1)..(372): unsure at all n locations
gaattncaaccgaccatgtgtgttgtaatgtcgtttaatcactgttaaagcaaaatctaaccgattgttcacactataacctcagttaaataaaaaaaaggcaaaataataataaaataatcaatatatcttgaagaaaaaataaaatcaaaaatcaaaaatatcaatcggacatttttctttgaaagtttccttgaatgaattgactaataaccaaagtgaaactaaggctaaaatcaactcacaaaccaagctttgtccgtaaaagtcacttgaaaccgttttaaggtccaatgccataaaacggtcctctatgcttatatcggttaacatggaccgttcaaaacatataatcaacacataactttaccg

SEQ ID NO: 282385 - DNA, 336 bp, Glycine max
tgtttgctagcttctatttggagttaccaaaggaacagtttggtccctcttgataaggaagccaccgcaatcaatcgatgctacggacccaatttcgagatagcatggcttattgtgcctcaagccatccgccaataaaacccaatagataacatataagccccttcagtttccttgtttcgactttcgattacaattaacgttaataatcctccctccctgtcgtaataatctttgtgtaaccaaaaaaatcctaaaataattattattttaattttttaatgcaataatacttattttttaacttatatttcctataatattaattaccaataa

SEQ ID NO: 282386 - DNA, 306 bp, Glycine max
  unsure (1)..(306): unsure at all n locations
attttaataaacgggggaattgctttttattgcaatagcttttaaaagtaactaaccacatgaaaataatttaatctttcaatgatagaaaaaaccgtataggataagcaccttacattttatgctcaaaagtcaaagactttcctttctaaagagtgcanatcgagatcgttttaatgatggaactatatatggttctacatttcgagtttcatattccattatagtactacattgtttattgagagaagaaatatatagccatatatatatatatatatatgggtcaatcttcaaccttaacat

SEQ ID NO: 282387 - DNA, 368 bp, Glycine max
accgtattatttaactgtgtactctgagccaattccaaccgacattactctttacctcggaggtccgatggagcccttaattaatttcagacgctcgaaaatggaaacgccagctcttagaaaaagtcaacgacgataacttttaactccgatgttcgaatgagccctgttatatatcgagacgcccacaaagaaaacggagccttaggaaaatcaaacacaatacttttactcgatgtcgatagtgcccgaagatatcagagctcgtattgagacgaagctttagaaaactacacaatacttttactggtgtcgatgggcccgaaatatcagagctcaattgaaacgagcttataaagtcacacatg

SEQ ID NO: 282388 - DNA, 464 bp, Glycine max
  unsure (1)..(464): unsure at all n locations
nnttagaaggcgaaacgacaggcttagcatncaacnaagctttattntaaacaccaanggtttcgatatataccggaaatctttcgaacttcttattaaaaggtatcggcggttggtatttcttaaaaccttagatttcaattccagccttctggtacacctccaggaaccatccggccaccgaatccaaaggtattggcggttggatttgcttaaaacctccggtttccaataccaacgtctcgaattctaccggacccaatccgacattccaatcaaaaggtattggcggttggatttgctcaaaacctctattttcaattaccaacctctcgattattaccggactaattcgacctccaataaaaatattggctttgattttctcaaactccgtttcaattcagcgttcgattacacggacccatcgacctcagtcaaagtattgcgttgaattcttcacg

SEQ ID NO: 282389 - DNA, 135 bp, Glycine max
tggaccaatatcacaatcatttacatgggtttccaaatcttctatttaagccccttcaaaccccctctcttcctttaatccaaacctaaaccttaaaaaaaccaactctttctctctctctctctaacttccaaa

SEQ ID NO: 282390 - DNA, 465 bp, Glycine max
  unsure (1)..(465): unsure at all n locations
naatccggaagtcagcctgcagtacatgcacattcagcacgaagctgcatgcntacggttgcgcacaggataaaattgtgacgtcctgggactctccctatatggggcgcggggttatacccaggagctactcacacttatattggaatgacatttttttttacacaatattgtaatgacctgtgaaaaatttataattattatgagagagaatagagcctcctccactttatgtgttatatatccccaactcccacacgggaataacacataaaagagagattggtcctctccatacacgtgaaaagaaaaatatttggggaaaaaaattatctcataatttttaccggccaagtattaccttttttaaaaaaaatcctcacttcataacctcaccatagagaatccatattatccctttccgaatccccaaatcctttacagaatgtgtgatacaagcacgtc

SEQ ID NO: 282391 - DNA, 431 bp, Glycine max
  unsure (1)..(431): unsure at all n locations
ggagagtcgtgattaacggcaatncaacacgaccgggagccctaaggcgcccgcaggaggggagcgctgtttatttacacttctcacgggaacgaaggagggaacaggggaatccattacccagagcaaaaaagctctatggaaaaacctattgcaaaatacttcaggcgctacgaaagggtggaaaaacacccaatacctccctggagggggctttcctagatccgggaaccttggatctggacaacacgaggatcctcggatctggatctagaagccggatctcgatcttgatgctggaactggaacttgaacgtgaactagacctagatcctgaattggcgtgaccaatcttgaggcatcgggagacttatgtaacaacggggaacatcaaacagctagaacaaccgacgatcacatgatcaacgcag

SEQ ID NO: 282392 - DNA, 476 bp, Glycine max
  unsure (1)..(476): unsure at all n locations
agaggtgggcttcnacgataacantcatttaatgcttngctgttacgangtttanagagagaaaggtccaagttctaagtattcttgaaaaattaaccggtgggagaatcagcgagacaaaaacctcgagccgaagcccgtcttgaaacctggaaataatttgggaagggatggtgaaacctctgaggtgagggaaacttctctcccactgtgattttgcgcaacttccatctggtcttcccctgggtggaaaaggaggttcccggactatggaaggctaattcctctgtggaatcttccgggtaggtcccggaggtaaatatattccaatctatgaaaggatggttggtgtgtcttctatgctaactgcttatcattccagatggctttaaccttgaacacttagatgcatgcttggtaggggcatccacagtgggaatggactgattctaagtccttgaagtatagactaattg

SEQ ID NO: 282393 - DNA, 299 bp, Glycine max
aaaaagctacttctcgatatcaagaccggatcttaataaccccggtggaacttttttaataataaccagccctggatgttaaccaaaatttttttaattcaaggcctggaatttttatagcctgctaaaatttaaccccaacgtttttttccctttaaatactcagttttgacaggaactgaacgatcgcaatcccaatacacctacctcacccacgttactgggctaacctatacttgctaaaaaatatacttttccacaatgaagactcggagagatgaggacttcgggctggtcgc

SEQ ID NO: 282394 - DNA, 485 bp, Glycine max
  unsure (1)..(485): unsure at all n locations
aaaattatttcaagtaccgataactntganattaagcanggacacagagtcttcattctctacacgaggtggtggtgtgttcctttgctgaaccggaaagggagagaatggatacatgacctatgaccccgatttggtcactatcggatagccataaaaggtgcctttgagattggtgatttggagtgatgttgtaaaaaaccacaatgggtttcatcttttgtgcctgaatattgtgcctgagggcgtatttgtgtttgtaccgtgtggaacacagttttactctaaccaaggaccaatattgtgcatatatttactcttatctaataaatatttatatattataaatattaattaattaaataatactctccaattattatttataaatataaattaatccgtttacctttatataggtcatgcgcccgagaaaatggattaaattattaccatatttttttaatatcataaatttatatttn

SEQ ID NO: 282395 - DNA, 478 bp, Glycine max
  unsure (1)..(478): unsure at all n locations
gggggnagggggcggggattttngatntcgttanttnacaacnnnnccgagagactctanagcgaccctgaagagtgcgagcctgagatcattctcaaactctacccnggnnnngggcgctgttggtatagcgggggacacacccccttacacacgtggatatatacgttatttcgcgcgctcaaaaacttgcctatcgtgctttgaatccccgttaccggccggaataccccaatgggttttccgattaactttttgctgtctgtagaagaaaagcctgataacaccccgagactaccgtcgtctttgcgccttcgtcaatccgggcgacaacccgttgaacctggagatttacgtatctttcgcgctcacaagatttgtataatgactttgagcacgctgcgggcggaatcacgagtggtattcgtataactttttgtgttgaagacaaaagcctgatacacgagagaatacgtcg

SEQ ID NO: 282396 - DNA, 470 bp, Glycine max
  unsure (1)..(470): unsure at all n locations
gtaacatcgacggtagacgacacttnaaaataacanngctggcaaanncgattcggagaatgaagattattattcttgttatccaatacangtattgggatatcgaatacaagcccaataagccctctggtgatcgattacaagatgttgtaatcgaatacaagctggctgttcatgtgtaaaccattacactaaatgggaatcgaataccagagcctatcctaagctaatttctaagaaaatatacatatttaggctcaaatacattctatatgaactaatttcactactaatacaccaaaatcaatcattcaattaccatatatacaggaaatcattaattctatcattagaaccagaattccaacaagatcaaaccaaataatctaccatcaaaagggaaaaagtaatcaatcatcaatcaccaatcattcctattttctaatctcttacatcaaaacctattcttt

SEQ ID NO: 282397 - DNA, 391 bp, Glycine max
  unsure (1)..(391): unsure at all n locations
ggtatgatgagtggagggagaaggagagatgaagcacgaaaatttatgccctaaatgacgtctgaaaattgaaatggaaatcttaaatgaatcaaggttaaaggttaaaaaaatccatccccaaggccttatttataaccctaaatgtcacacaaattgggagggaaattaaaattctattcaaattcatgtgaatctgtgaagctaattttgagccaaaatttcactaattatgattagtgaactntagcaatggttcaacccaactatccaagatcatgtncaagattctncactaagtgtgcttangtgtcatgaggcatgtanatcatgaaagacatgtacaacgtgtgactatatgatgtgaccatgggtgtagcangcaaatgcg

SEQ ID NO: 282398 - DNA, 492 bp, Glycine max
  unsure (1)..(492): unsure at all n locations
ccccttctaaacgactgacannctantgncgtgacntatagantactcaagccttcttttttggtccttaatcatttggtggccaaccttttgttcttattgtaagaattcctaatcctttgggaagggagctcttcccaagtgagaatcaatggcaaagctctcactcctatagaaggtgttaagcctggtcaagccaaaccagtgtgggtatttttttttgtgtgagggcctaaattttcatgtcaaatatatcaatagggtttgggtattggatgccatttttatatttaataaaacacattgaatatgtgggtgaatatttaatttgggatttgcctttcaaatttagtggaacactttactttaaaaaaagtcttatattgttttaactctatcaaagatcatttccttctaaccttcacatgtttcaattttcctctccaacctttcgacccatcntctcttttttttcatccaacagtagttgga

SEQ ID NO: 282399 - DNA, 351 bp, Glycine max
  unsure (1)..(351): unsure at all n locations
agcttggtttgattcggtctgacaagggatcgaggtttagtaattcaggctatagcatacaacacaaaagcatgattgattagagaaatatatttatatgcatcaacttgtttgttagaaagacctaccatttctacctactgctgtcacttttacttacttatgcatttatagtttttagcataaaagttagtttaaattctgtttgaattatcaatcatacatgttctctcaacaatgcttcattatcaatcatactgtagagaatccgtaaagcatggaatacagtggaatggaaagataaggagcttangggaagtagcaatggcatcgttggtggctatcacaagt

SEQ ID NO: 282400 - DNA, 368 bp, Glycine max
  unsure (1)..(368): unsure at all n locations
tacaagcctagaaaagtgcttgggaccagttgggtggtcctgaatataccccttgaaagaaatggcaaaaatggaaactggggtaaccggtgaatggtggattaaccctaacacctggggttgaatggaaccaggaccaatagggcttggggtgatgatcccttcctaatatttgcattcctactagcttatttcagttgtgttccttgataatcatggtcacatctttgaaaagctgcatgtcttgtgagaagttgtgattgaagcattntatgccattcatttcatgtgattgaattatntggagcaaacaccttgtgaataaccactgtgattntgtcacttgaggacaagtgagttgtttttct

SEQ ID NO: 282401 - DNA, 353 bp, Glycine max
  unsure (1)..(353): unsure at all n locations
agcttcttatttaagctggtaaataagttcttagaagtgtttaattaagttagttagtcaaatatatccaaaagttaaaaaggacaaaccttaaatgcagttccaagggtaatgggggctgctctccaattggaatggaaattcactccagaggtatatgttgcccttaattgtgacccttattacacgaaatatcaagatgaaactcccatttcattagagacaacaccaaagcatctaagaaatgctttaagtctgctatagctcttaaatctttattttgtggtgtcatttaactggacaatgttttagttgctgtaatnntatgaaagtgctgagtctcttgttgatga

SEQ ID NO: 282402 - DNA, 371 bp, Glycine max
  unsure (1)..(371): unsure at all n locations
tcgattatcaaaaccatgtaatcgatacacaaagctttttatgaaaggatatgaatcttcacaattgattttgaatttcaacgttcatatacactggtaatcgattaccaataccttgtaatcgattacaccattttgaaatcaattggaacgttacaaattcagttgaaagcctttganatcaaactttgccactggtaattgattacaggaaactggtaatcgattaccagagagtataaactctggtaacttagaaaaatttgagaaaaactcttttgaaaaacaaaactgtgctatgtttgtttttttgaaaaatcttttcaatacttcccttgtgaagtcttcttgatttcttctcttgaatcttg

SEQ ID NO: 282403 - DNA, 328 bp, Glycine max
  unsure (1)..(328): unsure at all n locations
agcttttttataaagcctatcaggnatgcgccaagggcgactgttccatggctctatggaccctgcttcaaacccgaaatagtgccttctttaatagaaacacctttgtttcatctccttttgcaacaaagccttcaaggtgctcaacataaatctcttcctttaggaagccatttaaaaaggctgacttgacatcaaactgataaatcttacattggtttgggttgaatagctagaacattctgattgatctagccttcaactggagcaaagtatcaaataatctactcccaaacttgacataccctttaccactacattgcttata

SEQ ID NO: 282404 - DNA, 639 bp, Glycine max
  unsure (1)..(639): unsure at all n locations
ntagattaattgcttgnaccaggtttanncngnnatnanctntannannaatnaaanccacnnngacgcntnacanaagaaacaacncacgcgcctgcacacggagaagngatcttttatgtgtttgtataatganannaaacnntatcaatgngcgatccgcgttggagttattgttataatttatctcttacacgtcaattcatttaaaatatatannaaactacatatatactttattcaaagtatataagataatggatacctaatnnngtgtgttctggaaatntgatgggtgtttttataaaagtagcatcagatatctgcgattgtcattcttatacaacttcangagcaaacatgtntactaacatctaagactnttttcaagtgaccaacctttaatattgttttatgttgcgtcacccattcatatatcatacaccacttcttacaatctcttcacaatatgtaaataacagttcttctacatgtagattcattttaccttaatgaaaacataccattaacctttgagaaataagngggctgatggatattnncaatatcttaacgaaattacttctatataatttttataactgttagagacctatgtaagtaacgttaatacttgag

SEQ ID NO: 282405 - DNA, 391 bp, Glycine max
  unsure (1)..(391): unsure at all n locations
tgctttcttcctttgggccatttcctgcgaaagcaaacattnggaaagttagttttaccaagtgggacactttactcttaanacanaaaatgacatacaaccctcctccattaatacaaacatcaatgtanatttagagcaagcctattgcgcatatntccctacgaacgttcacttgcacaagacatcctattaactaagaaaaatgcacccatatacaatcaaggtagcttcattacctagattatttacatgtacttccaaggtgtatttgttatttacatcacacacgcctncttggctaaatttacatacatgcatactcaaaacatttcggggtaccaaaaattgcacatgcgctcatctnggtatttctaatacctatacatat

SEQ ID NO: 282406 - DNA, 499 bp, Glycine max
  unsure (1)..(499): unsure at all n locations
aaaacgtttccccnaacttcngcanngcatanctgganactatgantactcagccttcttactgaggtccgatccaggctaatattaaatcaaacctcncaaaataaaccatcgaagcctcttgagaatttcaatgggccaaacctttcacaccgatgtctgatatcggcgccttatatgtccattcgcttgaaaatgaaccacggaagcccttgagaaaatcaaatggtcataacttttcaaacggatgtctgaattcggcgcataatttgtcgagacgcangaattgacaacggaagctctcgagagattcaaatggtcattaactttcacacggatgtcagattcnggcacataatatgtcgcgatgctcggaattgaaccacggaagctctcgagaaattcaaatggtcataacttnttcaaacggatgtccgattaaggtgcatcacatatagagacgctcgaaaatgaacaacggaagctctcgagaaattcn

SEQ ID NO: 282407 - DNA, 67 bp, Glycine max
agcttgctaaccaaatgctcaccactactaaaggagaagccttcaggttgtttaataaaaccctcct

SEQ ID NO: 282408 - DNA, 404 bp, Glycine max
  unsure (1)..(404): unsure at all n locations
atgcatggaaaatgtaattatgaaattgatatgcccgaatttacaccatttcctagttaaccatgcattangtaccatgttcaattattttgtttttaagtgaaatggggttatgatcccaacatggttggctcgtggtgcctaacacatgaaactaagaatgtaatgtgaagtttcacgcttcccccttttttgtttttgttttgtagaggaaaaacacaggatgagcaaacatganaacaaatggtatgcaattntgcagatcaaaaagtttgttgaacgcatatgcatgatgatgccatgactcatgcaaaatgtgaggccggaatatgataacggacaaatgcaggatatgtccattatgatgttatgaagagatgcttatgcgatgcatgatatgaatg

SEQ ID NO: 282409 - DNA, 403 bp, Glycine max
  unsure (1)..(403): unsure at all n locations
ggagaaagctaggaantgctngattcagctcggacccgggatnctctaatcgacctgaggcgtgcaagcctatttatttttatgctcaacaaggaggcgcgggaggtccccaaagaaaatagaaaccttagtttaaaaggaacctcttcttccttcataattttgggcatgagactaaaattatgacttaattaggaacacttatggatcggggcatatcttccaaggagataagcttttttctttctaaccggaaatcttctggcgaattttcattatcttaaaaaagaccaccatctcagtggcaggtggccatcatacattggaccaggagaatctctcttctcttggtgagccaaccccttaattcttgtcccaagaattatgaaccctaccaagacag

SEQ ID NO: 282410 - DNA, 483 bp, Glycine max
  unsure (1)..(483): unsure at all n locations
aaaactcnnataagggctagcagcgtcgcatanctactaagctggatacttacaaaatttttgggatgtgcatctcgcgcctatttcaatcatttttaacctaacgcctatccctgggggccggttgggcctaaccaacctggacctcctaagccctattaactaaaccaatttttggaattttgccttggcgctacgcgctaactccaattgctaccgcaattggtggcggttggaataaggctaagcaaggcttgctcgttaagcccaataatgcctagaattcaagccgggctaagcaacaacctttcgcaaagccctggtttaaaacggtttggctctgagctaagcgactgctaatctcgcttagccaataatgcagaaaaaatntctgtcatactcgcaaacgcacccctgtgtgctagccaatgaagtattctcataacacgcctangggacatgctttcctgacggccctaagcg

SEQ ID NO: 282411 - DNA, 441 bp, Glycine max
  unsure (1)..(441): unsure at all n locations
nnaataaactttcatnatctgcgactactctagtacgcggcgatgcataagtnaactgagaggtgccaaccgatatttgttcgcccccaaaccataaccttccttttagagtacatataccctggtaatgtgagaagaaccggttctcttggtggaccggcaatttcccccaaaccggctttaagaagaaccattattaccaccctggccaacatggggaggttggtggagttattattcctggtatgccattatttggaccaataaaaattaaatatccttaatcaacttgccaacaaatatttgcatgtgtttatttagaccattnctatatcctatagtatttgatatttaatgacaacaanaattaggaccacataatattaatattaaaaacgatgatcatttgcttgactatggccatgatactgtcatgaacta

SEQ ID NO: 282412 - DNA, 479 bp, Glycine max
  unsure (1)..(479): unsure at all n locations
aactttttggaattcgnanagtaganctgtgananataaagcccaaacacatggacctgttgtcccggcattatgcaacggactcttattagaataacaggcctggggaatattggacgttagtattgccgctataccggcgggaagaatggtggtgggcctaatgggtgccatggaataataacctggggaaggtaaaatgggggttgaacctggaaaaatggattttgaaggaaaaatggaattggggggaaaaatgggaatggggggtaggattggaaccctactaataatactccccccgaacccaacctaatcctcaaattaatcctgatgcccagcgacaacctccgtaaatacctcgcccattatgcccaccntcaccataatggtcacaattacgctgagaaatatcgacataagcacgccgtacgcccccgcctctcatcatcccctcctcagctccccatagccctccg

SEQ ID NO: 282413 - DNA, 240 bp, Glycine max
tatgtgtctatacacatgtccgcgaaaaatttataaatttggccatataaggctcacggctataaaattgggaccaataatcattacctggacgggggaccggtttagaagcattgttattctgaccgagattgatatgatcatggtcgtgccactcctgggacctgacctgtttcttctaataatataatcattgcctttaaaaaatcatatagtgaaggatccctgtaatagaaataa

SEQ ID NO: 282414 - DNA, 158 bp, Glycine max
taacttataaaagtttacctattatttctgaaaactttcttttcctttttaccctaaatttttgaatacaccaatgtattcattggttgaacctaataccctaaggtttaaccctcttcatattattttccggaaaaattaaaattttttcaaaaatc

SEQ ID NO: 282415 - DNA, 308 bp, Glycine max
ttccatagaggagggaacctacgtggcctattttttatacctccttaatacatgttggccattacacctatatgtctacttgtctaaattttgggattatccgagatgagttgattgatctacaatttgtgaacttgctcattcaattgtgatcttgagtgtgactttctatttgtataacatagagagatggtgaagtagagtgaactcgaagctctctaataatatttgcatgttggatataagcctaacagattactgagttaattcctaatgccctaatgtgagttttacatttgaataaatgg

SEQ ID NO: 282416 - DNA, 483 bp, Glycine max
  unsure (1)..(483): unsure at all n locations
aaattttgcctttgacgaccacactnanatngagcangnccanagagatccagganggataaagcggccgaaggacttanttttcnttcccaatttgacagcattcgctttaggacctctaaacacaaccacccctcctaggccataaagggatggcatttcttccggaaccaacccttccaccttagggccaacaagtttcccatattcaagaagaaaatacctcgccgcgcgtggcctatattgtcaaccccattggccaagtccaaccaaaacttatccctcaaatttattcccattgctggccctacagaagaaggcgtgccaaaatattaggcttgggttgaggggcagtggattcccttttgatgcagatgctatcgcccacttcctgngatatccttatatgcttgaaaaggtcaagaagtgaagtattggccaaagaggacccggtccatggttccatatgatgccatcccattn

SEQ ID NO: 282417 - DNA, 54 bp, Glycine max
atatacatatatatatatatatatgtatatatatatatatctatatgagaaaga

SEQ ID NO: 282418 - DNA, 454 bp, Glycine max
  unsure (1)..(454): unsure at all n locations
acacgaatgaggaagtgtnaangggtgaagctgccggctatattttntttcacttagagggacccggaaataagtcgcgggggttaagaaaaccttgggacctcaagtggggtgctattggccaaaaccaaacttgaccaatcctgaaccaacctgggcctaatccgtcaatgaaaacctgtgatggaccttaaccagccaacctctggcagtccaccagataaagggaccaagaacaccaaaccaggaggcttgtggtggcttgccaactatgaaccttgatgatgtgtgagatatggccctcttgtaatcgattaccaanggtgggtaatcgattacaaggcttaaaaatgaagacaggaggctaagatggtctctggtaaatcgataccacngngtgtaatcgattaccangcttganaacgaggtcaagagctatgaaggcttttggaat

SEQ ID NO: 282419 - DNA, 369 bp, Glycine max
  unsure (1)..(369): unsure at all n locations
ccaatcttcttgtattcctacttggagggatctggataccgctttcttaggcaatatcagtccaatcttgatttgcttctggaccgtcttcactggagaatatgttcaaaaaagaggcgaaacctttaagaatatgcgcacgattgaaggatttggcggcacaagttcttcttccatggtganaggagatgatcacatgatggggacactctgctgtgtctctatgagaacttgtaagtacatgccgccactttcggatctgtgtttgccgggaagattcaggttgattgaaagaagaaaattgattcgtttctcacaaagcgattgcaaaaaattcggcaccgggcaaaaggatgatgaatcccttcn

SEQ ID NO: 282420 - DNA, 320 bp, Glycine max
  unsure (1)..(320): unsure at all n locations
aaactatattatctacaccaaagggacacttctctatatttgcataaagggtgtttttcctaaagactgaaagaacttgcctgagatgtcctaagtgatcatctangctcctactgtacactaaaatatcatcaaaataaacaactacaaatctacctatgaaatcccttaagacatgatgcataagcctcataaaggtgcttggtgcattagtgagcccaaaaggcatcactagccattcatacaaaccaaacttggtcttgaaagcgattntccactcatcaccctntttagtcctgatntggtgataaccactttta

SEQ ID NO: 282421 - DNA, 327 bp, Glycine max
  unsure (1)..(327): unsure at all n locations
atcttgtgtgacacactttanagttcaacttctatccctatcctccttcaatttccactctctctctttctctctctctctctctcattctcttcctccattgaagcttcctctctaagcttcttatccaaggcactctcttagtggtgaagcttctccttcatggcttattctctagttgatggtacctcctctcacctcttctcctttatcttctgcttgaactccatggcttaaaatcaccattgaaggacctcattgaagctcaaagatccagcctgcatagaagcttctcaagcaagcttccatcaagtggtaatcaaagca

SEQ ID NO: 282422 - DNA, 450 bp, Glycine max
  unsure (1)..(450): unsure at all n locations
tacaaatctgttttaagtccaagcccataaataatttaaattctagataagataagacaaaatctagatgaattaatatctagatgaaataaaatctagataaaataatatctagatgagataaaatctagatatgataagataaaatctagatgaaataatatctagataagataagatntggtagcataaaattgtctgctctcttcaagtccaagcccaattccggattcaaacccaattgcttantaatttcctganattaaattaaaaacacaaaattaatccagtaggcccaaatgataaaactgcataattaatttgacaattaaggctaatcagtaattaaaatggtgacaaaaaggggtaagaaatatgagaaaatgatgacacatcaggacgacagcttttaattaaatccacaataccatgacttcagaatggtttatt

SEQ ID NO: 282423 - DNA, 371 bp, Glycine max
  unsure (1)..(371): unsure at all n locations
agctttatttttgcttaatatatcactttttagttgactatttttcttattagcttcctactattagtgcaaaaccattttgctatngtntcatgttttttttgctcgtgttgtgggtttgaatttgaaaattgaacgtttgtgcttaactttttgaactatacggtatgttgttgtttggatggcactatatcacatgaatgcattntggtttgcaacctggtgtgtttgcaaggggttgtgaagcgaatttaataataaataanatcaaatgctttctctctggttctttgtatatttaattgaaaagtatancatatctatagagtatcttcaattatacttaaaaaattaagtattatattaaaaaa

SEQ ID NO: 282424 - DNA, 409 bp, Glycine max
  unsure (1)..(409): unsure at all n locations
actggatgcattggttaactgggtttctcattggccttgaatcaaaaatttgtaactgtcgcaagggtnttgtgggttgtgctcctctgctgaccaccatacagacctttgccctttcattgcagaacctggagcaatngagcagcctgaagcttattgctgcaatatttacaatagaacctcccaaccacagcagcaaaatcaaccataacaaagcaattatgacctctccagcaatagatacaaccctggatggaggaatcaccctaacctcagatggtccagccctcagcaacaacaacagcagcctgctccttccttcaaaatgttgtggcccaacagacatacattcctcaccaatccacaacagcacaaccccagaacaaccaacagttgaggccctccacaa

SEQ ID NO: 282425 - DNA, 88 bp, Glycine max
tgcaaccttttttaaaattcttaaacctggttaaaacataattataagttggattgccgaaggtatattattgaacccatcaccttcc

SEQ ID NO: 282426 - DNA, 365 bp, Glycine max
  unsure (1)..(365): unsure at all n locations
ttcgtggagcttacagaccatgtcttttgaaatantctatcaaccttgtatgcccgtatggtgggtanggattagcnnaccaaatgagcacccctgtggaaatcggtctacaaacactaatatcatcgtgaaacccgtgggattattgcagcccctattattgaaatcgaggacaaatctttccatatgtgggaaggtattggaaagaggtgcagcaaaccggcagcccttctttgttcgtattttgtctgttcgcacgaaggacattgcacgatgtactggcggacatcttcttgtatatgtggccagtcaaaattctgtcgtanatgatggagagtctttgatacccctgtgtgattgtcgag

SEQ ID NO: 282427 - DNA, 221 bp, Glycine max
  unsure (1)..(221): unsure at all n locations
agtttgttttatcggttatgctagaccgagaccaacaagttagccatcatcatcaagtaccaagaagaattaaatctagccacggcccacgagcacaaagtggtggacaaatatgcccaagtgtacgcggaaaaggaggctagaggaaaggtgattgactcgttacatcaagaagcaacgatgtggatggaccgatntgctcttactttgaacgagagtca

SEQ ID NO: 282428 - DNA, 424 bp, Glycine max
  unsure (1)..(424): unsure at all n locations
aatgcctgttgggtgagtagaattctccttctgtttanggtttttgtgatgatgtttgtgatgtttatatgctgaaattgctgatggaaatctgttagagacgaagggtagaactaacccaaggttagaaagtgagaatgtgatgttatgagtgaaaaanaaagagtgagactntgagagttggaaggctaagtctgaattctgtggtaaatggaggttagagtgagttaatactagcttgaaatgtcatttagaacatgtgagaaaggttaggctgagctagagagaaaaacaaatgaccaaagtgaacaaagagccattgctagggcaaatttgggtgttgaagagtncaaatttgattcggtgagattntaggtgtaaatccagttcgaacaagtctanatggatgttacggactggtgtg

SEQ ID NO: 282429 - DNA, 354 bp, Glycine max
  unsure (1)..(354): unsure at all n locations
ggttttctagcttctatgactttaacacctagctgtcagttgtatgtggctgtactgtcttaatacaggttttaatacatggcttacacatatacatgtatatataccaggtagtaccaatgtgcttcacctgaactggatataatgaaacatcttccacaacaacaccaatggacaaaccaagttcaactacaacagactaattcagcttcacctgaagttgatataatgagtaatggcattagaagaactcacagccaaaccaagttcaagtacaacaaactaatacagctttttctcaaccaaagtatgtcanactactttgtggctataaaagtngtaggtattcatgtg

SEQ ID NO: 282430 - DNA, 350 bp, Glycine max
  unsure (1)..(350): unsure at all n locations
ttttaatgaatccattgccaaggatttcacttagggttgcttatctcttttatgccaaacaaacttgccttttgatgcctgattatttttataaataactttatttgttcaaaaaatggtttgcgaaagtgttatcttatggtctctttgttctctttacattaccccttgttgaatctaaagttagttatgatgcatgtgatgttttccaataaaatcttttaaaacttaactctaaaggtggagaagcattttagtgattttcttatttccaataggaaagtttactactttcttgttggtagaaaatccattctgaaagatctaatctcttacatagatntctttag

SEQ ID NO: 282431 - DNA, 352 bp, Glycine max
  unsure (1)..(352): unsure at all n locations
agctncttgccaaatggaattaccatgaattaattccttggatagccccttggagccaattttccttttccttggtttggaacctaataacaggcctaaggggaaaaacatgattcaaccttacctttagggaatttggaagcttggaantggtttggaataagctggaataaggtgggggggatggttcatgaagattgattttggcatgctaatgtttatttgccatgctgatgatatatatatgctaagtcttcttaatcttcaattcgactgtcataaaaaaaatgaaaatgaaaaaaatcaaaaaaaaaatcaagtgcggaatctgcagttcgactatcaaaaaaaa

SEQ ID NO: 282432 - DNA, 443 bp, Glycine max
  unsure (1)..(443): unsure at all n locations
ntgttggtgtttggacttcagatntagtgcatgtttggatgtgtnnatttatggaatgaccacttattttgcataagctctctcacaaagctgcaaaaatagtgattattttctcaagataaactgaaccaaacatgcgctacaaagagaaaaaattgctaagggaagataagtttccttagggcttgtttggataaaatttttcaaaaacaattataggagaagaaaataagaaaaaaatatgtgaaaaagcttctccataagccaaaattaacttatgcataagctaatttgtagaaactctcatattagcttctccaaaacttgattnttagcttacgtataagttaattttagtttatggagaagctntttccttggtttcttctcgtgtaagtgcttttagagaagtttatccaaacaaaccccaagtcctaaacaat

SEQ ID NO: 282433 - DNA, 259 bp, Glycine max
acgtaataaaggctaaaatgaattccaaccaatcatttgtgttgtaatgtcatttaatcaatgttaaaacaaaatctaaccgatcgttcacgctataacctcggttaaacaaaaaaaggtaaaataataataaaataatcaaaaaaatcaatcggacgtttttctttgaaagtttccttgaattaattgactaataacccaagtgaaaccaaggctaaaatcaactcacaaatcaagcttgtcccgcaaaaatcactca

SEQ ID NO: 282434 - DNA, 285 bp, Glycine max
  unsure (1)..(285): unsure at all n locations
ggattacaaaaaattaaaaaaagaggtctttccaaaaaggaaacccgaggaagtccccaccaccgttattttaaggaaaaaccaggaaaaacaaaaagggataaggatattctatagttaagaaaaggattcggagccgttattcatggggaaggtattacactcacacgcccgcatgaaacgaaatcttaatcgatgtgtaaaataagtacttttgatattatttccttgaaaataatatgttgcttatntttgtaattagaaagaagtgatttattttagaaa

SEQ ID NO: 282435 - DNA, 429 bp, Glycine max
  unsure (1)..(429): unsure at all n locations
gcttgcacacctatattagttattgtgagcgtctgatgtaaaaatacaagttggttcataaaaatatgcgaaaaaccacctatatttatgttatatccatgtgactgcgcggatatataggatctgagttctggaggaaagaattacctgttaatggatacctgaatttcatagcctggatattaccttctggctggcttaaaataatggtgaaaaaacattttaagcagaacaaaatattcaaaagaattaagtaggtataaagcaatggcaatgcaatttttaacatattatcagctgatgaacatctatgattcattcactaaaccaaaaattaaantgcatatcttcaacagctggcatgcctttcgtggatcaagcttctctacacaattaatctgtagtacatatgtttattcggtctccccn

SEQ ID NO: 282436 - DNA, 452 bp, Glycine max
  unsure (1)..(452): unsure at all n locations
nnnnnggggacttacgatgcacgcacaactttgaatactaagcttgcaacaagatgtaacgttcattaacgtaatcaaactttttattttttggggaccaaaatctatagtggggaaaaacaatgaatgggccctatctcccctatttaaataatgctcttggaatggatgatgtgcattggcccccacacatcatatatgggatttccctgtatgtggctaccccccttgcatcagtggaaagatgctgtctggaaaaagatcatgagcttgtgaacatatctcttctattatacacttgaatttaaaatgcgcagttaccagtgccaaaaatacccngtgatcttttcgccgtgtttttttgggtaaacacttttggcttcctctatcttaataaaccaccagcttgccttatatgatctagtctcggagtttccaacccataacaatgc

SEQ ID NO: 282437 - DNA, 466 bp, Glycine max
  unsure (1)..(466): unsure at all n locations
ggagttacttgatantcggcaattccactcgggacccgggatcctcttnagacgcccggcaggctggcacacccggttttccttactgttttccaagggtttaaattggcccctcgggtgggcttatatgggtcctggattaccaaaaaatggtggataanaatggccaatgtggccacatttcggctacattaaagccacccgcacctcaggaaacccttgatcttgccggccaatcacaggtgcagaccatttttttaaaccttgctacctatctatttagtatcaatgacttaagagtaagacttccgtgaaaatattacanacgaattattaaccccataaaccagggacaagtngaagagtagagggactccctaaaaanatattagagtagagggaggaaagtctttntgagagagaaaatagcttanggagaaagaaattcacttttcacatattttgn

SEQ ID NO: 282438 - DNA, 258 bp, Glycine max
tgaatccttgaattccaaccatggtaatcctttgggatgagaatctctataatatggaatttttgggtgggtattatttcaccttttcaaaaataatgagttaattaagaatgtgcctatgatgtgaaataaccttacaccggccctaaatttaaaatattgtctattaaggtaaccaatttattataaataataaattttgaatggaccatgtgaaatggttttattggatccatgcctaatcctttttctccttaa

SEQ ID NO: 282439 - DNA, 506 bp, Glycine max
  unsure (1)..(506): unsure at all n locations
aaanaacaaggctaagcantcgtgcgaattctatctcggnaccccgcggattcctctataagtcgaacctgcgcggcgttgggcacgcctataattatattatnntaagnnngctcataaaaaatccctcttggagaggagactgcgctatatcgagatacacctcatatactctatatatattntataaaaaatatttccacatattggattgggcctagatttaaatattgctatttggattgggccctttggaggggcgcttatcccagaagaattatattgggccatttttcttaataatggtttaaaccttccaatattatattaagaagaaattattgttgcctcaaccgcattaaaaagattgttacctttcaaagggtgccctggtcctttttctttggattgaaaacagatattatactatgcaaaggatatncaanatngtattagcttattttaaaaagaaaaaaaatggcattccgttcgcaaagtctaacttn

SEQ ID NO: 282440 - DNA, 654 bp, Glycine max
  unsure (1)..(654): unsure at all n locations
aaaaactttggaggtttgaccgnagaactatagantactcaagcatnctcgccaatggacaatgggcggcacaccntaatctcgcgcaatccttctgtgttgcatctaacggaaagaaagagacaccgctccatataatatctctaaaaaatatgacatctctttacactaaaatatatatttgtgaaagggggacaccctctacacgcgaaatattgtctatagagatgacactgtcgcactatagagtatataagttcacttttcacaacacaatataaagagaacgatatntatngtgttgcgacatcttgagagaatatcntataagcgactggggcntcttcgcgcccacatcttgagtacatatcctctgcgatacacagaaattatatatatgctcgcgtatgaaaaacctgtgggtgtgggttntctacaccacactatgtgtcccaaaacatctttgtgccgcgtgcgcgcggcgcgcgcccttatacaccccctatgaatatggagatataacccgaagagagagatagagtaccttctctcncaaagacacttgatatatactgagaaaaacactataatatataggttttccttttttatggaatttatacactatataccgacatatatatagggttgact

SEQ ID NO: 282441 - DNA, 417 bp, Glycine max
cagcctgcattatttctgggcctcttttcaatatacataccccacacaccccccatatatctctgcgcccagagcgcgctctatacatatatatctctcgctctcccctttctttgggccatggtcgcttcattcattatctcaaaggcgtgcaagtcgccatccgaaaataccccagaccaaatcgcccaagggtgccaagattccgaaattccgtagccgaagggtgcagtgatagaaacaaaaaaaagagagtgcgagccaagtagggtttgattcttatatttttaaatatgtgagcccagatcggtttaaaaaaccgatgttatcacatgatgttaagttaacatcgttgtctggtaaaaccgatgttacttatcataattaacatcagtttctgaaaatcgatgtaacgaa

SEQ ID NO: 282442 - DNA, 374 bp, Glycine max
  unsure (1)..(374): unsure at all n locations
ttttttttcttatgatggttccattagaaaaaacctaagaatggcttggaaaccgggattaaaagaaagggacttaacccttaccccgatctggccgtagaaccaacactatcgaattcttaacccttaaacaaaggaaaagttctcacaatagagaaactctcaactttcattagtcttcaaactctgttnttggagagtacaagagttccctatttataggctaatcttgaattgctagaataattctgactaacatgcatttactgcatgcattgantaatgcatgcccactacctangaaaatgagaataaacatgaaaattaattcccgctagccactaaatgacttagagaacttctaggaagcattt

SEQ ID NO: 282443 - DNA, 159 bp, Glycine max
  unsure (1)..(159): unsure at all n locations
agtttttttggaagctacctagnctataaatagaagcttgtgtaacactggttggacctttgatgattgaaagtctaatgaaatacacttcaaagtgccacttctttccttctttaattccttcaattcctggctcccgccttctctctttcttttcct

SEQ ID NO: 282444 - DNA, 446 bp, Glycine max
ggaatcggacctcagtgtcaaaagttatgaccatctgatatttctcgagagcttccgtggttcagtggcgagcatctcgacatattatgtgcccgaatctgactttcgtgtgaaaagttatgaccatttgaatttctcgagagcttccgatgtttaatttcgagcatctcaatatattgtaagcctgaatcggagctcagtgtgaaaagttatgaccatttgtatttgtcgaatgcttccttggttcaattccgagcatctcgacatattatgtccccgaatctgaccttcgtgtgaaaagttatgaccattcgaatttctcgagagcttccgttgttcagtttcgagcctctcgaaatattatgcgcccgaatcggacatccgtgtgaaaagttatgaccatctgaatttctcgagagcttacgatggttaatttctagcgactc

SEQ ID NO: 282445 - DNA, 383 bp, Glycine max
  unsure (1)..(383): unsure at all n locations
agctttcttgggccatttcctgtgaaggcaaacatttggaaagttagttntaccaagaaatgctactcttaaaacacaaatggcatacaacctcctttaataaacacaaacatcaatgtaaatttagaatanactcatgcacatactcccttacgaacgttcacttgcacaagatattctcctaactaagaaaaatgcacccacgcacaatcaaggcaccttcgtcacctagattatntatatgtacttccgaggtgtatntgttacctacatcacatgtacttcctttggctaaattacacacacgcatactcaaagcattntggctaccaaaaatcgcacacgtgcacattcttgtatttctaatactatgcatatacaac

SEQ ID NO: 282446 - DNA, 426 bp, Glycine max
tggattaaacaacggaagctctcgagaaattcattttgttttaacttttaactcggaggtccgattcaggcgcgtaatatatcgagacgctcgaaattgaacaatggaagctattgagcaattcaaatggtcataacttttcacttggaggtctgtttcatgcacataatatatcgagactctcgaaattgaacaacggaagctctcgagaaattcaaatggtcataacttttcactcggaggtcagattcaggcgcataatatatcgagatgctcgaaattgaacaacggaagctctcaagagaatcaaatggtcataacttttcacacggaggtcagatttatgcgcataatatatcgagacgctcgatattcaacattggaagatctcgtgaaattcaaatggtcataccttttaacacggag

SEQ ID NO: 282447 - DNA, 174 bp, Glycine max
agcttaatatacttagaattcaagtgatcatgtatcccgaatattagggggaaaaaccggtgccccttttatctatattccattggttggtgcctgcctggatcctgaattccaggattggattggcctcatccaaaaggggggaaatggtgaagccattggctttgatggttt

SEQ ID NO: 282448 - DNA, 443 bp, Glycine max
  unsure (1)..(443): unsure at all n locations
tatgcgcatatttccttacgaacattcactcgctctttatattcttctaactaagaaaaatgcacccatgcacaatcaaggcactttcggtacctacattatttgtatgtacttccaaggtgtactacctacaccacatgcatttccttggctaaatttacatacattgcatgctcaaagcctcttggctaccaaaaagtgcacacatgcaaaccttatgatgaatcttggctatctacacaataaggtgctacatttcatgctntattcaagtgtttttactacctaaagccgcatgcaaattcaagtatattttcttttgccgactaanatngtattcaaattaaaaggtgtttntgtaaggtattttctttacataacatgcaacatatttatatatttttgggagacattntgactaccanaaattatatgtacataca

SEQ ID NO: 282449 - DNA, 404 bp, Glycine max
  unsure (1)..(404): unsure at all n locations
tctttgtgtcctcaannaccaaagtggttccccaagaagtatcgaggcactctgttatatcatataaccacatccagtggtaatccgatacacctaaaaacacattttggaaaaaccgcgctttttaaaaagggtttgagatttgaaattttggatcctggtatcgaataccagaaggttgtgattggatacccaccaccggaccttataaaacaccttggaaaggcctgaaccttccaaatattaccggattatccaataccagaaacctggtatcgattaccaatggagatttcaganaaactttttgaaagacacatctttcaaccatttgaaaggcacgaaggactattatgtgttgtcagacttgaaagcagagaagatatctagagacttaatgcaan

SEQ ID NO: 282450 - DNA, 384 bp, Glycine max
  unsure (1)..(384): unsure at all n locations
tgagaagcacaaccaaaaactagtatgcttgtgcttaatatcttaattagnctttgggatcactattcaatgtattcaatctttcttctaagaaacaacttattcacttcaattttctcagttggtaaacattaacccatagaaattaaaatagttcttacacttcatgctatagcaaacatttataagaatttgagttgatttactgaataaaaaaagctaaattgtcaaaatggttaattattttgctctttttctttcgtttgacctcgattacattggttatccctcacaaattttactttagaaagcagggattcgacatcagtgaacgcaaacgcaatatgttaaaggaacaatttgggttgggttggcgggttgagt

SEQ ID NO: 282451 - DNA, 200 bp, Glycine max
  unsure (1)..(200): unsure at all n locations
atcttattggtatggtcataggtctnggctgggatggggagaagaaaaccattgcaactagtgatgaatggtgggaagccaaaattcaggtttgtattattcaacgaaaatagagtttttatgcaggccaatctttggttnttatattatttatgtgggatactngactttgcggccaaaattgcagttgcagaatgttt

SEQ ID NO: 282452 - DNA, 439 bp, Glycine max
  unsure (1)..(439): unsure at all n locations
tgcttacttatgtggagaatgatgagagcttgaagtcatgggtgacaaggattcaacaactcagtatcaatagaagaaaaccttcatctcaaatgcatcgtgccaactgcccagcagcatttctgcctctcaactttcctcattgtagatcatccccgaaaacattccttaggcctcgcttcaggtaagatcacagcatgtggctcggcatccaaaccatcagagattatgaaacagttccaaatggccagagcatccagcaggatctccagccattgacccatgttctgacatgccatgcttgactcacagatgtcatactttctggtgcatgagggctcatgccttcaacattnggccagtttactccatggaatcagttgaatccttcacttggaccatatccacttacttcccttcagccctcatctagtgatct

SEQ ID NO: 282453 - DNA, 387 bp, Glycine max
  unsure (1)..(387): unsure at all n locations
ggcttcaagcttgtatataataggcctgattcctcaaggatgtccatggtataatttctctaaaaattatgacaccatcgtggattgtgccaccaccattctatgaaatacgaagtttttcaagatctttgccaaaaaatcattgaaaagaagtttcaactaaatgatgccaacatgccatggtgattgttagaaactacacatctatttcaataaggattctagaacgaatggtcaagtttccccctctccttttttaaactttacataagtcctattcagcactaattgtctctttaatttatattnttcagtcaattaaacttgatctctaaaatgctcaataacattagatgtcaactcctttgtcatataccagaacatgat

SEQ ID NO: 282454 - DNA, 432 bp, Glycine max
  unsure (1)..(432): unsure at all n locations
aggatgtaaacagatttggaaccttcatatgacttttcacgaaataatggagaaataagaagagaagagaggtttaagagattcttaccaaagctttgagagaaaaaaaaaacctaaaaaacactaatatggagcttggaagaagaggaaatggtggcctcttagtaagtgccatattttagttatttttgggattagaatgttagcacttatcttttgattttaatagttttcttataaacttcctttaattctagttgttttatatattatacgtntataaatatttttttaaatatggaagattcatccatgcatttcttatgttttgatggttttttgttggatctagaatccaagccaagatgaagagcaaaaagtgtcattcttgaagaatctcatagtgccacatcgcccagctagcaatcaact

SEQ ID NO: 282455 - DNA, 336 bp, Glycine max
tcaaaaacttttaatgttggagatttagtttggaaggttatcctgcccatagatagtaaggatcgagcttttaggcaaatggtccccaaattgggaaggaccgtttaaaataattcagatctattcgaatggtgcttatgagttagaggagctaacccctcagaaacgtactttgagcataaatggtaagtatttgaaaaaatataaaccaacactactcgaagttaaaataagcatagaataagagaaataccggaaacataaaaatggcgataacagtaaattgccacgaaagggcatgtgtcaatattacatcgaaaagtaaaatcgaaatac

SEQ ID NO: 282456 - DNA, 288 bp, Glycine max
ttccactcagactcctagtcactgctattgttgggtttcacccctaacgaacacatcttttttagtgccccatcatatacccccttggatgaactagttaacgcttacgcactggtgggcttctgtggttgtacaagtaacacacattagctggctctctcgttatgcccgtccgactcccactagactgatgcatgcacactactctctgatggactgtcaaagctttggaatgcgaattaaatctttttgagattaatttagtatgtaacaatcattaaagcaatt

SEQ ID NO: 282457 - DNA, 331 bp, Glycine max
ggaaaaacctatgtgcctcattgaagttagcacccatcttttataaaactgatgggagaatatccaatcaacataacccacttgacccttttgcaccccatttttagggcttgttttgccaccacagagagcaacattctcccaagccccttcgtcttataacactccctcaagaacaagttctccatgtaaaaccctcgcttctctagaacgagagagaagttcggagaaaacaagacaaacccaacaatggaaacacctctgaaggtgtttaaattgtagtttctcgagataactattacttaatgggaaataatgatgaataattaat

SEQ ID NO: 282458 - DNA, 489 bp, Glycine max
  unsure (1)..(489): unsure at all n locations
gaagtatactcgatgcatgcagaacnttngatactcaaccntgtaagcctaagccatagtattgagcacatgcagggcctacttatttccaagtaatggaaaatggntggaatcaacccgacacaatgagggagcaataaatgtcctctataaacaatgcaccggctaattttcacccaaattaaccctccatacataccagttacacaacttaatggcacagtattccccctgtgcaatgacctctctaccctcacacaaattcaacgtgtgactcataagatacaatacaatttcagcaaacttttgaattaagatccaaacctttatctaatcacaacaatcatatgcagtggatacaaatacacgccagtttgtgactctcccgtcatctccttcattcctgcttatttcactaaacttcacaggaaatcttatcaatatggcgtctggttttgtggatattgggatacatccgaatgatgtctn

SEQ ID NO: 282459 - DNA, 481 bp, Glycine max
  unsure (1)..(481): unsure at all n locations
ggggaaaggaaagactacttgtnatactngcannnctcagagancngccgacacccncagagaggacccgagagggatagtgaaagccaagtttttttatctntatatcgccaccaanaaagggcgagcttcaatggaacttccaaaaaacaattattggcgttaaatttgctccaaagctcaacattcaattttaaccgttccgatatctgaggggactcaatcagacttccgataagaaagtattgtcggttgaattagctcagagcttcagcattcaatttccagcgtataatatgtgaccggcctcgaatatacatcccaagacaaagttatcgtcggttcggatcgctcaaaggtccacataccatttcaagcgggtttgtttatcacaggcctcaatcgacatccgagtataagatatatgggcatggatgttccaacacttaaacaatctatgtaaatcacaaatatataccgg

SEQ ID NO: 282460 - DNA, 394 bp, Glycine max
  unsure (1)..(394): unsure at all n locations
aggtgggtactcgtttcatgncatacagaaatcaatagccattaaacgacnnacgggggcgcggaaggttgttgttcctgtcnnaacaagacgctgaagtgagtgtgaattctgacaatccaacgacatacttttactcgatgctggatgagtccggaattaacgaaacctcaaatgaatgtgagcctagaacaatcaacgaccatacttttactccgatgtctgatggtccctcaatatcagacctcaaatttatgtgagctctaccattcaacaacaatactttctcaatgtctgatggccggatatacagtgctcaattgatgtgactctgaccatcaacacatactttactcgagttgttggtccgcttatgagacctgaatgaagtgat

SEQ ID NO: 282461 - DNA, 537 bp, Glycine max
  unsure (1)..(537): unsure at all n locations
gggaccttgatcnctccctggtatnncctatacnntctaatttcactnaatccntaccnncggagannnngnnnggannnaaacagagagagagagagcaagcttcatttcttacaccnaccacaacaaaccacacaggcgagggggccgcgatgacgacacacaacacaacacaacccccacacgcacngggacggagaacagaattcaaaagcgaaccccacgagcacaggacgcagccgcagacgactcacatcgcaaccgagcgacacgggataagaaccgacacgcaccgcatgacaacggcggaacggcccgacgagacagggccaacaaccgcccggaccacacaatcaccaacgacggaccgaccgccagagcagagacgcacaaagaggctgcgaccaccgccgaccgccgcccacaccccgtcaaacggagaaaggacacagaacgacccgacagcaacgaaagcgcgaggcagacgggccgccgaacggagcaacccgacgagagtccacccaacgatgagccacg

SEQ ID NO: 282462 - DNA, 370 bp, Glycine max
  unsure (1)..(370): unsure at all n locations
ggatgtacccgtaactngannacnaagctcgacacgggnnaaaagangaaagggaggacccctctttcacccccaatccaccgccccgcgacgcgcacccnntaggcacaacaacgggagtgaggaaccttatccggaagaaactacacacttggtactaatgggcatgggaaaaatcagcggaatgacatatcctggatacacaaatcacaatttatccaaggagctaccttgccacatttattgaggtattgaagcctaggttctatactaattttaaggctactcgctcattaataaatgtccctgacagaaaaaaatatcatccttggacacttttacaggaagccttggccaaaacaaatgcagg

SEQ ID NO: 282463 - DNA, 482 bp, Glycine max
  unsure (1)..(482): unsure at all n locations
tgggtttcgtttcttagtttttanantctttganannatncannaacntagganaangccaacagaaattgagcgaggctttaancttcatgnncnnngcagncnnagggggggggactaccagaaacttaccgaaccggcagngcnanatnnnccgaaaaagnacaangaangccaaacgagagcacacatagcaaacaaagcgcccccaaactagagaacgaaccgagacagggcccaccaggaacagagacggaggaagcaagncagaacgcatatccaaaangngagacagngccatgtgaagactgagacttcattcaaggtttcatatggaagttatattctgttatctcggtttcttataataggatatcataatcaataattataaatactcacttaaatattatataatatatctattgatatatattatcatattgaaatattgtattataaaactgatttcatttacatat

SEQ ID NO: 282464 - DNA, 223 bp, Glycine max
  unsure (1)..(223): unsure at all n locations
agtttgtgnaattaccccaattccaatgccatatgctgacttactcccatatctgctcaataatgcaatggtagtcataagcccaacaaagactccttaacctctgtttcctagactatacaaccccaacgtgacatgtgcttatcatgggggagttccagtgcattccattgagcattgtaagaccttgaaacataatgtgcaaagtgcgattgatgcaagc

SEQ ID NO: 282465 - DNA, 215 bp, Glycine max
  unsure (1)..(215): unsure at all n locations
ccttgaatnaaaaatctgtgcctatcgcaagggtttgtggttagtgctcctctgctgaccaccatacagacctttgcccttccatgcagcaacctgtagcaattgagcagcctgaagcttatgctgcaaatatttacaatagacctcctcaacctcagcagcaaaatcagccacagcagagcagttatgacctttccagcaacatatacaaccct

SEQ ID NO: 282466 - DNA, 308 bp, Glycine max
agcttgctctccagctctcccaggcgagctagggtgcttcctccagaaggcaccgccttctggtagaacttcctggaaggcccaagtgggcctgattactattagtacccactgtttactaaatacatccccttgcctttttgctgattctttttccgtaatgttaccgaactttacgaatttcgaacagatacttgatatctttccgtaatgttatggaaccctacaaattacgttatcatccctttttttgcttccataatgttacggaacctcacgaattggccacaatgcttacatttgacttt

SEQ ID NO: 282467 - DNA, 53 bp, Glycine max
gcaaggaaggtagcttgcttgggaagcaaggaagacagctatctcgaaaagcg

SEQ ID NO: 282468 - DNA, 175 bp, Glycine max
  unsure (1)..(175): unsure at all n locations
agactcaccctnccgggcggctgtattacgcccatggcaaaaccgttactcacgttccccttataaccttgcgatcatacttactgctattgattgtgaattattggtcttacggctgtaaagactcgctttcttcaatgctcattatgggttatctaattatctatcttatcac

SEQ ID NO: 282469 - DNA, 382 bp, Glycine max
  unsure (1)..(382): unsure at all n locations
cacgcatggatgggcttgtattgtatggtcaggatccgataatcaaactttatcatttcatctaatgctatgccttttatcgacaccaaaatcgactagaaaaagcctattgtttctagttgtataatgccctgtgacatttatcaagtagctaaattgaccaaatggtggctccaaaaaacaatgcaatccaaattatgttctcacttcgctcacacaggtcacactccttgaaatcaggctctgatccttttatgcatgactaatgagtaaaatcacttatttatactccaaacctagatggtaatcatatatataatggttatcaaatacgtacaataacatgtctcatntgtatgaactgctagtatctaaattatta

SEQ ID NO: 282470 - DNA, 327 bp, Glycine max
  unsure (1)..(327): unsure at all n locations
agcttgttttttcttattcaaatnacnggggggcacgaggccgagcatacctgagctaagtgcatttcgttgcggctaccattaagcttatcgagtctggcttgctaagccctcgtacttagtgaattttctgaatgtcattgtgctgctaagcgcaaccctgatgagcttagcgcacatctgttgtggcaatcgctagacttagcgggcacttgcctgctaagccgattatgcagaagtagaactttctacaacatcttgttagcggcctcacatgtcgctaagtgggtatgtgtattttgtgaaggtgagcttagcagaccatgt

SEQ ID NO: 282471 - DNA, 397 bp, Glycine max
  unsure (1)..(397): unsure at all n locations
attatgtgtatggatggttcgtagtaggctttaacattttcgttcttatgtgatntgtgttaacaatggtatttagaatgggaaataaatgaaaggatagctaggggggaagcacancatcattntgtattttactggtatacccttttctatgagatcatataccataagtgcacacttttcctgttaacaatcattgcacacctctcgctcanatccttcccactgaaatccaattgtcataatggattaacttatatctaccaatacaatacaagatcatatcaatgtcaaacatcagtgtcagctccctgtgactcttatagctttgctacaagaacccacatgttggcaagctcattttacaggtatgcttctctttgctatgattcttcaa

SEQ ID NO: 282472 - DNA, 275 bp, Glycine max
tgtgacacttgtagaaactctgatgaatgacagtcttgtagacacaactcaaagttcatcttctctccctttttcttccatcaatatcatgctccgccatctctatttctctccctatttcttgtactccatagaagcatcctctccaagcttgttatacaaagctcatcttggtggtgaagctccttctatcatggcttattccctagtggatggagcctcctctcacctcttctcctttgtcttctgctgcatctccatggtggaacacacca

SEQ ID NO: 282473 - DNA, 363 bp, Glycine max
ttgataaaagggatgcgccacattatttgcatgacacaaatgcacaaatgatgatttggaaattttatgcacaactggtcatgcatgcacctatgcggacactcaagtgttaaattattatggtcatgtgatgctagggctcaggattcattttctctattttagtcaacccaatgtttccaaaatatgttcttttatccatttgtgcattcatccaagtccatttctggcgtccgggaaaattttacagcattcaccctttaggtgacacacattttttcataaactagctatgatcagcgaattattcttcatagaaaagttggaagtcatctcttttcaaaagcatgttggtgttcaact

SEQ ID NO: 282474 - DNA, 266 bp, Glycine max
  unsure (1)..(266): unsure at all n locations
tttgcaagcttgttggtgtgtaacgcaccatcttttcatagtagaacactggtactgtgtctactatcacaatgatcatctcccttttcgtcattgngggtgccacctgggctgccaagtctctccacctttgggcgtattctttgaaagattcatgcccctctntagccatgttctgtagtggcatcctatccggagccatatcagaactgtactgacaactgcccaacaaaggcaaccattaagtccttccaagaatggactcg

SEQ ID NO: 282475 - DNA, 369 bp, Glycine max
agataccaccagcatcaaggaattagggttgttgatggattctctccaaatgcaagctgtccgcaagacttacggaaagatcttagagttaaccttagcagaggtatccatagaagtcattgcatcactcacccaatactacgaccagcctttgagatacttcacattcggagacttccaattagtaccaaccattgaagaatttgaggaaattctaggatgtcctctcgggggaagaaaaccatatctttcatccgggtgtctcccctctttgagcagaattgcaacagtggtcaaggattcagcaagaggtttggaaccgcataaacagactcggaacggcatagcgggcctaccacgggggtacct

SEQ ID NO: 282476 - DNA, 133 bp, Glycine max
  unsure (1)..(133): unsure at all n locations
tttgcatgcttgtttcgaggtacttacccgtngaagatcgaagaacgatgaagaacgattgaagaacgtcgaataacggttgaaatctttgcgaaattcctcacggaaaacgttacggaaacgtttcggaagc

SEQ ID NO: 282477 - DNA, 422 bp, Glycine max
  unsure (1)..(422): unsure at all n locations
nttcgattcgttctatgtacccgtagtggtccacattgtgttttctgtgcatttataattctcgtatttgttgagctttntatanccccctgttgacgttgcttaagccatnnnttacttaagtcattgtctcgctttaacttataaaatataaataatatttccacccgaaccgtttgaattgcattatccattaacttcggttaaaatcaattccgaccgttcggtcgtgccgtaaccacgttggaaatcaaaaagaggtaaaaaataatataataatcaaaaaatatctttttagtaaaataaagcggacaatcaagtggacattntctctttgggatttctcattcttaatcgaattgattaataactaaagtgaaactaaagggctaaatcaattcgtctagtcaagctcgtccata

SEQ ID NO: 282478 - DNA, 232 bp, Glycine max
  unsure (1)..(232): unsure at all n locations
tatcattccttgccctcggangaaaacacaaaaagaaggaaaatccccaatcaaagaaagggagaaagcaaaaaaaggaaagaaaattcccatttaaaagagggagaataagaaaataaaaagaagaaaggaaatcctcgatcaaagatcggaagaaaacagaagaaatatacagaaaggtctttggaccagagaatatctgaacaatacagaattgtcaccaagaaaacat

SEQ ID NO: 282479 - DNA, 483 bp, Glycine max
  unsure (1)..(483): unsure at all n locations
aaattcacgctcggctgattacgtgcacttgcatctaagctgttgaatgcctgttgatgagtaaactacccattctgtttagggttttgngangaggttggggaggttatatgcctgaattgcctgatggaatccggtagaaaccaagggtgaaacctaccttaaggttgaaagtgaaaatggtatggtattaagtgaaaaagaatgaaacctttaaaagtggaaggcgttagctgaattctggtgtaaattgagggttaagtgaagtaatacttacctggaatggtctttangacatgtgaaaaagggtaagcttgacttgaaaaaaaaaccaattgcccaagttgacccaaaaccctttcctaggccaaattgggtggtgaagagtcaaattttgatttgtggaaatttaggtgtattnccagttgggccagtttagattgacgttatggacctgtgtgaggtgagagtttgccttaaatn

SEQ ID NO: 282480 - DNA, 406 bp, Glycine max
  unsure (1)..(406): unsure at all n locations
cgtgcgagccttttttatttgcaagaantaagagaaaaannccgtgccgcccttaaggaggaccctccaagccgccggaagacgacgcttatgcttattcactttactatcatgatcaattgattgggtcatggtctctccttagcgttgaaataaccttcattaattaactcttgccttaactatatattaatatatacccttaacttatacccacgattattaatacccccaatggttctgggatctacatcacactcataaagtcgactcataatnattctatccaccatttaatttcttagacaaatactttattaattaaatatatcttaatggctctctttttgtttttatcagtgatatacatgtcaattttttgttgttgaacacatgaacgttaact

SEQ ID NO: 282481 - DNA, 450 bp, Glycine max
  unsure (1)..(450): unsure at all n locations
aaaacgatgngcattgatacgtaattataacnaaacgtgggcaggaaacacgtaccctatcacttctattgtgcganangggnngcaggcctacgagcagaataatattctcctctcactctgattataggtttttggagcatatatatggttgtcgctagggcttattaattggtcaaaaagttgtgggatagagtcatcggtggcatatttggactagttaacgtcattctgtgaaggaagtatcgctgttgcaaaatgaacgatgctgatatatgcgtggttgaagtctctaanattacgatgaacttgtaaaggtgatatgataaattacaataacgtaaacaattaacaaaataaaaaaagtcaaatgtgcggcttgtgacatctacattattaatgtccatttgagactactgaacgacactgaatatctatcatcatatacag

SEQ ID NO: 282482 - DNA, 453 bp, Glycine max
  unsure (1)..(453): unsure at all n locations
gggagtgtcttgtagncctctgaattactctgaacctgcgatccttaagagcgccgcgggcgtgacacctattttatttaatagggcgggacacacccatcgaggtagggttacaacactttaaaagagtttataaccaactcaggattcaacagatgtgacatggaccatggctgctccgctaagaaaatatgctaatagctatgttatcctggcctggtatgtggatgacatggtgattgcacgatctaagttgacagaatattacatgtcgaaacaaactttgcagataactttgaaatgaacgatcttggtctacctatacaaagccttgtatgagaattctagatacagatcataatgattctgaagtgtctcagagaaattatcacacgtgcttgcaggtttacctgatatctaagacaggaatacccttaggatctcattgaattn

SEQ ID NO: 282483 - DNA, 479 bp, Glycine max
  unsure (1)..(479): unsure at all n locations
cctactantgcattcanngcatncatacacantnnatactangcccttggaggattanaggggttggttcaagcattccaccagattaaaatatttctcatagaagngaaccaaattgggccatcatcctggacctttatcatgaccgccaccaaatttaagaaaattttgccaggttctacacttcagaagaattattgcttagcctccaaaagaacggtggaacctgtgacaccccttgaatccgtcctttaatattaccagaaaattattagggagggtccttcctaccaggggtgaaggttccagttagccacctccatggaccttctattatggtcttaacccaccacctgatcaagaatttattgaaaaacagaatatcagatatttgagatgttggctttgctttctcagctcaatgcagatatgccatgagcagacaagaatggcacacagcattacaacgtagtctagtt

SEQ ID NO: 282484 - DNA, 470 bp, Glycine max
  unsure (1)..(470): unsure at all n locations
nnccaagatttgagtaacttcantattagtaaactccgaaccnnaaatgaaccgaaggaaggcaagcttgttcaatttcgaaaatggcncngaccgaccaaaaggaagaatccacttcaaccaatatcacccttaggcacaaccatacataacattcaaatcatgacaaaggtggacaattagctagagtagcaaatattatagcaatactaattgcaaacaacgggaaattgaccacattaaaattaccttctggggaggtccgtttcgcatccaataatggctcagcaacaatcaaacaagtgggaaatattacagtaaaccagaaaaatttaggcatangtggatctaaatgttgacttggtaagcatcctatagtaagaagagtataattatgaaccttgagaccatccacatggggtggcgaaaggagggacccantggtagaaaaacccagaactccttggatg

SEQ ID NO: 282485 - DNA, 428 bp, Glycine max
  unsure (1)..(428): unsure at all n locations
ccactaaccgaactgggacgatanctgtaactatatacacgaacctgacaactttccagagacgctgggagagtctctttctagncnaancnccngngagangagggccaggtgaatatcaaaaaaggattttctcttngaaagatggaaaatcctaattagtgcgtgacaaaatggctacttcccataccattattatgatataccccaaactccatagtctccttcacactataaatctttgagaccttaggtgcaccatatagctttgccacatatcattgtgcattgatctgatgttatttaaatcaaacctgtactgataaaccacaaaggatttgcgatacagagattaatgatacattatagaaacactggagcaatctaaccaaaataatgctgcctgatattaacccataattgtgaac

SEQ ID NO: 282486 - DNA, 416 bp, Glycine max
  unsure (1)..(416): unsure at all n locations
naaggattaccctangatacnctngantgagcaagagcaccggagagagctcctaagaggacctgaggggtgtgaacgtctttttctttataaagagacacaagggcccccacccctggggccctcttgaattagacctaagagaaacctacccgtagccaaatctagaaaaacctatttacatgccttaaaatcttgctaacagtatttgtaaaacaacgaaaagtagagcaaagatgaatcattggcagacctgctggatgttaacgcctctgagctaaaaaaatcaaatagaagtggagcacctgttctaaaactttctttttcttcttactatgcacttactcatcgagtgtaactgtagactgttgaggaaccaagactatttaagaacatataccttgtacgatattacg

SEQ ID NO: 282487 - DNA, 390 bp, Glycine max
  unsure (1)..(390): unsure at all n locations
ccaataccggccactcctttcataaccaattaacacaaatgaagtccttcctctcataccagtgttggtgtttaacctcataattaccgccacgaatccaatttcataagcgaatgatcgatcccactgcaaaacatcatctcaggtagcaaacatctagaatgcaagacacacaattttagtcttcaaagggacattcctnttattaattaaataacaataaatcacattattatctgaaaagtatttaacgcctcagaacaatcaacatgttcttcttcattcacactagcttcgtcgccattttaatcattcatatcaactttntcagacattatactgtcatacatccattgatcttcgtccatcttaacaacacattcaaaaatt

SEQ ID NO: 282488 - DNA, 78 bp, Glycine max
agtttgtttcaaagaggtccaagaaggataaggcggccgaagggactagttccgctcctgagtatgacagtccccgct

SEQ ID NO: 282489 - DNA, 401 bp, Glycine max
  unsure (1)..(401): unsure at all n locations
ctatanncatctcccactccaagtaggcctccgatcattctttcctctaaagggggaaatgtgatttnatacccatcattcggttttgtctaagaacaccatcatttccttcttctccctccttctttttcattatgatctctattctccatgtgatccaacctctcatggagcgcatcatctcgntgtttcattaacctctccatatgttgcatcaaagctngcatttggaattgcgaaagtccccctccatcattangaattgttcctgccatctcaaacanacaaatcaaacgtaacaagacaattatagtctgctgtttgaatacctcacccactcaagtgtatcacacaattatggcttttctctaatgaaacactcttgccttttaccactctaa

SEQ ID NO: 282490 - DNA, 77 bp, Glycine max
agcttctatcaaggggagatggaccatttcaagtgcttgaaagattcattgacaatgctaacaaagttgacctgccc

SEQ ID NO: 282491 - DNA, 448 bp, Glycine max
  unsure (1)..(448): unsure at all n locations
nttcttctacagttaatttgtattgaacatctcgataaaatttaaattgtctgatnncttttatagttaatgtaacccatgattacaggattaatctaacccctcattaggaatttaaattagaatccaattgaatcatcaaaggaagcattacaacaacaaacatgtagagaaaaataagaaatatatgtagaaagcctatatatccttgaaaccaatctatgttacaaatgctaaacctgagcttcttgtagttctatatttgccaggtgttagttttggaagcaactangtgctacaaaaaataaggaggaccatctacctaagcatgttnttaactgaatgtgaggcatttntgtttataactagtgaatactcgtgtttaagattctgcagtaagaatagttcatggggtaaatntgataatgagctaattgattatattctg

SEQ ID NO: 282492 - DNA, 324 bp, Glycine max
  unsure (1)..(324): unsure at all n locations
acttgttgtgatgttagctttgttcgtcaatgctttgaccttccaccaccatctgcatagatttagattattattattatatttaaattttaagccttgtatttggctatggtttatgacatttgaatacttagtatttctttcatatttacttagtatgactgaacatgatgatttatattacttgcttttggtgtttatggttatgtgtggtaaaccttattattttatgatatatatgtctagtgatatgtacttacatttggtattgtgtngatgtatgtcttataattattcatgtatggtttattntacgcactatga

SEQ ID NO: 282493 - DNA, 416 bp, Glycine max
  unsure (1)..(416): unsure at all n locations
tacatttttgactttttaacatgagatgaaatacagagattggacctcctgtaagttgttatcaaggaatacctaaacacctgggcctgagtggaaccagaaccctgaaaacgggggttgaaccaactttcctgaatctgtcttaataataaacctcatctattggaatgttcacattttgttctccttttgtctagttgcatattctgtgaaaacaagggataggtacacattgcttcatctttctcatcatgcaatcaatgaattntgatgcatacacccctatacataatcactgcatgtnntaccactngaggacaagtgagttgttatcttttgctcgaggacanagcaaactgtaaaattgggggagttgttagtcgatgaatacgactaacttttgtgataaaacatgt

SEQ ID NO: 282494 - DNA, 392 bp, Glycine max
  unsure (1)..(392): unsure at all n locations
agcttgttgnggagtgtcatttncagnnncagaatgatctgagtacatatatatatatatatgtctacctgcacatacatctttgaggtntttttcacatagtttaatggaatcatattatctctattattcacaccccttgtttacactaaactagaaataggccattttcaatttcttttggtgatggacaagcacaagctagtgtcattacaattaatgattaagaaattaaaatgcaaaattacttaataagaaatataatatctattatatatactatatgtaatttgatacctcttattttgtaatgttataataatacccacaaagcatgtcatgaaaaatataaaattataaatgtctttagcaaggtatctacacacgtacgt

SEQ ID NO: 282495 - DNA, 450 bp, Glycine max
  unsure (1)..(450): unsure at all n locations
caactttgcggactganacngatgacgtacanttagacactaacctgcaaacanataagtaggtctatgatgcttttctttgttctagagnactatgtaatgaaactaactgtttcttgtaatctatcatgttgcctgtcctggtatataataaattatttcgggaataaaaaacgttttggtgggtgatatgccagtcattttcttggtggtaggtacccctatcttaagaatagttgggccaccacctaatagaagaaacgtccttccttatagcatatgcccaaatgacacttccacatggaaagtgcacccctgagatgaagtaccccactgtgagtaaaanatcacttgggcttagtcataaatgttggattgaagaaagtgaactngtaccaaaaagaaatgcattagggccaatgacttgatagaaacagtttattgtaactt

SEQ ID NO: 282496 - DNA, 509 bp, Glycine max
  unsure (1)..(509): unsure at all n locations
ggaagaggagttganaccttagganactnntganaacnaaannnntggcnaaggagacactnnanangagaccggaaggcacgcaactttggttaantcttttataaagactngagcgcgccggggtttctccccctttgacaacatcaaaaagccaaagaactcggaaatcaacacagtcttaacattggagtaccaggatataagtatcaaagtattaaatccatttagccaaactcataatcaaggaaataatctaaccagaattcaattaccaataaatgtcaacaaccccataatatccatgacttgaacacaagaaaaataagcacagtacttagcataataatgtaaattctaagaaactaaaagccacaatacacggcttataagagatatataagcagaagtctaaatctaagaagacggaggaggtggtgggaagatcaaactctgacgaatgatccgacattctcttcaagctgtgtaagacgaatgtccatccggcn

SEQ ID NO: 282497 - DNA, 310 bp, Glycine max
  unsure (1)..(310): unsure at all n locations
aagtcatgcacaagcactcattntatatcaagcanatcacttattatcataactggaatttaatgactgaaatttaaatgactgaaacatagagcaactaaataactaataactaaattgttcatgatttgtagaaattaaaacaaaaccaaatttaaacatcctgctcatcctgtggctgatcttcatttaaatccaacactatagcagctggtgcatcctgaagaatgggctgctctggctccatggctggtgctgatggcatggtgtcctcagaaataggtgctggagagatacgaactggagaatt

SEQ ID NO: 282498 - DNA, 340 bp, Glycine max
  unsure (1)..(340): unsure at all n locations
ctacaacctgcttgcagtntgagaatcgaatctatcaggaagtttcataccatccatttcttcctcatcgatatccttgaagcactgatctacactttcttccctacccagctctaccttgtaaggtcccacctcgttatttaataaataagacacaaacatgacggtaaaatattcattatttacatataaactaaatttgtgaaaccgaatggataggagactatctttaatgagtttaccttggcttgtgtcttatcaatcaacttgctctgtccctactacgttttgaagtgaataaggtcaataaagggcgtaatagtctttcataaaagactaa

SEQ ID NO: 282499 - DNA, 190 bp, Glycine max
acagctgcataaataataggtaatcattatatttccaatccacccattcattgtttgttacctaatttacttcattgacaacatcgtaaaatatatacaaaaaagaaagatgtagtatataagtataaatttgacagagtaataatacatagatatctctttattttaatggtatcaatacttctcatat

SEQ ID NO: 282500 - DNA, 321 bp, Glycine max
  unsure (1)..(321): unsure at all n locations
ttgtcttcttattatgtataaactatttaaaatcgtaaggaataactttttataagattgaactgaaaataaataaattttggtggataaaaatcgtaacaaattgtgaaatcgtaaactcaatgaacaaagaggggactaaagtaacttttcgaaaattgagggactaataaaaataatntttttgagaactaaaaatacttaccgaaattgaaagataaaaatatatttagccttaatcatcttataaatcagctgtagatgaagatgtccaccttatatacctaatttgctatatctctagacatgtgactcaacaca

SEQ ID NO: 282501 - DNA, 417 bp, Glycine max
  unsure (1)..(417): unsure at all n locations
ttataagtgcgggtctgggagacgaaggtcaagtgttcctttatgcgaagatgatgttccgagtacttgggatttggtccgaccatgccctcctgatttccagctgggaaattggcgagtggaggaacgccccggcatttacgcaacaagcataatgtaaacctttacggttttaaaagctctatagttgggcctaggctntagagttttcattntgttaaggctntgtgtcttttgtttttgaatttataatacaaggatctttcttcatctgttcctggtctctacccattctcattcatttgcatgtttacttctttntctaaaacggcagattcgatgacgagtcccccgaaggtactaatacctgggacccgtctatcaacttcgagcaagaaatgaatcanacggaagatg

SEQ ID NO: 282502 - DNA, 475 bp, Glycine max
  unsure (1)..(475): unsure at all n locations
aaaaaacgggcttagnttacgtcnggantncanctngnnaccggggatactcttaaagccaacctgcaggctggcaacccggggtattaagggtataggccagggaaccctggaattcttttaaccctacacagagagagaggtccccgagggtcgtccattcttccaccccgaaccgagagacgcggattccaaagtagaggcaccatattcgcgaacgtggctcctcttccgcttcggcaccatnttcgttggtttcaggtctttcctaaaagcttcagggattangttacgggtttcggcgatccttgtctctttctgggcctgcgacagcgagtggttcacgacgcggaggctctgatcggagcangcagcatggaacacgctctggccgtcggagaagctgatcttctcgacggagatcacgcagcactcctgccagctgagctcaccgagatccgcaccacatcctccn

SEQ ID NO: 282503 - DNA, 492 bp, Glycine max
  unsure (1)..(492): unsure at all n locations
aaaaactttaccttgattggcaagcaatacaaactcaagcttctgagattcccacgtgtctttgaaactgatctctgagttttgatactattgtgcctctcacaacaatatttaataaatttggatttggtggattagttaaacccggtattcgcaccataaaagtcacaactgcgggaacttcgcaagctattcttagggaatcttaaaccttaaatggcttcctttaaccttggtcttggaggttcaacttaacccttattgggttatgatattataatttggtatccaaacctgttggtccctgacctggattggaacgggaaggaagtagaccatcctaaaaagccactaggaaacttctggacattcgcatttcttaatcacagcttcttgccttgtgcttttgagtagaatatggcanatatatatcanggtgctgttatgaaatatactacacatttgtgttttgcgacgtggtcatgtgtatan

SEQ ID NO: 282504 - DNA, 248 bp, Glycine max
  unsure (1)..(248): unsure at all n locations
tttggaacctttgaattggtttgggaattaatggtgggggggttttggttcattgacaactggtttgtggctatgcttcatgatgtattttgggccatacttgatgtacattgtatattggtaaatgttggacatgctgaatgaaatgtttgttctcaaatgcttaaaaacaaaaagaaaatcgaanaatataataaaaaataaaaaattcgaaaatagaacaagaaagcaatacagttgagtgaata

SEQ ID NO: 282505 - DNA, 425 bp, Glycine max
  unsure (1)..(425): unsure at all n locations
aacggcctcgactangctcttctagacccgtagcacttagagcancanccncaattntctataaataggggtgaagtgaagtaaatcgggttcaccccctaggccctctctctcttcggaattggctggaaaaaatggttcccgggagaaaaatccagccgtagcccctcccaaaccgtttccttaccgttccggggaggatttccccaaaggttccaaccgtcctcaacgtcctatatctccttattctctcgacttacggtaatccctcaccagcctttcaatcttcttttcccctggtggcccatggggttcggatttatctcttcgttactttatcccctttgactgctaacatttattaatcattctccttactaaataataattcaccacgttgatgatatcgtactcgtaaatgatcg

SEQ ID NO: 282506 - DNA, 447 bp, Glycine max
ggaaggagatgacttagacagcgattcatccgaccgcgatccctgagacacccgcaggcagcaaaccggttttttccggttatggaatcccaacctagagccttacacaaggcaccgaatacaccgttgaaggacacaattcctttcaaccttaggggaagagatcccaccaaaaggctaacctggaacctacctggatccagaaagattatttatgaaatggagggaagaagggttggacctatatgaattcaaaacccattggccagtgggtggtcttgtgtctaaaaacgatgttgtcgtctggttatgttcgttgcgtaaaagcctgatatcatatcaaagtgcagttaacagttaagtttgtattaattgattaatctatgggaacctggataaaaaatgtgtattgcgttatacgtgatgttttttctaccagtgcatgaa

SEQ ID NO: 282507 - DNA, 404 bp, Glycine max
tttatgaacgacaaacctgcacaacattggcctatttattcttcgtttagcctccaataacctctgcatgttagaataattagctacttataatgcacaacattttttcataggttggtatattttacctattgaattaagtaaagtcctatgcagacctctttttgtgattccttcacccatgtttcaatgtgatggtgacattcatcgcgtctattctttgcattgtgtatggactaaggctcaagaaatacatacccggaaccatgacccaaccttatactaaacttatccataaacctatttttaacattacaaatcaaaattggtaatcatacatatcataatgaatattaattattaggtaatgaaaagtaaccttgaaatacaaatcacttacatca

SEQ ID NO: 282508 - DNA, 477 bp, Glycine max
  unsure (1)..(477): unsure at all n locations
naaatgatgctttgattntcttgcaggcnaatcacagacccggggaacccnanaaggcgaaccggaaggaagcgaagccngagtccttttggaaaggaccaaacctnaatacacggagggcgcggggagccccgaaacacacaaaacgcgcaaattataaagccgcagcgcggagaaaaaggaacggcaaaaactctatacactggaagcccgggagagaccctgtaaaatatccagaacgccgcaaantgaaaacggagctcggaggaaatcaaagacgaaacctctatcggacgccgattgaacgggtatatatcacgacgaacaacaatgagactagaagcgccgagcaaattgaaacgacaacaaccttatacacggagggtccgttgaaccccgcgaatatccagacgcgcaagattgagaaccgaagctctgagaaaattgagaggcaagaaccgtcgcaacggaagcccg

SEQ ID NO: 282509 - DNA, 548 bp, Glycine max
  unsure (1)..(548): unsure at all n locations
agacaccannnnnnnaacgggttagaccccaatcggannatcngnatnancatnncatattnaatacnannacagatngactggggaccccgnggttgagaaggatgcgaggattatggttttcntnnggaanaccnngaacctcagtggaggggtggccatcttggggattggttgggtttaatgtggtgatcctgggggatgtgggagaagttgactttgcccccattgccccgacacggcaacctaattcaccacaatattaattggttacccccataattcctacaaaccttggaattgaaggaagtgtggcaagggtggagactttctaactttatttcgttgaacacagaaggggtccctgaagatatgtcgtgggggtcatgagacccttgggacgtcaggtgggtgctattggcccatacccagctttgaccatccccgaccacacacgggcatagtcagtcagtgagacccttgatgtactaaacagcnagctctaacatcaaccgttaaagacaaataccacaagcaggagcttgttt

SEQ ID NO: 282510 - DNA, 376 bp, Glycine max
  unsure (1)..(376): unsure at all n locations
tagggcgccctactctccttgcagtataaatctgacaaactgaggataaggaagctacactacaaagaatggatcancattcaccttcangaaaccaggatatttacactggtttttacaatattcataattagctacatataaattatcagagggagagacaaattaactagtgttaatcattagtgttctttggatacattcttcataagtatttatagaaatagaaaataaaataaaaaagattaacatcttctctaaataagattaattaattatatgaacttaattttatggaagtctctcatttctctanagctaaatattaaattaatttaattatgaaagnacttaataattcacttactttctattt

SEQ ID NO: 282511 - DNA, 500 bp, Glycine max
  unsure (1)..(500): unsure at all n locations
ngggtaatgtagtncncngtcgatnctatagcaannacantaaagcnaancncnggnnaaacaccctaatagtggtggctcggngaagttctgggttgaaggaaaagaaccgnnnccggggtatgaactatattccaatgggaacccttcacaatggctatttggtaattataattttaccctttttttggcatgaatggttgaatatggttactcttctattcatggtctctgaagaattaaccattgaatacctcaagcgagaaccaggggctattctggataccaagggtagaaatcgcaattgattgtgctagaggtctttggttcttacatacctaccaaggaggatgcattggtcaccgtgatatcagggcaatctttattaattgaacatgacatgttccaaaattattatttgggttactaaatctctagatatggatcaatgcttctatatctaaaacttanggaatccctatcaattggttgacaatatn

SEQ ID NO: 282512 - DNA, 103 bp, Glycine max
  unsure (1)..(103): unsure at all n locations
agctttgtttatttggtcttcgccagtgaaaggatcgatgtgggtccgaanagaggcaaatttgatcatcctactaagacaactggaaaaactggggccaatg

SEQ ID NO: 282513 - DNA, 382 bp, Glycine max
  unsure (1)..(382): unsure at all n locations
gaaagagatggaccaacagcttttcgtccgcggaatacacacccatctttcggcaatacatctggagatgcccttttggacatgtcgtccctttgtacttatcaaagtctggtactttgaacttgggagggatgacgatgttgggcacgagacataaatccgctaaatccgagaatgggtaattgccaaggccctcgactgctcttaacctctcttcaagcgcctcaatctttcccttatcttccgcgaagggaacagattcttttacgggtgtgggtgaagccgggatatggcggactatgctcggttggggtagttcatggngggacngatctatgaggtggagcatggggccaagatgggtatctccttcctcatcgtc

SEQ ID NO: 282514 - DNA, 285 bp, Glycine max
  unsure (1)..(285): unsure at all n locations
agcttggttctgtgtttcagaggaaanngacgcnggcaacgtatcaagagcaatgctggcacgactactgattcaactgatcatggtagagagctagaaatagttcatatgacactaaacgaaaagttggctgatacaaaatttctcctcgtttaggatgacgtgtgggaacgaaaggcggccttaatggagaactgtgctgaatgctccttgttatggagctcagggaagtacgatccttgccacgacacgcagtgaagaagtggcttctatcatgcgggcaga

SEQ ID NO: 282515 - DNA, 445 bp, Glycine max
  unsure (1)..(445): unsure at all n locations
ctacaataaaaaggaaatgactgagagatgttttntattggattgtaaaccatgaaagcactcaacatgaccttgcaaaacacaatgattacggaacaatggctctagataccatnttcgataaactgagagagaatatgatgagaaaaagacgaagaaaaaaaatctaatattattgatatgaaaagttagttggagttagttataactgaggtatttatagacctctacatagttgaactaaccataactgattctaactaatcccaactgacttctaactaactaatcctattgagatgcaaatagaaaagttcttacactccctaaattactaactaacactagatgggtattgttagcaaaagctaacaacccttacaatatgtatctatcactcaatgggtgatgttagcaaaagctaacaagccttacaattaatata

SEQ ID NO: 282516 - DNA, 338 bp, Glycine max
  unsure (1)..(338): unsure at all n locations
ccaccaaccccacacaaccacacgatccaaaaacaacaagcaacaactannaaannaanagggaccctcaacaccataaaannnngtgttnttgataaaaaaaaaaattttttaaangaagaaagggggagaaaaaaaaaaagaaaaaaaaaaaagaangggaaaaaaagaaaagaagagagagaaaaggaagaaaaaaaaaaaggaaagaaaaaagaaaaagaaaagaagaaaaaagaagaaaaggaaagaaaaaagaaaaaagagaaaaaagaaaaaaaaagaaagaagaaaaaaaaggaagaaaaaaaaaagaaaaaaaaaaagaaaaaagaaaa

SEQ ID NO: 282517 - DNA, 384 bp, Glycine max
  unsure (1)..(384): unsure at all n locations
cgacgaatctggcagtactgancacnnatttatcannacnnccgnnggaagaggaggagggagtttaattcntnnnaancannnacggggcggggggtcaaatacacaacccaccccccaaaaaaacataatttcaccccgctccctcgccgagtatcgagctaactacataacggcaataccgaagaggcacaaggtaaggagaaaaacaactcaactataggaatgtaacgccagaacacagactaggtggacgtacacaaagataaactccacagtcattgactgattaccaagtagtgatgggccaacacaagcaacaaactagatgtaaagagcacgtgacgtccgagccagcacaaggataacgcgcaaatgcatttc

SEQ ID NO: 282518 - DNA, 405 bp, Glycine max
  unsure (1)..(405): unsure at all n locations
agcttnagtcntttttatctgcacaaggctcttaaaggttgaagactatccttgtggaaccttcacccgacgaagacactgacaaaaacttatcttctccttcttggacaaagtatggcaggctgggggcaagtaaattttcttcccatcagaccttggatgcaactgtgatcgtatacccatatcagctagatcttgaagggtattcaagccatccttcgtcttgccttgaatgttaaggagcgttccaatgacactatcacagacatntttttccacatgcataacatcaatacaatgtctaacgtcaagatcacaccagtactgaagatcaaagaanatggacctcttcttccatatgcaactttgacttttatccttcttttgagtcttccaatacagtat

SEQ ID NO: 282519 - DNA, 428 bp, Glycine max
  unsure (1)..(428): unsure at all n locations
gacaccaaaggataatgtatggcttcacttgtnnnnnctttncattnnngggctcaaacatcatcacagctcttcaactcttcaccaagacctcaatattatttcattttcccccctaattctatgctntcaactctgttcaccgatttcaaatattctgagataagacaaattaccatcatatttagatattagcaaccagagtttcattcaagataaaaagtacattaacacaaaaactttcaattgcaagtccacctgcaagattaaatagaaggccaggcttttgaacatagatacccttcanataaattcaggcagaaacgatggttgaatattcaacaaatcacattcttgcaatctatagttcatttgaagcatatntaaaacctcaaatacctgtatgaagaaattcttcttttgcattt

SEQ ID NO: 282520 - DNA, 397 bp, Glycine max
  unsure (1)..(397): unsure at all n locations
ggtttgtcttctntgttgaacttanagaggtaatttcatagttacttttgccttctctctatcaaattctgagttataattttcattttgcattttattatttggcacagaaatcgtttagagatttggaagaatctgaatatgaagatgggggttataggccatcccctagctcccgagagaggcgtgccagaagacagctaacaaaaataacaaaaatgaatgacttcattcaatcatctatgctnttcccaaaggtgtggtgtggtggaattgcttccacaggacacgttttctatcttctttntttaattttaaaaagtttcaaatgagatatactngtctatctagttcggttggcttcatttctttcctgttcgtaattattcgtattatt

SEQ ID NO: 282521 - DNA, 444 bp, Glycine max
  unsure (1)..(444): unsure at all n locations
actcaagcctaatgttntattgatgatcatcaacatattcaaagttttgtatacattggcaagaagtggggctccattgttcactatgaagttgataattggctctatatatggctctacatcgctattaaaaacggatgtactgtgtgggtaggcgggtgcagcaatgaaagcagagtatattgctgttgacaccttgagtcggccatgcaaattggctaatgaaattgctntttgaatgttggtcatagcaggtagaatgtattggaccgacctcattggtattggggccaatttcgtttccaacaacgatgtacttaaaattgacgtctcgtgagtagggtgtcacgtacttattgacccagtctctggctgcattagcgttngtcagagattgaagggtatccttagcaacgtccatgatcaactcaatgcctgaacctc

SEQ ID NO: 282522 - DNA, 262 bp, Glycine max
  unsure (1)..(262): unsure at all n locations
ggttttttgctngttgccttaaatagcttcaagcggtatgtatcatgaaatatagtctaattttatcattatgtccatattcgtggtgaaaagctgctcctatttgttgtataataaaaatactacaaattacgcaagatgaatttgtattataagataatcaccgtaattgtaattaaatatctcattctttatatttagtctctattattataacaactatccaattatatataaacatgtatgtatcgtgtggggttga

SEQ ID NO: 282523 - DNA, 361 bp, Glycine max
  unsure (1)..(361): unsure at all n locations
acgcatgctngacagagaagtattaggggcagagacattgtccttgtagttgtaacggattggcataccagttaaatgctccaagatattgtcctcttctgaaccatctctaggagactcgggcaacctttgctttcttctgtggtatctaactcccccaaagaccagaccacaaatgacaagcaaggttattatgacaatgaccacaacaactatggtgtgcttattgccacctccactgcccccataacccgtgccagcacctccaaccgtcgagaccttgatgtagagacataaccagaatcacaatcaggtttctgaaagcatcctacactgttcaaaaggaaacagtcccctgaac

SEQ ID NO: 282524 - DNA, 344 bp, Glycine max
  unsure (1)..(344): unsure at all n locations
tctgcttgatggtaaactagatgcttagttaacctggtaacccagctagcgttgaatcagaaatctatacctgtcgcaaaagtctatggtttatgctcctctgncgaccaccacacagatcttttcccttccatgcagcaacctgaagcaattgagcagcttgaagcttatgctgcaaacatttacaacagacctcctcaacctcagcagcaaaatcaaccacagcagaacaattatgacctctccagcaacagatacaatcccggatggaggaatcaccctaatctcagatggtctagccctcaacaacaacaacagcagcctgctcctttctttcaaaatga

SEQ ID NO: 282525 - DNA, 382 bp, Glycine max
  unsure (1)..(382): unsure at all n locations
tactaagcttctttggacttgacaggcaactaactcctctttantatcatgctatgtgctcgcgactggtccctttcttcccttcgcacttgagttcactatggctaccccatagagctccgcgaaatttggtcccgccatactcttccttgcgagccctcttggtctctcgttcaaggctcttgcggtaattgcattctcttcccgtaacccggcacactccttccgaacgtgtgtagcagccaacttgaacttctccttggcgagttttgcctttcctaactcgcttttgagagcttggacttcctcgtcctcttccggtgcttcaaaattcccttcgctgacgacttttaacttggcgagccaatctaaacctcgtatg

SEQ ID NO: 282526 - DNA, 294 bp, Glycine max
  unsure (1)..(294): unsure at all n locations
ctcgggaatatccgggagatgtgtggacctttatgganaagtatggaaggatatggaaggaagtagaagagtgtaaagactcctagatgtgtgagcatctagagaataatcttcacccaagatacagtaatctccacattcattgggaggggagtgtataatagctaagtagagcctcttcctattatcagacagagtaatcatttttaagtgaaaagctaaagtaagagcttttgaagaaaataatactgaaaatttattctagctgatgaccccgagatgatcattataacc

SEQ ID NO: 282527 - DNA, 480 bp, Glycine max
  unsure (1)..(480): unsure at all n locations
aaaaaagggagtggcttgattngcggngnatatncanacncaagctatggagggcattaccttatggatctaaatttgaggggtntattgaccataagtccctaaaanatnggntggaccaaaaaaacctaacattgaggcaaagaaattggtaaaagtccctaagggataccaatttgagcctaactattattccaggtaagcccatggaataactggacccctaagtaaaaaattcctttcaatggttggtttgatgggtagagaagtggaccctctaaaacaagttaaaaaccattaatttggcatggtgagatcactttagtaacaataaagtgggtaatgtgagaagtcacaacgaacttttgagcgagatctggaggtcagaagttgaccattcttgcagcctgtagagtcatatcgcaggagagagagagtttagaggggactgatgagtctgaggttcaggaanggttgcgn

SEQ ID NO: 282528 - DNA, 304 bp, Glycine max
tgacaggaaacccctcatgctaattactgagtatctaagaggggtatgcaaataaaacataattccttcagatgtccacctagttttggtttaacaaactatgctttaaatgaatcctgttcattatatatgggtgaactcatcatacctaaagaaaaggccgctagtctgaactgctatcactttccatgatattgcacgatggtgcttacatattattttcttatttatctctaaaggaatatttgaatgaagaaaatcattgaggagaagagaaaatatctactatgacattagccataaa

SEQ ID NO: 282529 - DNA, 515 bp, Glycine max
  unsure (1)..(515): unsure at all n locations
naaaatcatggactacngnattagnattnacgtgacactataaagcantgngccgntgacatcancacggntagctagtatcatgcacataatttagaattttcntcgctanaacgaggggngncggagatngcgcgcctnaagcgcaccatcnnctcacttaagggcccaatgggcgtgttaagcatgtctttgtgttgtgccctaatgccaaaatcttccctttatttcatatttttntctattttctgcatctttttgacatttaatccttcatttgcatatctgcaggcataaataagaaaaacatcaattcttaaaattaaacatatataaatgctaaataaatacttttaagggtattttcattataaaaaatacctcatgtttaccagttatctttcaaccatttctattgctaaaatcaaatccaatgcgccagacccaacatatctatgttaaatttcatgttatcaccccaacaaaatgattttaacaacactgaatctaatacg

SEQ ID NO: 282530 - DNA, 232 bp, Glycine max
acccactaccctagaatcaaaataactcattgccattaaactagggaattaaaaaaaacttaatggctgagtgtaactgaaattgtggcaaccaaaagtcaaccccacagccaacaagtcacccaccattgggtctccaaaaggctgatgcctacgttgcaattgtgcccttattacaagttgaactagacctaactaaagcccttttagttgattaacccaaaacataatt

SEQ ID NO: 282531 - DNA, 374 bp, Glycine max
  unsure (1)..(374): unsure at all n locations
taacggaagctctcgagatatccaangggtcttcatnttttctcatcgtaagtccgatccagaccgcttatattcccgagccgctcaaaattgaaccaccgaagcctctgaaaaacctcaatgggcattatttgtaacaccggagtcccattcagggcgcttatatattgagaagctcgaattgaaccaccggagccttcgagaatttcaatggtcataagtttgaaactgaggtccattcagcgcatatatatcgaaagcatgaattgaacacggaactctgagaaatcaatgtcatatttgtccacgagtcgatcatatgctattacgaacctcgaatgacacggagcttcgaaatcaatgtctacttcaat

SEQ ID NO: 282532 - DNA, 262 bp, Glycine max
  unsure (1)..(262): unsure at all n locations
gtagggttacaggactttccattagtcctataaattggccatatactcagccggtattaggcctcatgagctttctcatattaagcaccttacaggatttaccttgggtgactttcctttaaatacttgggtgttcaacttttatcatctaaattaaatgtatgtcattatgctcccttgctttccaagaaaactggcctgattcanggatggagcaagaagtctttatcttatgcangcaagttagagttgatcaaagcag

SEQ ID NO: 282533 - DNA, 391 bp, Glycine max
  unsure (1)..(391): unsure at all n locations
gaaacttaactacttgctgaaaaaaaaaaacttctagaatttaaccctatctttttattttaacaatagacaattgcaaaaaaaaaatcaagatttgaattgactaaactctataaactgggctgattaattatgagttaaacagtcttaattatttaataataaatattaataacatttaaattgtacagcataatttatactattcacagaggtattggagggagacagagagaagggaaccaacctggtcttttgggaaagtagggcaacaacaccaaagatganaaacataagaagcattccagagtgctcaaagtcattcatgtgagcggngttaaggactccaccaacaaaaatcttgaggtgtggtgaatacaaaagctcgatg

SEQ ID NO: 282534 - DNA, 292 bp, Glycine max
  unsure (1)..(292): unsure at all n locations
tttttgtctttcttattcattcaatatcgagcgttgcgatatattatggactgaatcanacaaccgagtaaaaagttattgtagtttgaagttgctcagagcttcaactttcaatatcgagcgtttcgatatgttacgggactgaatcagacatcanaataaaaagttattgtcgtttgaattatctcagagcttcagtattcccattcgagcgtctcgatatattacgggactcaatcagacatccgagtaaaaagttattgtcgtttgaatttgctccaagcttcaacat

SEQ ID NO: 282535 - DNA, 414 bp, Glycine max
  unsure (1)..(414): unsure at all n locations
ttgagtccttaaacaacaataactgtttactcgtttgtttgattgacacctgtaatatatccagacgctcgaaattgaataccgaagctctgagcaaattcaaacgacaataagtttctactcgtatgttcgattgactctcgtaatatatcgaaacgctcgaaattgaagaccgaagttctgagcaaattcaaacgactataactttttactcggatgtctgattgagtcccgtagtatatcgagacgctccgacttgaatgccgaagctctgcgcaaattcanacgacaataacttttttcctcggatgtctgattgagtcccgtaatatatcgagacgctcggacttgaatccttagctctgagcacatcaaatgacataactnttactcgatgtcaagtgagcccgaata

SEQ ID NO: 282536 - DNA, 349 bp, Glycine max
  unsure (1)..(349): unsure at all n locations
atcttcttatggaagcttctcaaggaggtgagcttagttatgagaggggtgtgtgtagctaagctctagcttctcaaggaagttttctcaaagaacctctcagggaagtttctcaagaatcttctcaagaagttacctagtctataatagagcatgtgaacactgttgaactntgatgatgagagcttgtaaacatacttcaagttcactttctcctctttatccttcatttcggctcccccattctctttcttcctctttcttttctcattgaacatcttccagcttctatccaggctgatcttggtgtgaagctcttcttcatggctatccctagggatgggcctct

SEQ ID NO: 282537 - DNA, 435 bp, Glycine max
  unsure (1)..(435): unsure at all n locations
tgacaatnngggaagacagatacactattgtttttatggttcattgatagcaattcagcaggcactaagtggttgcagaccctccactntagttagttacaacattccactagttagttatacaacatcattctgttataaccatttccaattctgttagaacaattagtataagtatatcaagcagtggaatgaataaaggaatgagaacaattacctcaattagctntccttagttccttagctgtagcagtagaatagagtagttattcgtatcagacattaacaagtgcaaattagatatggaggctngtagacaacttgaagatcctctcagttgctcaatatatggaattaaataaccacttaaactctttgcttcatcaagaagagcactnttggaagcaaagggcgaaaatctattggttgagtgat

SEQ ID NO: 282538 - DNA, 106 bp, Glycine max
  unsure (1)..(106): unsure at all n locations
agctttgtttgcacttttcaatggagnngacaggaagatcttcgaactgatcaacacttgcacagtggccaaagaagattggaagatcctgaaaatcactcatgaa

SEQ ID NO: 282539 - DNA, 410 bp, Glycine max
  unsure (1)..(410): unsure at all n locations
gcttaacattcaattntgagcgtctcgatatatgactagactttatcttacatccgagtaaaaagttattttcgttgtaattggctcagaggttcaacattcaatttcgagcgtctcgctatattacgggactcaatctaacatccgagtaaaaagttattgtcgtttgaattggctcagggcttcaacattcaatttgagcgtctcgatatatgacgagactcaatcagacatccgcgtaanaagttattgtcgtttgaattgtctcaaaggttaaacattcaatttcgagcgtctcgatatgttacgggactcaatcagacatccgagtaaaaagctattgtcgtttgaatttgctcagagattcaacattcaatttcgaacgtctcgatatattatgggactcaatc

SEQ ID NO: 282540 - DNA, 271 bp, Glycine max
  unsure (1)..(271): unsure at all n locations
agtttagtttttttncattcncgtcggcaggagaagcctagatgtggctctattcattcacaggtaacagtctaaagacatgggaggaagttgttgagaaatttatgaataaatacttccccgagtcaaagctgcagaaaggaaagctgctattttatcatttcaccaacttcctgatgagtccttgagtgaagcattggatatgtttccgggtttgtaagacagactcccacacatggattctctgaaccaattcagttgaacatgttta

SEQ ID NO: 282541 - DNA, 404 bp, Glycine max
  unsure (1)..(404): unsure at all n locations
gactaaacggagtagtttaagccatgtttgtntattagtcgttnangctatgttataaagtgaagcaagacatanataatgaggtgaaattaatatgagccttgcaaagtcaacaaggccatgttagtccaatgacaagagctngngctatgagaagtaaagggactatggcaaacatagttgctaaaattcgtacaacagtcatggtagcaatgggacagcatgggtctactagattgaagctttgaaagactaacggagtagtttatgccatgttttttttttataagtcgtttaggctatgttataaagtgaagcaagacataaataatgcggtgaaattaatatgagccttgcaaagtcaacaaggcctaatttgggctgctagtagtttaagaatactt

SEQ ID NO: 282542 - DNA, 441 bp, Glycine max
  unsure (1)..(441): unsure at all n locations
agaggacagaaaagagaaagaaagacagaaggaaaaaaaaaaaacaaacaacnaaaaaaaaaaagaaagagaagtagctctgagacatcgannacaaaaannnaagnagggaaannagaagaaagaaagaagaaggtgttatagtttagggaannnnaaggggagaagaagganagaagnnatgaataaagaaaaaaggagaaaaaagagagggaaaagagagaagggaaaggaaaaaaagagggaagtggaggtaagaaaaaggaaggaaaaaaaaatgtgaaaaagataaaaagagaataagggaatgaagtgaggaaaatggaggagtaggaaagaaagatgagnggaaagaaaatggaagggggaaggtaaggggaaaaaagggagaaaagggaggaagaagaggagaaaaaaaaaaagaaaaagggaggaagagag

SEQ ID NO: 282543 - DNA, 340 bp, Glycine max
ctcgactcaaagaaagtcatattagtctcatacaattaatatagaacctatatcctattgtcacatcctatcagagcgtggtgttcccgtgtcctctagcatgaggttcttcatagtcattcacctatttatctgctcacccgaacataagttcaagatcatcacaggatccatacaaaacaacacacagggagtgagttatcacattcctagctgatagagaaacaagacaattgaatatacatattatataaatgagataccacttgctttaacatagctcacgtaacttcaacacttcgtcattcacaattcactcgtcaattatcaatcacattac

SEQ ID NO: 282544 - DNA, 353 bp, Glycine max
  unsure (1)..(353): unsure at all n locations
tgtttgctttctnctttattaatatnaactatcttccatttttgagtatttgggaccatataatctagaacgtaacttctcatcatctcattcaacctcttaggctcttagctatggacatgatagtttgtcctaatttttacttcaacatgctcgtttggacgtggtggtcattttgtgacaacagtgcaagtaggagatgctgattctttccctttctgcttcaagtgttgggtgttggcggttgaggactcgtgcttgtgcgtctccccaattttatcggaagctntctgatcaactcgaaccgatgatcaggatagattcaaattttgtgtgaattttccccacaatgg

SEQ ID NO: 282545 - DNA, 402 bp, Glycine max
  unsure (1)..(402): unsure at all n locations
agcagttgcagaagtcaatgtatgtgctaatgactattatcattnatatcttacctattttgaattatggccttggtttgtgtgtctagattggcaccagactcctacatacacaatatctttcattgcaagcttagcagtagtcccaaaacccaatgtttatgcgcaaccaagtgtcatgatttctatattaccaattntgctagttgttaatgttgaatcatagttttggtctctcatttagcattcatctcatattgtaaacttattccgtgtcgtccagatttanaacaaacttctcttactttatttcanaatcattcttttgtttaccttacaactcactcaactctatcattaccctttttcaatatgcagaattaccaacatgcaaacaaatct

SEQ ID NO: 282546 - DNA, 179 bp, Glycine max
ttgtctccttgttatgtaataatgcctttccaggattgacctttaccattaaaacaattggcggcaattggaatcctaaggttaattttgttgtgatgaagggttcaccactaatgaaccctactgctagtctgttggctaagcaaaatcacccccatccaattgttagctcaaggtga

SEQ ID NO: 282547 - DNA, 435 bp, Glycine max
  unsure (1)..(435): unsure at all n locations
tcatggttcagtgtcatgttgatcatgacaataaagtatatttggatttgaccatgaactagttttaagtttacttggtaatatagtttttttgtataaaattatctttcaattntgaatagcatagtaacacctattttagaacaccaaaacanaattttaagaggctactatcgtgtaagtacaaaattttccctgttctgtaaactcaaggtaaaaacacctgctttcatacaaaaaacgaccaaagaatatggcataactagttttaagtttacttggtaatatagtttttttgtataaaattatctttcaattttgaatagcatagtaacacctattttagaacaccaaaacaaaattttagaaggctactatcgtgtagtacaaaattttccctgttctgtaaactcaaggtaaaaacacctgctttca

SEQ ID NO: 282548 - DNA, 237 bp, Glycine max
tttgtcttatcttgattagtgacaaaaacacagtggctaatataggcttttttgaacacactccttttatattataatatattagaaagaataaaattagtcaataaaatcagtaaataagatatgcgacccacaaattttgatgatttttctttataaatttcaaccaataaaagaatatgtggtaacattttctatgcaagctgtatcattttctctgtatcaagggaacttaca

SEQ ID NO: 282549 - DNA, 439 bp, Glycine max
  unsure (1)..(439): unsure at all n locations
actaccctgagaaccacaaggagtcatgcatgctacttgaatatctggagggacaaagngcagcatccagaattagttttgagaaccatcaatttaagaccatccttgttcaagacaacacattcaaccactttcatgatcagaatttttatagctctttatacaataaaacatgagaacatagcaaccatgaacatgctgagaatcatgaaaatacattcctctttctctgttgcaaaccgaaaccttaatccgtaaaaatgaaggaacatatacattccatatgcgcagtgatctcaatagatagtcaaatactcacaaagattcatatgtagtcataaacaaattatataacttgtaattctcattataattgaacaactgccatagaagtttgtatataatataaaatacgacagcattatagtcatgttatatt

SEQ ID NO: 282550 - DNA, 420 bp, Glycine max
  unsure (1)..(420): unsure at all n locations
ttcaacctctcttcaatatccttaaccccaccaaaacaaaccgtggggggcagtgttctatttctgattggcttgcccctttttccgcacatcctgcaaaaatanaacataatctttcaaattggtagaatgaattataacaatttaatgttttttgaaaaacaacttaaatggcaaggtacataccttccaaaaagggtctttgcgagtctggcaaaactgggcccatttttccttgcttatgtcgtatntctcacggacagtgtcgttcacaccgtcctgatcggctgcaagggcctatntccttgtgaggtctgatntaaactgcctccatctcttgccgacagtctgaagtaacttgttttttgtcctactatcagaagcctctgggatttcaaaatccgcttgacaataacaaat

SEQ ID NO: 282551 - DNA, 497 bp, Glycine max
  unsure (1)..(497): unsure at all n locations
agagatgatggccttganaccncccnatagtaacatcctgacgaannngngatngnggatttggccggagatgtggatgttatataagtcctaccggattggaatttttgatgggtgattggtgtnnttaccatggagtnctaaagaagcaaagacatttgtgacactttttactttgtgaagccgagtatgtagctgcaacttcttgcacatgtcatgccatttggcttagaagattgtggaagaacttcagttgttgcaaaaggaaagcacaaagatctatattgataatagatctgcacaagagcttgccaagaatccggtgttccatgaacgaagtaagtatatagatacaaggtagcatttcattagagagtgcattaccaaaaaaagaagtagaatngactcatgtgaaaactcaagatcaagttgcggatattntcaccaagcctctcaaatnttgaagattntcgaagattggcgagcagacttggtgg

SEQ ID NO: 282552 - DNA, 230 bp, Glycine max
atctgcaatgcaatatgtctcctgtcagacactctgagtgtactctcacaagaacatcatgtccgtctccaatgtcaccctgtcaaataaaaaatgtcagaaccactcaatggtttgaagttgacaattgaaccaatcaatcgaagtaagatagcttcaagacaattggaaaagctcgccaaagcccacgtatgcatcacattgtcaggtctactcactatctactaatg

SEQ ID NO: 282553 - DNA, 217 bp, Glycine max
aaacaccgccactttccatatgcttgtcagtgtttacgtggccaaataaaagggtgtgtgaaacatcatgatccctacaaattgatctacctacacataactaaaagacgactctgacatttcggaaatctcaaagcttgaaatcttatgatttcattctgaggctttataccactttattagtatcttatattggaaaaaagccaacgtacctttc

SEQ ID NO: 282554 - DNA, 331 bp, Glycine max
  unsure (1)..(331): unsure at all n locations
cacccgnngtgagacaacatacactgtgactatgaacctacacacaaacattcattttctttatgtaaaaaactctatataaatgtctatataactccgcaaaataacttgattatcttaagaaaaatgactaaaggctaagattgtatattcgtatgtaagacaattaacagcccgtcattgtgcacacaaataacaaatgtgtntgattcatataaaggctaatacaattgtatattcatatgtaagaagattaaaacctagccattgtacaaacaaacagcgcactcatttgatttatgtagagtcaacaatggctctgtaagacaaa

SEQ ID NO: 282555 - DNA, 254 bp, Glycine max
ctactgatcaccagaatgaacttggtttattgtttctcctgcctggcctcagatgctactaaatcaatgctgattgtatcatcacacctctagactgcatttctagttaattctcattaagcttcagccataacttacagccgcatacacacaattatcttttccatgtgacaacaactacactctgtttttgacccacagatgggagtccaattgaaaactaccagagtgcttttctatctcttataccaccc

SEQ ID NO: 282556 - DNA, 354 bp, Glycine max
  unsure (1)..(354): unsure at all n locations
ggcacaaataccatatttctatactctaaacctctaattcaggttccgagtgtttgacaaaagagtctctgacataatcttaaaactaatgatataaaaaaattaatatttcttgtggaactaaatttgctagaaaattcacatgaaactttatcctaattttcctaccacattattataatattaataaattttacctaccaatacatgtccacaagaaaatcgtaggtatttcctgcaaattatatatccaataacatccgcacgtatttcctatggatcttcttcanataaaaatctgcacgaatatcttgtggattatttntcacagataaattcgccagaaattatcac

SEQ ID NO: 282557 - DNA, 402 bp, Glycine max
  unsure (1)..(402): unsure at all n locations
ttttcacttgtgtacttgatggagttggagttattttcgatgatctcattctttcctttagtcccaattttgaacaatctctagtgccatgtgttanggtgtaatcaacattatataatgtcttactatagatgaacataagagaaaagcatgagccaatagcaaacctgaaaggaactcttcttatctactggactatcatatgacttcatatgaagcgtgatggagtcaaaataaagaattaaggctgattctgcaagaaccatgagtccacatatcccaagtagtgcagcaacacaaattgacctaagtaaacattgattttccaccaccgttcgatcctgtcaacagaaataatgattatatatcaacatcattacgcataacaccttatgctatgtg

SEQ ID NO: 282558 - DNA, 312 bp, Glycine max
  unsure (1)..(312): unsure at all n locations
aatcctcatcctcgcaaatcttgaatncgcaggcactgtctcaccctcctccaaaactattgatgactctaagaacgcgtacaagctgtcagcatcaatcttaattgaatgtactcttaccctcacttgcttagggctctggtcttacgagctgtataagaaagcataaaactccttcaccatagctacatctatgcttgcatcttggagattggcgagacgtttgtgtaagttacgcctttacaactctgccttanactcgtcacattcggtatgatgaatcttaacattcctttacagaatgatcctccg

SEQ ID NO: 282559 - DNA, 491 bp, Glycine max
  unsure (1)..(491): unsure at all n locations
nggctcaacaatacgaacgtcnacatccnaaannnagccngagcccaaatccacctcacataaacatagacccgggttagtattttttccttaccctcggaagcaaaaaacaagagacggaaaatttcctttccaacaaaaagactgagaaggaaatttccctatccaaatgaaataagatagagagaatgaaaattttcactcactggaaaaaagagaggaaaggatattcccaatctaatagtgggagatagcgaanacaagagaaaggaaattcccatccaacgaatggtagaaatgaagacaatgaacgagagatagctcctggtcaaggatcacactaaaacagaacatatgtgcagaaaggtctttggaccggacaatatctgaacaatacagacttgtcactaaatgaacgaaaagaatgaaaggaaaccatgacctacagtggtcttcttcctttaattgccaaccaaatcttgtgtgctacg

SEQ ID NO: 282560 - DNA, 416 bp, Glycine max
  unsure (1)..(416): unsure at all n locations
agcttatttcatatttccctacgaacgttcacttgcgcaagacatcctattaactaatacaaatgcacccatatacaatcaaggtagcttcattacctagattatttacatgtacttccaaggtgtatatgttatttacatcacacacgcctccttggctaaatttacatacatgcatactcaaagcatttcggggtaccaaaaattgcacatgcgctcatcttggtatttctaatacctatacatatacaaacttcatgatgaatcttgactacctacgcaataaggtgctacatttcatgctgttttttttcaagtttttgctacctaaagccacatgcaaattcaagcatattttcctttgctgactaaaantgtattcaaagtagaaggtacatatcctttttgtaatatgt

SEQ ID NO: 282561 - DNA, 482 bp, Glycine max
  unsure (1)..(482): unsure at all n locations
cgccgctacgtgcttgagatttcgaanacttagtanaatntcgngnccccngagangaggcnaaagagcatatgttcccgttgtttatcatctcccccacaatcttaagaggggtggttgggtgaatacatacactcctaactatccctacacataaacatctatctcactttttattcaacgttataactccctcaataatgaactctttccctattgattttaatagaacaattcgagtacgaatcttgtgccataatgaacacccgagaatcttgcaagataacagaccagctcaaattcttactcgaactgccgcaccctctgacctacctccagttctccatcacaccgcttgtgaatcccatcatcctgcccttccctctacaaagtctgcacacgctgggatactcctcaccttaggtgtgaattctttctcacctatgacccccgtctcttatcccatgcgaactaagcaatat

SEQ ID NO: 282562 - DNA, 394 bp, Glycine max
  unsure (1)..(394): unsure at all n locations
gtggccagtgcagatgacataccaaactgcaattttgcacatgaatcatagataagattaaaaaatcaaaaataaatgtcacatggcaaaatagccatgataacaataataattgttcgttcttctatagactaaaacaccagattccccacatatgagaaaatctatgaaacaccaatacttcaatttgctttgcctatccgtattcgatttgtttacgatactaatactcttaattggatactntacgtatatatagatattgttgaagtattactactaaaaatatgatatttagtaatatttttttatcaacactaaataaaaatgttactaaaagcctttgacgacatttaatttttttacaaaatgatgaataaatgttattaatata

SEQ ID NO: 282563 - DNA, 376 bp, Glycine max
  unsure (1)..(376): unsure at all n locations
tcnggttgctcattgactccagattgctgcanagaaggacatatatttgtatggtgatctgcagaagaacatagaccatagctcttgcaacaagtatatatttctgattcatggcaagctgagttactangttgaccaaggcatcaagttttccttcaagctttttattttcagtagatgaagatgaattcatggccacctcatggactcctctaagaacaatggcatcatttcttgcactgaattgttgggagttggaagccatcttctcaatcaaactcctagccccagcatgggtcatatcaccaagagctccaccactggcagcatcaatcatactcctctccatgtngctaagtccctcatagaaatattg

SEQ ID NO: 282564 - DNA, 415 bp, Glycine max
  unsure (1)..(415): unsure at all n locations
agcttatgtttcctattttgcaatgttatctcccagatttgagtagcatctctactatgataccagttatgaaaacaatgcacgaattctaaaatgcaacacttagcagaagggtcaatttgtaaagttcatatagcaattcaattctaatccatatataacgtattttatatatattcatattccccaagagtctacttttcaaatataattttattttcatcaaacgttatgtgaatcaaacaaagtaaaaaactatgtgaagtatgtcaaagttgaaatttgtaaaacagcatgtgtgcacaaactttcaacaccaaataatttagaaatgactctaagagcccatactcatggaggataacctnccanaccaaaattgacattaaagaanatagaaactctcaataccttg

SEQ ID NO: 282565 - DNA, 352 bp, Glycine max
gctttaggagaaaccatcaaaactaaagtagtgcctaaacttatatatttgaggaagcttcgccgagtgtccccattgaaaaacctttattcaaacctttcaaagttagtgataaggctaaacgaaaaattatggaacttagaaaaactaaatccttaattgaaggcgtaagtgacaatcatagcgaattactaaacaagattagtagtttgcttaaggtcattccatatactccccaagcttctgaaaatacttccaaaatggtaacaagaaagacctccaaattaattaattgtatgaatgaagatagtgaccaaaacttatataacacaactgagataggatcagtgtc

SEQ ID NO: 282566 - DNA, 355 bp, Glycine max
  unsure (1)..(355): unsure at all n locations
agctttctcatacatacgaagattttgtgagtntacaaaccatgttgtcattcttgacaagataaccaagaggcatgtccatgtatactccctcaatcaaatcactattgagaaacacattatttaaatcaagctgaaacatgttccaatttctgtgaggtgcaatggaaagaaacactctcattgccgtatgcttggcaacaagtgagaaagtgtccaaaaaatcgatctctgcttgttgtttgatgtgtgtacccttttgcaacaagacgagccttgtatctatcaagggagccatctgctctatacttgaccttataaatccatctgcaactgatgggtcttttatcgggtg

SEQ ID NO: 282567 - DNA, 325 bp, Glycine max
  unsure (1)..(325): unsure at all n locations
tcngggtttgctcctgcttctctcgtgagtataagttctggtgattgtggtttccgtctgataaagagaagaacgtatactatgctgtgagtacaaagcatatagatgcacatgattggccatatgtaatattgaaagatgaaaacacatcaagaacagccaaaaagaggaacaagaatgtgagatcaaaagatgaattccatacttgggtatcttaattgcttcattgatggatcgatcgtaatcatctgcaatgacagcgacgtcaaaagttagctcaatgtgggatcagcttatactgatactaaagaaataaagtttactt

SEQ ID NO: 282568 - DNA, 413 bp, Glycine max
  unsure (1)..(413): unsure at all n locations
ttcttgtatgaagaaggagatgaatgaacggagagggagagaagagcacgaaattntgtgctcaaaaagagctctgagatctgaagttaatattcaaatgatcaaagttgagaaaaatgcacacacatgacctctatttatagcctaagtgtcacacaaaattggagggaaattcaaatttcacttgaatttgtggagccaaactttggagccaaaatttaactaattatgattcgtgaatgttagttatggttcagcccactaatccaagatcaattccaagattctccactaagtgtgcttaggtgtcatgaggcatganaagcatgaaggacatgcacagagtgtgactatatgatgtggcaatggngtatagtaagcaaatgctcacctctccctctaaaattaattgg

SEQ ID NO: 282569 - DNA, 384 bp, Glycine max
aacatacacaactcaagcttcaatgaggtccttcaatggtgattttcagctatggatttatcgaggaagataaagaagaagaggagagaggaggcaccatccactagagaataagccatggaaggaggagtttcacgccaatagagtgtcttggataataaacttatagaggaagcttcaatggaggaagagaatgagagagataaagggggggctcgaaattgaatgagaaaaaaagggagagaagttgaactctgaagtgtgtctcacaagttccctgagaaacttccttgagaaacttccttgagaagcttccttgagacacttgcttaacaagcttccttgagaagctagagcttatatatacacacccctctaatatct

SEQ ID NO: 282570 - DNA, 426 bp, Glycine max
ttcttgtttctcgtggctagtgtgtgggaatgtgttgagggttcgatgaaacctggtatttataggagtgaagcgtagttgcaggtccttgtgacaccctctacccctcacatatatattaataaaggaataaaaattcaaatattaattaaaagtattgttaaaacatttttaaatacaagctcttcaaatggataaaaggctcacattcactctcttctacatcatattcaaatttgtccaaataaataataaagtcatctcgactcaaagaatatcatataagtctcatacaattaatatagaacctatatcctaatgtcacatcttatcagagcgtggtgttcccgtgtcctctagcatgaggatcttcatagtcatccacctattcatctgctcccccgaacacaagttcaagatcatcac

SEQ ID NO: 282571 - DNA, 324 bp, Glycine max
catagaaactaagcttacatcagatttagtatgatgcactaacctataatattattcttaatgccaataacctaaggaattaaaataacttaatggctgagtgtaactgaaattgtggcaaccaaaagtcacccccaacagccatcaagccagccaccatttggtctcccaaaaggctgatgcctaagttgccaattgggcccttattaaaacttgaactaaaccaaactaaagcccttttaattgattaacccaaaccatatttttggtcagccaactttacaaggattgggccattatttagacaaactaaacactctaaaa

SEQ ID NO: 282572 - DNA, 343 bp, Glycine max
  unsure (1)..(343): unsure at all n locations
aaccttttcacacaaggatgctattggtaatcaaaattcctagagctcttttaataattttacttctctatcacatcattcttctttcgttacttatatatcatggtctaaaaactattaggagaaatttaagtgataattcatatacaagtntatgaatattgattctgttactcattaattatcatgcaatntgngaccaaacttggctagttgggaagctttgatacggggaagattacattgacaaattgttcgatcttaanttttcattgtcatacagaatcagtactagttcatagttatacaaacaataactgagatgggaaattaatatatatta

SEQ ID NO: 282573 - DNA, 467 bp, Glycine max
  unsure (1)..(467): unsure at all n locations
ggcatttggacangttgatcgtcgnactganacanagcnngccatggttgggtcgcggaatctaacgaaccaattaacccttaatcttctgcctcacacctctgaactggcagtcggagtctgaggccttccttttctctcatcccccttttctcgaaccttttggcggagccttgtgaatcacttccaccccattttctctaaacccagttgtggctgctggtgtactccctccacttttcaagtgtgtcttncacataaacacttccaccgttgcgtctctttcgcgatttcctctccctgcagccattccaaaaccaacaaatgaacaaaatatttgtaacttcactcttactttcttcaacaaatcggtagcttagtttcacagtacaaagaaaactcttatagaagctaagaaacaagctatgcgcaccacaattcataaataaatgggttgaatgatagaa

SEQ ID NO: 282574 - DNA, 526 bp, Glycine max
  unsure (1)..(526): unsure at all n locations
aaaanttatccccgattgccgnatctntctggcgaattctagcancgtagcacgccgacgcatcctatacagaccagcctgcatgcaagcatgctcngtgnaatcganctcactagacacggatggaacgacactagtgacgagncacactttctttatactcgaagcttttttaatgacagcgcctagtaaacaaacaacttattaggtctcattacttccatgtgatggcctaagaatgaactgcctcggactaataacaaacatgttgaaggagccaaacagacgacgatccgatccttgcatgccttttatacgacatagaacactccctatcgctgtactagtcgcacacctacaaccaattgctcgaagccaaggagagtaacgcatcaatgtcttctatacatacccatacatgtatacactgctgccgacgtggcaatagcatatggctctgcgcacaagcgtgagataaaactttctactgaagaatggctcgtgttacaacaagcctatgaatgcg

SEQ ID NO: 282575 - DNA, 382 bp, Glycine max
  unsure (1)..(382): unsure at all n locations
aatacttaagttatctcataataaacaacagcggacgggaaaaaagagagagattagtctaaaaaacggccccagggcgggggaaggccccccaccacaacgagaaaccccgaaggggaaacgcccccaccggaacacaaccgctaaaggaaaaccggccacgaacacaaggccacctacggggcgccaagagcccaaaaacggcaacagagagaacaagccggcgcgcaaanggagggaacgcaaccgcgcaagcaccacaccgggcaagggacccacccaaaaccagctgtaacgataccgaacaggacacaacagcccccaagacagcgcgaccagacatcaacaaaagagcgcgataaaggctcagatccacacacga

SEQ ID NO: 282576 - DNA, 503 bp, Glycine max
  unsure (1)..(503): unsure at all n locations
aggagaccgaaaacttanaaaccccantnancannnncagcgaggctcatagncgaccagcagcatgcaagcgggntttgttattctccacgaccgtcacgagcacggcaacaatagttatcctagcctacacaagaccgagcgacagagcaaggcaagacaccgacaccaccgctgaacaaaacccaacgcgctatatgcggacaaaggagctgacccacgcgggattgataacatggacaatgaggagacgaacctacgctgcctgtagaaaaggtaccagccacgtgctcgaatgacatcatgatatctcaactgcaagataagcacagatatctcagggagcggcactgatgacacgcgacgcaatacacaagcactgaacatactgtacaactacacctgacctcgcatgaccctaggccaccaacataaagacctatgactagaagcacgctactgagtagagccccgaaccatacatacacaccctgaacggggct

SEQ ID NO: 282577 - DNA, 457 bp, Glycine max
  unsure (1)..(457): unsure at all n locations
tggcggcgaaacattgcanacaacanctaganannaagcnngcaaacccgccatggaagatggtgacgccagggcaacctgttgttnttttgacnaagagcccattccctccggcaaagagtatggtctatgcgtgaaggcagagcaccatgccgggaatcactatcacactcccaccaatgtccgagccatgtgacttattgtcgcccaatgcgcgaaatccgacgaggggattcgttcacctgttgagagttgcaccaactgacagaataggccttcaatgaattaccgcatcatttatagggtgtacactttacgagaagggggctgatttttcagagacacagcgaccattgtgacacactggcacttgatttctgttgttgagtcttcccatactgctggagatgtctccataacatggtgggctccaacgtagcgttgtcctgagatgtcn

SEQ ID NO: 282578 - DNA, 516 bp, Glycine max
  unsure (1)..(516): unsure at all n locations
aggagtcgacagcctcatnnnccacgactattcagctcggcacccgagctcctattagactgcctgcatgcagagccgctatgtttgtgttntctcaacagggggaggcctcgagagagatgccgcttctcctttatatggcaggagaatattccttctgtcctaaccaatgcttcagccaaagaaccgaaaagctcattatgcttgtaggccacaagagaggttaaatgatgacacgatactagtttcttgacatagaacgaaaaatgaatcgctcgcatgctagggaagcgccttaagacccaagttataagcttagaccagctatctttctgctctaactaacttttctcctatattgctgtatacatgctaattcttggagccttttcaggcccagcattaataggaaagaatcttagacatagtaaataatgttgcaccaatctgcactgtcctgattcataaacttgaactgtggcttacacatacatatatacaactctctctatgcan

SEQ ID NO: 282579 - DNA, 497 bp, Glycine max
  unsure (1)..(497): unsure at all n locations
nnntttaaccaattcangangtacttgctgcgatacaatanaanacccnagcatacatagctggaggatttacttgatggaatacaagtatgcttttcaatgctctttatcactatgaatctgctagtgtgcttctgatattggagagatgaagggatctggatcttctcattcctaagcttaatagcaagagaactaataagatttaggctaatagctttttgtgattgaacaagacatttatttaatgaagacatggagagaacaaaagttgagaataaagcatcctagcaagaaacttacagaagaanaaatttagaaactaatagattgagtcatgtagcaaggcatgccaatctctctgcatataanatccatgagaataactatgttccaagtgttggatggagaagttccttaaaaaattcagcattcctttcctccaaagacaccaccaagcagcaaatcagaccactgccacagattcttattttctt

SEQ ID NO: 282580 - DNA, 360 bp, Glycine max
ccccaatcctggcaaactgcaacctttaggctttgaattttgacttgatcgaaccttttcttatgaaagggtgattgattcgatcccatgttttttctagaatgaaaaattctgtttgaatcaaactttgacaccctatcatggaggaaatatgatcaatgcatgaaggaatgcttatgctatgcatgacacaaatgcattgtgcagacacaagagcccgaaagatcatctcttcttacccactaacattcaggcatcatgattcatttgcagtcatcaccacagtgccccatgtatgcatataataatgtgatgtggaccttccaacttcccgtgacataatgatgagacatatgtaac

SEQ ID NO: 282581 - DNA, 354 bp, Glycine max
  unsure (1)..(354): unsure at all n locations
aaaccatgaaacaaatttctctgtattagctatatcaatgaaagtgggaatgttaagttttgtgcctgaacctctggccgtgcaacacttgagagatattgcggcactaaagtacttaagtaatcttccaaggtcactcgtctaggatgactcagaanagtgagcctcttcaaagactgatgctactgttctgtcgtgcaaaagctttctttttctctctacattgtttcttctaaaggtgacttcaatttctaaatccaatggaaccaattcacctgcaaaagatctacgcatacaaacactaacaggaacaacagttaaccaattcaagaagaaaataaattttggactaaa

SEQ ID NO: 282582 - DNA, 425 bp, Glycine max
  unsure (1)..(425): unsure at all n locations
cctgcatgcatgcaagctttgttaatctattacactgattnggtaatcaatgaccattgactgtttctgaataaatcaaaagatgtaactcttcaaaaggttcttgaattnttcaaattggttttaagttcttctaaaagttataactcttctaaatggttgtcttgaccagacatgaagagtctataaaaacaaggctttgttttgcatttcaattatcttgaacacttattcatacaatcctttacaagccttaaatctctttgaacttcttcttcttctttgtaccaaaagctntctgaagttttctggttttccaaagcttgaaaacttgtgctattcatcttttcattctcttctccctttgccaaaaagaattctccaaggactaaccgcctgaattctntttgtatctctcttctccc

SEQ ID NO: 282583 - DNA, 398 bp, Glycine max
  unsure (1)..(398): unsure at all n locations
tgacaaattccttgngataaaggtagtgttgccatgttttcaaagcccgtactaaggcatacaactccttatcataagttgaatagttaaaggtaagaccacttaacttttcactaaaataagcaattggatgaccttcttgcatcaacacagccccaatcccaacatttgaagcatcacactcaatttaaaaagatttttgaaagtttggcaatgcaagtatgggggcattagttagcttttgcttaagaacattgaaatcttcttcttgtttctctccccattagaaaccaacatttttttagcacttcattgagaggtgctgccaatgtgctaaaatccttcacaaatcgtctataaaatcttgctaaaccatgaaaactcctcacctcggtcac

SEQ ID NO: 282584 - DNA, 428 bp, Glycine max
  unsure (1)..(428): unsure at all n locations
agcttgtctttctatgagcttactagtngggtatgtggtgtttcactgacaagtcacatattctttatactngaagcttttntaaataaaatgcatatttggaaaaaaattattgattctcattccttaaatttgatgggttaggtatcttctgtttgcagataaataacaaaatattttaaggagagaaacagtaaatgattgttacaaaatatngtttttatttgccctaaaatactcccttttgtttttttatacaagaagcanacaactaattcatcaaaaccaatgaaagtagttaattaatttatttcaaanatacccatagaattaaatcggtttagtagtgattatagttaatgacagtacacataatcaagagataattntttctactgatgaatggccttgtattttaatatgcctat

SEQ ID NO: 282585 - DNA, 378 bp, Glycine max
  unsure (1)..(378): unsure at all n locations
gcatctttattcttaacgcagactactgggtttacctcttaagagattatgagtgaaattatgtggtttaggctctttcacatgaagaatcatggttagagtagtttagttgacgaagataatagttggaatgactttaaatggtgaaaaatctttaacactgcatcaagagttagtttggtaggttaagcatccaacacatctacaaaatctgcaccaaacatcattttccacctccaagtgtntggtttgttggctcttgcattntgctatgctttcttatcccttattatggttgaagtttatatttctgcacttattactctaaaaatatttagttntagtcattcattcatttaattcttggtatatacaaac

SEQ ID NO: 282586 - DNA, 434 bp, Glycine max
  unsure (1)..(434): unsure at all n locations
agncttgtttttgactcatcttctctttgaagtggcgtctccaatcattcttcttccttatccaatacactgccattgatcttcaagaagaaaatgactccattgatgaagaagatccaaggcctacaagctccacatggagctacgtcatgtggtattaagagcatcttcgtctaggtgatgttcttttgcttcctctatcttttttcccggtcaattcactctaattccttattcttcatcttattctccatgtatatcctccattttcttgtggtttggtactatttagagtagattcacaaaanataaactgattaaatcttagatctacacttgttcttgcatttctattggttcaaatttatagacctattcttgaatcatgnttttgtgttgattntaggttctatcattntcagtcataatctttt

SEQ ID NO: 282587 - DNA, 423 bp, Glycine max
cgatactataaaacccagcttaatagatggtggtctattatgccggaggcatcctattgtttcttaaagttttgggtcgtcttctttgtgggaaagataaggaagtatgggaaagtcagctacacaaacttgaaaacatgccaaatacagatatttaccatgcaatgagattgagttttgatgatctagatcgcaaagaacagaagattcttttagatcttgcatgtttcttcataagattgaatttgaaactggacagcataaaagttttattgaaagacaatgaaagagatgattcagtggttgctgggttagaaaggttgaaagataaagctcttgtaaccatttctgaagataatgctatatctatgcacgatatcatacaagaaatggcttgggagattgtgcgccaagaatcaattg

SEQ ID NO: 282588 - DNA, 388 bp, Glycine max
agctttgatgcattttatggagaggttaatgaaacaacgagatgatgcgctccatgagaggttggatcaaatggagaatagagatcataatgaagaagaaaggaggagaagagggaatgatggtgttcctagacaaaaccgaattgatggtattaaactcaacattcctccatttaaaggaaagaatgatccggaggcctacttggagtgggagatgaaaatagagcatgttttctcatgccacaactatgaggaggaccagaaggtgaagcttgccgccacggagttttccgactatgctcttatgtggtggaacaagctacaaaaggagagagcaagaaatgaagagccaatggttgatacatggacggagatgaaaaagatcatg

SEQ ID NO: 282589 - DNA, 430 bp, Glycine max
  unsure (1)..(430): unsure at all n locations
ctagatgagttatgtctgcgaatcgacatccggttaaattattgaccattggaatnnctcgagtccttccgttgtttaatttcaagcgtctcgatantttatgtccctcaatcagacatcggagcgaaatgttatgaccattcaatttgtcgagaggctcccgttttcaatttcgaacgtctagatgaattatgtcaccgaatcagacatctgagggaaatgttatgaacattcgaatgtgtcgagagcgttcggttgtcaatttcgagcgtctagatgagttatgtcagcgaatcggacatccgtgtaaaaaagtatgaccattcaagctttgtcgagagcttccgttgtcaatttcgaccgtctcatatatatgtccccgatcggactcgggtgcaagtatgacattggactttgcagagctccgtgg

SEQ ID NO: 282590 - DNA, 429 bp, Glycine max
  unsure (1)..(429): unsure at all n locations
agctncattttatcatctttatccatctcatcaacgtttccaactgtaggctctccaaccattatccattcatgatcaacaaacctcattccaagcttcttaagatgtctttcgataatctcactagaggctttggtaaagtacacaatctcattagagatatcaaccttgaaatagtcaatgaatcttgagggaagtacaacataaggaaattcataatccaccaggcgacgacactttagcacaatgtcttcaatcagtagtacccaattcatcttgatacctaatttcaaaccataagctatctatagatcatcattcattacccgagcatgattacttcacctaagttagagaatgtaggcgatgaggtatactaatattgtgtcctctgaaatcagtccaccaactcctaaacgaatcctcaaa

SEQ ID NO: 282591 - DNA, 375 bp, Glycine max
gatgaatcaagattgtagggagagtgtgattatatttttatgatgacaaaaagctaaaaagtggagaacaattcatgataacaaaagtcaagaatcaaagaatgagttcaagattgaatcaagaacacttcaaggttcaaaaggaaatttgatttcaagaatcaagaatcaagaatcaagtttcaagattcaagttccaagaattaagatcaagatgcaagactaaagattcaagaatcaagagaagactcaatcaagataagtattaaaaagtttttcataaattgagtagcacatgaatttttctcaaaagcctcttaccgaagagtgtttactctctggtaatcgattaccacattgtcgtgatctattact

SEQ ID NO: 282592 - DNA, 386 bp, Glycine max
  unsure (1)..(386): unsure at all n locations
agtttttattccccttctaaatgatagactcatagtacagaagtagaagcaacattcattttaataatgtgctttaaacatgcaagacagatttgattacaacataataaatgagataatggaacagagaatgcgtacacaactgtatactggttcagcaatggtggacacacataaatgtgagaggtatctagagatatcatccatttagatattatacatcgtggcggtagggactatcagcgacatcgtatcattaaagagaaacactctagatgaggcttcactagtatcaagcgagtcgaagacctagcatgaccacagatcaaccttcactttctatgtctgcacggacccggatatanggcccaataactcactatgtg

SEQ ID NO: 282593 - DNA, 314 bp, Glycine max
gtgcttctacacaagagccattaaagcactgtttttgtatttttaaagcatagttttagagggagagtaaaaaatatatcacaaggagaagctaaagcgacaacaagtttttggtaagagagcttacgttagaggaatgaagtttagggtttagaggttagaaaaaacatcctcgaccagcctttgtcattttatttcactcaaaacccatcctttcttgtattgagcatattgcttggaatggaaggctaagcctatatgatgagaacgtctgctgaaaccttgatgtaacactctgtcactatctatataat

SEQ ID NO: 282594 - DNA, 395 bp, Glycine max
  unsure (1)..(395): unsure at all n locations
agcttcatttgaatcaaaggtgattcanaggtgttttgatgataacaatgatgataacaaaagatgatgacaaaggtgatgacaaanagctcaaagatcaatcaaagaacaactcaagtgaatcaagaacaattcaagagttcaagataagaatcaagaagaattcaagactcaagaagaaagtttagagtcaagaatcaagattcaaggttcaagatctcaagaatcaagatcaagattcaagactcaagattcaagaatcaagagaaggcttaatcaagataagtatgactagtctttctcacaaattgagtagcacatcatttttctcacaacatgtttaccacagagttgttactctctggtaatcgattaccagattggtgaatcgatta

SEQ ID NO: 282595 - DNA, 333 bp, Glycine max
tgctgcctcatgaggaatgccttgcgcttagatagcatgattaaacccttcgataatatgtatgtatgtaaatatgtagcatgaaatgccttgcaaaatgtagaatagaatgccttgcaaaatgtgaatatatatagcatgaaaatgccttgcataatatgaatatatatagcatgaagtgccttacaaagtgtttggatgggtagcgtaaaagtgtttttcaaaatatgtgtatttgtgagtaggtagcaaaaaaatccttccaaaaaaaaatgtgtgtatatatagaagatgtagcatgaaaagggttggcaaaacagtatgtacatggat

SEQ ID NO: 282596 - DNA, 427 bp, Glycine max
  unsure (1)..(427): unsure at all n locations
cagcctaatattctttattaaaagtcataattggtgccattacctatcatcatttctatcttacctattttgaattatggccttggtttgtgtgtctagattgacaccagactcctaaatgcacaatatatttcattgcaagcttaacaacagtcccaaaacccaattntattcgaaaccaagtgtcatgatttctatattaccaattntggtagttgttaatgttgaatcatagttttgctttctcatctgccctttgtctcatctctttaccttacaactcagtcaattctatcattaccctttttcaatatgcagaattagcaacatgaaaacatatctaatccagcaaatgccaccatcaatagccaggctatggtccagaaccaacgaaatgcctcatgtcccatttctttcatcttctaaa

SEQ ID NO: 282597 - DNA, 100 bp, Glycine max
  unsure (1)..(100): unsure at all n locations
caaatgattttttttctttgaagccttctganaatataagatcaaacacccagttaattcagggtatttttcaacaaaccgaaaaaaaataaacctaaaa

SEQ ID NO: 282598 - DNA, 406 bp, Glycine max
tttggccaattgtgctttgacccaaattttcctttgatgaatgatgctctcctacaacctaagacaaggtagaaggagataaattctacaggctcaaggttcaatcaaacaatcatactttcagctcaaaatatgtgcaagggataaatcaatcatgcacaaggtaagctttttagctaagtggctatcttcaatcaaaacatggccttcatcatcttcaatttcacgcattcattccatactcagagattcatgcaaaaatcattactcaatgttagtcgttctctcacaattaaagatcacactctcacctggctgtggctaatgagtaccttcacaatcaaactgtcaaactgactaacattatcagtcatgatcctaatccatgttctttctcttctaatca

SEQ ID NO: 282599 - DNA, 427 bp, Glycine max
  unsure (1)..(427): unsure at all n locations
acatgagtttgtggctacttcattcactcctctaatgactatagcatcatttctggcgctaaactgttgggagttggaagtcatcttctcaattaaatntctggcttcagcaggggtcatgtctccaacggctccaccactggcaacatctatcatacttctctccatgttactgagtccttcataaaaatattggagaagaagctgctcataaatctggtggtgagagcaactggcacatagttatttaaatctctcccagtattcatatacactctctccactgagtttcctaattcctgagatatcctttctgatggcagtggtcctggaagctggaaaatttttttctaagaatactctcttgaggtcatcccanctcgtgatggaccttggagcgaggtaatatagccagtcctttgtcact

SEQ ID NO: 282600 - DNA, 313 bp, Glycine max
agctgtatttgttctgttctgggaaacgaaggtcaagtgtgtgcgatatgtgaagatgatgttccaagtacttcggatttggtccgaccatgccctcctgatttccagctgggaaattggcgagtggaggaacgccccggcatttacgcaacaagcataatgtaaacctttacggatttaaaagctctatagtagggcctaagctttagagtttgcattatgataaggctttgtgtatcttgtttttgaattcataatacaaggatcttactacgtctgttcctggactctacccattgtcattcattagcat

SEQ ID NO: 282601 - DNA, 353 bp, Glycine max
  unsure (1)..(353): unsure at all n locations
tcaccttcagaggactacacgtnctcgccttcagaggactacacgtgctcgccttcaaagggtcatgtaccttcacctttataaggctacacgccgtcaccttcaaaagactacacgtcctcacctttagaggactacacgtcctcgccatcagaagactacatgtcccccattttcaaaagaggacatgccctcacctttagaggattgcatgtcctcgtcatcatangactacactccctcgccttcaaaaggcgacacgtcctgaacttcaaaaggctacacgccctcgcctttagagggctacgcgtnctcactttcagtgggctccatatccacaccttaagataatt

SEQ ID NO: 282602 - DNA, 384 bp, Glycine max
  unsure (1)..(384): unsure at all n locations
gactgctttaaatagctacataatgggggattcctttgaccaagaacatcatgacaattgggattcataatttggcctggttgttgaatgttgggcatgccataggtccttggaccaaattttgatgactatctntaatggtctggtaaaagaggctaaattttttgcaacatgcaatctacgttagtgcatttggttgaaggtaacacatatttaaggttttttgggctcagcagctgatttggaataagaataggtgtttcacttctgtttggtgcacaagcaataaatcaagggtatccctaacagagagactgagagatgatgtaactttactccatttatgtttactctttctccatcttgactatgttttcctttaca

SEQ ID NO: 282603 - DNA, 213 bp, Glycine max
  unsure (1)..(213): unsure at all n locations
aacttccttgagaaagctctttgagaaaacttccttgagagctagagcttagctacacacacccctctataactaagctcacctccttgagaagcttgcttaagaagattcaagctagagcttanctacacacnccctataatagctaagctcacccccatgacagaaaacatgataataataaaaaaaaagttcttattacaaagacaactc

SEQ ID NO: 282604 - DNA, 262 bp, Glycine max
cgtcgccacctttaaacccaaggaacctattcaatgccacgatggtgtagtgaaccgcgcaagaccctgcagccaactctcttctcaacgatcccatgtgcgtaacaatatacctaatcagcttaattgacaccgcgtacaggtagagaaaagatttagcttaccgcggcttcttcgtcgccagcgatggcgtgcgacaccaccacgccatgatacgacctaggaccggtgctgaggccggcggccatcatgtcgcacataa

SEQ ID NO: 282605 - DNA, 476 bp, Glycine max
  unsure (1)..(476): unsure at all n locations
aggcccccggaattttngagcntnatacataaaactcagcttcactcatttatttgtccagtagaggacagaattcattactatacaaccagagctatggacgctttggtgtaactacagaccctccaaaaaatcgcactcgagatgctgagtgatgtggctaacaactggaacttcaatacacgatagggttggacatcgaactatacacacatcattccctgttccaccatttctaaattataaccagaacggttaaatctatcacatttcacaaaactaccaaagtatacaccatgacaatattcatcacaccaaacaacagtgaagtcatactccaacaagcaacacaccttgtctacaaactcattgtaatcatgacgagcacctgattcaactagcttgcaataggcaaagatgtgcattcaataccgtgggcttattattgaactgggctctgcacaagacacacaaag

SEQ ID NO: 282606 - DNA, 426 bp, Glycine max
agcttgtattattatggggtatccatcacatgtggtactaggtggcggtcgggcgatggtgcacaacaatttttccacatccacaaatcgcgcataaacccaccatcccctgttgcccacctccaactgagctcacgtactcccacgtagcccatatcctcgtttctctcacaacaccgggtccgcatcaatcctcccaagcttccccaacatccaggtaatacaacattcaaacagcacaaactatcacagccaagaaaacagggcaaaggcagaaaactctgcccaaaacaccaaccaaaatcacaaccaaaatcacagcttttctcacttaaagaccccagtaataattccttcgttccaattcgttaaccggtggatcgaactccaaaatttactggaagtctctagtacataagcctacat

SEQ ID NO: 282607 - DNA, 266 bp, Glycine max
gagtcccgtaatacatcaagacgctgcgaaattgaatacaaaagctctagcaaattaaatcgacgataactttctactcggatgtccgattgggtcacgtaatatatcgagtcgctcgaaactcaatactgaagctcacagcaattatcaacgacaatgaatggtatactcgatatcacattgagctcacgtatatatcgagacattcgaaattgagtataaaagctgtgagaaaattctaacgactataactttttactcagatg

SEQ ID NO: 282608 - DNA, 284 bp, Glycine max
  unsure (1)..(284): unsure at all n locations
gaggtggctaagggtcaacctagtctcaatgttttccaatcgggtagtatgtaaatgggctagtggatttatcagcgatcgacgcttttcttgcttatcaccacaacaagtaaagcccagtcattgttgttttggctgatgcctatgccacattcgacctgagatgcgaaaagagtagtgcangaaattgtctgtgtacacctgctctttatgtatggttggtctcccacattttttgtcatgaaggtaggcctatatgtccnctacaaggtcatcacatgtgt

SEQ ID NO: 282609 - DNA, 440 bp, Glycine max
  unsure (1)..(440): unsure at all n locations
tcctcgaggccattncctgcgaaggcaaacattnggaaagtttttttaccagtgggacactactcttaaaacgaaaatggcatacaacctcttcccataaacatcaatgtaaatttagagcaagcttatgcgcatatttccctacgaacgttcacttgcacaagacatcctattaactaagaaaaatgcacccatatacaatcaaggtagcttcattacctagattatttacatgtacttccaaggtgtatttgttatttacatcacacacgcctccttggctaaatttacatacatgcatactcaaagcatttcggggtaccaaaaattgcacatgcgctcatcttggtatttctaatacctatacatatacaaacttcatgatgaatcttgactacctacgcaataaggtgctacatttcatgctctttttttttttt

SEQ ID NO: 282610 - DNA, 332 bp, Glycine max
agcttgttttgtttgcttctatggaggctggatctttgagcttcaatgaggtcctttaatggcgatattccaccatggagatgcagcggaagacaaaggagaataagtgagaggatgcgccatccactacggaataagccatggaagaaggagcttcaccaccaagatgagccttggataacaagcttggagaggatgcttcaatggaggaacagagagagagaagggggcaacacgatattgaaggaataaaagacggagagaagtggaactttgaagtgtgtctcataagactttcattcatcagagttacaacaagtgttacacatgct

SEQ ID NO: 282611 - DNA, 255 bp, Glycine max
gcggatgttaatgtatctttcttatgtctccgtaaaagacatatgaatcaagagatttgtattagctcgtctcatgtaatgcatgctctaactttcaagttatagttcctgcgtaggatactctcatgatattcatatgctaagttgtataatttagcgatctaacaagacaaatgtaatctcccattgcgtgtgatagaccaatcacatgcatgatgcccaacacggaacgcctcctaagaatgtcacacctct

SEQ ID NO: 282612 - DNA, 411 bp, Glycine max
atatatatatatatatatatatatatatatatatatatatatatatatatatatatatatatatatagggtgatcgttgagagacaaaatcgccctcatgcctatcccggaagtgtccgactccacaaaaaatggcaaggagaagtctggtaaaccaaggatgggtgcttaacacacagcatccttcaatttgatgaacgcctgctcatcctcagagttccatgagaacgagccctttgacaaaagcaccgtgagaagtgctgctctactcgacgatccctttatgaatctttgataaaaccccaatacacctaacaagcctcagacagctctcgcagatcgtggtgtgggccataagtgtatggcttaaattatcgtcgcaccagctccactccgcgcggggacatatag

SEQ ID NO: 282613 - DNA, 341 bp, Glycine max
  unsure (1)..(341): unsure at all n locations
aatatgatgtagaagaaaatgaatgtgagcctttttcccctttgatagacttgtaaaaaaacatatgttttacaaatacttttaattaatatttgaattntatttttccttattagtatatatgtgaggggtagagggtgtcacaatgagtgtgatgatgcaatgttatagtatagaaatatgcccacttgattatagtattggtagtagaatattacttcacttgttctcaagagcatattttatctgtaaggacaatgggagaaataatcagaacatgaatgtaacatataacttaactcgtgctcatcaagtacttataagaaatgattgttgatttt

SEQ ID NO: 282614 - DNA, 429 bp, Glycine max
  unsure (1)..(429): unsure at all n locations
agcttattgtatcaaaattgccttaatcatttccaaatatgcatgtgaattangacgcatcaacaagaatcaagccaaggctattatgcaagcaatcaatggggcaaaacataccaaatgattataatgatggatggctcaaattcttacaaaggtaaaatcatcactttcaaattgagctttcaaaactatcatgacatgtagagaagaatcaaggatttcaagtcacaaaatgtcaagaacttttattttcaaaacaattacccatttcttgaacatatcctataattcaaagaanaacatgcaaaatcgtacgtgcacacaaaattgacccagaatattaaactaataatccgacgaaactaacaacattaacaaattaacacaaccaacaaaactatgcaaaccaaagaacactccccccccccc

SEQ ID NO: 282615 - DNA, 385 bp, Glycine max
aaccaatattctctagaccattgtagacactacctacggattcttttcaaaatccctcttccaaaattgaccatcagtagtacctatagctggacttccaaaattacttgttgtattcccaaagaactctagaaccaggagtcactagactactctcatgttctatttagtagctcctactaccaaacacacataacaacctattatgttccccaaaaacttcagaagtaacaatcacctatctacttttttgagatctttccttctaagcctagggggtggacaaacacttgttcggatatggcattaatggctccacctagagtgcttttggctaagaagtccattcaattaggtggtttttctactgacctttaccctatac

SEQ ID NO: 282616 - DNA, 371 bp, Glycine max
  unsure (1)..(371): unsure at all n locations
tttctttatctcaaatcctgactcaccatanaccttgacccagggtgagaatgtcaatccttaccctcggaagcaaaaaagaatagaatggaaatttccaatcaaagaaaagagaatgaaaatttccaatgaaagaggacaaaagaaaagataggaaattcccaatcaaagagtgcgagatagaaaaagaaaagaaagataattcccaaccaaagaatgggagatagtaaaaagggaaggaagctcctggtcaaagaaaccagagaggtctttggaccagataatatctgaacagtacagaattgtcaccaaatgaacaaaaaggaatgaaaggaaaccacgacctagaatggtcttctccctttaattac

SEQ ID NO: 282617 - DNA, 438 bp, Glycine max
tcttatccaaggctcatcttggtggtgaagcttcttcttctatggcttattccctagtggatggcgcctcctctcacctcttctcctttgtcttccgctgcatttccatggtggaaaatcatcattaaaggacctcattgaagctcaaagatccagcctccatagaagccccacaagcaagcttccatcactgctgttgttggtgctgacggctggaccatctgaggttagggcgattcttgtatccagggttgtatctgttgctggagaggtcataattgttctgctgtggttgattctgcttctgaggttgaggaggactattgcaaatatttgcagcataagcttcaagctgctcaatcactccaagttgctgcatggagggcaaatgtctgtatggtggtcagcacaggagcacaaaccacatacccttgtaca

SEQ ID NO: 282618 - DNA, 431 bp, Glycine max
  unsure (1)..(431): unsure at all n locations
atcttgtatgattatggggtacccatcacatgtggtactaggtggcggtcgggcgatggtgcacaacaagttttccacatccacaatgcgcgcataaacccaccatcccctgttgcccacctccatctgagctcacgtactcccacgtagcccatatcctcatttctctcaacaccgggtccccatcaatcctcccaagcttccacaacatccaagagaaacaacattcaaacagcacaagctatcacagccaagcaaaacagggcaaaggcagaaaactctgctcaacacaccaaccaaaatcacagctnttctcacttatagaccccagtaacaattccttcgatccaattcgttaaccgttggatcgactcanacattntactggaagtctatagtacataagcctacanttttgaccgtgggatcta

SEQ ID NO: 282619 - DNA, 336 bp, Glycine max
tctacttatgtggcagggcgggcttccttcaccttcttgtcttcaacgcgaattttgaccattgttcttccttcccgcgatgcttcttttcatgtccgcctgagtgggcttatagcctaaaccatacttcccacgatttccttgggtatttatcaggctagttatgccgccgttgttttttcctaaacccatcccgggttcataaccgttccccaacataactcgggccatcattaccgctgcatcggacagacaaggcttgccaaagagggagtccacggaggaaatgctgaccacctcaaaagactggaaagcagtttctaacgattcttctgc

SEQ ID NO: 282620 - DNA, 382 bp, Glycine max
  unsure (1)..(382): unsure at all n locations
atcctcctccggaaacagctcacccgcgacgactcttacctgtggccgcgcctctcccctcagacgcagtcttccctcaaatcgctcctcctctcctcgattcaatcggaaaacatcaaatccatctccaagaagctctgcgacaccatctctgaactcgcctctggtattttacccgacaacgcctgggcggagcttcttcctttcatgttccagtgtgtttcctccgattcccctaagcttcaagaatccgcgtttttaatcttcgcgcagttgtcgcagtacatcggcgattccctcactcctcacatcaagcacctncacgatatctttttacagtgcctcacgaacgctaccgttaaccctgacgtncgaattgcgg

SEQ ID NO: 282621 - DNA, 363 bp, Glycine max
  unsure (1)..(363): unsure at all n locations
tctatgagtccccttgagaattgngtttctcttcttcttcttcttcttatatgggatccctctagcctttgcctgacactccttgacctcacgcaggtacacccaaatggctcctcctacaaaaggattagtctctggcgatccgtcatgctcctcataagcagcgcgaagccggcctatgagggcatcgaggctaccccatgcttgcctgagagggcaggcacacggtgcacgaggggtgggctggccaaagaagatgcaaccgtgcaagtggagcttggtttcccatattgatcgaggaccgaacgaaatccaacacatggttgaagttgcactgagagagtggaactggcggactctgat

SEQ ID NO: 282622 - DNA, 430 bp, Glycine max
  unsure (1)..(430): unsure at all n locations
ntctttatttgttttctccacaagcttcattgagaggcttgtagcacactccacacatcttctcaaaaatacccacgggcagatcttggaaaaatgtgttgcgcaattgtagaccacaattagagaagataccaccggttatgaaagcttggccatggttttacccatggaggctcctgtttctttctttaaaagcctcatttagaaggcttctctagaaacctcctctagaagcttcctcggggttctttgagaaactctctcaagaggttctttgagaagctacatccttatctatcccccctctattaactanatttacattcttaaaaataattacggatgaaaataacgcagcaaataatccgacatcagacataattacttatcatctatagatatatatatcacggtcgtacattgagcatcn

SEQ ID NO: 282623 - DNA, 430 bp, Glycine max
  unsure (1)..(430): unsure at all n locations
naaaacgttcgngatgctanatagtacacactccgnccataaaaggcctcaatattaccccgctattttctaacttccaggcaaaaagtaatggaggccggaatttcttataacctccggtttccattcggagccgtttcgtatattaccaggactaaaccggacatccagtataagtgtatgccttttcattatctcaagcttcgatatgaaattgacctctcgtatataatggactcactacacatccgaggcgaagtattttcgtctgaattgatacgacatccgatacattccgagcatactccaaaatacaacactctgcacgcatcaaatacaagaatggtgttaaatttctacagttacttttgcgttggaagttgaattaaacggactcaccgtcgtactgataagtacagtgtcagatcct

SEQ ID NO: 282624 - DNA, 431 bp, Glycine max
  unsure (1)..(431): unsure at all n locations
agctctggtttttcttcatgaagaaaccaagaatttctcacgagtggactgggctccaaatctaatattcactttggccctttaaaagatatcctcctccgttaaggttattattaatgaccagaattggactggtaagaattgtgaaggataccattgtggtggtaaatcattgaggttataacatgggtagctatagaactaacgaagattgagtttccaatgaaggaagtaaaatggagctcacaataggctcatccatgttagagcactntatggactntgatctggaggaagataggaataaagaggggttatggaagcaggaggcagatcgganagcacgacaaggtgttcaatcagagaagaaacatttctattcccactgngtaataaccagaagccccagtctagcaaaagtacactacata

SEQ ID NO: 282625 - DNA, 472 bp, Glycine max
  unsure (1)..(472): unsure at all n locations
nggctttttacttttgcgatggctntatgatactcagctagaagactnncncnngngggcaaggctgatgggaagcnattantttgttttnacgcgaagcacgacccaaagccgtttattacaaaatcctgtcatgtctagtacacgcaaacgggcttacaacacgtttccatacgatggcgcgacttcacttgcgtgatacattatgctaatgagaccctccgacgtcctccctatgcacatgccaaggatccaagccgttcccaacattacaatccccgtgcttcttacatcctatggcaagagacggggcgccacaaaggaggttcagtggggaagcgcgcccttaaacaacagagaatatattctaccatgcttctgcggttcaccaaggcgtgaaggcgagcactctccaacatatttcttccctgacacaagacaaatgtcgcgcattaaacatcttttgggaccg

SEQ ID NO: 282626 - DNA, 434 bp, Glycine max
  unsure (1)..(434): unsure at all n locations
tgcatgccagcctatatcttctaagcaacactctcactctggggagactccaaaacgatgccgttttgggccccactcaagtcaagcctctccaccaagctcctcaacataaccgtctcctctctctgcaaagcgaagcanatccccaatgccgaaacggcaatcgtcgacggcatacgactcggcgtgctccccgacgtggtcacctacaacaccctaatcgatgcgtactgtcgtttcgccacccttgatgtcgcttactccgttctcgcgcgaatgcacgacgccggcattccccctgacgttgtttcattcaataccctaatctccggcgctgtgagaaagtctctgttctcgaagtccctcgacctgttcgacgaaatgctcaaacgaggcatcaaccccgacgcatggagccacaacattctaatgaa

SEQ ID NO: 282627 - DNA, 329 bp, Glycine max
aaggattcaggaggattcaatggaggattcaggatatgcaagagctttagaaaaggcttcagttaggtaaaagaatttttccaagaaaagattgaccacacaaattgtccagaaaatttcagaatatctttaccgagtttactctttgtatagaatacataggtagtatcgttactaaagtcaaacatttataatgattacaaggagaatcgttccagggctgtatcgatacattgcttgtacgtcaaactatttcaaatagtgtattgataccagtggtctgaatgtggattcaacctcacatgagagtctaaccttataaaataact

SEQ ID NO: 282628 - DNA, 334 bp, Glycine max
  unsure (1)..(334): unsure at all n locations
ggggaccaacttttaatgctaattttgaatggggggaatcatggggcttggcaattatttattataatcttctaccttctaagttgtaattaaattatatattatntatatgatacacaaaacagcaccaagagcttcatctaaagtttttttttttccttttaaaataaagagttgaaatcttgatcaacttcatctttgtcgtttggtttcacttagtagcgatcctttcgaagccccttccttccatcagaaaacacaaatcccgataaaaaaaattgcatgttctaaagtgtgaacgtcaacactcagaagtacacaaatttcctcaccc

SEQ ID NO: 282629 - DNA, 457 bp, Glycine max
  unsure (1)..(457): unsure at all n locations
gggtgtgacctgaaccgccatgaaccagctccatggacactttttaataagcggggggacttttgaattatatatgtgnnagagcgccctctcaaatatggatctatatatatattctcacattctcttttatctcgcgctctaaatatattcttctcaaataataaataacaattttttcatatttttattttttatccttaaaatatggcgatacttttcaccaccagaaaaatacctattcattccaatgagtcttttaccaggtaaacgatctttatatttaccccaggcttatggataccagggataagttacccactttttccgcncttgagaaagggagaagaggaatgcttggatctgaacccatttgagaaaggtggagaggtgagacggagagaaaaatgatctgaaaacacaaaagtgataactgatttcatgtnnaaaagagaga

SEQ ID NO: 282630 - DNA, 295 bp, Glycine max
  unsure (1)..(295): unsure at all n locations
agcttatttatgtatcatcggacagggattngatggaggactgttatgattgagtcttctttctatatataattacggctgcgcattatatcgatattcaatcatatttccgctgaaccgatatttcgttcaatcaatccttggacacatggtgaattttgagcacttcaacagcagctcgaaagtgaatcatctggcgactttcaacactccggtactgatggcacaccaatcactagaacgaagtttactacggacgctgcacagagggacaagatcagtgatccctacgatc

SEQ ID NO: 282631 - DNA, 391 bp, Glycine max
  unsure (1)..(391): unsure at all n locations
aatcatgaaggaggaaatacatgatttaacagtaatatttgaaggagtgtaagttatgagggggaaaagggaaaaataagaaaagaaaagcagcacaaagtaatagtataaaaacaaagcaagtagcaatcgagaactcaacaaatcacattatatttcaataccaatcctagatgttggggttttacataagactcctatagtacatttatccaggatttcaattatgaaagtggaagcaccagtgagaacagtacatttcaaaggagcgtaagttatgagctaaaggaanaaaattaacacggtaatagtatatacacacaaagaaagttgctatgaagaactcagcaaatcatattagttctcaataccaatgcccgtgtgaatatta

SEQ ID NO: 282632 - DNA, 428 bp, Glycine max
  unsure (1)..(428): unsure at all n locations
agcttgatgattatggggtacccatcacatgtggtactaggtggcgatcgggcgatggtgcacaacaagttttccacatccacaaagcgcgcataaacccaccatcccctgttgcccacctccatatgagctcacgtactcccacgtagcccatatactcgtttctctcaacaccgggtccccatcaatcctcccaagcttccacaacatccaagcaaaacgacattcaaaccgcacaagctatcacagccaagcaaaacagagcataggcagataactctgccaaaacaccaaccaaatcacagcttttctcacttatagaccccagtcacaatatcttcgatcctgttcattaaccgctggatcgactcgaanattgtataggaagtctttagtacatacgcctacattgtgaccgttgggatcta

SEQ ID NO: 282633 - DNA, 388 bp, Glycine max
  unsure (1)..(388): unsure at all n locations
ctccatgtttttaaaaggaacagctaaggaatatagaagaatgataaatgcttcagcaggaagatactatgtcaatgggaccacaacaaaagtaaagaaaattatagaagatgtagcagctagtgaacgaggccgtgattgcaaccgcacctctccaaaggacattcccaaataagataccgaagatgaatcccttaaacaacaaacacaaatgaaagctatgatggagagcataaccaacagcatagtnaaacaacttcaaccaatgatacccccaaaacaatcagttctcccatgtgaagagtgtggaggtaaccaccatacctcttactgtatgaaggaagtagtcaaggagaccacattcatgagagaacagactacaaaatta

SEQ ID NO: 282634 - DNA, 421 bp, Glycine max
  unsure (1)..(421): unsure at all n locations
agcttcttttcaattntctataaatagggggagaagtgaagtagaaaagggttcagccccttatgcacttctctctttctcaaaatagctgaggaaaattaattccgtgaaaaaaatccaagccaaagcgcttccgtaacgtttccgtgagtgatttcgcgaaggttttcgaccgttctttgaccttcttcattcgttcttcatcgttcttcagtcttcagtgggtaagtacctcaaaccaagctttttaattcattctatgtacccgtggtggtccacatttggtttcatgtatttttattctcgttgtcatttactttttatacccccttttgacgtgcttaagccatttatttaagtcatttctcgcttaatctaaaaataaaataaatctccaccgatcgtttgaattgtatcattc

SEQ ID NO: 282635 - DNA, 408 bp, Glycine max
ctcaactaagattacgctatgcagaagctgtaatttgtctaatgtctatgctcgagccaaagcttcttattagaaacttttgtgaggtttatagatacaatacaatttacaaacgtttgtatagaataagttacttaaagtactgacacgtatcctaatgtgatatcaatactccaccaatatgaatatgagaagtatccaagcctttaaaaaaaatagaatgcttgtgctccttacataagaggcaaagtgaacaggatgaagcatcttgtatagaacttttggagtgtgtctctaaatcaaagagacatttagatcgtgatcttgataatcctaaaccatgcaagtctagaaagtcaatagttctagttcattattttcttgccagtacagcaagatctcattttg

SEQ ID NO: 282636 - DNA, 393 bp, Glycine max
agcttttgtattattcaagaagtgccttatgaatactcccgtgcttatgccaccagtacctggaaggcctctcattttgtacatgacaatcttggacgagtcaatggggtgtatgttggggcaacatgacgaatccggaaagaaagagcgcgctgtttactacctgagtaagaagttcacgacctgtgaaatgaattactcgttgctcgaaagaacgtgttgagctttagtatgggcatcccatcgcctaaggcagtacatgctgagccatactacctggttgatatccaagatggacccggctaagtacatctttgagaatccatctctcacgggacgaatcgcccggcggcaagtcctgctatccgaatttgatatagtcgacgtcacaca

SEQ ID NO: 282637 - DNA, 404 bp, Glycine max
  unsure (1)..(404): unsure at all n locations
attgaaatcaaactntgccactggtaatagactggttttcttattaccaaaaccatgtaattgattacacagagcattttatgaaaagatgtggctcttcacaattgaatttgaatttcaacattcaaatacactggtaatcaattaccaatatattataatcgattacaccatttaaaaaaacaattggaacggtgcaaatttagctaaaagcttttgaaatcaaactgtgccactggtaatcgattaccacagagtaaaaactctggtaacttagaaaaatttgagaaaaaactcttttgaaaaacaaaattgtgctatgtttgaactttgaaaaatcttttcaatacttcccttgtgaagacttcttgatntcttctgatgaatcttgaattcatcttctc

SEQ ID NO: 282638 - DNA, 422 bp, Glycine max
  unsure (1)..(422): unsure at all n locations
agcttgtttcttttggtgcatagaatgcaggcaaaaaaaaaaatagtaagtgtcatgaatctatgacataagcttcaaccaattaacattgtttgtatgacaactgttgtagttggacagcaatcacacagtttgtccaccatggaatgctntatgttcctattggttatagttttggtatgctttatgttcctattggttatagctttggtgctggaatgttcaatttggagtccacataaggaggaactctatatggtgctggagtttttgctggagatggtacaagacaagcaagtgaaatggagctggagctcgcagagtatcatggcaagtatatatgaaattagcccatanaagctaggctggattctgtgattaatnatccattaagccctcctagctaggttagcattctagtc

SEQ ID NO: 282639 - DNA, 410 bp, Glycine max
  unsure (1)..(410): unsure at all n locations
ntaagtntcacggagtntgatattggttgtgcattcttatatttgcaatctatttcacaacaattatctcacttttccttgaatcgtagctaagtttgcccttgtttaagttagggaatatatataattagttagatattttcatatagttaaaatttaggaaatttattagcttttacatgtttttacagtgatttagtcattttagtgcacctggaaagaaattaagggtttggaagtgaaaattgatcactcaatgagttgccaagtagcttaactaggaagccatattataagaagacacgtggtagctggtggctatgcgagaagtctatctctcttagcagatttctcttgaagaggccatgtcaacaacatcaaggcttgttgagtgaagcaacctctttgga

SEQ ID NO: 282640 - DNA, 410 bp, Glycine max
  unsure (1)..(410): unsure at all n locations
ttcttattttgtagcagttccagggaccatcgacgaacgggcgatcaatacanaaagaatactcattccatgggaaaggaatgaaaatcacacactttgcctcaactctgctaaagcaattggatgtacagtggtcaacattggcactcatgacttcattgaaagaagggtatgtatgtaagccttctagtttccacccataaaagcagaattattgtgggcatgtacactgcagaaccacaaaatttaagatttaatttaatttataaatgaaatctggtcagatttgattatttctcgatcaaagtaattctcaatcaagttacccctgtttntaaatgattccgaatgctggtaaagtatctctatagcatgctacatatttatacagtcaaagcctttctctattc

SEQ ID NO: 282641 - DNA, 273 bp, Glycine max
gtgtggtgcggaggaccgaatctcggttataatattggttgttgcgtggggtcagagaagtgacacgaatccgttatcagcgctggttcaggactccgtgaagcactccgcgaagaataaggtggttccgttccataagaaattgcccaaatggtggccaactgtaatcaattccaacgcttctattttttacgccgatgaacatgaggaatacaagagggaggcttatggagtggttcgaggtttgttttttctttcctcagatacatttag

SEQ ID NO: 282642 - DNA, 424 bp, Glycine max
  unsure (1)..(424): unsure at all n locations
agcttatatgaagaaattaaccggttgtgagacaacatacactntgagtatgaacctacgcataaacattcattttctttatgtaaaaaactctntataaatgtctaaataactcctcaaaataactggattatcttatgagaaataactaagggctaagattgtatattcgtttgtaagacaattaanagagctagtcattatgcatacaaacaacaaatttgtttgatttatataagggctaataagattgtatatttttttgtaagacgattaaaagctagtcattgtacaaacagacaacanattcgtttgatttatatagaccccacgatggcttgttaagacaaataatatcggggtttaataagattggggtggagtttgtcttggtaagtaagaagtggtggtgacaaaatactta

SEQ ID NO: 282643 - DNA, 339 bp, Glycine max
  unsure (1)..(339): unsure at all n locations
tgtgcagagttgtgagcaacanagggatctaaaaaatatattctaaaaattaataatcaaatagtattgataaaaaaaatgtgcataaatcaagtacaaatccttcaaaacaaagtaagatcaaatagtaattntagcagaaaagagaaaaagaagcnaaaaaaaaaagataagcaactaaagttagaagctaaacgtaagaacaaaaccaaaaccattggaatttaaggtgtgtgtgagagaactgagccgaaggaattgtgacctatgaagaacaaatcanagtgaaaatgcatagaagagtgtcattttttttaaactaagaaatatatactttac

SEQ ID NO: 282644 - DNA, 402 bp, Glycine max
ctccaaacctatatacatccactcactctaacaacaatctcacagcctgtactttatttgtatttactaataacttatctttaaaattaattaagtctaatcatgagagaattaaaagatcttaatcaagtgaatttattgctattttgtgattgaattttaaatatcaatttaactaatacctatactatgttgcataaagataatgtagatatgtactgacttatataggcgaacaatgcaatttgtgtgatgattaaagtgtgattaatagtaattaatcataatacctttgtggaggattgagttcgaagaggatagaaatggaaaagcagattgagaagatgtggccttccttggtaaagtgagagaagtggccaatatcataacttcaataacaaa

SEQ ID NO: 282645 - DNA, 433 bp, Glycine max
  unsure (1)..(433): unsure at all n locations
gcatatgtactntaagtgagagagaagatataaattatttgtaataataattaatattacgagtaaataacatatacaaagatgattaatttttacataatcaatcacatattatcatataatgtaaattgattgatagtaataataaaaatataaaattcatattaattatgatttaagttctaaacattatagatgatatgataaaaaaaatgtgtataaaaatgagaaattaagcaataatgagagaaaataaaattgaataatgaaagagagaaagagtgtgaccgtcacagcttccaatagattggtgttgtcgtgcaagtacttgaggacccatgttagaacacttgctgtggtgtcatgtgcagcaaagatgacaccaatgagattatcaacaacttgagaatctgtgtgctgctgatagtacatc

SEQ ID NO: 282646 - DNA, 383 bp, Glycine max
  unsure (1)..(383): unsure at all n locations
aatccaaggggccttttttccttgcctgaactctcttttaatattggtggaagaaaactcggccctgcgtactcacagctttgctcattaattgtgggtgcttgttttcgcactgagcgtgtattgtgctggacctttttcaactatgctctattgttcttagatgataggcttttaatccatccctttcatatctgcaagcccatgaatatgaaaaacatcagttcttaacaattaagcatgaataattgttaaattataactttacaggatattttcattatatgtttattataanaaacatatcatatntacctgttttaactagtgacttatagccaaagaagatgaaataactgaacttagttcatttccactgcact

SEQ ID NO: 282647 - DNA, 347 bp, Glycine max
  unsure (1)..(347): unsure at all n locations
tttttttatttcttagtctatcgtaaagaagcttgccttgtgaagccattgtggaactagaggtgtgtataactataggccaaataataatttgcgcgctggaaaaatatggatggtaatgccttaattgtttgttaatattcacgggattgtgacgtcttgtgtaanagtactttttctatgatgtccctttgatatgtataacctgtaactgaaagcaataacacgtgagaactaactcggtgcaattaattgagataatggtgctggaatttataagtaaagcccatctaatggatcattgataaattttgaaaactctaaaaatatatctgaactaacatatg

SEQ ID NO: 282648 - DNA, 411 bp, Glycine max
  unsure (1)..(411): unsure at all n locations
aacctactcagacagcagatgaggcactntgccaacatcggtccataaccttagcgaggctggcattgtaacatcatcatgatatgatacaacacaccgagtgactagattgacataacggagacacctaatggtatctaattgcaaagaataacacttgcctaacgggctgtaaccctaccttcggcacctcccacactatacatcgtgagctaagatgtgtgggagaacggctgatcggccaagcgcaccaagatgcaatctccgaaaaccacatgattcgaatcgaatatgatgccnggcacgagtgcgcctgagtgctataatctacaatctctatacgaactacgcactcatctgggatcttagagaaacttcttactagatgttcacaagctaggctattgaatt

SEQ ID NO: 282649 - DNA, 139 bp, Glycine max
gatcactatcaatcaataagaaatagacctagatatttattttagacgtgagcatagcacctctaatccgatataagcgtgaaatcttattgttagtagacagagtatcgcatcatgcaatctaattcctgtattgtac

SEQ ID NO: 282650 - DNA, 391 bp, Glycine max
  unsure (1)..(391): unsure at all n locations
gaaaattactcaaagaaaattgcaaaaccttactgttataagtaatagaagcaaactgcattgagttataaattacgaaaaaatactatagttcagaacaaaaatgctgcagtcaacatcatctataatcacattatctataagattggttacctgaggttacctgtaacagttgcatattaacatcccgcggaacaccactcagcaaggcagaaatgttcccactcccaccccctccttttgaacctgccaagtcaaaagcatcaataaagtaagccacgagccatgacccttccaacataacatataatagaaaatcagagtaaactctcattctagttccgagattgcaagtgtaggtcattntagttctnttacaaaatctcatatt

SEQ ID NO: 282651 - DNA, 382 bp, Glycine max
cacagcttcagttgttgatctgtaaccaaaaaggtacgtgatatatgcttgtttgattaggtgctacatttagacgagagcttctccaagatcagtatttgtttatcaaagtaccagtgacctccaacatatattctttgcacatccattctgtggaacaactggaagagatacacacccccttctccttcatgatattatggcttcgtataatactattgttttcatcagttaggctgaaaacaaaaccatcatcttcttcatctatcaacatgaaaccctacattaccttctccatgttgtcactctctcaaaacctcaccgtgtgtcactcagaactctcagtggattctctcactcaaactcaaagaacagaacagat

SEQ ID NO: 282652 - DNA, 381 bp, Glycine max
atgatctagagaatgcctgttaccatctgttcggacatgattaagtttttaacataatagtcatgcttgtattggtttaagacaattgtgcaacaattactttattaactactacattatcaattaaccattagccgttttacccaagctcaagcaagcctatcacaacctttcttaaatgttagccattgatgttacgaccattcaactaactggataaaatttatttaccaattaccattactggattgataatagggtaccaaacatgattgttagcacaaaatattgcttgctctttagtaattggatgttcattgttaacagataatatctgatattgcctctgtgcccagtcttatttctctctagcgagtatat

SEQ ID NO: 282653 - DNA, 380 bp, Glycine max
  unsure (1)..(380): unsure at all n locations
acatgacttacaagcatgatctagaggtagcattagtcacggggtagacattagaagctacacatgacttaaaattcatcacaagatgcaatgtataaacaacaatgaagacatttgtgtctacatagtcaagaagcacacaccagaagttgtgacgaacaaagtcatgcactagtgtactaatgcaatatcatgacaaactcctctaatatcaatgatcaaatatgaagaacagagctagtcacgtactactattactatattaataagttaaccgtgagagacaaaaatgagtctctaacatctgcaatgttaacaaaaggatctacaccattatgtagaagactcactnttctaaaagagtagcaaaactcatgact

SEQ ID NO: 282654 - DNA, 393 bp, Glycine max
agcttgttgcatcgtatatgcgagacagagaccaacgtgttagctatcatcgccgagtaccaagatgagttaggtctagccacggcccacgagcatacaatcgcggatgagtatgctcaagtatatgcggaaaaagacgctagaggaagggtaatcgactctttacaccaagaggcaaccatgtggatggatcggagggctcttaccttgaacgggagtcaagaacttccccgattgtgagccaaggccaatgcgatggcagacacctactccgaccgcgaagagatacatgggctgctcggctattgtcagcgtatgatagacttaatggcccacataatcagagatcgacaggaaacttgtatgggctctcagaccgtgactagatatgac

SEQ ID NO: 282655 - DNA, 394 bp, Glycine max
  unsure (1)..(394): unsure at all n locations
attcaaatttcaagtctgaagagtcacaactcttcataaactaactgtgtaatcgattaccacatttatgtaatcgattaccactaaggaattttcgaaaataactcccaagaatcacaaccgttcaagaagttcttgaatgaccatcaaaggcctataaataggtgacttgtgatacgaaattcattagagttntttttaataacattgtcttatcctctcaaaaccaaattgtcttatcactctcaaaatattccttggccaagatactttcaaattcaataaggaatcttgatcgatcttcaattgtaatatgcttctcttaaagagagaaaattcttcttcttcttattcacagagatctgtttaagagaccaatggtctcttaagttgt

SEQ ID NO: 282656 - DNA, 434 bp, Glycine max
  unsure (1)..(434): unsure at all n locations
agctttcatgcatttgtagtacgctttcttgatctgccctggagtggcatctggaagctggtgaaatggatcaaccaatcattaaacatacactatacagtatgatattaatatatatcttgataataatgttctctctcttccctcaattataacactactctaaaagaagggaaggagggaaagttcaccggttcgatcccaactaataaattaacgattaacatttattaataataaaaaaaaattatagcattactctcacagccacaattactctagatgtaactttcgaattagttgttacaaaattagagtaagtaaaaaaagttngccagtatcatgtattgtattaaattcttcatttgtggttaactgattgagcagcttggatgggttattgtaaatcttgtgatactntcttcaattcatat

SEQ ID NO: 282657 - DNA, 433 bp, Glycine max
  unsure (1)..(433): unsure at all n locations
tggccaaatgcaacacaatttgttcccaataaatccatatctctttatgatcaatcataagagcattggttagggacctcatccaatgaaagtattcaactnttggattgatgaaacgagctttcttgactttgtaaggaaggcatacaaatcctacaatgttcaaggatgaggtgcttatgtggtcaaagagaaactcaagctcctaaaaaaaatcatcaataagtggagtgtggacaaggttgggagtcatcaaacacaagtcgacaagttggtggccaatataacttctttggatgttggaagaatttcatangagaaggtgtgtgaaagggaagacatgctcaanggagtttggaagaatgcaagaatccaagaattaattaatctgcanaagtttatgcttaagtggccaatataactttccttggat

SEQ ID NO: 282658 - DNA, 423 bp, Glycine max
  unsure (1)..(423): unsure at all n locations
agcttggttcgaggtacttacccgttgaagatcgaagaacgatgaagaacgtcgaagaacggttgaaacctttgcgaaattcttcacggaaaacgttacggaaacgtttcggaagcgcctcggcttagattttcttcacggaaacgattnttccaagcaaattcgaaagagatagaagtgccaaaggggctgaaccccttccttcttcacttcctcccctatttatagtaaaataggggaggtggttgccgcccagctcgcccaggcgagccaggttgcttcctccagaagcaacagccttctggaggaatattctggagggcccaagtgggcctgggtgctatttgcacccccatttttactaagtacaccctcctctgcctttnttggtgattcttttttcgtanagttacggaaacttac

SEQ ID NO: 282659 - DNA, 413 bp, Glycine max
  unsure (1)..(413): unsure at all n locations
cctcgaactcgctaagctcatataacttagacgaatttttttatttntgccttgcgctaagcgcctcacttttgcactaagcgttattcattgcggtttgtataaagctaagcgagacttgctcgctaagcccaatagcgtctagtagtcgagtcgcgctaagcgagcacctctcgctaagcgcatgtttaaaactgtttttccctgagctaagagagtgcctatctcgctaagccaattatgcagaaaagattttctgtcataactcgctaagcctatgagttatttctcataaggcacgctaagcgagcatgatctcgttgagcgcccactgtgtttntcagtttttaatgcatgctttcaatttaaataaaagttagctaatatagttntaatggttcttttgtcacaaa

SEQ ID NO: 282660 - DNA, 401 bp, Glycine max
agcttattttatttcaattatgcgacgacgagaaaacaaaacacaattaaagggatgaaattcatactttaataagtttatgggatgaaaaatatgttttaatcattattttattaaaaacttaattatatcttatattctaaggtttaatttgatccctcaatttttaaaatgtttaatttgatctttcaattatttagaatgaaacaactatatcttttgcatcatatctcttaattatgtggtgaaaatagattttttttttattacttgtcaacacaattgatgtaaaacattatatttctaaaattaattgtttggccaccgatgttaaaagatatcttcaaaactttaccaaatctagccttttacatcgattgtcaagcaaccgatttttaaaa

SEQ ID NO: 282661 - DNA, 382 bp, Glycine max
  unsure (1)..(382): unsure at all n locations
ntgagccacaatcctaactcaccatagaccttgacttantgtgatatatgtcaatccttaccctcggaagcaaaaaagaagagaaggaaaatttccaatcaaagaaaaaaaagagaaggataatttccaatcaaagagaaagtaaaaaaaagagagaaggaaaatttccaatcaaaggaaaaaagagaggaaaggaaattcccaatcaaagagtgggagaaagcgaaaagaaaagaaacaaaattcccaaccaaagagtgggagaaagtaaaaggaaggaaagaaagctcctgatcaaggatcgaaagaaatcanaagaaatgtgcagaaaggtctttggaccagacaatatctgaacagtacagaattgtcaccaaataaa

SEQ ID NO: 282662 - DNA, 396 bp, Glycine max
agctttatttgttttggaatcaaataaagaaccaaaaatagtctcatattggaaaaattgttcatatcgtgtctcaatagaattaattaattgatctaatatgtataaaaaatactcgatacgaacagattcttcacgtgaatgtgtgatctcattactaatattttcatcaaaatgagattttctatgaattttacgtttttcacaaaattttggctctatatccatttcgatagccattttttctgtggattctaaagtcgatgcaaacccgtcttccctataatgttttatataagcgataagaccttttaaatgatctatagcaacatctatatgcatatctttggattgtacaatcctgctaacagaaattgcaacaaacaacatatcata

SEQ ID NO: 282663 - DNA, 339 bp, Glycine max
  unsure (1)..(339): unsure at all n locations
ccctgatccgaatagncgaggttggtttctccgctatatttatttggctgggaaaaattcaatgcagggcatatcatttccaattttctggttctaaaaccaatgttcaaaattgattctggaattagcaacaatacatgtctccacttgtatgaaatgtgacaaggcaatttgatattaagacgtaggaatgcaatttgagaaggctaggtgcttgagatgttaatgtgagacgcgactttgattgcacatacttaggcttatatctacaaggaagactatgataactttatttattttttgggngagtcaccttctaactctatgctggcttaagga

SEQ ID NO: 282664 - DNA, 426 bp, Glycine max
  unsure (1)..(426): unsure at all n locations
atctttcattattgaaatcaggtgcagccatctccctaagagtcctcttacgaagtggaggttgagtcatgttctcagtatgaaaattactagtcgaatgctcaaaatcagaatattcagaatcaccagcaacagaatactcaaaatgctcaaaatgcacagaatgaccaagatgcacactatgcctaactaatctatgaaaggttctatctattccaggatcaaaggattgtaaatcacctggattacccctagtcatgcactatatgcagcaaatcatgtgtntctcagacaagcaccagcggagggttaaaactacaactatagtaaaacgatatccatatgagctgaaattctgtgatcaacaccctataataatgaaaagatagcacaaaaattttcagactaaaattcaaagtctaacta

SEQ ID NO: 282665 - DNA, 329 bp, Glycine max
cccatgttgacacagatatcctagctactatatatactaatctttcttcatgtgggtgcttaactaaatatatatgtatttctgacaaatcacacattagtatgaaaatgaatgatagtggtacacaagttccagtacaatagttgaaattcaataggaggttggcaaattcataactcagaaatagagaaaacaaaaatcttatcaaaaggtaagggcaatctgattcaggcattcgagtcaagccaatatgaatattaattttcacctgtagctaatacacagaacataacaggaataatagcatatactgagatcgattactttac

SEQ ID NO: 282666 - DNA, 346 bp, Glycine max
  unsure (1)..(346): unsure at all n locations
atcttgttgtccgcgattgacaaagggtgcagaagacgacgttagtctctgcatgctatcatgcgttgactgttagcgatagcaaaagaatgtttatactaataaccacttgggtatttctgccggccccctaacttcacgacttattaccgacagagtttgtaagcgtggaagacgacgtatatctccgcatgtgaacgagcttgttggccgcgattgacaaatggtgcagaagacgacatatgttttttcatggtatcatgcattgagtcttacagatagcaaaagaatgtttatagggataaccacttgngtatttacgccgacccccaacatctcgagtttg

SEQ ID NO: 282667 - DNA, 331 bp, Glycine max
  unsure (1)..(331): unsure at all n locations
tcaagaaaaagatggcctcagcaaattccttatttccggaatggaatnctatcaatagacctccaatctttaatggagagggttaccactactggaaaacccgaatgcaaatttttatcgaggcaatagatctaaatatctgggaagccatagaaatagggccttatatacccaccacagtagaaagagtttcaatagatggtagttcatcaagtgaaagcataaccatagaaaaatctaaagataaatggtctgaagaggatagaaaacgagtacaatacaacttaaaagctcaaaacataataacatctgccctaagaatggatgaata

SEQ ID NO: 282668 - DNA, 337 bp, Glycine max
  unsure (1)..(337): unsure at all n locations
cttttcacatgaatgtccgattcgggcgcataatatgtcgagaagctcgaaattgaacaacggaagctcttgagaaattcaaatggtcataacttttcacacggatgtccgattcaggcttataatatatcgatacgctcgaaattaaacatcagaaactctcgcgaaatttaaatggtcataacttttcacacggatgtccaattcgggcgcataatatgtcgagaggctcgaaattgaacaacggaagctctcgtgagattcanatggtcataactcttcacatggatgtgcgattcaggcgcataatatgtcgagaggctcgaaattgaacaac

SEQ ID NO: 282669 - DNA, 395 bp, Glycine max
  unsure (1)..(395): unsure at all n locations
tcggacatccggtgnaagttatgaccattagaatttctcaagagcttccgntggtcaatttcgagcgtctcgacatattatgcgcccgaatcggacatccgtgtgaaaagtcatgatcatttgaatntctcgagagtttccgatgtttaatttcgagcgtatcgatatattataagcttgaatcggacatccgtgtgaaaagttatgaccatttgaatgtctcaagagcttccgttgttcaatttcgagcctctcgacatattatgcgcccgaatcggacatccgtgtgaaaagttatgatcatttgaatttctcgagagtttccgatgtttaatttcgagcgtatcgatatattataaccctgaatcgtacctccgtgtgacaagttatgacca

SEQ ID NO: 282670 - DNA, 357 bp, Glycine max
  unsure (1)..(357): unsure at all n locations
accaaagatgatgacaaaaagcccaagagaatgatttcaagattgactcaacaagtttcaagaatcaagagaagtttgatttcaagattcaagagaagatgaattcaagattcaagagaagaaatcaagaagacttcacaagggaagtattgaaaagatttttcaaaaaacaaacatagcacagttttttttttcaaaacagtttttctcanaattttctaagctaccagagtttttactctctggtaatcgattactagtttcctgtaatcgattaccagtggcaaagtttgatttcaaaagttttcaactgaatntgcaatgttccaattaatttcaaaatggtgtaatcgatta

SEQ ID NO: 282671 - DNA, 379 bp, Glycine max
  unsure (1)..(379): unsure at all n locations
ttcctaactagatgatatagatgatggatgttaatgtgtncaaccctacaatgccccaaccatgaatcatcatctatgttactcaccaagcaacttagctcatgaaaagatgcatgctcaacattcagcatataaatattacctattctcttaccaatgtggacaactttaccagatatggcttcacttataagatagcaattgctgtcaaactcaatcttgaaacctctatcgcaaagttgactaatgtttagaaggttatgctttagtgcatccatatgtagcacattctttatctgagggttgtgtaaatccctatatttccttccccagttatatttcctttggtattgtctacaaacatgacatatgatccatc

SEQ ID NO: 282672 - DNA, 405 bp, Glycine max
  unsure (1)..(405): unsure at all n locations
cttgatattgagcgtgatgatcaaaaagggggagaatgtggatcatgcattgttttgatgatgttgaaacaaaatcacttgattgtcatcatcaataagtgggagaatgtgaatgtatgaatacatgaattttgatgatgccaaagaagaatcaaacaaggccacttcaaaggataagcatttgcttcaagattaattcaagattgcttcaacaaacaaagccttgtttcaagattcactaaagttcaagccttgcctcnaaacaaagggtttcaaggtcatgcaacgctctggttattgattaccaggaagtgtaatcgattaccataagggaagaatgaaatagagctgttgaagagggtntgaatttgaattttgaacatgtaaccgattaccatatgtctg

SEQ ID NO: 282673 - DNA, 439 bp, Glycine max
  unsure (1)..(439): unsure at all n locations
gcatatttccctacgaacgttcacttgcacaagacattctatttctaagananatgcacccatatacaatcaaggtagcttcattacctacattatttacacgtacttccaaggtgtatttgttatttacatcacacacgcctccttggctaaatttacatacatgcatactcaaagcattntggggtaccaaaaattgcacatgcgctcatcttggtatttctaatacctatacatatacaaacttcatgatgaatcttgactacctacgcgataaggtgctacatntcatgcattttttttcaaagttttgctacctaaagccacatgcaaattcaagcatatgttcctgtgctgactacaattgtattcaaactacaacgtatatactttttgtgaatatgttttcttacataacatgcacatattatattatttt

SEQ ID NO: 282674 - DNA, 431 bp, Glycine max
ctgtctggcgtttatacatcagcgcacacacgagtgaggagtcaggatgattcacatattcgcctgacctgtacgacagcgagaggcgcgctatgccatctgcactgcccgcacaacattgctgagataccgtgccgcccaatcctgctttgatgccaaagcttgctgcatggcggatagctgcctaaacggccttgctcagggggtcctggacatattcgaaattatcccaatccgccttcggtcaggtgatagcggtggctacgtcgatcaaactgataacatgaatccaactgcttacgaccgcaccgaagaatatgtctctggcgacatttgaaaggaaaagctgtgagacgggatcgcggttagagcatgacatccggctgtgccctgtaagcctggggacgcggcgcaggactcttggaaaaccc

SEQ ID NO: 282675 - DNA, 159 bp, Glycine max
  unsure (1)..(159): unsure at all n locations
cacactgactaatattcctaactgtctctgctgtcagacgttcttccaactcaccaaacgatacatcttntttccctctcaatgacccaatgattatctatctcacttcactttcttctcgcttacttcccctcacactcttacgtgcttcatcactta

SEQ ID NO: 282676 - DNA, 396 bp, Glycine max
ccaatgaaaggatcgatgtgggtctgaaaaaaggcaaatttagtcatcctgcttggacgaatgagaaaactggggcaaatgaagagggtgagaaagagggagaaacccatgctgtgactgccattcctatacgaccaagtttcccaccaacccaacaatgtcattactcagccaataacaaacctcttccttacccaccgcccagttatccacaaaggccatccctaaatcaaccacaaagcctgtctaccgcacttccaatgacgaagaccacctttagcacaaaccaaataacaccaacaaataggaattttgcagcaaatagcctgtagggttcaccccaaattccgttgtcatatgctaaacttgatcccatatccactcaataattcaatg

SEQ ID NO: 282677 - DNA, 431 bp, Glycine max
  unsure (1)..(431): unsure at all n locations
ctcgcccaggcgagcagggttgcttcctccttaacttcagccttctggaggaatcatctggagggcccaagtgggcctggttgctatttgcacccccatttttactaagtacaccccctgcctttttttggtgattcctttttcgtaaagttacggaaacttacgaatttcgtaacgatacttgttttcttttcgtaatgttacggaaccttgcggattacataatcatccccttttttgacttacggaatgttacggaacctcactaattgtgcatcgatgcttccatttgatttccggtgtgtcacggaaccttacggattgtgcatcaatattntctttngttttctggcatgtcctggaatttcacgaattgcctaatgatgggtgccaagcacctaacaaggaccaaacaanagtcgcatgtcatc

SEQ ID NO: 282678 - DNA, 399 bp, Glycine max
aacgagacatcgggagcgattcaagatatgacgagcggtcatccctattgactgatttcgcgagtgactgccgcattattaggaatcaagacaagtatgattccacgattcctgaggagatgatttcatgattctagatattaactcaggaagacttcccaaggtaattattgtatcgatcgttcacataatctacatagcacagtgtctttatttataactggtcttatcatatctctctaaggtcccatattgtttactatctggtatagatgactagatcctgtatagatttccatgggaatattctgtgtctaacgttcaactgattccaatgttgccactttttataatgggtgacattgaccaatgtagttttcgatacattattgccgacat

SEQ ID NO: 282679 - DNA, 435 bp, Glycine max
  unsure (1)..(435): unsure at all n locations
tctctataaaggtctcaatttgcttgtttaagtgcttgttntgagctagtaatgcatcttgagatgtgagctcaacaagactcttctttgtaggtttgtaagctcattcgtgaaagatggcatgatcactgattgccatattntccattaactccatagcttcatcaacggtctttaatttaatttttctgccagcggatgcatcaagaagctccttggaatggggtcgcaagccatcaatgaatatatttaactgaacaggctcactgaacccgtgagtaagagtcttttggagtaaaacatggaagcgagcaagagcttcacttaatgattcatcanggaattgatggaatgatgagatntccaccttccctttagcaatcttggactcttgaaaatatttatttaggaagatctccaccatatcttcccatg

SEQ ID NO: 282680 - DNA, 520 bp, Glycine max
  unsure (1)..(520): unsure at all n locations
aggagtcgtttagcatcactacacanncntnnannacnagcnccngaggatcttntnnagacgagctgcaagcatgcatgcttatttatcttttctcactaatctgctccatgcgtggactattacaacctgtacctctgcaccaccaccatgtgcggaaatagtactcaatctactgattaacaacatatattacagcatatatattataatgaagcacactgtcagatgatagatagactagtatactactacctctgggacggtatatgaactagaagctcgaagctcgctgtctagaaataggtgagacgatttcatactctgccccactccaacaacagctgcttcgtacgctcattattttcattcatcatattactgagcgacccgcttggcacttgctgacccgtgccatgtgcattacttctgagactcaccttgtgcgaatgagctcggagacacaaaaacagacaccctcctataatataccccacgatccgctgaggccctgcttctg

SEQ ID NO: 282681 - DNA, 376 bp, Glycine max
ttatattcatgacgatcgagagatttgtttttttgatgagttatgaattattggatatatcataaaaaaggtgtgagaccatgagagctctaaaataatatctgaatatacttacacgtacattatatatattagttcttttttcattgtcatacattttatattatattatacacggggtttaaactttatgctaaatcaacttctattattaattttacaaatccataaaattggcagaaaagctacgtcatctagttaacgaagttttttatgcttcaaggaatttgaaattcactatatagacaggcctgatcaattgtcattagttatttaatgtcacgtaaacaaattaattaattaaacaaaacgaatg

SEQ ID NO: 282682 - DNA, 428 bp, Glycine max
agcttgtctttggtttagacatgatttatatatgatttaggacttgtaggattcaatttgggcaaaattggatgaaggcaagagtggtttttgaaatctgcactttatgcagaattttgctgtggaaatgtgcagcagaattttgcataagtgcagaaaaatgcttatgtatggttggctgtggaaagggtagtgcacatggggttctggacattttttagtagatcccaacggtcaaaaggtaggcttatgtactagagacttccagtaaaattttcgagtcgatccaacggttaacgacttgcaaagaagaaaaggttactgggatatttgtatgtgaaaagctgtgattttggtatgtgttttaagcagagttttctgcctttgccctgttttgcttggttttgttagcttgtgatgatgggatg

SEQ ID NO: 282683 - DNA, 231 bp, Glycine max
cccgttgaagatcgaggaactatgtttatcgagtgacgaacgtccaagaacgggtgaaacctttgcgaaattcctcacggaaaacgttacggaaacgtttcggaagcgcctcagcttatattctcttcacggaaacaatgtttccaagcaaattctaaagagagagaagtgccaaaggggctgaacccctttcttcttcacttcctcccctatttatagcaaaatagggga

SEQ ID NO: 282684 - DNA, 411 bp, Glycine max
  unsure (1)..(411): unsure at all n locations
agcctatcttttatatgaaacacccccaaaaattctcaaatgtgaaagttttaccttctttcctgaccatacttctttgggaagctgataattcanaggaactgatggtcctctattgatgagatatgttgttgtgtttattgcttctgcccagaatgttttatgcaagccagattggatccacaaacaccccgctctcttgttcaaggttctattcatcctttctacaacaccattttgctcaggtgttcctagtattggcttaataattctgattccatgttctgaacaaaagtccttanaatcctgactatcatactctctgtcattgtcagattttagactnttaacctttagacctgtntgattttcaacttctgttgtccacttttaaacacagaaaacacatca

SEQ ID NO: 282685 - DNA, 386 bp, Glycine max
  unsure (1)..(386): unsure at all n locations
atcttgatggttttgaagatggttattaatgaaacaaagataaatggagaaaaagtgcaatttaaatatttctgatttaggaaaagaacagggatacttctacataatgaaaattcaccaaatctgtatatgtgctataaaaacatgcctttttagtctttagtgacagtaatngttttgttcttacctttctggtttttgtcatgcgaatntgagtttgtttgacttgccctcattattgcctaatgctatctggactttcagggagagtggatcttatctngaaaagatgctngcaacaactacaaattacttcatctttatatgtatgccgcgaagtgtgaaaatcttggccattcaaaggatccgttcttgactcaagtttc

SEQ ID NO: 282686 - DNA, 323 bp, Glycine max
  unsure (1)..(323): unsure at all n locations
caactaaaagtgcaacacggatactcttcagatatcaagagccttgcatccctcaataatactatattggcgagcctgtagtcgtatgattgtcacatgttaatgcaccaactattggatgtagcgattagcgatatcttgcctgacatagctatggttgccataactcgtgtgtgctcttctttaatgctatntgtagccaatgtattgaccctcgacaatcggatgatttgaacaatgaagctgccatcggccttagtcaattgtagttgtatcttactgcatcacttattgacataatggatcacttaattcgtcatctc

SEQ ID NO: 282687 - DNA, 232 bp, Glycine max
ctggccatcggccgggatgatcatggtcctccaggctggacaggcagaagcaatgtgtcctctgactaagcattggaagcattgtatgttactggtgccggcgccggatgatgagacaaaactatgctcggtttcatggacttacattgcattaaacttcattaaagagcgcaagatacatcaataaatttgacaactcgagcttatcctggaatgatatccatataacaca

SEQ ID NO: 282688 - DNA, 226 bp, Glycine max
ataacatgcttaatgtggcgaccattcaatttttactttcaaatgtatatcaatgagcggaatcttgcctcaatttatggatccgcgagtatatttatgacatcagtactaatatgtcatatgcactgtaggataagttattggcttgactattcgatgtcattagattatgattctccgagaagtctagcggctctatggaagaataatacatctcgacttatct

SEQ ID NO: 282689 - DNA, 247 bp, Glycine max
tagtggagaatgatacaaccatgataatgatgattaatttgtgatagcatatggagaactaggaatgacaaagtctggaatggagtgacccctcacacatagtgccaattagggatcatgataccctatatcaatggaggtgtgctatgcgtatcatgcaagagccacctcatagacctctcacacaccaagtacatgattggtatgcctcgccaccaggttatttgaaattcaatgtagatgttgt

SEQ ID NO: 282690 - DNA, 414 bp, Glycine max
  unsure (1)..(414): unsure at all n locations
agtctttatgctatgtggtaccatgtcagtgaaaaacctcggcgggcgcctatgagtacatgacaagacaagccacacaatagtaagtcaagtcactctcactaggtaatatcatagggagaccagtcagggtcacagtgttttgcgagaattttccaaccatatgagatcaacatatgcttaaaggagcactcaaaccgtgtgacccccaaggcctacactccgaagagtccgtcagggcctctccctcctgattcatgtccaaccaagagaatattttagcacacagactctatctatgaactgtacaaaacacatgacttctcaattgttctcaaaatacatntaactcgtcgtcctttaagggtcttatcattaactcgtcgcccttaaagggacttaacattaactcgt

SEQ ID NO: 282691 - DNA, 511 bp, Glycine max
  unsure (1)..(511): unsure at all n locations
agggtgaagcagtcgncgactnctnnctngattaanaccccncccgcgtncaancgccacacagaatgttaggcgggtttctttttttatgccgtaccgacactgggatggagtatatcgttaagtgtctcgatcttgcgctctttgtgctacgattggtttctgcgatataattctgcctaaggtgggaaattcgcgtagctcctcnttcagaggctatcaccattctaggcgtttttttagtgtgctcgtctgtcgttagatacttccttgcctttctctcttgttcctcgtgctataatacttctctcgctgaactctggcctccttgatcctctattgctattctcgccgtgtactgagtctcctatctctctttacaattagatgctctgtaggaacattccatcttttgctttttctttttttccgtgtgaggggtacatttgtgcattttttcgtatcggttttcccttcgtttcgatttttggctgctttcacaattgctatg

SEQ ID NO: 282692 - DNA, 362 bp, Glycine max
  unsure (1)..(362): unsure at all n locations
aaaaaataattccaaacctcctatatgttcctggtaataatcccgtgaatataaaaattaaaccaaaataaatattgcaatccaaataagcatgtcttcatagtnttactatacactnttggaagcttcaagttctcannatttgttgttgggttatagaaagctntggannagcttgattttcttcttattattccgagaatatganagcaatggaagaaagatattgcatagctaanaacgtatgttgtcctgagtatactatacacgttgaaagctgctggtgcttgaagttttgtaccgacaaacttatagaaacatatgcgtacgtgaattagatttctaattatgatatacatcat

SEQ ID NO: 282693 - DNA, 456 bp, Glycine max
  unsure (1)..(456): unsure at all n locations
actcaagctggactgacctanacattatggtacttatctatgagagcttgtgtatttngttttatggtgtgaaagcttatggtacttaattagcatgcactggtgcatgtgcgcatcatatgctntagtctancatgaaattatggctgagccatgttggttctttggtataggaagtgtcacatgaaatttgctagcagttttctgctcacgtgttggagctcttatgcacactntggagcaattcgtgctagcaattttctttggatttgtacaatctccataatagttaaagcagcttgtagagtttgaaaaataatcacatgatttaatgtcctgttcttctctttctcttggaatttacacattgccttggagctggtattngaactntgaaatanagagaacaaggaatgaccattactacaagcagaaaagtatgtcagcaaaatgatt

SEQ ID NO: 282694 - DNA, 325 bp, Glycine max
ctcgatatactataggcctgaattggacatccgtgtgacaagttatgaccatttgaattgatgcagagcttgcgtcgttcaattttgagcatctcgacatatgatcagcctgactcggaccttagtgcgaaaggtatgaccatctgaatcactcaacaacttgcgatgttgattctcgagcgtctctatatgagaatcgcctgaatcagaggtgcgagctaaaagtcatgaccatttaaattgctcaagagcttccggtgtcaatctcaagcggatcggtgtgcgacgcgcatgaatcggagatccgtgtgaatagatatgacca

SEQ ID NO: 282695 - DNA, 280 bp, Glycine max
gaatcggacatccgagtgaaaagtgattatccttttgaatttctcgagagcttctatgtttaattatgagcgtctcgatatattatacgcctgaatcgaacctcagtgtaaaaagtatgaccatttgaattctttagacatacgatgtcattttgagcgttctatatgtgatgaccttatcagacctcctgtgaaaggatgacattgaattctcgagagcttcgttgtcaatttcagcgctcacatttatgccccgatcgacatctgggaaagtatgaca

SEQ ID NO: 282696 - DNA, 389 bp, Glycine max
  unsure (1)..(389): unsure at all n locations
taacctagaataaaaataacttaatgccattaacctatggaattaaaacaaacttaatggctgagtgtaactgaaattgttggcaaccaaaagtcaccctcaacagccaacaagtcagccaccatttggtctcccaaaaggctgatgcctaagttgccaattgcgcccttattacaacttgaactaaagcccttttagttgattaacccaaaacatatttttggtcaaccaactttacaaggatagggccattatttagacaaactaaacactctaaaattgaaataaagtggtgtcatttagtcctgcatgtgggccatgatacaactcacaaccttggactnttctccttgaaacttgcgctagtattccaatagtatggacagcac

SEQ ID NO: 282697 - DNA, 382 bp, Glycine max
  unsure (1)..(382): unsure at all n locations
ctcggatgttttatttatgcgcataatatatcgagacgctcgaggttgaataatggaagctattgagcaattccaatggtcataactgttaaactcggaagtccgattgaggcacataatatattgacacgctcgacattgaacaacggaagctctcgagatattcaaatggtcataacttttaactcggaagtcngattgagacgcataatatatcgagacgctcgaaattgaacaatggaagctcttgagcaattccaatggtcataacttataactcggatggccgattcaagcgcataatatctcgagacgttcgacattgaacaatggaagctcttgagcaattcaaatgggcataactcttcactcggatgtacga

SEQ ID NO: 282698 - DNA, 440 bp, Glycine max
  unsure (1)..(440): unsure at all n locations
tgcctgccagcctcgtattttctcttatatggggaaaccgctcattgtgaactttcataaatggggctccacacattcaacccagtacttgaggacaacaggtgagcattggactaccaccgtcagaactctcattcctcgtgggaacagtcagtgcttcacatgactcttactgtgtgactaagtacatcactcgtgaaaccgacttcctataacgaattttagaaaacatccttcacaagccacagctgagctacacactcccgaatggtcactaatcgcctctccctcagataccagacctggaagatctctatggaagcttgagcagacccacacctactcatactacttgtgatatcgcactcttcagatgtagaacctaagccagctacgcatccccgatataactcacgctaccgcatctctcaagaaggatn

SEQ ID NO: 282699 - DNA, 130 bp, Glycine max
cccagatgaaatgcgctcgaaggttgtttttcctagcccactccacgggcagcgtcgagtcgcccaattgaaagatgcctccggaatgcaatgttttaacgtattgacccgaactcgaagaggcgtgtga

SEQ ID NO: 282700 - DNA, 324 bp, Glycine max
  unsure (1)..(324): unsure at all n locations
acctatacttaacagaaaatacttataacacaaaatgaaaatactaagtatttttgggcctttagggctccataatataggtaaggtaccctagaaatgtaacatttttcagtccttgtattttagggcacctagactagttttttgtattaggggtagttttataatttcacatgcattaagtgaatatttgatgtgtgtggttgtaaataaatntaattgaattgggagaagcccaatccaattataatttagagggggaggtgagcatttgcttgtacaccccattgcacatcatatagcacactttgtgtgtgccttcat

SEQ ID NO: 282701 - DNA, 292 bp, Glycine max
  unsure (1)..(292): unsure at all n locations
ctaaaagcttttcacccttatcgacgattgaaaaaagcttttaatggaagtcaggggaatgaangccccccagaaccattaactggaaaccaagttcatgatcgcgtaaaggacattgtaaccgtgtttgggaagtcccagaagaagacatcatctcccaacaacatgtggaagaaacgctcaatattctttgatcttccatactggtctgatctatatgtgcgtcactgtctagatgttatgcatgtggagaaaaatgtgtgtgatagtttaattngtactcttcttaaca

SEQ ID NO: 282702 - DNA, 388 bp, Glycine max
  unsure (1)..(388): unsure at all n locations
cccacttaaactccaaaactgagcagagttgctcattcttcctccattttcacaagctggtcaaaaggaaagaagacatcatttccactcttcttccaagattttccaaccgtaaaagaaccctccttccatcaagcttaggtgaatgacctccattttcacttcattatcttgctctattctcacttgtagtttcaaatcttatattcgcactcttgaacgttggaaacaagaatccaaactccctcattctgccttctaaatttgttggagactacaacacgtanggggtgtctctccaactcttgaaccctatgcttttagttaacttccttgaacatgttgtcttgaaattcccgtgctagttgcctatcctggatctgtgtgc

SEQ ID NO: 282703 - DNA, 206 bp, Glycine max
gaatcggaccttagtgtaaaaagttatgaccgtgagaattgctgtggagcatccgttggacatttcccagcagagctatatgtgatgcacctgagtcggacctgcaggtgaaaagggacgaccgagcgaatttcgcgagcgctttcgttgggcaatggcagccgccacacatgttaacgcccctagtcgaacatccatgggaaaag

SEQ ID NO: 282704 - DNA, 433 bp, Glycine max
  unsure (1)..(433): unsure at all n locations
agcttggttatgatgcttcaatggaggaaaagaaagagggagagaaagagagaggggggagcacgaaattgaaggaataaaagaggtatagaagtggaactttgaagtatgtctcacaagactctcattcatcaaagttacaacaagtgttacacatgcttctatttatagactangtagcttccttgagaagctttcttgagaaagcttctttgagaaaacttccttgagaagctagagcttagctacacacacccctctcataactaagctcacctccttgagaagcttccttaagaagattcctaaagaagctagagcttagctacacatacctctctaatagctaagctcacctccttgagatgagaagctagagcttagctacacacccnctataatagctaagctcacccncattgacaaaaacatg

SEQ ID NO: 282705 - DNA, 303 bp, Glycine max
ggctggctattatagaaagatcattgtatgattttctaaattggcattgcccctaactaagttgactcgtaagaatgagaagtctttctggaatgagaagcgtgatcaaagtttccaagagttgaagaggcggttgacgacagctccagtgttaattttgcccgacccttatagaacattcgaagtgtattgctatgcaagcgggcaaagcttgcggtgtgtgttgatgcaagatggaagagtactggcttatgcttctcgtcaattacgtcctcatgaatttaactatccgactcatgactt

SEQ ID NO: 282706 - DNA, 329 bp, Glycine max
agctttgttgtctatgatcaggtcatcacgcgcgcgctcaaggatctcggcggcggctcgggcaaccacgccaggatcgacagcattcccgtgcagatgggcacggccacggccggcagcacgcccttcgagggccggctgcagctgatcgacaaccaggtcgatgcccgaagcggcacggtgcgcgtgcgcgccgtcttcgacaacaaggatggcgccctcatgcccggccagttcgcccgcatccgcatgggccaggcgcgcgacagcagcatgctgctggtcagcgagcgcgccatctgcacggaccaaagcaagaagtacgtgat

SEQ ID NO: 282707 - DNA, 213 bp, Glycine max
  unsure (1)..(213): unsure at all n locations
atgcgcatgcaccctgatcatatacctcacaggccttgcatattcnaagcggcatgcatgggctttgcaatgcatcacaacgaacagaatgtcatggaaactaataatacttaatgacaaccatcacttgacctacctgcaagcgcgcctgtcactgttccccagctgactgcaccaccgcagtgctctatctacatcactgatcaaatgact

SEQ ID NO: 282708 - DNA, 330 bp, Glycine max
  unsure (1)..(330): unsure at all n locations
agcttangttttttaaatngnngaagacaattatgtgtgtgttacactgatcacatttatatatatacattactgtatatagtatattggcatttaatttgtattaatagttcacagttaattgttagacgcgcaaaatttttagctatctagtaactgatgacgtgaggatgaattgcgcaaaattaatcatgttaaacaaatgtagacaataatgtgtgtcttactaatcatatcacaattatatacattgtggtggagcaagtgagagtgaaactttcttacagaaagccatacaacagcaagggagagccactatcatggacacca

SEQ ID NO: 282709 - DNA, 394 bp, Glycine max
  unsure (1)..(394): unsure at all n locations
agaagctcatccagagagatgtagccactngctttgttttattaaaagaaaaagcagcaactgaatgatcttctatttcaactttgtttaaatgtaatgttgcagctatgaattctctgtagtcaattgtgccactgttgtcaacatctgcctgcgatcagaattatcttttttttaaaatggaacaaatggattataatttataaggatgtgctactaaaactggttaacactacctttaccattctggattctatttacaatgttacttttccctacttgcataacaatgtgtgactaaatgatactcagaagtctttcccttgtaagactatatctttagaatggaattataaacactacccataatataggtcaagttacaacttgaaca

SEQ ID NO: 282710 - DNA, 419 bp, Glycine max
ttcttgtctaattgctacaactcgcagccacttcaatcacattgcttctggaatgcaactgaggagtcgactcccctactccacctcttctatattgtgactgttccacatgcacatcggctggctcaactctcctcacagaaccagactggtccccaagaaccctcagtttatgctcagcaaaaagcttatcaagctcatcagccttcattatcagctcatcatgcatcccttgattccctctagattgcctcaccctctggagttgctgctctaaaggtggagatgaggttgcgcgtgcattatcctgagtctccaaaacttgtttcatcttgctactttcattagcaccatcccttgtaccttgtgccgtgcttattagttgttcatttctaccaggtaatggattatggtactca

SEQ ID NO: 282711 - DNA, 317 bp, Glycine max
gctctgatacaatagagagagagaggcttgatattttatatgtacaacagaaagaaaaaaaaagattaatcttattgaactcatgctagactgaattctagatgaggtcttataatagtagtgtagaagtaataaaataaaggtgcttaaaagggaggagggaaaaaaaaataaataaatcaacactcgtaacatactatttttttttaatcaacaaaattggtataagatatatatatgtgggcacaaagggggtccaaaacccgtatacatgtgattcatggcagaaaaccacccatattggctaccgaatatta

SEQ ID NO: 282712 - DNA, 363 bp, Glycine max
agcttatatttattatacttacgtcataggattaacagaatagcttatatcacattataaaaaaaaggatgacacactgatgataatttaaaaagttttacaccagcatctaatcccaacccatcttgtatgttaagatagttgattcttatgctaattactttataagttatatcaacaatgatgatataatttaataacggtataaaactattttatatatgaggatcaactcattacattaacaataaaattaccaagagaatcatgtcttattctaatacgaatattttataattgattattagaataaacaaagatttctcttttctcttgcttactaattgaatgtatccttttatt

SEQ ID NO: 282713 - DNA, 287 bp, Glycine max
  unsure (1)..(287): unsure at all n locations
gacacatagccacncaagctgttgcatgatcgtctggtcatccagctatttatttgtattgatggctcctacactcaagaatctgagagtcttaaattgagagtcttgccaactaggaaaacatgttaagtcatcatttcctcaaactgtgcagagatgtaactctgctttctctaccattcactctgatatttgaggaccaagtacggttacatcttctgactttcagtgttttgtgaccttcattgatgaatagttcagatgtacttgggtttatgtaatgaaag

SEQ ID NO: 282714 - DNA, 360 bp, Glycine max
atcttgattcttgaatattgattcttgaattcaactttcctcttgaatcttgaagtgtccttcaacctttcctcttgagtcttgaactgttcttgattccttcttgtacatcttgaactcatcctttgattgacctttgagctttttgtcatcacctttgtcatcatcattgttatcatcaaaacatctttgaatcactcttgattcaccatgaagctctgcttctacaaagaagataacacagagaacaaacaaaacatcattacatatatagaaatatatttacattagatacctacagggaagatccaatagaggatatagctctccatagtccagaaacctcttttacaacaaaga

SEQ ID NO: 282715 - DNA, 330 bp, Glycine max
  unsure (1)..(330): unsure at all n locations
tgccacccagctcgcccaggcgagcagggttgtttctctctataagcaacagccttctggaggaatcttctagagggcccaagtgggcttggttgctatttgcacccccatttttactaagtacacctccttgccttttttttggtgattcttttctcgtaaagttacggaaacttacgaatttcgtaacgatacttgttttctttccgtaatgttacggaaccttgtggattacataatcatcccctttttgacttacggaatgttacggaacctcactaatngtgcaacgatgcttccatttgattttcggtgtgtcatggaacctta

SEQ ID NO: 282716 - DNA, 532 bp, Glycine max
  unsure (1)..(532): unsure at all n locations
aggacgtgtttcgacnttctgttannaccccncnaannnnaannaangcnnccngcgggannncannaaannaccgcccaggatgggagcgacgcttccttttatttttcntaancannacgcacaccgagaacggggaggggctacgacgacangcgacggagacacccgcccnggcagcgacaaccggggggacaacagaggagccaaccgagccagaacgacncggacagacagccaccagaaaacaccgcccggaagcataaaaacgccggaaagacgccccacacagccacagggcaacacgcacaaccaagcaagacacagcgacagcaggagccaacaaccagccaaaaagcnggcagcaccaacgncacaccggagagacacgaaaccaacccagagaaaaacgcccacaggatgaaccacgaaacctctgatcatgagaccaaacttatatgctgacgctgtgactcacaagagggttgggctcaatcgatcacaccactacctcataggtgagtgtgcaccg

SEQ ID NO: 282717 - DNA, 427 bp, Glycine max
  unsure (1)..(427): unsure at all n locations
ataactttgtactcggatgtcttatttagttccgtagtatatcgagacgctcgaaattgaaacagaagctctgagcatattcaaacgacattaactnntttctcggatgtacgattgtgtcccttagtatatctagacgctcgcaattgaaaacggaagctcgtagcaaattcaaacgacaatacactttaactcagatgtctgactgagtcctgtagtatatcgagacgctcgatattgaaacataaggtctgagcaaattcaaacgactataactttttactcggatgtccgattgagtcccgtaatatatcgagacgctccaaattgaaatagtagcttctagcatattcaaacaacaataactttttactccgatgtccgattgagtcccataatatatcgagacgctccacattgaaaacat

SEQ ID NO: 282718 - DNA, 429 bp, Glycine max
gcttttatcatggcgatacttgaggggacagatactaagcaccggtcctgtgtgaaaggggacactttaaaggacttcctatatgatgaatcgcatatgcagggtgacatgcactcgccaaataattcatctgcacgacatgctctgagcttacttcgtcaactgcaacacatcaatctgtctaaaacctactcccatacgacagtttgtaagactcagatcactctgtggtgatatgcgagaaatacaagagaactttatgctcaatgtgaaagtccaccgctcatggatacgatgccattgacgtggctgcatgtgagagacagatagtatataaataatgtctaagactctatgaacatatataggcacacataatcaagtgatcacatgaagagagggactgaatctttggcttatcattaatgg

SEQ ID NO: 282719 - DNA, 480 bp, Glycine max
  unsure (1)..(480): unsure at all n locations
nnttaaccaattacgagatngcacattgatacacaagctncctcctgacatctggtctgcttgaagtggactgcaaccatatactttanttgtaccccatacctcaaccctggaccttaatacagcaatgcatctctttgaagtaaaataccctcggcttacttcctcgtcttgagcctccatacatttccaccttgttaaagcaccgaactaagctcccccatggatgagcatacgctcatcatacaggctcacccactaactgaagctttgaccacaagaactgatacctttaagcttaacattcttacattgtttcgccaatagactatccttaactgcgtgtttatctcccctttacgaactaatgcctcacgcttctctctctgactatcctatgactctctgaaaagctgtgctgatgatgcatcacagctgtactatcaaacttgcctgaggaggttgtagattctggctcgg

SEQ ID NO: 282720 - DNA, 433 bp, Glycine max
  unsure (1)..(433): unsure at all n locations
cagcctcctatttattgtaatttttgggtggtgaacctccttcttccttggctaattccctagtggatggtgcctcccctctcctcttctccttttccttccgctgtatctcaatggtgtaaaatcaccattaaaggaccccattgaagctcanagatccaacctccatagaagccctacaatcaagcttccatcaagtggtatcagagcacaagagcctcaagtgtccaggaaaggagcccagagtgtgaagaacctcgggatttgaggtcaaatcctttccaaggtggagaggatgatgcaatcctaccccccaagggtattggatagaagactccaggaggcttangctagagctactaaagaatgccctanggttctcatgaaccttangttagctntttgagcccatgggtcatnggtggatccactc

SEQ ID NO: 282721 - DNA, 438 bp, Glycine max
  unsure (1)..(438): unsure at all n locations
ctcagcttatgagtttctggttccaaccttgaaaactggctattatctttcattctctnctcctttggccaaatgaaattcgccaaggactaaccacctgaattcttttttgtgtctctctttccccttttcccaaagaacaaaggactaaccccctgaattcttttatgtctctcttctctcttgtcaaaaaattcaaaacaacacagtctaagaattcttttgattcttcccatccctaatacaaaagtgtttaaaggactaacggcctgagaattcttttgtatcccattcacaaagtatcaaaggtttaacagcctgagatctttgtcttaacaaatttggacggtacatcctttttggtacaagtagagggtacatctacttgggtttgactgagaacaagagagggtacatctcttgtggatcagttctagt

SEQ ID NO: 282722 - DNA, 289 bp, Glycine max
  unsure (1)..(289): unsure at all n locations
atctgggccttctttaaaggcttccaattgtgtgaatttggccaattccgtgagacaatttgnggcaagtttgtgctttgtttctttgaattgaggggttgtaggggatggccttangcctaggttatgctgtgaaataatggagcaagccacattgcccctattcccttattattggcacccaaaagtgcgcccaccaagtgctcagtgaaatgcctcaatgacatttgggcatggttttgtgaactntggattgtggggctgatttgtgtgtatagggacaacatgt

SEQ ID NO: 282723 - DNA, 229 bp, Glycine max
  unsure (1)..(229): unsure at all n locations
tcaattcaatccctgaataatttttggatattgtccaataagaaatgttcgatcggcgtcatcaggtgatgcttgctttttattttagacctgctggatcggtcatctttcctggccgacatcgactatcatttnttttatcagtgtcggtgaataatgttttttggccgaggtgggctgatgtttttctagccgagtaaatgagaacacgccagtgtcggccgaaaca

SEQ ID NO: 282724 - DNA, 421 bp, Glycine max
  unsure (1)..(421): unsure at all n locations
ttcttgcttctacaatcaaaacctacanaaccatgaatgaatctttcatatttaaacaaaaacattagtaaatgtacaatatatataaaccaactagatttaagggaagtttataagagaactattacaaaagatagataagtgctaacattataatccaaaaaataattgaaatatgacacttatcaacttggcaccctattaagggtgtaagtcgtaagctttaaggcttctccccaaagtgactctggcaaaaaagaatgactaatcatatttctcaccatatctttaagagtttgctttcttcgttcttctacaccattcgtgctacgttcttcaaacatagcgtatggccaaacaattccacacactgtgagtaaaagcacaaaaagtactgaacgttgttctcctaatttgcata

SEQ ID NO: 282725 - DNA, 240 bp, Glycine max
  unsure (1)..(240): unsure at all n locations
aaaccagctcttgctgccgctctgggctcagaaattcattttttttccctcttatnactagctatagtgaattctttagttcttgaatgtacaaccttcaaattgttgctcgttcccctctntcttttctgcaaaaaagaaaatcaaatgctgtgaaaacatggatgaagtcctaagaaaatcaatatcaaagaacacatggatgaaatcacaattaacaagcacaattacctatctttc

SEQ ID NO: 282726 - DNA, 417 bp, Glycine max
  unsure (1)..(417): unsure at all n locations
agctttganggtttcattctgtatttttctgattgtattggtacctaagcatttattttatttctttctgcatttatctgttgggaatatattgatctaacttgttattattntctgtttgaaagctctttgagagctctgctctgatgcatatatctgctgtaaagtctctcctctctgcattatgtcaactttcacatcaatgcatgacttcaagcagtttgggaccaacaactagtcaaaaaattggaagcatcagcttttcagtggaaagaatgatatccatccttgtgaataatgctcacagtatgtagcttcaatacctttgagcatgatagcaaatcttttatgctggatgctgttttcttagaatggtgggttgggcctaactcaacacccaaagctagctcatagggt

SEQ ID NO: 282727 - DNA, 393 bp, Glycine max
aagaagaagaaatcaaaagagagttattatgcttgtgtcttggactctcatattacagtgacaaagccattgctgtgatgacgtgaaaacaaaacacgaaggaaaaggcagaagagagagaaagagaggtacataacttttttaattgtgttttaatcttggctgttcatttttctttaattgtgatctaatggctaatgattaattctcatttctcatttaagaagtgttttcatttgaaacatcccacatatatatagagagagaaggttgttattcaaattaactacgactattgttttttggttagcttttatactctaacaattaaagtaatgaactaatggtagtataaaaatttctttgcttgccatccaattttatgataaaact

SEQ ID NO: 282728 - DNA, 399 bp, Glycine max
  unsure (1)..(399): unsure at all n locations
agcttgtttatatggctagacatgatacatgtcanggtttggtttggttcaaggataaaagggatgccccacattatttccatgacacanatgcaaaaatgatgatttggaaactntatgcaaaactggtcatgcatgcgcctatgcggacgctcaagtgtcaaatttttatggtcaggtgatgctagggttcaggattcatttcctctattttaaatcaacccaatgtttccaaaatatgttcttttatcaatttgtgcattcctccaagtccatttcgggcgtccggngaaattnttacagcattcacccttcaggtgtagacacgtnntttcttcaaaaatcggttatgatcaatgaatttttttttcaaagaaaagttggaaatcatctcttttc

SEQ ID NO: 282729 - DNA, 287 bp, Glycine max
  unsure (1)..(287): unsure at all n locations
ccccggagtacgacagtcaccgctttatgagcgttgtacaccagcagcgcttcgaagccatcaagggatggtcgtttctccgggagcgacgcgtccagctcanggacgacgagtatactgatttccaggaggaaataaggcgccggcggtgggtaccactggttactcccatggccaagtttgatccagaaatagtccttgagttttatgccaatgcttggccaacagaggagggcgtgcgtgacatgagatcctgngttaagggtcagtggatcccgttcgatgcc

SEQ ID NO: 282730 - DNA, 400 bp, Glycine max
  unsure (1)..(400): unsure at all n locations
agcttgttttgcattcttggttaggttcattgngtactatgctgatagctaaaaacaaaccatgttggggttataaaatcctctttcctaaaaatgataaaaaaaatcatgtgaatatggtacccaacgcgtggtctttgaagtgtctcgtgtcgatctcataaatacacatgtcatgcatcgcataactatatcctactcattcatcatatatcctctatgatagattgtcgaagtattgacaatcaaaatttttattctttggaacatggggccgaaccaagtgcagtcttttaagataaaggttntaccaagtcaaggtcaaaagggaagtagccagcttgcaaaacttatggaagtgaatggagctaatgacttacataatcaagaaattgtgatg

SEQ ID NO: 282731 - DNA, 461 bp, Glycine max
  unsure (1)..(461): unsure at all n locations
tacaaacccaagcttgacactatgaaatngaaaacttgaaaccctcaagtttcattctaagttgcaactgacacagtaaccaagattgcatttttttacccccttcttccttctccagcatcatcaaacatcacaacacaaacctcaaatgcctactaccaccaccactttttcttgcttcctcttcaccttcctcatcaccacttccaccatggcttctatggttggagctgtgggggtgaactggggcaccatggcttctcacccacttccaccccacaaggtggtgaagctcttgaagtccaacagcatcaacaaagtcaagctctttgatgccaactctgatgttcttcaggccctttctggctccaacattgctagtactgtgggtgttcccaacactttgctcagaagcttgaactcttctaagaaagctgctgatagctgggtccatgataatg

SEQ ID NO: 282732 - DNA, 377 bp, Glycine max
  unsure (1)..(377): unsure at all n locations
agcttctttccaattttctataaatagggggagaagtgaagtgaaaaagggttcagccccttatgcacttctctctctttcgaatttgcttggaaaaattgtgtccatgaagaaaattcaagccgagccgcttccgaaacgtttccgtaacgtttccgtgaggaatttcgcgaaagtttcgaccgttcttcaagattcatcgttcgttcttcgttgtcttcagtcttcaacgggtaagtacctcaaaccaagctgttcaattcattctatgtacccatggcggtccacatttcgcctcatgtattnttattctccgtntcatttactttgtatactccctgttgacgtgcttaagccatttatttaagtcatttctc

SEQ ID NO: 282733 - DNA, 504 bp, Glycine max
  unsure (1)..(504): unsure at all n locations
aggttaaaggactttgagctcntatgcctactatanaanactcaagcttctcccnncaatttctatacgtacgggggagaagggatttgataaatgtggttcacccccttaggcactttctctgctttttctgaattcgacttggaaaaatgttttcccgtgaagaatatctacagccgaagcgctttcgaaacgtttccgtaacgtatccgtgaagaattttgcgaaagttacaccgctctttcaacgtcatcatgtcgtcttcatcgttcttccatcttcaacgggtaaagtccttgaaccaagcttttcgattcattctattgtcccgtggaggtccacattgggtttcgtgtattattattcacgatccatttactgtctatacccccctttgacgtgcttgagccattctatttaagtcatttctggcttaacctaaagaataaatagaattccaccgatcgtttgaatctgattatgccgtaacttttgttaaaattn

SEQ ID NO: 282734 - DNA, 426 bp, Glycine max
  unsure (1)..(426): unsure at all n locations
atcttggttcatatgatttatatgctccagcttgagggggagtgttggatatccttgtattttatctatattangtagctttgttagtaagcttgttcagaagggcagcagtgagttgtcactgtcactgcccttctctctccatcttgtactctatatatatgtcttttttgaaatgaataaaggtgtgagagaaaggagggaatttctccttcagtttcaagtaattttaatatgcactccaatgatggctttcaggggagagttgatccttgacaggcaatatattcaactgggaaagcaaattaaattataaaaatatatgtatttttcatcagtatattgaagactgcaatgggtgaaaattttgaacaaattctagactgcaatgggtgaaaattntgaacaaattctatcatctctgtc

SEQ ID NO: 282735 - DNA, 382 bp, Glycine max
  unsure (1)..(382): unsure at all n locations
agatactaagctatttgagaaacttccctgagaagctaagctttctacttcacccctctaaaagctaagctcacctccttgagaagctntattgagaagctagagcttagctacacacacccctctaataactaagctcacctccttgagaagcttcctcgagaagctagagcttagctacacacacctctctaatagctaagctcacctccttgagatgagaagctagagcttagctacacaccccctataatagccactgaatgtcgcgcttagcgaatgctcgctaagccagcagattggcttagtgagaaggtgagaataacacttttgccaatntgcctaattaacctgagattgagagaaatngattattaaacac

SEQ ID NO: 282736 - DNA, 382 bp, Glycine max
  unsure (1)..(382): unsure at all n locations
agcttctttctatatacaagactgaagctctgataccacttgttagagaagtggcctcagatatcttaagaaggcggggcgcgaatgaagatatgaccaactatttaccctaatcaaaaatctatattactgctcaaccaacgtatgaattcccttaatgacaatcttcttaaatattaattcanatgagacactttgaatatgaatataatgcactcatagataacggagaataacggaagagaatatgcgcactcagttctatactgtttcggccacacccgtgtgcctacgtacagtccccactaaacccgctagagagttccactatcttagaaatgctttgtacaagttctaaacacacaaagacaatccttccttt

SEQ ID NO: 282737 - DNA, 332 bp, Glycine max
  unsure (1)..(332): unsure at all n locations
tagcagccaactcctgaggatcaagcctcaggagtgctaactgggaataagcacaaagattttccccctcttccagaatcactgcggtcttcagaaaagtgttcanagtatcttcatcaaatttgatcagatgaccactgaccctcacctgcttaagtgacttgtcttctaagtcatagaggtttgcgtagaattccttgacaatagctacatcaatactaccttcaatgaagcttgtcaactcctcatcccattgttttctttctaattcctccttaagatcatcaaaatcagtgtagtatactatagtagaaactctttcaataatactc

SEQ ID NO: 282738 - DNA, 428 bp, Glycine max
  unsure (1)..(428): unsure at all n locations
agcttgagtatgataacggatttgtttacgttcataaacatgactgactgaaatccactattataaaacaaaaaatcaagtgactgctaaattatgacggtttgtgaagttgataattactagtaaatggtgcaaaaaatcaagtgtagtactaacacttaacaagtaaccaatgataatataataaatgaccattgcttgtgtacccaacttcgtccttagatgatgatattgtaatcatagcagctcccgacaccagcgattgctctatgcgtttccttgacttctattccanaacaattcttctcttttcattnttaatgttcatcactttgtgggtcccaacttctgcacggcaacaagtcggttattttagtctctgctcctttttccctctgaattcggtactctgccatgcatgaatcata

SEQ ID NO: 282739 - DNA, 433 bp, Glycine max
  unsure (1)..(433): unsure at all n locations
tgtccnccatcaaagataagacaaagtataaatcatgttcttctccattctgctagctatcatgtccacagaaatccatatatgtcaatagagattgtaaagtaataatcatatcacaatatcacatgttatttgctacggcctacgggaaagctcgagcgagcaaacttgcttggtgagtaatgctaactgtttgttgaaaacgcccaagtaattcattacatttttacatcacttgacaaggagtttcggatcaatgtcttttgttttgcgtgatagcacggatgcagatcaacttggacactacttcaaaaatcagaacgtgaatgataataaccaaataaataagtggataaactttgcanatgcanggtgttgcaaattgcatgaagcccaagtactggacttggaagtttattgttcttctttcatc

SEQ ID NO: 282740 - DNA, 123 bp, Glycine max
  unsure (1)..(123): unsure at all n locations
aataccccttattttaatgggtttctaggtntgagaagtgaaatttataatganggtaatttgaagcaaactctcacctacaccagtcataacattattaactgtcaactgattaccctaaat

SEQ ID NO: 282741 - DNA, 202 bp, Glycine max
ctgtctagctgattgagctaaggatcaattgaatgtctgctggagttacttgaatgattttaagcgatgactacctgtttagaatctatccttgactttttgagttagtgaaacctttttacattcacctccctaaatgaccttgcatcaattaaattgtactgtgaacaagttcagattttgctcctgtatgacaagaact

SEQ ID NO: 282742 - DNA, 233 bp, Glycine max
tttcacttcttctatggaagttctatccttttctcttcatcttctaaagttgttgttcgagcctttgtttccaagaaagtcttttttcaaagctgtgctatcatcttttcattccttccccttgccagaagacgaagactaccgttgattctgtggctctttctcctacaaagatcaaggataccgctgagatctttgttttccaccacgggcaagatgggggcttccgccgg

SEQ ID NO: 282743 - DNA, 244 bp, Glycine max
  unsure (1)..(244): unsure at all n locations
cttaacttcctcaatggtgactnagtttgctagttcatcaaacatattttggccaatctgagggatagaattcagataaaggctagatggatcacaagttttagggcattagaagagcttcttaaagaacttcaaggctttcttcctgagtaagtcatcatctgtgcactgaattccatcaatcataagactcgtgattttatttcttctccttctaataaccacttgagtatggaaaaatttg

SEQ ID NO: 282744 - DNA, 160 bp, Glycine max
  unsure (1)..(160): unsure at all n locations
aaatctgatcatcatgctgtgatttatgcaaaanaaaaaacaactacggcaaatgaagagggtgagaataagggagaagcccatgctgtgactgccattcctatacagccaagtttcccaccaacccaacaatgtcattactcagccaataacaaatctt

SEQ ID NO: 282745 - DNA, 329 bp, Glycine max
  unsure (1)..(329): unsure at all n locations
ctaagttttgaaaggctggaatgcaatcaaaggtttcagcacacaagaattccatatcaataaacttatggtcgataatggaacgagatgagaaaagattggagtaccgtttctgctgttcgtcggaagaaaacactgnggaagaggacaatgagggtggaattggtgttgtggatgcgctagtggctccagaacgatgagcccttgaagccgaagcggaggcggaagaaccctttcgtttcttggacgattcttccattngagggaagttttgcagattntaatcggtganatcaaaagaaaaatgaaaaagaagaagattgaattta

SEQ ID NO: 282746 - DNA, 387 bp, Glycine max
aagcacattttatttctttggagaaaccttggtctaaaatgtggcaacataatgttatcaatctaacaaaaaatcctatcatgcattctaggactaaacacatagaaataatgcatcattttcttagagatcatgtgttaaaaggtgactgctacattgagttcatagatagtgagcattaacttgcagacattttcactaaaccacttgctagagataggttctgtttcattagaaatgaaataagcatattagatgcttccaacataaaataacttcctatttgcataatgtgtgatgcacattgctatttgagacgatgactaatttattctggagtctctactctaatcaattaccaagtagtttaatcgattacttctctct

SEQ ID NO: 282747 - DNA, 184 bp, Glycine max
tttcgttcaaggattgaatcgagggctcgttatgcgacatctgtcgcgacataccgaccgatattcttcagccgacattgcacaattctttttagaaaagctcgctggtcgataatggtctttttacggcagagtaagttatcttggtttggtgttgcatacaaaagttacaatgtacttcagc

SEQ ID NO: 282748 - DNA, 505 bp, Glycine max
  unsure (1)..(505): unsure at all n locations
aaaaattgcgggttagcggttctancnctagntacaagtcncgnncccatnnacataaattgggggagaagtgaagtgatataaggttcagccccttaggcacttctgtgtctttcgaatttgcttagaaaaactgtttccgtgaagaaaatccaagccgaggcgcttncgtaacgtttccgtgagtgatttcgcgaagggtttcgaccgttcttcgacgttcttcattcgttcttcatcggtcttcggtcttcaacgggtaagtacctcgaaccaagcttttcgattcattctatgtacccgtggtgggtccacattgatttcgtgttttttcttctcggtttcatttactttccgtaccccttttgacgtgcgttagccattttatttnagtcatttctcgcttaacctataaataaaatagatttgcaccgatcgtttgaattgtattatccgtggaacttcggtaaaatgagttccgaccgttcggtcgtgccataacccn

SEQ ID NO: 282749 - DNA, 267 bp, Glycine max
aacaagtcaaaccgagcccaaaccttaataggcctaaccataagttcttgacaagcgactccgctcatttccatccctaggcacacaccatatattagtagaatgcagcagtatacaaatttatcaaagttgacacaaaatttgtgaattggtgaagattgaacattaatacttgtgcgattgcatgtatatgaaatattggtgtgttcttcgacgtgatataatatgtatttcacaaatttcatatttagtactaatgtgttatgt

SEQ ID NO: 282750 - DNA, 456 bp, Glycine max
agggttcgggctttgcgtatgcgacacactagatactaagtctgaggtgagtgagaattggatcaagagttggcaatcggatgtgttggcattgagggaggaattggatagagtaagagcttgatgtggagctgactctcagacacaaactactcgaatctgctgtgtgagctaaaatcaatgtggcattgcaacaatggaaaggtgagaaatttgtatgttttgcctcagaaaacatgtactttgaattcccttccaatgtccctattaaggggtgctttcttattctggttataattccaagtgtgggtaatcccgttattagagtcatcactcactggtttgatggttttccatgtggtaagtgtactcttaacttatctatggtaaaaaatgagttaaatatctgttttatgcataaaaatatctgcactatcttggaatcatctgattttt

SEQ ID NO: 282751 - DNA, 164 bp, Glycine max
gtatcctatgtcgtgtggatgattctccagattacctgggtaactttatagagagaaatcgaaacctctgaatatcaaagagttgagtctaaacttcaagagagaaaactgtgtatcaagagaataggagtgccatggcagaaatttgaaacagcaggtcactg

SEQ ID NO: 282752 - DNA, 333 bp, Glycine max
  unsure (1)..(333): unsure at all n locations
gcacccctgcgggcagtttactatcaatggagtgactcacaaagccacattgttgtatgagtatactcacattcgtttttaagaaaatctttaagatatgattgcattgataaaccattcatgttcaagataagctatgtaaacaatatacctgagtggtcagcatggattgttgagatgctagtacatcattatgcataggttctatatntaaattgctgccactacgttgtgaagttggtggatcttactattgttgttgtcactgacaaaaaatttctacacatatatgtaagagatgaaatataacttttgtaagagtagtggaaaatg

SEQ ID NO: 282753 - DNA, 394 bp, Glycine max
  unsure (1)..(394): unsure at all n locations
gttcagccctcctggtaattcgagatcacttgaaattagtgagaaaaatcatttccgtgaagaaaattcaagccgaggcgcttccgtaacgttttcgtaacgttntcgtgggtgatttcgcgaagattttcaaccgttcttcgacgttcttcgttcgttcttcggtcttcaaccgataagtttccgaaatggaacttttcaattcattctatgtacccttagtggtcctcatttgtttcgcgtacttttattttcatttcatttactttctgtacccccttttggcgttctttagtcatttacttaagtcattntctcgcccaatcaaaaataaaataaatttccactgatcatttgaattgtacattcgttaatttctgtaaattgaatctga

SEQ ID NO: 282754 - DNA, 333 bp, Glycine max
  unsure (1)..(333): unsure at all n locations
tttctcatgtgttcactttacccaatctccgggttcgaagacaaccttctttcttcctttgttggcttgtttagcatagcttttatttttcctctcaatttgatctttgactcttacatgaagcttcttcacatagtccgcctttgcttgaccttctttatgcttaaaaacagaaacattangcataggcaaaagatcaagaggagttagtgggttagaaccataaacaacttcaaaatcatcaaaagtggtagtggtcaaaatctgatttttgcaaaacaagatatatagtgactgtttagcatgaaacaacctcttgacctcactttttgt

SEQ ID NO: 282755 - DNA, 219 bp, Glycine max
  unsure (1)..(219): unsure at all n locations
atgtgccaactctcgaagatgtggctatatcatatagacagtacacacacgtcaggattcattacctttattaaaagtgctgaattttcttagaatttgggcttagggcctcactaaactcatcccacaaaactggcttgtaagtngagggctgcctaagcattataagcactatttacatcatatctctagttaatgtggagattaaataccaccctt

SEQ ID NO: 282756 - DNA, 478 bp, Glycine max
  unsure (1)..(478): unsure at all n locations
aggcaatttttaagttttngttgcgaanattatgataccanncnnnccncgcangacccaannaacccgatgtgaaaacaaagttttatttgtttccacggagnggacangagagacgtgttgccacttctgagagaacacaaccacctgaagagtatgagccacatcgcacataaaatatctttttgcatatagtttactcccacttgggtttgcaatgatagctgatatgaggcagttgaagatttcatatttttcttatatgaacaaattgtctgataaacaatagataatatctgctactatgtcatcgttgatcttactctcccctttgttgcatcaaaacaaatcatgaatagagaagacgaaatgtgcctcttgtgtatagatgaaatagcgatccaaaagattanaccatctcttaatgaataaatgatcaatatgtcagcaaacaagatgttccttcatctaacacatc

SEQ ID NO: 282757 - DNA, 167 bp, Glycine max
tcttgcgtaccgctctgtgctagaaaaccctaatctatccctctatactagtatttgaatcttagttctgatgtacaccttcaatgtgctcgttccctcttctttctgaaaaagaaatcaatgatgcaaacatggagaagcctaagaaataatatcaaaaaacatga

SEQ ID NO: 282758 - DNA, 357 bp, Glycine max
  unsure (1)..(357): unsure at all n locations
accggatgacgccgatcgaacatgtcctaaccgacgtattcatatttcgttcanggattgaattgaaagctcgttatgcgacatctgtcgtgaagtagcgaccgatatttttcagccgacattgcacaattctttttagaaaagctcgctggtcgataatggtctttttacggcagagtaagatttcttggtttggtgttgcataaaaaagttacaatgtacttcggctaggtttttcgtgcgagttcaaccgacattttgtttcngccaggaaaacattagcccacctctgcaaaaaaaatattngctaaccgtcttcatgcatatntcattcaacgattgaatagaaaactcaat

SEQ ID NO: 282759 - DNA, 494 bp, Glycine max
  unsure (1)..(494): unsure at all n locations
aggaattgggcttgggggatgcgaacactagatactcaaccttcacacaattatctgtctagacgtgagggcgcactggcttagttctatcacaccactgactcgacgagggacatgacacatgcctgtgtcagtgcccctgtgatgtcgcgaccaagaatgatcccactcacttctttgaaactcatacctcaagatcttgaatgaattgtggatcacatatggcaatatccaagtatcttgccgatatgggcaaccgcctcagtcatcagttactttggacagaaccggcacccactgaggacatgcactagctctaaaaagaaagtctctctatctcttcagataatcttgtaggatatncaactatacagcctattatcatttattggacatgaagagtggttatattaccacatctctcaatcaatagcctatcctactcttcaagaaacccaganacaggctgcatcgtgaacacagctgtgttatcn

SEQ ID NO: 282760 - DNA, 480 bp, Glycine max
  unsure (1)..(480): unsure at all n locations
aggggttaggggttttgcgtaatgtgacacnatagantactcaagcctngcgagggcatccccctatatgttctagaattcagaangattgatcctcaaagcattacacactatatattgcatacaacaaatatgcaatttgaccaacctgtataccatcttggattgaaaaagaagtaccttctggaggttggacaagcttccggttatgacgagcggccattttcttctttaactgtgtcagtatgtcctccatggagtactctctgtgccaatttgcaagaagaccaaatgtctttgggtcaacctatttctttcagtctataaatcctggcacaaagataattagtattaagcccataaaatagactaaattttctcataatcattaacatgaaaagtgtcgcaagatggaccgattcaccccgtctttgaataaagtagaaaaaatattttcattatgcttcccaaaaacccaan

SEQ ID NO: 282761 - DNA, 251 bp, Glycine max
gggagagaagctgaactttgaagtatgtctcacaagactctcattcatcaaagttgagacaagtattacacatgtttctatttatagcctaggtcactaactaaatgattgggaatttcattttcatttcatgtgaatctaagaggaatattccaaggatatgccacaggcatcttagcatattccaagaatatgtcaaaggcatcttagaatattccaagaatatgtcagaggcatcttaccatattctc

SEQ ID NO: 282762 - DNA, 324 bp, Glycine max
ttatcttctcaactgagttcgaaggttagttgaatctttcctactagatgatgagatgatgctggttgtggtagcctatatgcacaaccaaaatatctatcttatatcaacactcatctatgaagatgaagtcatgttaacatatgatttcctattctcttgcatatggacactcccggactacttcctatagacacatcttactgatcatttgaacctatccatattgactaatgctagaagtatgcttatcatcactaaacattcttattgcgttgactatttcaatattcttctccatatcttacttattgtgctctgcac

SEQ ID NO: 282763 - DNA, 294 bp, Glycine max
gattcaagaatagctgaaaaaaggctggtgactgtccctgaaagatttgacgctactattacaaccttggagaatactaaggatttgtcaaaacttaccttggcataacttgtaaatgctttgcaagcccaagagcatagaagaagaatgagggctgatgattctgtggaaagagcattgcatgctaaattacaaattaaccactgagagaacagcatgtggaagaaatacaagaagaagaatttcaacatacaagaagcagcggctaacactagcaccaaaagtggagataac

SEQ ID NO: 282764 - DNA, 189 bp, Glycine max
  unsure (1)..(189): unsure at all n locations
gtcacacgaagtccgattcaggtgcataatataccgagacgctcgaaattgaacaacggaagctctcgagaaattcaaatggtcataacttatcacacggaagtccgattcaggagcataatatatcgagaagcttgaaattgaacaacagaagctctcgagaaattcanatggtcataacttgtcaca

SEQ ID NO: 282765 - DNA, 275 bp, Glycine max
  unsure (1)..(275): unsure at all n locations
taagaaccccatcgtcttcttcgatgtcaccatcggtaacattcccgccggtcgaatcaagatggaactctntgccgatattgccccaaaaaccgccgagaatttcaggtatctatgcttctagtgttaaagcgtttcttcttttagtgctagttagagtgccccttggctttaagcattgctatcaacttgtgattgaacttctacgaaaaatcactanttnttgttttagtctacagaagtttactcattttaattgcaaaagtgcagattta

SEQ ID NO: 282766 - DNA, 275 bp, Glycine max
acttatctccgactgaagaccgcatgtttttgtttggcccaagtttattgcgggctgtagcaccggttccgcttccctagctgtattggaggcggccaccgtggcattatcttctatagttctctgaagctctagcatggcctccgtgatagaagccatttgatcttctaatgccgataggttggccttcatctgttcttgcactccctcttcattatccatttttctggatcaagtgttatatgggtgcctttgcctctcttattatggagagt

SEQ ID NO: 282767 - DNA, 159 bp, Glycine max
gggctacgtgggagtacgtgagctcagttggatgtgggcaacaagggatggtgggtttatgcgcgatttgtggatgtggaaaacttgttgtgcaccatcgcccgaccgccacctagtaccacatgtgatgggtaccccataatcctacaagcttgagat

SEQ ID NO: 282768 - DNA, 350 bp, Glycine max
agatgtatcacacaatcaaataaaggggctactcccagattgttggagaccctaaaacacttacttgttcttgatttaagcagcaataaattgtcaaggaagattcctatgtccatgggcgcccttgttaatatggaagccttggtttttaaaaacaatggtttaatgggtgagttgccttcttctttgaagaattgcagcacgttatttatgctggacctgagtgaaaatattgtagcccggccaataccatcattgataggacaacgtctgcagcaattgataatctttgacatgcgaggaaatcacctttcatgatatatacccattcatctttgtatttgaaccga

SEQ ID NO: 282769 - DNA, 497 bp, Glycine max
  unsure (1)..(497): unsure at all n locations
ngggcgcctttagcatgantntgcgacactttagntactcaagctnctcagccaactggtttcctcactaacagtggctagtgctattatctcaaattccatagcggactgaggtaagatagtcttgttctttgactttccaagaaacaagcccaaccaactatgcctaaatatataggttgctggtntgcctttggaatcaatctgaaagagtgttccaatctgcatcattgtatccttcaagtacaacgggaaaccttttataatgtaatccaaggtttatggttcttttaaggtacctcattaccctttcaatagcgtgtcagtgctccatactangtctacttggtaacctgcataataatcctaccacataggctatggcggatctagtacaatcagtggcatacctatggctgtcaatgatacttgtgtactcagtttggtcgatacccttcaccagtgtcttaaaccaggttacacttggaatcatatgg

SEQ ID NO: 282770 - DNA, 491 bp, Glycine max
  unsure (1)..(491): unsure at all n locations
aggcggtgatgttgnnccttttgccttacgtagaactataganattaaagcatgcacccgaggagggaagtgatatttgcagctaatgaacccttttttatctatttgtccttagatnaactgtttcttttcttatatgnaaatataaataatataaggctatgccataaagacacagtcatttttacccctaacanatcttagaagtaaatatagaccatgtttttacggaataccctttacaaagatagtggaaatctcaagtgggttgcttgagtactggacgtangcacgggttgtggccgaaccaatataaaactgtgtttgcattcctcttccctatctcattatgttatgcaatcattttgccttgcttgttatagaacatattataatgattggtgtggttctctgcatctaagctatccctctaaaatattggattccactatcttgtaaaatcatacaaagttgaccaccaggacaccctn

SEQ ID NO: 282771 - DNA, 251 bp, Glycine max
tctgtacctgtcgcaagggtctgtggtttgagctcctctgtggaccaccatacagacctttgcgcttccatgcagcaagctagagcaattgatcggcctgaagcttatgctgcagatatatacgatagacctcctcacctgggagcaaataaaccacagcatgacaattatgacctctgcagcggcagatataaccctggatggaagagatagcctaaccttacatggttcatccctcaacaacaacaaca

SEQ ID NO: 282772 - DNA, 374 bp, Glycine max
  unsure (1)..(374): unsure at all n locations
ccaaagcacagcttcaaatttgggcactttagatgtatcacacaatcaaataaaggggcaactcccagattgttggaaatcagtaaagcaattactgtttcttgatttaagcagcaataaattgtcagggaagattcctatgtccatgggcgcccttgttaatatggaagccttggttttaagaaacaatggtttaatgggtgagttgccttcttctttgaagaatgcagcagtttatttatgctggacctgagtgaaaatatgttgtcnggtccaataccatcatggattggacanagtatgcagcaattgataatcttgaacatgcgaggaaatcacctctcangatatctacccattcatctcntgtattt

SEQ ID NO: 282773 - DNA, 335 bp, Glycine max
  unsure (1)..(335): unsure at all n locations
tgaaggtagcaccgtatcttcctatctgggagtcgatcatgcctcacccaacaacagatgaagccactcaagtaatgacagtggaagaagggtctcanagctgaaccttgaccatctaccaatctagcttggacagaanatttgacatagatcgatgagacgacacctccaataatgcttgaaacccatttaagagcttgtccaactgtaactcggaccaaaattggggcagtgcacgcggcttagcanggacctcaccattcatgagcattgacgcattgccgatgtgctatgcagaaatgcggatctatttacctgacaaacatctgacatgc

SEQ ID NO: 282774 - DNA, 216 bp, Glycine max
tgtccgagcagttaagcaagaccgtagaccagtacttgattatctaagcttggcagcgactcataagcaaaggctataggacgagtacaccaaggtatcaatcctacaagcagaaagggaagcaagggaaagggtgatcgattcattgcacagagaagcaatgatgtggatggacaggttcacctttactttgaatgggagtcaagagcttccccg

SEQ ID NO: 282775 - DNA, 402 bp, Glycine max
  unsure (1)..(402): unsure at all n locations
agggaatatcttgtagacnncncntncatagaaactaagcctgagaaggcagncaggtacgaggaaggtttttttctctaaagtactatagagaaggtatgtaccaaacctaactgtgacctataacacttatgatggtttttataattgacagaaattaacctaacctgttttaattatggacaatttatctaaatatagccaagggttattatataaacactattcatacccgttctgaattgagaggagtggattaactgtctgaatgtgcatctgagactcatgatatataaaatgttttataactcttccacctattatgagctgggctaagtacctaaataggtgaaatactcttcgaaacccctaaattgttggaaatgggctttctggaaggcg

SEQ ID NO: 282776 - DNA, 488 bp, Glycine max
  unsure (1)..(488): unsure at all n locations
agcttctgccatgatccccctagataccactctcagcaagcttcccgtatatcacttgggaagataattacttggattcatcaagtgattcagaaaatgaaattgcanatctaagcctcatggccaaagactatgaaacccgaagaagaggtgacatcttctaactatgatttatctatttcttttgatgaacttcaagatgcattccatgattngcataaagaatctatcaaacttgccaaattagtttcatttctaagataacccgttcanatttagaaaaagaaattttgaaattaaatgtagagttagaaaatcttcaatctcgagttaaaacattaaaatcaatagataaaaaccaaccttctacaaaatgcttaatacaagaaaacaatgaagcatctcattcatgtgaatgcgctgtataaattnanagaagaaantgtnnatttaaaaaatgctcttgcaaatttactctttgtaaaaan

SEQ ID NO: 282777 - DNA, 245 bp, Glycine max
  unsure (1)..(245): unsure at all n locations
gctcgaatctacggacacatcgacattaagtaaagtactgccctgaatttgctcaacttctgtctaatacagacctcctaattacagatcatctgactncagacaagtattgcgttgatttgctcaacatcggtgcatacgacgttaatattacggatcattcgacatcgagaaagctatgcatttatttgccaactctgttcattcgacctttgttataccgaccatccgcttcagcaaagtat

SEQ ID NO: 282778 - DNA, 269 bp, Glycine max
  unsure (1)..(269): unsure at all n locations
tttgcccgctgaaatcttctggacgaagcaaatgttgaacacaaactcttagaaagatattgagaaattggttgttctaaattcatgccatgatcacatatntatagccatttgatggctcctgaagannncntgttaaaagttgtgacttttggcaatttcttcaaaaccaatctattactttaaaaaggtgggacttgacaattatttcaaaaccagncaccttaaaagttgtgactcttgacaatttcttcaaaacactcactggt

SEQ ID NO: 282779 - DNA, 254 bp, Glycine max
  unsure (1)..(254): unsure at all n locations
tcagcagcagcctatctatccatagtagtgatggnggctttgatcagagattaaacttattcacactgaagcgcaatacacacgtagtgatcatgagctacaccatgaacagatcatcattctatcgggaaaaatccaagtctcacattgtctagagatgaaactaaaactaaacttatcagtgcgggaaaaccctcaccctatgagcttgccttagggcttagttatgccccaactagacaaccctaatggac

SEQ ID NO: 282780 - DNA, 170 bp, Glycine max
cccctaatgagcgatgacattatgccgcgtttacaacgtctgatggaaaacctgcgttcccacttatcgcttgcacacatccctttcccactgcgtatacgaagagccccaccgacgccttccacagtgccacctgatggcaaggccctgagcggatttctactaccatc

SEQ ID NO: 282781 - DNA, 434 bp, Glycine max
  unsure (1)..(434): unsure at all n locations
ccagctcgcccaggcaagctaagttgcttcctttttgaacttcctggaaggcctaagtgggcctggttgctatttgcaccccctgtttactaaatacaccccctgccatttttgctgattctttttctgtaatgttatggaactttacgaattccgtaacgatacttgttttctttccgtaatgttacggaaccttacggattatgtaatcatcccctttttggctttcggcatgtcacagaacttcacggattgcctaacgatgggtgccaagtacctcgaagcagtcaagcaaagggtgcatgccatcaaacaatggtccccagatgaaatanggtatgacagttgcccctctttacttaccttttatcggagataggangaaagcaaagttaaacactgattcgttcgtttacctctttcgaatcatctat

SEQ ID NO: 282782 - DNA, 196 bp, Glycine max
acacttatgttcataaaaacatagtgatcttagcattcacaatcacttatgacaccaatctaagcatgataaaagttaaaataaactatgagcacacatgtgtaacaccctggcaaataattacaactcatattggtagaggacactttgcgttatatcatctcgacatgtgtgtacttaatggcagagaatatat

SEQ ID NO: 282783 - DNA, 492 bp, Glycine max
  unsure (1)..(492): unsure at all n locations
ngggtgtcaagctangaggacncacncntnngntannaaacnnggcgccccatcnccgacggaagacagaggagcagnagantttgccnttctcnagagcgcgcctgcacacgcgggtctgcttccctaactgtattggacgcagccaccgaggcataatcttctatagtttggtgaagctcaagcatgggctccgtgataaaagccattcgatctttgtaggccgaccggtatgcctacaactgttcctgcactgctcttcgttatacatttgcctggaacaagtgatataagggagccctttcgactcacttagggatcgagagtcccctaagcaaccaccaatggtgagtatgccacacaaacatgaatctcgcgaagaatgagcgaagccttcggatccactcacggcacttttatagagaagaggacgaaggctaaaacctatcgttgattaaagagaacaagcttttttcaaccaagacataaaat

SEQ ID NO: 282784 - DNA, 273 bp, Glycine max
atgcatgcacctatgtggcactcagtgtcaaattttatggtcatgtgatgctaaggctcaagattcatttcctctattttaaatcaacccaatgtttccaaaatatgttcttttatccatttgtgcattcatccgaatccatttcgggcgttcgggataattttcacaacggtcacccttcaagtgtatacacacttttttcttcaaaattggttatgaattttttcaaagaaaagttggaagtcatctcttttcaaaagcatgttggttttt

SEQ ID NO: 282785 - DNA, 361 bp, Glycine max
  unsure (1)..(361): unsure at all n locations
ctcctctaatgactatggcatcatttctggcgctaaactgttgggagttggaagccatcttctcaattaaatntctggcttcagcaggagtcatgtctccaaaggctccaccactggcaacatctatcatacttctctccatattactgagtccttcataaaaatattggagaagaggctattctgaaatctgatggtgggggcaactggcacataatttcttaaatctctcccagtactcatacaggctctctccactgagttgtctaatacctgagatatccttcccgatggttgtggtccctgaagcaagaaattttttttctaagaatactctcttaaggtcattccaactcgtgat

SEQ ID NO: 282786 - DNA, 300 bp, Glycine max
  unsure (1)..(300): unsure at all n locations
gataaaagggatgccccacattatttccatgacacaaatgcaaaaatgatgatttggaaattttatgcaaaactggttatgcatgcacctatgcggacgctcaagtgtncaaatttatggtcatgtgatgctagggctcaagattcatttcctctattttaaatcaacccaatgtttccaaaatatgttcttttatcgatttgtgcattcctccaagtccacttcgggcgtccggggaaattttcacagcattcacccttcagatgtagacacttttttttttccaaaaactagctatga

SEQ ID NO: 282787 - DNA, 273 bp, Glycine max
aagtaacaagttggcaaagaagcaaaccgaatcgacaagcaaagtacataaattctgtagaagcgagcttcatgatgaatcaagattgattcaaagaagttctgatgataacaaagctgatgacaaaaagctcaaaggtcaagaacacttcatgataacaaagatgatgatctccagaatcaaagaatgagttcaagattgaatcaagaacacttcaaggttcaagaggaaatttgatttcaagaatcaagaatcaagtttcaagattcaagt

SEQ ID NO: 282788 - DNA, 267 bp, Glycine max
ctccatgagaggcgggatcacatggagaatatatatcataatgaagaagaaaggaggagaagagggaatgatcgtgttcctatacaaaaccgaattgatggtattaaactcaacattcctccatttataggaaagaatgatccggaggcctacttggagtgtgagatgaaaatagagcatgtcttctcatgcaacaactatgatgaggaccacaatgtgaagcttgccgccacggagatttcccactatactcttgtgtggggaaca

SEQ ID NO: 282789 - DNA, 358 bp, Glycine max
  unsure (1)..(358): unsure at all n locations
tataaggaaattgacggttatcttctaaaaagaaggttttaagaagagtgaaaatgaagtcactttgtatgtgaagtgataaaaaaatgaagtgcaactcattggttctttatatgttgatgatttattntttatatatagggtatcaaattccttaaaccaaatcaagaatgatatatatgaagaaatttgaaattatagatttggcaaaaatgaaatttggaatggagaatctcactactagaaaatggcgttntacgacacagacactacgacgattatgggggaaccgccttaaaaagatgtgcggtggctttttgtaattatttgacaatattaggatttacgatttaaatta

SEQ ID NO: 282790 - DNA, 217 bp, Glycine max
  unsure (1)..(217): unsure at all n locations
tatgtggcagggcgggcttacttcaccttcttgtttcttctcgaactttgaccattgttcttccttcccgcgatgcttcttttcatgtctgcctgagtgggcttatagcctanaccatacttcccacgattaccttgngtatttatcagtctagttatgccgccgttgttttttcctaaacccatcccgggctcataaccgttccccaacataactc

SEQ ID NO: 282791 - DNA, 411 bp, Glycine max
  unsure (1)..(411): unsure at all n locations
atcttcttcatcaatggagtccgttgctttttgtatatcaatgacagtggaatgcagaaggaggaaaggtgattggagatgccacttcaaggagaagagagtcaagaacaagttcaccaccataggaagccatggataagagcttgaaggttggagaagatgagtggagggagagggagagaatgggcacgaaatttatgcctcgaatgaggtctaaaatttgaagtgtaatttctcanatgatcaaagtagaaataatgcacacaacaggcctctatttatagcctaagtgtcacatgaaattggagggaaatttgaattttattcaaatttcacttgaatttaaatttgtggagctaaatttggagcctaaagttcactaattatgaatagtgaaatttanctatggtt

SEQ ID NO: 282792 - DNA, 288 bp, Glycine max
agatggaccatttcaagtgcttgaaagaattatgacaattcttacaaagtaagctacccggtgagtataatgttagttccacctttcatgtctctaacttatctctttttgatgcagatggagaatccgatttgggaccaatccttctcaagagggagagaatgatgacgaaatgaccaagagcaagggcaaggatccacttgaaagacttggacgacctatgacaagggttagagcaaggaaagccaaggaagctcttcaacaagtgttggccatactatttgaata

SEQ ID NO: 282793 - DNA, 226 bp, Glycine max
attctacatcgatgagatcgatgcaaagactatcactcgcagctagtcgttcactcacaatgtaagatcatactctcaccgcgtctggaacaagctgttctttctcaataaatgtgtctattgactaaccattctaattgcagacttacatacttgctctttctttgtgcaacacacatacttgctcagactcatgaagagaaacatagactgcatcataatcatg

SEQ ID NO: 282794 - DNA, 231 bp, Glycine max
tatgctttcaatggtggagctctttgagacatgacccctgctggagccacaaatttaattgagatgatgacttccaactcccagtaattcagtgccattaatgatgctattatcattagaagagtgcatgaagtagcccaaatttttcttcatgatgtgagactaacacacttgaacgtgaactacattaacttgggtagacctattacccaactgaccatgaatgaaaaa

SEQ ID NO: 282795 - DNA, 314 bp, Glycine max
  unsure (1)..(314): unsure at all n locations
cccaaacaccttgaccacgaatctcttctcttaatgctttgttccaatcctcgacctcaaagcaatatttatatgttaattctttttgtggaccttgggctcataacttaagaggatggcttagangcagaagaagcacaatcaattaatagtgtctttaaataagatagggaagagagaatgctatacagtttatactgttcgacacaacccgtgcctactcagtactaagcacccattgagattttatattttgaaaaatcattacaactctgaccacacagacaaccatccttggtcaagaatctacactc

SEQ ID NO: 282796 - DNA, 146 bp, Glycine max
  unsure (1)..(146): unsure at all n locations
tcaaagtctgacaagagtatgatgaactaagggacgtccatatggccaccgctgaagccttggaacgagaaaccaagaaggcccgaaaggaagaacacgtgccagcaaagttntgaggggctttatacggcagcaatagtaagctc

SEQ ID NO: 282797 - DNA, 277 bp, Glycine max
gctataactcttccatgttgtttgttgaccacacatgtatattctataaaagcaaaaccttgactggcatttcaataactttttagaacaacttcttagaatttcttgaacaacttttgagaaatcttgacacattggctacttatctttcttcttcttcctttgccaaaagctgtctaagttttctggtttacaaaccttattctttcacataaaacaaaagcgtgatatatctctatattctctgctccctttgccgaatagaatggaccacgac

SEQ ID NO: 282798 - DNA, 172 bp, Glycine max
tccactgtcgctgatccgcagagtgttcaagtcaaccaagcatgtgttggcagccccattccatggctcaatgaaggtactgattgcgcattctcttgtcctatagttaaagggaatcaactattgataatggattcggaggttacaggtcatatttgcacatccattgact

SEQ ID NO: 282799 - DNA, 218 bp, Glycine max
  unsure (1)..(218): unsure at all n locations
cccagattattaacactnatactcttgattcacaaacacaaagttgacatgatgccaattcaaacctanagaaggacaccactaacgcaatacatcaacttttctaacaagaagaaacttgcatagaaatatgtcatcaaattcacactcaatatatcactgtgattctttctggatatgaaagctcattctttatttttatgaaaattgtataatat

SEQ ID NO: 282800 - DNA, 381 bp, Glycine max
  unsure (1)..(381): unsure at all n locations
agttgacgtttatgtggcctgccaggagaccagtcttcttcctctagagggggtggggcctccacaacccaggagcctgtgactaaagagcctgcagcagaggaagagaccactccagctcagactcctcagccatctccaccatctgaacctgctcctgacgagactcaaccatcatcagcactggatcttaatgaagaccagccacaggaggagcanngacgtttaatttttttttttgcattatgaacactttagttttatttcagttattttatgctttatgtcatttaaatntcagcttttatatttcagtaacatagttgtttgtttgcttgaacaaaaagcttgatngaacagtgaattgattgacattgcatg

SEQ ID NO: 282801 - DNA, 348 bp, Glycine max
  unsure (1)..(348): unsure at all n locations
ctctcttgttcaaaagattttggacatgttctatggtcttcanacctttgttggtgaaaggtttgatactttgtagttacaagtggacatgtgattcaatgagatggagtcaacgatcatcaaggttgaagaagatgtttcttacattcgtacaagctttgatctaccaccaccaccgccaccatcatcttaggtgtctattatgtntaataatattagtactttgaattctaaccggggatttggctatattattatgacagttgaacaatttaatatttcttttatttgcatagtatgattgaacaattatgaattatgttatatgactatgagggttttatatat

SEQ ID NO: 282802 - DNA, 405 bp, Glycine max
  unsure (1)..(405): unsure at all n locations
ttctagccaaatggacttaccttgaattaattccttttattttccttttgagccttgtttccctttccttgttttgaagctcgctacaagccttaagtgaaaaaccatgatattaccatatccttaaagaattttggagctttggaattgttttgggaataagtgtcgggggtttttgtttcattggacaacttgttttgttggctatgcttcatgatgtattttgggccatacttgatgtacattgtatattggttaaatgttggacatgctgaatgaaatgttgtttctcaaaggctaaagagtcaaaaaaaattcgaaaaaagaaaaagaaaagcaataaagttgagtgaataagatcttaaatggcacaagaatgatgaaactcttnggtctactcttcat

SEQ ID NO: 282803 - DNA, 254 bp, Glycine max
gccttcagatgagatcttggctgaaacttttttttacttcccctaatttacggcctatatattctgagaggatgctctgcgcatacaagtggagctcctgctctgctaaattccctgttttcatgttctttgctgagaagcattaaacctcttgtgaccgtaaccattgtctcttactttttgagaaatggaactcagatcagcggctgaaatcttaatgggagagatctttaggaaatcgaagtttggtctat

SEQ ID NO: 282804 - DNA, 494 bp, Glycine max
  unsure (1)..(494): unsure at all n locations
nnnnntttcccgggttcagnacgtacngncnnntcactatagaaaccccaagcttgcttaaggcgtaggaccttataacgagttttagttattttttgctgacanagcttgatttgcgagtggattctagctctagtttcacttacgtaattagtcaattcattcaacgaaacttccaaagacaaacgtccgattgattttttgcatatttattcaaagaattgtgattaatttatattatctttaagaaattngattatggtatattatttatggaaaagtacgaaagcttgcggaagcatatatgacttcattntctttcttttactcttccctttcagcactatcaagtgatatatgcttacccaacgttntcngannatntacggaaacattacggaagtcccggaagcccgagaagccatttttcacaaaacatgggacgaggtgctgcgcagtcgcccaaaaagctaagttgtttcaccttaacaagg

SEQ ID NO: 282805 - DNA, 363 bp, Glycine max
  unsure (1)..(363): unsure at all n locations
agctaccttggnttatactctgcccagccttcgttaaccgttggatcttctcaaaacttggtttgctactttaaaagacacttgtccatgatctgacagttgggatctttgagaagatgtttggagtcttagaagcttccgttcccgagagcatctcttatttaaacattttagcctttgctttcgtgtagttgaggaaaaacgtcatttcttcttctttctttcttccaaagccatttctaaagttccgagaactttctccatcacacacagcctccattagccaccacaaaccatcattgttctccattgaaaacccacaccgagaggaacccttcaaccgaagcggaatcttccaacttg

SEQ ID NO: 282806 - DNA, 392 bp, Glycine max
  unsure (1)..(392): unsure at all n locations
agcttagtcttgttcaacctaccatccttagactgatggccaaactgaatggaccattcagttgttggaggatcttttgagagcgtgtgtcttagagcaaaagggaagttgggagagttttctgccattgatagagttcacttataacaatagttttcactctacgattggcatggctccctatgaagctctgtatggtagaaggtgtaggacacctgtcataccctaatttcgttcggggaccagctgtttgttgggatgcgaccctcgtttgaccacttcgaggtacttggcacccatcgttaggcaattcgtgaagttctgtgacatgccggaagtcaaaagatagcatntgtgcacaattcgtgaagttccgtgatgtgccggaagtc

SEQ ID NO: 282807 - DNA, 416 bp, Glycine max
  unsure (1)..(416): unsure at all n locations
agcttctatccttatagacttaccttgacttaattcctttgatagcccttttgagccttgtttccctttccttgttttgaagctcactacaagccttaagtgaaaaaccatgatatcaccatatccttaaggaattttggagctttggaattgttttgggaataagtgtgggggtttttgtttcattggataacatgttttgttggccatgcttcatgatatattttgagccatacttgatgtacattgcatattggttaaatgttggacatgctgaatatgatgttgtttctcaaaggctacagaaaaaaaaattataaaaaaaaaatcgaaaaagaaaaagaaaagcagtaaagttgagtgaataagatcttanatgacanaagaatgatgagactcatggttctactctttat

SEQ ID NO: 282808 - DNA, 342 bp, Glycine max
  unsure (1)..(342): unsure at all n locations
agctggngtgggtataggcaaaagcatcggcggatcaaggagaatgggcttctttcacggatgtcttggcatcattgatattcggagtcatcctttttccagatgtggatgggctagtatacctagcggcgatggatgccttccttgcttatcaccatagcaaggaaagtccgatcgctgctatgttggctgctgtctatgacacgttcgaccgaagatgcgaatagagcaacgcgataattgtctgtggaacacctgctctctatgtgtggctagcctcacacctctattgccatgaaagtaaacccatctgtcccctgcaaggtcaccgcatttgcgccg

SEQ ID NO: 282809 - DNA, 344 bp, Glycine max
gtatgaaatccactcgacaaggtttgaagtagaagagaaccttcatcctataacgcaacgtggcggacaaaaatgggtagttaacttgaatgaccattattgtcaatgcggaaggtattctgcgcttcactatccatgttcacacattattgcagcttgtggttacgtgatcatgaactactaccaatatatagatattgtttacaccaatgaacacatcttataagcatactccgcacagtggtggcctcttgggaatgaagcggcaattccttcttctgatgtggcatggacactaatccctgacccaactacaattcgtgcgaaaggtcggccaaaatcaa

SEQ ID NO: 282810 - DNA, 487 bp, Glycine max
  unsure (1)..(487): unsure at all n locations
agggannatnnnnncttttgttcgtacacgtcgagttcgagctcagcccgcggcgatgcgatacagtcgagctgaccgcgtggcaggcaagcttgcttttaatctgccctacctgaacgaaggagtggatatttaccttattgatttagctccacatctaacactagcgcaaggataaaagctaatgggggtcctggagatgtctataccctcaggagagggcgcacttaacaatatttgtcactctaacacatttaactctacatatgaataattgtagagcataaggtggaggactactgtcttactgtgattaacatctgtgaccgacgggtagagtgatcaaacctcatacgccattacgagcactaggatccaagacttgctgaagaccagactgtgagacgcgcacccggagaaagaattcacgcatttgaaagtccgtgagaccagaatctaaacgactgtaatgtctattaggaagaan

SEQ ID NO: 282811 - DNA, 167 bp, Glycine max
agcttcattcgcacattctctctcgtaagacgaggcgcagactaaacagcattattgtaacaacataagaaaaaccaagactgagtgcgcagatccctcttgtaagactaaagagcgatcctacttcgatcaagttcgaatgcaacagtacatttcccaatgctaaa

SEQ ID NO: 282812 - DNA, 253 bp, Glycine max
agcgtgccttccagctcacccaggcgagcaacggggcttcctccataagcaacagccttctggaggaatcttctggagggcccaagtgggcctggttgctatttgcacccccttgtatactaaatgcactccctcctttctatttatttgtaattctttttccgtaacgttacgaaactttacgaatttctgaacgataattattttccttccgcaaggatacgaatccttacggattatgtatttactcttt

SEQ ID NO: 282813 - DNA, 311 bp, Glycine max
  unsure (1)..(311): unsure at all n locations
agcttttatagtgatgtttgtannngancnccnactcacaagcaaaagagacatagaggaacgaagacaaataaaagaaagaaataaggaatagagggaggctcttgcacgtttatatccacccctcttttattaaatagttttgttgtttacacccagttcctctaaacacctccccttctatatccaaagtttacaaataaagtccaacactttcacaacctacactttaagccctacaactntatggaaactatcaacaatactatggcgattaataaancataacgattgttattaaaattttcata

SEQ ID NO: 282814 - DNA, 275 bp, Glycine max
  unsure (1)..(275): unsure at all n locations
agtttctttgttatatcttcgatcggacatctcgccaggccgaggtcgaccgtcattattttcgatccattacggngaataatatttttttgccgagatgggctaatgtattcctggccgaataaatgggaaaatgccagtgtcggccgaaacgaaaagtcggctgagctcgcacaaaaaaacctagccgacctacattttaaatttttcatgcaaccccaaaacaagaaaacttcctgtgccgtataaaaaaaaaaaaaacattacatgacagc

SEQ ID NO: 282815 - DNA, 434 bp, Glycine max
  unsure (1)..(434): unsure at all n locations
nacgtttgtttcttgacttganacnagnacnggaggtcagcgacgcaggggcgggcgagtttgttttcnattctctcagggaccagcgggcgatgaggtgcagtgctncacactctatactccatgtataatggtctcatgatcgcgtctccatcggcatccaagtaagcaactggcttgagtcgcggtagtttttcgaatcattatccttacggtagataattgatagacaatttttcacatatctggtcacatcggcgtcttaggtcgaggttgaacactagggcggcgcgcgattaaggaccccatggggcatgcctgtagacggaaacccctttactggttaatactaagaacgactggccaccgccttgctagtggtcagccactgcaagtgtaattctggagacgctcgaccggccttcagcggtccg

SEQ ID NO: 282816 - DNA, 487 bp, Glycine max
  unsure (1)..(487): unsure at all n locations
nggaagttagtttcattgatgctctttgnananacncnnngaacccgaggancgnacacagggaacccgcagagagcgaccgcgaagcgtgcttttttnattcgcaanggacngaccagggagcgagcgcggaagaaaccgaacngaccaggaaaccacgaaacggcanggaggcaacaagaggccaagggngaaacaccgcggnaccaccanagcgccgaagaaggagggagcgacgagaaagcgcagggaaaagagagggggggacgcaangaccaagagagacgaagaacgacggccaggcacaacaaaaggcgccggaccagacgcagagacacgaggaaaggggaaaaagccggccacgccggcagagggagnngccaaaggcgacgaggcgacccaccacaacaaagacccacccccgcacaacaacagagcaaccgcaccgngccgaaaggacagaaacccccgcaaggcgcagcccggn

SEQ ID NO: 282817 - DNA, 398 bp, Glycine max
  unsure (1)..(398): unsure at all n locations
agcttttatctcttgtgcttgtgcctacattngttcttttgtgcatttttctgcctgtgctttaagttatcttctgcatcctttttgctctcatcttgcatttccatcacaatccaagtaagcttcttgctttattttcattttcttttcgaaacttaaaccttagggtagataatttattgctttttagtttacatttctgtttagctttagtgtttttaggtttagggttcacaatatagggtttaggtaagattttagagccccataagggcaatgcctgtaagagggagaagcccctcatttctgctagaaatcgcgatgaacgtgctaagcacaccagctatgcttagttggttcatcgcaactgacanaattttagatttctcgatgatcgc

SEQ ID NO: 282818 - DNA, 332 bp, Glycine max
cgctgaacaaaacatacatggaactggtgtaggtattaatgtctacatgagtctgaaagcagcacatcatcaaaacaacattctgctcgctctgaaagaaagacatatggacctgatgaaacgtgaaaacaaacatgctattagattgttgattcaatcacaccataatttacaacttggtttattttttaggagagaagagtaacgtaaaaaaaaagaagaagttaatgaacctgagattttcctttgacacgagtggctatgatggagaggccttgcagccattcctcacggttgaagtgtccatctgcaaagaagccattcccatcatt

SEQ ID NO: 282819 - DNA, 397 bp, Glycine max
  unsure (1)..(397): unsure at all n locations
agctngtgtgttatttgtgtttgcaagtaaatgatgaatgagcgagcgcatagcacaatgaatntaagatgaaacgacgtagttggcagtgaggcaggaggagtttatggttttagcattgttgttcttgagttgtgttgaatctggagagagagatgaataattgtatagcaaagagacgtgagaatgcgaggagcagtagagaggaagatcaactgatagtgactccattaggcgctggaaatgaagttgagtcttgttcgattgtggaatacacccggcttactctggcatggctgctttgccctatttcgacgagattgacccttccatagtcaatgttcttctcatcactcactttcacttggatcatgctgcttccttgccctattttctc

SEQ ID NO: 282820 - DNA, 415 bp, Glycine max
  unsure (1)..(415): unsure at all n locations
agcttcatttattttacatatttcttcaccaaaaaaaatctttaccataaaaaagtaacttatttgattaattaataaatttcaaatattaaatcaaaaaatacaaaacaaaaaagttgttaataattttttcgaaagcatgccacatttttatttaatgtttttaaagaaccccccttggtactagtactgcttcaccttggcttttcctcggaaataataggaaaatatttggttaaattggtttttttcttctcaaatttgatcttttattataaaaaaacgtagacaaaaaagttaaaataagctntgtttcatttaatactaaaatatttatgacatanaaatatataatattatntaatattcaaaaaatgaatatgtntattaaaaatggatatcatgattacaaaga

SEQ ID NO: 282821 - DNA, 354 bp, Glycine max
  unsure (1)..(354): unsure at all n locations
agctnagattcttctattacttccatacatnggctntgaacaccatgaggaaattcgcacaanacactgaattggtgagacacaaagttacaagatttgctaccactttcttaactntgcaaagattgcataagcaaaaggccaatcttagaaggatgtttacttcggatgaatggttgaagtctaaggaagctaaagagtctaaggggaagcaagcaacaaatgttgttcttatgccatcattttggaatgatgttgtctacattttaaaggctatanggcctcttgtaagtgtgttgaggttggtggaataatgaaaaaacctgcaatgggtttcatttatgaagcaatgga

SEQ ID NO: 282822 - DNA, 224 bp, Glycine max
cgaccgcgcaggcaggcaagcttggttatccagcgactaaaccccaacgagcgccgggcagtgatggaaatcttgacacccacctgcgaacagattgtcgaggggaacacaccagacgggccaaactggaaaccacaagccacagtgcctgatgatggctgccgacacattcaaccaacggcccgtgaccacgaggattctcacggacctcgatatgtcacaag

SEQ ID NO: 282823 - DNA, 398 bp, Glycine max
agctttattctcattgtctctcacagtctttagattttgggagccaatccaatccttgtgttcggactctcagccacttatgatagccgccgatgatcccattactgcttcccctaagctctctgtcctttcttcacgtcgcatcccatgccttgcgaactccttggagtaccctcgcgttgtggtcactgaaaccccgtgtgatgaaaggtgtgatgcttttgtctgatggcactcctctcatggggtagccaagtggtcttatggcgaggacgggattataattaatacaaccccttgttcccatcaagggaacatttggacatccttcgcatgaagatagaatcctgattcttccttccttctagcgagggaaccaattaacagatgctccttct

SEQ ID NO: 282824 - DNA, 335 bp, Glycine max
gtgcaagcgacattttattttatcttttttcttcaccaaaaaagagctggaccataaagaagtaactcattcgactaattaacaagctccaaacatgagagcagacagctacacaccgaaaaagctgttactaatcttttcgaaagcatgccacatttttatagaatgttctgaaagaaccccccttggtactagaactgctacaccttggcttttcctcggaaatcagaggaaaatattcggttaaattggttcttttcttctcagatacgatcttttactatgaacaggcgtagacaaaaaagttaaatgcagctttgtttcatttaatacta

SEQ ID NO: 282825 - DNA, 388 bp, Glycine max
  unsure (1)..(388): unsure at all n locations
agcttcgttgattgttcgggactgcgngagcaagcacctctactcctccgccatcttcttcgccgacaaagtggcagccttcaccgccgaccccgcagacatctacatgcaggcccaggccctcttcctcggccgccactaccgtcgcgccttccacctgctcaacgcatccaaaatcgtcctcaccgacctccgattccgctacctcgccgccaagtgcctcgtattcttctggttccttctctcttttttcatttgattattgattaaaaccattcattgaaaatacacatcaattctaataatgggatgtctttttctatttttatttanacgagttgaaacgtgattcttgaatgaattcagatagtatgagttacaacttata

SEQ ID NO: 282826 - DNA, 297 bp, Glycine max
aatgagaggaacatgaaagataaattataccttaagtaacattgtgatactttctaatattaagaacttaaatgacaacaaaatacattctgaagatcaagatgatgatgataaaagaacattgcatagcataagaaaaacactctaagagtgtgtatgatttatatgagagaggtagaagacattcaaaaaatataattttgtattaaaataatatgtaagaaacatgaatttgacatgataaaatacagaatgtctctgttatttagttattggcgaaacaaacacacccgaagt

SEQ ID NO: 282827 - DNA, 510 bp, Glycine max
  unsure (1)..(510): unsure at all n locations
nnnattcgtgggctttcgtttgatncnntgaanaaacnggnaacnggagctgggaccagggagccgaagagaggacaccgaggcttgctttctgtttctgacaanccncaagagcgggacagcgcgtgaacaacatacgtgcgcaccactcaaccagtatatgaggcgtcggcgaccgagcccaacaaagcacgctcgaaacctactggacatgcgacaccccgcagcccgtgcctggcgagcgccacagagcacccaaaccttgaggacacagaaacaccaggtgaggagcagggggacgcaatagaccgatggcgcgcctaacaccgagtagcctagtgtgcttaaggcgcggacaggacaagaaccaatacgtgcactcgggccaccaaaggaacataaggacagcctacacatgacgatagaatgcggattcgctcctccatcgagcgacggaaccaaataacagatgctccttaaatggctagactagagtcagacccacaatcg

SEQ ID NO: 282828 - DNA, 306 bp, Glycine max
  unsure (1)..(306): unsure at all n locations
atcttattctacgcttagnnctcaaagaactacgtaggtctgatttccttatcacaattgacgaatacgtatgagcaagggaaacacccttgtcgaccccaaaaaagataaaaaaaatgtaaaaaagcacaaaaagacataaagacgtaaaagggaacataaaacaaattgaagtcatatttgcacacttgattaaaggttgtcgtcccttgtgacggacgcgtggggtgctaataccttccctgtgcgtaagtataactcccggacctttcacttaaattntgtagaccacacctttccagtttt

SEQ ID NO: 282829 - DNA, 431 bp, Glycine max
agcttctttgttatacctcgatcggtcatctttccaggccgaggtcgaccgtcatttttttcgatccatttcggtgaataatatttttttgccgagatgggctaatgttttcctggccgaataaatgggaaaatgccagtttcggccgaaacgaaaagtcggttgagctcgcacaaaaaaacctagccgacctacattttaaatttttcatgcaaccccaaaacaagaaaacttcctgtgccgtaaaaaaaaaaaaaaaacattacatgacagcgagcgttttgaaaaacaaaattgcgcaacgtcggctgaaaaatatcagtcggggcttcttcacgaccgatgtcggctattgagttttcaattcaatccgtgaacgaaatttgcatgatgtcggttaggaaatgttcgatcggcatcatcctgtgaag

SEQ ID NO: 282830 - DNA, 408 bp, Glycine max
agctatagttatatacttactaatcatagctacaaccttccgattaaggagctcccattcgttgtctttcttccctttcatcttattcttatgggtgattgactcgtgcaaatccttgcagtacagatgattttccatcattgacttccaataggagtaactttttgcaattagcttgaaaatatctgcatcatgagtgatagctccctccatcttgaatcacacaggataatagctccccccaaatcaagcaagctctgataccactattgggaaacactagctctatttccctctctgtagactcaaaatagacacttagcggaaatgaacaaaaaaaatagaatagagagtagaagaatgacacacacgaatcttaacgtcggaaatcctttcagagtgaaagat

SEQ ID NO: 282831 - DNA, 480 bp, Glycine max
  unsure (1)..(480): unsure at all n locations
ngacgtaggcattgagatngtaanaccacaatcagcaggtcacagggaccgaggacgcacgcgaagatgcctcttcaattaattcngcaancgccgaggaaggactgggaagagtttcctacacaatagcgaccacagagaaacacggggaacaacgtggagctcacctgaaaaaaagaggaaggtaggaggcgaacatgccgatactcagtccaggggccatttatcaaaagagaaangaataagaccttgaatacaagtcaactcacaaagcatagatacgatgggagataaaacgctggctcagagcatatatggcaacggcaacctgaaccaattggttggatagaaccaccgtcaacataatcacccgattatctgtaaaaggctagggcaggaatggcagaaccactctactgcatagaagcgccagaaagcaaacaaatgacctggcctngataaggatagtaagcaaatggn

SEQ ID NO: 282832 - DNA, 421 bp, Glycine max
  unsure (1)..(421): unsure at all n locations
agcttccattgattcacataactcccatccactggatccgcccttatttcctccatcagaaacttgtaagcagtgttggtcgaataaataccactcgaatgttgcttccaaatccaagaatctgctccatgttgttgaattgatatcagtcctatatcctataggaattctgcagccattgaagcttcactatcgaataggtttctcctccaattgaaattccattcccacccttcctccttgtggcttcccatgagtctgatagtttgttgttgttggttagaaacttgatacagcgtangaaatttgtccattaaagttctgtccccccctaaccatttgtcatcnccaaatctggtcatgtcttcacaatgcaccttccactctatttgatccttatttttattcactcctctatttg

SEQ ID NO: 282833 - DNA, 270 bp, Glycine max
  unsure (1)..(270): unsure at all n locations
agcttatttttctttatttataacgaacacagaagacgnnagaactgcgttgaacctccagcctacattcacacgatctggaacatggcacaactacacgtctagacacagagcttgtacagagctnatntncacccgcaacacgaaaacaagattacatggaaatatgaatatatactgtgttgagctagacctagaaacgttcaagaagatactgtcggtatgttgcactaactaattcaaataacatgctnttcgagcctatatata

SEQ ID NO: 282834 - DNA, 403 bp, Glycine max
agcttgcattctataccttcgaccaaacacttgcgtgtgtatgtctcggcccggatttaacgcgggttgcaacaccggctccgcttccctaactgtactataggcggctgccgcggctatatcctctatagttttctggagttgtaacatgacctccgatatggaagccatttgatcttttaaagtcgatagatcagccttcatctgctcctgcatgccctcttcattatccattcttctggatcgagtgttatacgggtgccttggtgttttcttatttatgatgaaattcctaaagaaataaacaacagtgagtatgccaccaaaacatgaatatgctaatgaatgatcgaagcactcggatccaccccaaggtttctatattacatgatgagatcagaac

SEQ ID NO: 282835 - DNA, 424 bp, Glycine max
  unsure (1)..(424): unsure at all n locations
agcttgcgtactataccttcgatcgaacacagccgtgtttctgtctaggcccggattcaaggcaggctgcagcaccggctccgcttccctaactgtactggaggcggttgcggtggctttatcctctatggttttctggagttttaacatgacctccgagatggaagccatttgatcttttaaggccgatagatcgaccttcatctattcctgcatgccctcttcattatccattttttggatcgagtgttataggggtgccttggtgttttcttacttatgatgaaattcctaaagaaataaacaacggtgagtatgccaccaaaacatgagtatgcaaatggatgatcggagcacttggatccaccccaagatttttagataacgtaatgagtccagaacttctcattntataaaaagaaca

SEQ ID NO: 282836 - DNA, 184 bp, Glycine max
gactaatgaaatctcaatcaatctaatacgagatacgatgttctaggaatttttaaattagttataatcctatgaatatgcgttttattttatggatctcagtgataatgcacttcttaaatgctaatctcaatttctgttcaagctacaaactcttttccactatagattttcaacctacaac

SEQ ID NO: 282837 - DNA, 362 bp, Glycine max
  unsure (1)..(362): unsure at all n locations
agcttctctaatattatgcgcctgaatcagacttccgtttcaaaagttatgaccatatgaatttctccactgtattccgtgtgacaagttatgaccatttgaatttctcgatagcattcgttgttcaatttcgagcgtctcgatatattatgcgcctgaatcggacttccgtgtgacaagttatgaccatttngaattgtcgagagcatccgttgttaaatttcgagtatctcgatatattatgcgcctgaatcggacatccgtgtgacaagttatggccatatgaatttctcgagagcattcgttgttcaatttcgagcgtctcgatatattctgcgccttaatcggacttccgggcgaca

SEQ ID NO: 282838 - DNA, 379 bp, Glycine max
agaagaggggggcttgcattgccttttacctcaatagacaagatttgcaagtggttgaagaaaaactttataggcagtttcgtgtcagtccaaaagatggtattaaagtgttgcttgataaatctcttataaagattaatgagcatggtcgggtgataatgcatgacttgacacaaaacatggttaaagataatggtgacattacaacttgacacagaacatggttggagataatgcctaaaccataatatcatttcaaacaaggtgttacaatcgtttggagaaaacactgtaagactgatatagatggtttgggtttgtaatcttttactttgatacatctcatttatcaatgggagttcatcatttattgatgtta

SEQ ID NO: 282839 - DNA, 203 bp, Glycine max
ggcttgcttcttcttatttcagagaaaagatgaatacttggctacttcatgcactcctctaatgacaatagcatcgtgtctggcactaaattgctgggagttggaagccatcttctcaattaaatttctggcttcagcaggggtcatgtctccaagtgctccaccactagcagcatctatcatacttctctccatgatactga

SEQ ID NO: 282840 - DNA, 359 bp, Glycine max
  unsure (1)..(359): unsure at all n locations
tttctaatgatcaaaangcctcaatcattccaaaatgcatgtgaattaagaagcatcaacaagaatcaagccaaggctattgtgcaagcaatcaatggggcaaaacacaccaaatgattatgatgatggatgactcaaattctcacaaaggtaaactcatcactttcaaattaagctttcataactatcatgacatgtataggagaatcaaggatttcaagtcacaaaatgtcaagaacctttattattaaaacaattacccatttcttaaacatatcctataattcaaagaaaaacatgccaaagtcgacatgcacacaaaattgacccacaatattaaactataaatccacgaaact

SEQ ID NO: 282841 - DNA, 343 bp, Glycine max
  unsure (1)..(343): unsure at all n locations
agcttgatatgattaagtgtataagggtgaaacttcctgcttttattcgttgaccacagagtggtacctggagatatgtcgcgggggtcaggagaccttggggacgtcaggtggggtgctattgcccaaaagcaagcttgaccaatcccgacccaacccgggcatagtcagtcagtgagaacctgtgatgtacctaaacaggcgagctcctggccgtcaatagataaaagaataaagaccacaaagcaaggaggcttgtgtggtggctggccagctgtgaactntgagtgttatatgggatatggcctctggtaatcgattaccaaggatgggtaatcgatta

SEQ ID NO: 282842 - DNA, 485 bp, Glycine max
  unsure (1)..(485): unsure at all n locations
agacgtctgactctgntactnncacantaannaagacccgcgagncgaagagggacctgcagggagcgagcaggtgtgttatcccaacaggaacccaacgaggcgaatccagagcaaagcccggcccccacccccacagagagaaacatacaggagccgccagcctgacccagagacatgacgcgacgtggggcgcggccacgaagccaagaagcaggacaggagcggcccgcaggacccaggggcgaccatcaagcatagcgccacgaggaagggacctgaacacatgcaaacgtagcgaggacgctgaggcgaacgacccccgcaggctacaaacacgagagggcgacaagcgcaaggcccatgaggaaagagcaacgtgcggcacggcggtcgcgaaagcagacgaacggagccgacgcgaacgccagagcaccggaataaagcacgagccgacgcgacgagaagcgcggctagagaggacc

SEQ ID NO: 282843 - DNA, 377 bp, Glycine max
  unsure (1)..(377): unsure at all n locations
gactaccgatccgagantctgaaacacaanaccngaganggacacaggaacccgacggagagagccaagcttgatatactttattggaacacagcagcggaggacagcactgacgccacacacaagaagggcaccctgggacgagcccggggcaccaacgaggggaaaccagagcggggacgtagagagggacaaacgacggcaggaccgaccaaacagagaggagggagggctcacgagccacgaaaacggggacccgatagcgacaaccccggaccaaagacccagggaccaaagagggaaaaaccgccagaaggcccaaagaaggaaaacaccagcagcccgaaagaagaaccaccggaaagccaggcctgacc

SEQ ID NO: 282844 - DNA, 401 bp, Glycine max
  unsure (1)..(401): unsure at all n locations
agcttctctatcttatatgcatcttgtggctataaaagtcaaaaattaaatatatccctgctagcctaagtatttttaagtgaataaccagaataacttgaacaagtaattcaaagaatcagcaacatacctcagcaggccaggcatcagactccttcaaactcacatttgtctccaactgcttgaattcaggatagatacaagcactagaggcataaaaaaacctaaaaaaaataaaccaaaaaacaaggatcactatgacggcgacataaagactatatcatgcaattgaaagtgacataataacacatgtntgttcaaaatgaatgacctcttaacaccattgatcctggcagcctcaatcatgttgaagctaatcatggtgttgttgtacataatga

SEQ ID NO: 282845 - DNA, 109 bp, Glycine max
  unsure (1)..(109): unsure at all n locations
agcttgctctatattacattgatgtttgtatntattggaggggtttgtatgccattttttgttttaagggtagcgtttcttggtaaaactaactttccaaacgtttgcc

SEQ ID NO: 282846 - DNA, 168 bp, Glycine max
gtggcggctgaccaactgtgaactttgagaggtaaaagggatatgagctccggtaatcgactaccaaggatgggacacgagtacaacgctcacaaggaagacagcgaaccatgacggctcagatatccctacccctcggacgcatcaaacaccgagatgaaaaacgaa

SEQ ID NO: 282847 - DNA, 127 bp, Glycine max
taccacccaccggaccctagcaccgagagcgctgttttgttctagagaagaggatatcgagaaattccggaaagaagtaagaggggtggccaaacaaaagagctacgaggcggacttggagctaaaa

SEQ ID NO: 282848 - DNA, 419 bp, Glycine max
cttaccatatatttggtgaatgaggttgctgcatgtacacctcctcttccaaaatcccattaagaaaaacattatttacatcacactgttgaggtggccagccataagtgacagctagggtgagaagcaatctcactgttattggctttatcacaggtgagaatgtttctgtatagtcagtttccatactgctgatggaatcctttggccactaatctggctttgtatttactgactgtaccatcaagattctctttaattctgaaaacccatttacaaccaatgggaactctgttatgaggcagagaaacaagagtccaagtactgttgttgatgatggcatcatactcagctttcatggcagctaaccatatgaagtcagtcaaggcttgcttaatagacttagtttcatatgacat

SEQ ID NO: 282849 - DNA, 402 bp, Glycine max
aagagaaagaggccagagagacccattcaactccacatgtccacggcgagaaaacaacacatagcagcataagacacttcatgtattgccatattatctgatggctatcttttattattgatatgaacacatgtatatccttacatcttatatggttggggatgattaccttctctatattcatacacactaatggctaaggtgaagcaatttgctctgtatccgtatgacagtgcaatatctactatatcatttgttggatagtgatatattaacacagtttttttctataattaacgttgtgttctcactattgacccttgcatactcaatcatgttagcacttttttatgtgtagatttacattattattgaatgcttggtctgattattttattcacg

SEQ ID NO: 282850 - DNA, 410 bp, Glycine max
  unsure (1)..(410): unsure at all n locations
agcttattctaatttataaaaattgaatcatcgtcttaacaagtatttatttggcaccaaaaaaaaaaataaacaagtatttaagaaattttagctagtcaaaataagaaaatttttattttaaaagttttattccaccccttcatcccaaattgtgggagaataattgaattaaatggatagatgttatataaatcatagtcatcttttttttatcatgtagtatcacatctctcaatattttattttatattctaataatagatgctatcttgaaatcttaaattatttttttgacccacaacaattgaatgcaaatcaattntatgaagaaaaaaaaatcaatcttttaaatggagggtagattntaacagttaatttacaagaattgaatcactnaaatcaaacat

SEQ ID NO: 282851 - DNA, 111 bp, Glycine max
tatcttgctctaaatctacattgatgtgtgtatttattggagggggttgtatgccatttttgttgtaagggtagcatttcttgtggaaaactaactttccaaatgtttgcc

SEQ ID NO: 282852 - DNA, 157 bp, Glycine max
acaaaggaggggacatccctagcggatctttgcttgtaaaagattttataaggatattggaaatctcaagaatcggtggtcgcttgtggattggacataggcactggttgggaccgaaccaatataaatattgtgtgtgtcttcttcttccctacac

SEQ ID NO: 282853 - DNA, 421 bp, Glycine max
  unsure (1)..(421): unsure at all n locations
agcttcatgtgttatggcctcagcaaacttcttatttccagaaggaaattcaatcaatagacctccaatctttaatggagagggttaccagtactggaaaacccgaatgcaaattttcattgaggcaatagacttaaacatttgggaagccatagaaataggaccttatatacccaccacagtagaaagaaccataatagattgaagcacaacaagtggaagcacaacaatagaataaactagagatagatggtctaaagaagatagaagacgagtacaatataatttaaaagccaaaaacataattacatctgccctgngaatggatgaatattntanggtttcaaattgtaagagtgctaaggaaatgtgggacactctacaagtaacacatgaaggcacaacatatgttaaaagatct

SEQ ID NO: 282854 - DNA, 297 bp, Glycine max
agctatttatcatttcaaatggtcataacgtttcactcggatgtcggattcaagcgcataatatatcgagacgctcgaaattgaataatggaagctattgagcaattccaatggtcataacttttaactcggaagtccgattgaggcacataatatattgagacgctcgaaatcgaacaacggaagctctccagaaattcaaatggtcataactatgaactcggaggtcggactgagactcatattatattgtgacgctcgaaattgaacaatggatgctcttgagcacattccaat

SEQ ID NO: 282855 - DNA, 406 bp, Glycine max
  unsure (1)..(406): unsure at all n locations
agcnaagcttatttggncnttgctagagaaaggancgangngggtctgagaaaggcaaatttacccatcctgcttggacgaatgaaaaaactagggccaatgaagagggtgatgatgaatganaacccgtgctgtgactgccattccaatacaacccaagttcccacccacccaacaatgtctttactcagccaataacaaaccttcttctttacccaccgccagttatccaccaaagccatccctaaaatcaaccacagagcctacctaccgcactttcaatgacaaacaccacctttagcataaaccaaaacaccacccaaatatgaatttgcagcgaaaagcctgtagaatcacccccattcagtgcctatgctacttgctccatatctacttgatattcaat

SEQ ID NO: 282856 - DNA, 422 bp, Glycine max
  unsure (1)..(422): unsure at all n locations
agctagatttcttttataagacaggacacactgctgtcttctactataagctaaaacagatacaataatctattctaaagatacacataattataacatattcaacactgatcctatgtgctcattataaataaaggcttagtgtggtcatccaagacgcgacattacacagtaaaacactattataataaatgaagactaattgtggtcatcctcaacaacacattacagcaaacccttccaacatccataatgtgcaatgaatggtatttaatgcatataatgcaagaactagtaacatgtttgctttgacatctcacccatgctcatgtgtgtntcaccgaaacaaacattcacggcttctacatatattaagctatgactcatggatatgaacagacctaactatggattttttgtaa

SEQ ID NO: 282857 - DNA, 495 bp, Glycine max
  unsure (1)..(495): unsure at all n locations
nnnaagtacgttgttagttttcttttacnntcacannnaatnagagcaccgggcgcagggatccagtagagccgaccgcgtgcgcaggcaggttaatttttagtactttataaangaaacaacgngcgggcgagtgttcatttgggcccgccacaaacgactccgtgaataaacgatattgcgctggtcaaagaaggaaaatttttatatgaatagatgtataccaccccttcataccaatcgagggagatttatagggttaaatggtacatgttgttcctacatagacatctatattgatcgtgtgaatacatctctcatattggttggaattctagaatgcacgccatcttgaaccttacatatttgagtgcgccccgcaaaagaatgctatcagggtgccgagcaataaatataagacttctatgtgcaggaacgcaacagagaatagttcgacagtgtatgctgccatgaaacattcccccttcataggtg

SEQ ID NO: 282858 - DNA, 178 bp, Glycine max
  unsure (1)..(178): unsure at all n locations
cctagcgtgtcgccaggacagaaaacaagtaccatagtttacagatgcctaacacataattgcctctgctctgcgaatggacgaatatcctaggcgttcaaacagtagattgctgcgacatgtgtacactctaaagtaacacctgacgcgcacatatgtagaagagctggataactcn

SEQ ID NO: 282859 - DNA, 397 bp, Glycine max
agcttcatatggagtttttctaccagaatacttgtgtactccctcttccaaattggtattacttgtttttatatgggagtggtcttaccagcaagtgcaccgggtcaccaagtaaaataattaaaacggaatgaaccgagtatcgaacacagcgaacttgttcgattagcaaagtttttttaagtaagcaagcatttgcaaacagaaattaatgattgtgaattaaagcaaaagtatgttctatcctaagtaaaagcaataaacgagaacaagtaagtgtgagaacatatatctaaaagcgtcgggtcctcctactaagtaagttgatgcaataaagatgttatttaataaagatgtcctatgtctatgtcaggacaaaatacaacacaaatcctca

SEQ ID NO: 282860 - DNA, 311 bp, Glycine max
tacgaaagactgccgaggatattcagaaatttaatgactgcccacacctactgactcgaggggggtatgaactgcttgacaagagacttatggaggagaataccaagcgttgacatgaggaacatcactatactgaaaacccaacactcaacatcgacccttcatcctctatggcaagacacttgatgtggaagatcgcacgcacaaagagctatgacccaatgacgtcggacgcggcacgagaatttgtgcacataattgagagaccatgtcttcttttggtactggcattgccaaataatggtgagcca

SEQ ID NO: 282861 - DNA, 302 bp, Glycine max
agtctttttcttagggagacggaccatctcaagtgctcgaaagaatcaatgacaatgcttacaaagatgagctgcccggtgagtataatgtgagtttcaccttcaatgtctctgatatatctctttttgatgcatatggagaagacgattagaggacaaatccttctcaatagggacagaatgatgatgacatgatcaagagccatggcacagatccacttgaatgacttggagagcctatgacaacggctagagcaaggatagccaatgaagctgttcacgaatgttgacatactatttga

SEQ ID NO: 282862 - DNA, 102 bp, Glycine max
attaatgcgcagcaacacatcgtctaagggcaccaatgactgccttaaataaaggacgccttgtcctgctactcatctcaacactcgccgcattgattaacg

SEQ ID NO: 282863 - DNA, 277 bp, Glycine max
ttgatgcactcctctaatgacactcacatcgtttctggcactaaattgctgggagtttgaagccatcttctcaattaaatttctggcttcagcaggggtcatgtctccaagagctccaccactagcagcatctatcatacttctctccatgttactgagtccttcataaaaatattggagaagaagctactcagaaatctgggggtgagggcaactggcacataattctatacatctctcccagaattcatataggttctctccactgagttgccta

SEQ ID NO: 282864 - DNA, 408 bp, Glycine max
  unsure (1)..(408): unsure at all n locations
gaggtagcctgacatcgatcaaaancgnagtgacaggacaaaggagggggcgagtttgtttcgtttangaccacacacgggcgcggagggggaagaaaacactcgcacccaaacaacggagaaacacgaagccaccggacgccacgcagacacaaaggaagaacgcggtgggtacgcacagacggacacgacggccgaacggacagaacgcccggcacgatcgcaacccaggacagggccctgagaacgccgagagccgcggacgcccgaaccggagaacgacgcgccgccgccaaagtgaaccacactagcgtacggcgccagtcaagcaaacacctagccgggcaggtatgcgcccaagagaagacaacagcgccgcggtaaagcacatcggacgccccccccccg

SEQ ID NO: 282865 - DNA, 312 bp, Glycine max
agcttcttatgttttagttgataaagatgaattcttggctacttcatgcactcctctaatgacaatagcatcgtttctggcactaaattgctgggagtttgaagccatcttctcaattaaatttctggcttcagcaggggtcatgtctccaagtgctccaccactagcagcatctatcatacttctctccatgttactgagtccttcataaaaatattggagaagaagctactcagaaatctgggggtgagggcaactggcacatagttttttaaatctctcccagtattcatataggttctctccactgag

SEQ ID NO: 282866 - DNA, 389 bp, Glycine max
  unsure (1)..(389): unsure at all n locations
agctagcctcctttctctcccaggcaagctaggttgcttcctcctctggaggaacatcttggaaggcccaagtgggcctacttgctatttgcacccctctgtttactaaatacaccccctgcctttntttgctgattctttttccgtaacgttacagaactttacgaattctgtaacgatacttgttttccttccgtaatgttacggaaccttacggattacgtaatcatcccttttttggctttcggaatgttacggaacctcacggattgtgtaacaatgcttccttatgatttccggcatgttacggaacttcacggatcgtgcaacaatgctctcttttgacttctggcatgttatggaacttcacgtatcgtgcaacaatgggt

SEQ ID NO: 282867 - DNA, 292 bp, Glycine max
  unsure (1)..(292): unsure at all n locations
agcaagagtgnctgtttgttgangnngagccaagagctagcatgctacgctaagctctaattctttgtggctctgaacattgtagacttaggctaagctcagttgcgtgctaagccattctacaaaaaatgtttctgtgtcttcgagctaagcgtcaacttgctgcgtttaacgcttgagtaaaagttaataaggtgcgctaagctcaacatgctgtgctatgcgcccagtcagaatttcagtattatttttctgtttgtgtgaaaataacatgtattaatctcttgtgttt

SEQ ID NO: 282868 - DNA, 341 bp, Glycine max
  unsure (1)..(341): unsure at all n locations
ctgcatactcatcccttatcacaagattgccaaaatccaataactctgccactggattatgtgcttcttttggacaatttgtggaccacacaaccgtgttgttgtgtgtaaggaccaaattgccagaactgtttagtctcaagatggcagaggaatcatttattgggttgccaccgtttgcaacccaaacaacattttgtgacggattattcttgaaccaaatccccaggtagcttttgtttggaagtccaagattgaagaaaccaagctcanagattcccctttgggaaaccatggtctttccaaaactganggattgggactgtgaaatggatgatgtg

SEQ ID NO: 282869 - DNA, 421 bp, Glycine max
  unsure (1)..(421): unsure at all n locations
agcgantatttcttgcnttctatggcggngagccngngcttgactcatcttctacttgaagtggcatctccaatcacctttcctccttctncattttgtttccattgatcttcaagaaacaaaggactccattgatgaagaagatccaaggcctaccagctcaacatggagctacatcatgtggtatcagagcatcttcatctaggtgatgatcttttgcttcctctatctntntgcttggtcaattcactataattccttggtcttcatcttcttctccatgtatctcctccattgcttgtggcttggctctgtntagagtagattcaaaaaaaaataaaccgattcaatcttagatctacacttgctcttgcatttctatggttcacatntaatagatctactcttgaatcatgtttta

SEQ ID NO: 282870 - DNA, 222 bp, Glycine max
  unsure (1)..(222): unsure at all n locations
gcaccggcgaggcgatacagagagccgaccggcagcagcgcaagcttcttatataaatgcgagagaacggacggcgggtgccagcacaacgacaacacccccgagcggcactaaagngagggagagcgacccacaactcagcccagacgggctgaccaggggtcatgcgtacagagcgcaccaccagcagcacgaccagacctcgccccgcactgagcccca

SEQ ID NO: 282871 - DNA, 417 bp, Glycine max
agctttacttcatatgttttccaaatcatcaagaatcttgttgaaaacagccaattgttaagtggctgttcttgactctgtcatcttgaaggtgtacagtttttgcttcaagcatagccgatttgcaagggactttgtcatatacaatgactccagtttcaaccacattgaggctgctgtcttttctcttgcaacttctcttaaagctttatctccaaggtatataatgattgcacttctggctttagcaatcatctctgatttctcctttgagcttagagattcagacatcttttcttctcctttaagagcttctgcacaaccatgatgaatcaagattgcttccatcttgattctcataacccacagtcattttccctgaaaacttctctatatcgtactttgttgttccatctt

SEQ ID NO: 282872 - DNA, 371 bp, Glycine max
agctttgttccaaaatcctgacacaccataaaccttgacccagggtgagaatgtcaattcttaccctcggaagcaaaaaaaaaggggagagggaaaatttccaatcaaagaggaagcaaaaaaggagagaaggaaaatttccaatcaaaggaaaaaaagagaggaaagggaattcccaatcaaagagtgggagaaagcaaaaagaaaagaaagataattcccaatcaaagaatgggagaaagaataaagagaagaagatagggaagaaagttcccgatcaaaaaaaaaaataatatgcagaaaggtctttggaccggacaatatctgaacaatacagaattgtcaccaaatgaataaaaagaaggaaaggg

SEQ ID NO: 282873 - DNA, 360 bp, Glycine max
  unsure (1)..(360): unsure at all n locations
agcttctatggaagctggatctttgagcttcattgagatcctgcaatggtgattntcaaccatggagttgcagcggaagataaaggagaagagttgagaggaggcgtcatccactatgaaataagccatggaaggaggagcttcaccaccatgagagtgtcttggataagaagcttagagagaaagcttcaatggaggaagaaaatgtgagagggggggggggcactacattgaaggagaaaaagagggagagaagttgaactttgaagtgtgtctcacaagattcttattcatcanagttacaagtgttacacatacttctttttatagcctaggtagcttccttgagaaacttccttg

SEQ ID NO: 282874 - DNA, 400 bp, Glycine max
  unsure (1)..(400): unsure at all n locations
agcttattttaaggcatgtgaagtgggtggaattcctagagcaattcccttatgttatcaaacataaaaagggaaaaggtaatattgtagccgatgctctttctcggcgtcatgcattactttctatgcttgaaacaaaattgattggtcttgaatgtttgaaaagcatgtatgaaaatgatgaaacttttggagaaatttttaaaaattgtgaaaaattttcagaaaatggtttctttagacatgaaggctttcttttcaaagaaaacaaattgtgtgtgcctaaatgttctactagaaatttgcttgtttgtgaagcacatgaaggaggtttaatggggcattntggggtccaaaagactctagaaacattacaagaacatttttatnggcctcatat

SEQ ID NO: 282875 - DNA, 218 bp, Glycine max
taaccgccatcggccagggccaatgacgttggagatcagcagggccccccgaaaaagtgtgcagtaaggaggcgaaagatagcgttgcggaggtaactacggtgagacgtggacctgctctcgaagattatgtactgacacatttgatgacaactgctcttcaaggggaaggggatgatggaagactacctatgaggggacgaagcactataacaatg

SEQ ID NO: 282876 - DNA, 363 bp, Glycine max
  unsure (1)..(363): unsure at all n locations
ggcttttattctattttcccaaacatgacaaagaatgtttccaacaatctaattctcacgttaatctagtaaatcttgtcctactctntatatagttttatgattatccaattgattcaagagcaaccctgcatgttcacatggtatcatgaagtattatataaaaatctatctgatcatcatcaataagcaaaatacagaggctgtcaacaattaattgaacaataacatattaaaatcaaatagatatctcttgacacacatatacagaaagcatactcaattcatgatagtaaatcaatcaaacgtacactttataggtacgaganacangataaagacacattataatcatagataaat

SEQ ID NO: 282877 - DNA, 413 bp, Glycine max
  unsure (1)..(413): unsure at all n locations
agcttagttctatatgggatgaaccttttcaggttttggagaggatcaataacaatgcctataggttggacctcccagaagagtatggagtcaggaccacttttaacatttctgatttaactccttttgcaggtggagctgatattgaggaagaggaactaacagatttgaggtcaaatcctcttcaaggggaaggggatgatggaatcctccctaggaagggaccaatcactagaacaatgagcaagaggctccaagaagattgggctagagctgttgaagaaggccctanggttctcatgaaccttangatagaattctgagcccatgggccaaggttgggtccaattatctttgtacatattagactangatgtcattatanttggtccttgtatatagggctccatatt

SEQ ID NO: 282878 - DNA, 424 bp, Glycine max
  unsure (1)..(424): unsure at all n locations
nanttttgttgagcaganananngganaggcacgggccagcnngcagcagagaggaacacgaagcaacaanccgnnnnnccaccgcaanagaancanccccaccnggcgggaaccacgaacccgngcgaacaaancngcagcgannccaaaagaaccaaccacaacacnncnacagcacggagaaacanngaangaggggagaagggccacnacgcggaaaagccggngggaggcagngaccngcaccacnnggcagcaacggaacaagagagnagccnccaacgaaacacnngacagcaccaaancgangggcaaagcagccaccncggagcggacccggcngaagcacanggagaaggaacaacnacgccacnncaaccaacgggccacgaaacncagagaacggaaagcgaacagcccacg

SEQ ID NO: 282879 - DNA, 468 bp, Glycine max
  unsure (1)..(468): unsure at all n locations
naaaggctatcttgacatcgtgatncacaagaaccgggannccncagagncgacctgcgggcaagcaagcnagnatgctaataangtgacgcaggcnannnaagggacgcgacaggagagnatgcnagcacacccacacagaaagacaganagacaaanaaaaacacacagagaaaggcacacanaggcaaagagacacacacaagaacacggaggccagcgggagcacagaggacgggggaagcaaaaagcaacgaacgccgcggccggcccgcagaaagaaagagaggcgcccgccccacaaaaaaanggacagagccccccgacacaccacccncangggggaggaaaagaacgacccccccacagagccacaaacaagccccccccggnggaaacacaganagaanccgggcgcgaaacagaggaaaaaacacacaccggcggcgaaaaagcagaccagggccg

SEQ ID NO: 282880 - DNA, 430 bp, Glycine max
  unsure (1)..(430): unsure at all n locations
gangatgattttggngtacccgncacaagnggnacgagggggcgaacgggcgaaggngcaaaacaacncnccacagccacaaancacgcataaacccaccaaccccagnagcccaacctncaacggagcncacgnacgcccaagnnacccccnatccncannccncncaacaaccgggcgcccancaaacgcncccaagccgccgcaacanccaagcaagacaacanccaaccatcangaaccagcaaaaccaagaaaacagcgcanaggaagaaaaccngcccanaaaacacaaaccaanaccgcaacnnnncntactcanataccccagnaacattctcttncttccaatttgtttacccgtggatcgactcgaaaatttactggnggccccagtacataaatctacattgtgaccggtgggatctgn

SEQ ID NO: 282881 - DNA, 330 bp, Glycine max
  unsure (1)..(330): unsure at all n locations
nagcttcgtttacgatgtttaaacataaagtcaacttacagcatactaggaaaacattgcaaagatttaactgcgaaccatacagtgtgcaactcccttttgcggaggccaccgtactcctgatgctgttcactaaggatacgccggatcccccacgttattgagaaacgcgataccggagaaccgactcgactgtaatgaagtcgggagtgattacgcacgtgatgtanttcacccacacgtcgcccaaggacgcgagttatggatgtcaacagacttgattttatgtccttgtatgcttatatctctaccttttaattttctttgtgc

SEQ ID NO: 282882 - DNA, 503 bp, Glycine max
  unsure (1)..(503): unsure at all n locations
aaaaaactgctgtctagttcatttatgtacngcagagttaataaagcaccggcgaggganacagnagagcggcacgcaaggcaggcaagctttgttttcatggcaaccaacacaagncacggagaggctcatgtgaatgagcctctcngcccgcaccatcatgaacacattgtctttcagtaccttctattcctccaaggaaataactcctccatacgggagaaactgacattgatgaataagaaccacatcatcgctagtataatcattacaatgggaaggggaagatagaagccaccctatgaagggaccaagtcctagagcaatgattgcgacgctccaaaaataaaggactatatctgtagataaacgcccaaaggtaacaggaaccgatggatataaagctcaaccatgcggcacagtggcgccagaaacctagacattgaaactggcatgacttctgcaaggcacgtggcggagtctataccgtcggctggacatcn

SEQ ID NO: 282883 - DNA, 375 bp, Glycine max
agctttctttgtcttctttaagtaaagatctagtggtagaaaccccaactagtggttctgtgttaacttctaatgtgtgcttgaattgtcctgtggaaatttctggtagaacatttgtcattgatctgatttgtttgcctttgagctaaattgatgttattctaggaatggactggtatcagagccggtcgaaactttttgtttagagtctaacaaaagtaaaaatacaatattatccatattttctaatttttcatcatccaacaccttttttctttttccatatgcatctccttctctaaacctcctatgtcttgacttttcattatcccatatcttttttttgctggtttgtttcacttcatctcgtcggtg

SEQ ID NO: 282884 - DNA, 403 bp, Glycine max
  unsure (1)..(403): unsure at all n locations
gcttattacatgttctacctcacagaanaccgggaaggtcagattgngcttcgttctgaaccgaaaccgtgagtcaagtttggaagattccgctccaattgaagggttcctctcggtgtggggtttcaacagagaaatacggcggttcgtggtggctactattggctgtggtgatgtagaagaagctttggacgttggaaatatttttggaagaaggaaggagacagaaatggcgtttttccaaggctacacgaatcacaaaggctgacacactcaagttcttctgctctcggaaaaggaagcgtttctcacacgccggatgtcgtatcgccgatctcaacggtcatgtcgtccacaaatgtcttatgaaccttcagaccaaatctcaagaggatccaacggt

SEQ ID NO: 282885 - DNA, 393 bp, Glycine max
  unsure (1)..(393): unsure at all n locations
agtttttcttgataatctatagctnagcnacacacacccatctaaaaactaatctcaccctccttgacaaaatacatganaatacaaaaaaaaaatccctactacaaagactactcaaaatgccctgaaatacaaggctaaaaccctatactactagaatggccaaaatacaaagcccaaaagaaggagaaacctattctaatatttacaaagaagagtggatccaaccttgacccatgggctcaaaaatctatcctaaggttcatgagaaccctagggccttctttattagctctagcccaagcctcttggagtcttctatccaatacccttgnggggtaggattgcatcacctgtgtanaggaaggtggatatgtacttgtcgagacaaca

SEQ ID NO: 282886 - DNA, 97 bp, Glycine max
  unsure (1)..(97): unsure at all n locations
tttctnattttnatacnngagncagcgacttgagctgagtctattcttacctgaaggatctgtgaaccaaactcattttaaattatatctaacctaa

SEQ ID NO: 282887 - DNA, 283 bp, Glycine max
atcagactcatgagaggaaacacacactccatcacaatcatgcattctaaccaaactcaatacatacacgaattctcgcaaaaggaccatagcgattcactgcaatgtcatcacaatcaagatgaactgttccatatgctccataacaagcataccaacggatgacagaatgcacaactatataactataaacggaggccagaactactcagaacaatgcgctataactaatatagtcataatcctagagatcaacttgaactgagcattctcctcatctatc

SEQ ID NO: 282888 - DNA, 350 bp, Glycine max
  unsure (1)..(350): unsure at all n locations
ttcttagtttttcaccntanaaaccttaattnttgaaattataaataacccatggtggtgaaaatccaaagagaattgacagtcacttcaacacaagtttgggcctttatttcaactaacaaaatgctaataaaaccactcaacaaaggtggcaccctctactcttcttggaacatggtgcaattgacaatccaaagcttcgccacttgtaacttgggcctaaattcaaatagcatggttaacacttgttaaagagtttccttggccttctttgttctagcccttggcataagtcctccaagtccttctaaaggttccttgcccttggttattgccatgtcctcatcaaa

SEQ ID NO: 282889 - DNA, 423 bp, Glycine max
  unsure (1)..(423): unsure at all n locations
agcttttctatctcaatcatctctgtctattgactaacaattctaattgcaagttcacattcttgttctttctttgtctaaaatacatacttgctcaaactcatgaaaagaaacacaaactccatcacaatcatgcattcaaaccaaaatcaattcatacaccaattttcacaaaaagataaaagtgtttcactgcaatatcatcaaaatcaagttaaactgttccatatgcttcagaacaagcataccaacaaatcacagaaagtataactatataattataaacggaaaccaaaattactcanaacaatgtactaaaactaatatagttataataaaagagatcaacagaatctgagcatcctcctcatctatcaaatggagaaactagggaatcagtgagagcaacaacttctccggatg

SEQ ID NO: 282890 - DNA, 428 bp, Glycine max
  unsure (1)..(428): unsure at all n locations
agctntaattgctttcatgtcatctgtaacctttacaagttcaacagttggcttctccctcacaataggcaagagagcaccctggacttgtgttgcatttgcaagctcctcgggagtagaatcaccagcctacaataaaacaacagtttcacatgacacacaaacatctttcatttcgaccttcatcagaaatgaaaatgcctaccacaatcaaaatagataatggaacatctgaattaccttaaccttgtgtgcccgtcttgggaacacaaccaatttggccttgtatgttttcagcctctgcacattagcttgcagactttccaaagaacggttcttgcgacgatgatcaacagcaatacctatggttggtgcaagctttttgggaatccctgctgcctatggcataatatanaaaatacataata

SEQ ID NO: 282891 - DNA, 422 bp, Glycine max
  unsure (1)..(422): unsure at all n locations
agcnnngattatgtcttaattaatcacatgtnngncatcatcaaaaagagggagaatgtgaatgtatgtatacatgattttgatgatgccaaagaagaatcaaacaaggctgcttcaaatgataagcatttgcttcaagaataattcaagattgcttcaacaaacaaagccttgtttcaagattcactaaagaccaagtcttgccttaaaacaaagtgctttcaagacatgcaaggctctggtaatcgattaccagaagacagggttgagaaatagctgttgaaaaaggttttgaatttgaattttcaacatgtaatcgattaccatatgtctgtaatcgattaccagcaacggaactttggaaattcaaattcaaaagtcataacccttcanatataacttgtgaatcgattacacaaaca

SEQ ID NO: 282892 - DNA, 408 bp, Glycine max
  unsure (1)..(408): unsure at all n locations
aaagttttttttctttganctcannaaaaggaacggcagggaacagagaccgagggtgccggcaggttgttanntctttaacgcnganccggaggggcatgtccagtatccacccctccccgcagaaccaccaattagaatgcgtaacaccgaatattcggaccgctttcctcacaactattgggcagaggtagactacgtttactgtgaaaactaccatgaccacatgactaatcagtggacacaaaagaataataatttttttgaagaggcaagcaagatatgctcttcaaaaaaaaagagatttatgatgggagggggctcccaggagtgggtaacaagacataatatacacccccgcggaaccttgctcaaacataaaccctcccgagactcttccattatgcc

SEQ ID NO: 282893 - DNA, 365 bp, Glycine max
  unsure (1)..(365): unsure at all n locations
ggcttgctatcttggttataaaagaaaccgtctgtgagtcatatgagaatttttggttgtacaacatatgcattagttgatttaaggactaagctggatgataaatttgtcaaatgtgtatttattggctatgctacttagtcaaaggcatacagactgtataacccactaactggcaagataattgtcaatagaaatgttgtatttgatgaagatgcacgctgggtttgggaggaatgtgaaatcagtaaaagtgtttatcagaaatcagtcagttntgatggttcataggaggtctcaaatgtgccagaaaatgatcacactccaagccctcattcaacgccatcaagccagggatcattaac

SEQ ID NO: 282894 - DNA, 402 bp, Glycine max
  unsure (1)..(402): unsure at all n locations
agcttgntgttctccattgcgctaaagatcgtgacaggtacgtttcatttcgtctacctgtgttgttctattgaatagctaggtttgtttctggaacctttggttaacctaaggaccttttttggtttctggtgcaaggattgnggaactcatggtgacctgagacccattgccgctgccattgaatagctgagtctcgctgccattgtcggtgttgagtttgaggtaagcttcatgtcttcattgaaactttgtgcttccgcgtacgtgctctttgtgctcacttctctttgaagcatgtntatgttcccatcgtaatttgttcttatgaaaactagctggtatagattgtagttagttggtaattagtactactatacggtttgaatgcacctattggta

SEQ ID NO: 282895 - DNA, 406 bp, Glycine max
  unsure (1)..(406): unsure at all n locations
agctttgtttattgttatatctgtccctcaaacaaactctgcaacttagcatctgaagtctgggagctttgagcagatggggttgttgatactggcgaagagggaacaccagctgctctggacctggttttccttgcccttggaaaattaactatttggtcattcacattccaacatttccttttaatataggccaagataatgaccagcctcaggctcttgtaagcagtaagagcatcagatccaactccccttgacctacacaagactttgattaaagctgggaagcctaggcaagaagagttgaactgggccataatggttatccctgtgactaagccataaactaacctagctctgtcaatattcaagttcgaggtgtgggaggtangagctangttggagt

SEQ ID NO: 282896 - DNA, 391 bp, Glycine max
  unsure (1)..(391): unsure at all n locations
agcttgagttatgatttgaatagagatcatcactaccaacaatgccttgaagtaagacttcattggttgcctgtgatttaactgtgcaaaagtgaggaaagaattcagagtaaactccattatctttggcaaatttacttacacttgatggatttttagtgattgagggagcatgtaacaagtaatgaagataaagaggaaaactaggattagtaggggacttataagaaggagaaccagaaccaagaatttttaaaccttcaccattaccaatataaatctgatctcatccatcanagtgaccaagctgatgaatattntgtggttctccagtcacatggaatgaagctcccgagtcanggatccaggttgaattagcattgtccatgag

SEQ ID NO: 282897 - DNA, 277 bp, Glycine max
  unsure (1)..(277): unsure at all n locations
agcttgcttaatgatataccacnnnnaacaaaagagggacgcgggggaaacaagctnncacacgaccangcacanacccncaaaanaaaaagaggggggcgacaaggcctccgataggacaaactcaaccacaaagagaacatgcaaagaaatacgaaggccaccaaaagcaatgcgacgaagacatgcgcaaacgactcttgagaacatcacatgaaagcagagatagtctaacatatactcatgcaattattcaagtggaagaaaggagataaga

SEQ ID NO: 282898 - DNA, 345 bp, Glycine max
  unsure (1)..(345): unsure at all n locations
tatcttacttatctgtnntaaatccaagcccataaataaattaaattcaaatctagataagataaagataagataagatctaattttgtagaataaaatagtctgccctcttcaagtccaagcccaattctggattcaagcccaatgcttcattaattcctgaaattagattaaaaacatcaaattatctgaatgggcccaaataataaaattgcctaattaatttgacaattaagactaatcagtacttaaaatggtgcaaaaagggttaagaaataagagaaaataatggcacatcaaccattcatcaggaaatagcctaagtatgtccacatgacattgact

SEQ ID NO: 282899 - DNA, 115 bp, Glycine max
  unsure (1)..(115): unsure at all n locations
ncttctaggtttcctcgacatagaacctggccatctcttggacattatactttgtctatccttgcaccatacatatatctactaatcctatgggaactacaaagatagccctctt

SEQ ID NO: 282900 - DNA, 416 bp, Glycine max
ttcttggttatctccttctttactacatcaagaatcaccgggttgagtcttctctgtggttgtcttactggtttagctccatcctctaaatttattcgatgcatacatgtggatgggctaataccaggaatgtccgccagggtccagcctatagccttcttatgcttcttgagaattgacaacaacttctcctcttgttcatcagcaagggaggcagatataatcactggaaaactcttgctatcatccaagtaagcgtattttaaatttgatggcagaggcttcaattctggtgtggtccgctggacagtggtagaaggagatggtttctcagcctttacctcataaagaaagtcagaggtatgtgtacttcctgaaacatggttagtcctatctgactctataaaaacaatctc

SEQ ID NO: 282901 - DNA, 409 bp, Glycine max
  unsure (1)..(409): unsure at all n locations
cccctctctttccctgatctacaatgcattgttctgagtcactgctacatgtgatttgatccatcttcaatntatttatctaaaaaaaaaaattggttttccaatgcaatggttgtatgtgatatatgatataatttgctcttcattctaattactccctctctaaaacaaattaggcctggaaatataatttcctgggtatatcttattgaaaaagaacaattgtgagtggcctcttgttgatgcttggctatgttntcatataanggtgttgcttctttaattaaattctttttgtctatctttcgggaagccatgtgagaatgtgttttatgctcgaaaatgaatatcacatgcttctatggaactaanattgttgtctagtttagcctttggaaatctttgaata

SEQ ID NO: 282902 - DNA, 353 bp, Glycine max
  unsure (1)..(353): unsure at all n locations
aaaaaaaatgggttttgaattaatattccactaaaaatgaccaattagattctttagcaaaaattagttntataataaagagtttttacagtattcactaattagaaatcatgttagaaataattnttaaagtatttatttcanagtaaaaagaaattactagtactgtacataataaattntaattgattaatttacactttactggtaaaaaaatgcgtagagactacgggaacttgctttggaaaatgatgatacgaatggatgaagacaaaattggggatgtttggtgtaggtatgaaatatcaaaggtcaaaatcaaagttcaccaaaaaagaagtcgaaaaccaaaa

SEQ ID NO: 282903 - DNA, 105 bp, Glycine max
  unsure (1)..(105): unsure at all n locations
ctcaagctcgaggggactgttcaagttcatatagggacatgtagatgtggttatgacctctancacaggcaaggatccactggaaggacttggatggcctatcac

SEQ ID NO: 282904 - DNA, 423 bp, Glycine max
  unsure (1)..(423): unsure at all n locations
agcttctacttatgtggcagggcgggcttccttcactgtcttgtctccaacgcgagctntgaccaccgctctttctttccgcgatgctcctctntatatccgcctgagtgggtttatagcctaaaccatacttcccacgatttcctttggcatttatcaagctagttatgccgccgttgtctttgcctaaacccattccgggttcgtaaccatttcccaacataactcgggccatcattattgctgcatcgggcaggcaaggctgcccagagaaggagtccacagaggaaatgctgaccacctcaaaagactggatagcggtttctaacgattcttctgcggcttccacataaggcatagaggatgggcagctcaccaagatgtcttcctcgcctgacacaatgaccaagtgcccttccacca

SEQ ID NO: 282905 - DNA, 267 bp, Glycine max
cttaatccgacatcagttttttcttatttttcacatgaatatgaagctctcagatgctgatggtcatcttcgcaccacgcgaaggatgatcgacgaaatggagagtccgcagaggaactcactagatcaggtacttcttgattatcaggatgcagctgagcgcttgccgtacttgaaaacaacctctcttctttttgtcctctcatggcgaacggtgggggtatatactaaatttaacatccagtgagcatgagtccttgacctttc

SEQ ID NO: 282906 - DNA, 366 bp, Glycine max
  unsure (1)..(366): unsure at all n locations
agctttgtatgttcttatnccaccattatccatagtagaatactggtgatgtgtctactatcattgtcatcgcttttttgtcattgaggtgccactatgagctgccatgttctccacctttgggcgtattctttgacagaatagtgccctctttttgcacatgtactgtagttgcatcctatccgaagacattatactgacactgcctaacgaaggaaaccactatgtcctttcaagaatggactccggaaggttccaagttagtgtaccatgtaacagctacccagtaagactttcttggaaggaatgtatcaataatttcttatcttttgcgcatgctcccatcttgccataagtcatctttag

SEQ ID NO: 282907 - DNA, 423 bp, Glycine max
  unsure (1)..(423): unsure at all n locations
actaagctnncaagaatgacatatgtttatgcaaatgttgatatgtaagaattttttgtagtgcagcaatatatattcaaggatgtagcaatgctaagatatatttagttatgtgaccttcgcaataagtggaccataacataatagaataaaaaatattgatgtgtgatagagcatttttagtttattattttcatattcttcttaggttatttaacctttttttactcttattttctcaccttaattcaattttggtcttatgcaaataattagacttacacaactcaaaatgaatcatatgagtagtacctagaaagctaaggaaaagagctcgaattttatcggttatgagtttgggcgaattctactttttttatggttattctgggcttacaagtcagcgcctctatacttggcttt

SEQ ID NO: 282908 - DNA, 408 bp, Glycine max
tacaagccctagaggcagagcttgtagatcccgtgattcaaagagaagttcaagtccatagcggtcaatgtctgaaaagagtatgattaactaatggacgtcaatatggccacagccgatgccttggaacgagaaaccatgatggcccgagaggaagaacacgaacagagcacagttgtgaggggctttatatggcagcaatagtgagctcaagctctgaagaggtgaaagggatcatcacgggtcatatgcatgatcttgaaggacgagctaaaggctcgccttatgtcgaacagaaatttgtcccaacagttaagctagactgaagggaatatgtgggccattatcgatgagtgcatagagaagctaaatctagcggcgactcacgagcaaaggctagaggatgag

SEQ ID NO: 282909 - DNA, 324 bp, Glycine max
  unsure (1)..(324): unsure at all n locations
agcttttctactattgccactctactcaggaattcgtgagggatatgttgacgaggaacaccactgcttcctccaggagaatgttgttgtggaaagcaactacagtgctgtaatacagacaattcttccgccaacacgtaatgaccctggaagtgttactattccttgttcaatcagagaagtcactgtgggaaaggatcacattgatttgggagcagtatcaacctaataccactctctatgtgtataatgttgtgagagcttggaatcatgcccacgagaatgactntacaacttgctgaccgatccatctcaagaccttac

SEQ ID NO: 282910 - DNA, 207 bp, Glycine max
aacattttctacttacgcggatcgaaaccctaatcctacagatacctgttgatacggccttctactgacaaagagaggccgccagagacgccaccattgtgcggagtaagcttttaccatgtgcctatttatgtaaacaacatgtatatattggtagtagttcacgctcacgcaaccaccctctgcaataatgtgtcaacatggata

SEQ ID NO: 282911 - DNA, 375 bp, Glycine max
agcttgaatgttctataagatgagtggagaacaaaaactacccctaatacaaaaactagtctacgtgccctaaaatacaagggctgaagatcttacattacaagggtatcctaaacttgtggggtaccctccctacattatggagcactaaatacaaggcccaaaaaaataatgaaaccctaatctaatatatacaaagataagtgggatcatacttagcccataagcccaaaatctatcctaacgctcatgagaaccctatggtcttctcctgcatctctagcccaatcttcttggagtcttctattcaatgcccttggagggtaggatagcatcattaggggtgcctaaaagcaagatattcactatggtact

SEQ ID NO: 282912 - DNA, 521 bp, Glycine max
  unsure (1)..(521): unsure at all n locations
naggacgagacttgaaaacttgcagntacntacgagacaccacnnannaatacaagcacgcgagcanntgacgttagctcactataagagtactanggaatatgtatcatttttactctcnaaacnactgccctgctggaatgactctgatgggcctacttacaagggctataccanaggaagccgatgaaactctctcacatgtgctgctcaaactatttgaatacaaggcctggcttcatcaagaaacgaccaatgtttacttgtatcatggccctcatggacgatgactaaatggccccccttcgtctcaatataacaatgaaaaggttgtctaaatattggcccagttcttgtccaatggggagaccataaaaatgttctgtgttaatcaagtaaacaggctttattattgttacttctagaataagtatggcacaatttatacacaaagctctttctttcggacaccaatcgttgtaactaggggctagggggtggacaaaaacacggcacattcn

SEQ ID NO: 282913 - DNA, 389 bp, Glycine max
  unsure (1)..(389): unsure at all n locations
ttcttgagagttttgagagaatttattgtgtgaagatctgcagagaccagagcttgaagaggaagctgttctgagagcttgagatgagtttgtgagtggttgtgagatcctagaggtgaatgagacatcctcaccacttgtatttttgcaatctttcatctggttcttctctctattgtaaaggaggcttcctggttatggaaagctaanatcctctgttggatcttccctgtaggtacttaatgtaaatatctttctatctatataatgatgtgttatgtgttctctgtgctatctgctcttcattctagtatgcctttaccttgatcacgtagatgcatgctttgttcgggtcattcacacaatgaaactggccttattctgatgac

SEQ ID NO: 282914 - DNA, 462 bp, Glycine max
  unsure (1)..(462): unsure at all n locations
acacataaaactcagcttaacgaccacactaatccacacattganccattttctttggatcccacttacattcgacgttctggaacattgcacaactacacgcttgacacagtgcttgtacagagctcatctcccccgcagcacaaaacaaattagttggaaaaatgaaataactgtgttaagctagacctaaaaacgtacaagaagaactgtcgtttgtttcactaactaaatcaaataacatgtttttgtagcttatatatatcattaagaaaccagtcaacagtacctgaaggaagtgaattgtcttttaatcgagtcagaaaccagtatatatcatttaagatatgtaagagagtgttgtcttttcagacaaatgaagcattagcgaagcanagacacatcatcatgttgtgcatgtggaggtggcgggagctgaactgcgtattcattatatgtggg

SEQ ID NO: 282915 - DNA, 455 bp, Glycine max
  unsure (1)..(455): unsure at all n locations
cgccagattgctatacatggattctggtattgtgccattctatttattatgatagatgtcaaggtttgtcaagtgtatggtactcaagtatgaaactaggcaatccgccagtgaagacattgagatctaaagcaagatgagttaaggcaaggcattccagaaacatattcttacatgcgaatccaactacgaattagttcagccaggttttgttgatattacgcatagaggtaaatgtaaatataggaaaaatataactatatggtgtggtccacgtccgctgtggtatgtagtgattataattgaattccttgttttttaaaccaccataatgaaggtctttggttctctgacggcacaatgactccaatttccatgcatgaagatcaatgcactagtagggtcatggcactaagatacaanaaaaaaaacaaagagtctatcattttacttca

SEQ ID NO: 282916 - DNA, 469 bp, Glycine max
  unsure (1)..(469): unsure at all n locations
gcttataagaacattattgcctcaatcatttccaaatatgcatgtgaattatgaagcatcaacaagaatcaagccaaggctattgtgcaagcaatcaatggggcaaaacacaccaaatgattatgatgatggatggctcanattctcacaaaggtaaactcatcactttcaaattgagctctcaaaactatcatgacatgtaaaggagaatcaaggatttcaagtcacaaaatgtcaagaacttttattttcaaaacaattacccatttcttgaacatatcctataattcanagaanaacatgcaaagtcgtacatgcacacagaattgacccanaatattaaactagaaatccgacgaaactaacaacattaacaaattaacacaactaacaaattaacaaaaccaacaaaacttgtaaaaccaaagaacacttccccncccccatacttaaacaacacattgtcctc

SEQ ID NO: 282917 - DNA, 410 bp, Glycine max
gccctatagtgagtcgtattacaattcactggccgtcgttttacaacgtcgtgactgggaaaaccctgtcgttacgcaacttaatccccttgcagcacatccccctttcgccagctggcgtaatagcgaagaggcccgcaccgatcgcccttcccaacaggtgcgcagcctgaatggcgaatggcgcctgatgcggcatttactccttacacatgggtgcggtaggtggcaccatataccgcgcactcgtaggccaatctgctctgatcccgatatttatacccagacttatggccgcctataaaaacgacgactcgaaagcgttgcagacccatttgaatcacctctgtgacccatgatattggaatgatcagcgggaaaaaaaaacctattgcctacttagccattcg

SEQ ID NO: 282918 - DNA, 427 bp, Glycine max
  unsure (1)..(427): unsure at all n locations
agcttctccctcaatttcctataaatagggggagaagtgaagtgaataagggttcanccccttaggcacttctctctcttcgaattgcatggaaaaatatttccgtgatgaaaatctaagccgaggcgcttccgaaacgtttccgtaatgtttccgtgaggaatttcgcanaggtttcgaccgttcttcgacgttcttcattcgttcttcatcgttcttcgatcttcaacgggtaagtacctcgaaccaagcttttcgattcattctatgtacccgtggtggtccacattgtgtttcgtgtatttttattctcgttttatttactttgtatacccccttttgacgtgcttaagtcantttatttaagtcatttctcgcttaaactaaaaataaaataaatttccaccgatcgtttgaattgtattat

SEQ ID NO: 282919 - DNA, 405 bp, Glycine max
  unsure (1)..(405): unsure at all n locations
ntgacttcgctcaccactaactactagggaattcctcatgcttactctctaaactactccactaatggaatcatctcatggttcacttaaaaatatattactagaggttgaggatcaaagtcctacacatttctaactcaccttggtcgaaacaagggcttgacatcatctcacaacaacatgtgtattcttgacaagaacatctcatactccctaatcaacacaacaacatcctactaaagaaacatatgaaatggaatcaaatatcttaaaattgatttccaccaatgaggaagtaataaaaatagtcattgagaataaggaaatcactatatgtttttttcatctttagaaataagttctcacagaatttatagaaaagtactttatacatcacaactaact

SEQ ID NO: 282920 - DNA, 434 bp, Glycine max
  unsure (1)..(434): unsure at all n locations
agctttattattatagaatatccaaggagaatacctggatctgacttatcatcaaattttcctaagttatcttttccattattcaatacaaaacatttacaaccaaagatataaagatgtgagatgtttggttttctgccattgaacaattcatatggagttntctttaaaatgggtcttattaaagccctatttaaaatgtagcatgcagtgttaacggcttcagcccaaaagtattttggaagaggagtatcatttaataaagttctagcaatctcttccaaagatctatttttcctttctacaacacccatttgttgagggtttcttagtgcagaaaagttatgctcaatcccatgcttatcacaaaataattcaaattctttattttcaaactcacccccatgatcgctcctaatagatataatctttag

SEQ ID NO: 282921 - DNA, 438 bp, Glycine max
aaaatttgaaacctgtatacatcatttattgggatttggggacataacaatcaacatgcaaaggagaaatggaagaaaacgcataacatagaacacaaaataaaagattaagaaataatttagaaaatccccaacaaatcgaaatggaagaaaacgcataacacggggagggaaaacaaagaaagcgccatcaaggtagaagaaggatcatgaacacccaaacaattaaccaaaaaaaatcgcacctgttgtgataaaaatctctgctttttttgagataaaaatcaaagctttagtgtgttctttgggcttctatgcgaaacaaagtatgagaaggatcatgaacacccaaacaattaatcaaaaaaattaagctttgaaagaactacaaagaaaacacacctattgtgataaaaatcgttgtttttttttaaagat

SEQ ID NO: 282922 - DNA, 434 bp, Glycine max
  unsure (1)..(434): unsure at all n locations
agcttcctctacatccaagcaaaacaacattcaaacagcacaagctatcacagccaagcanaacagagcaaaggcagagaactctgccaaaacaccaaccaaatcacagctgttctcacttagagaccccagtaacaattccttcgttccaattcgttaaccgttggatcgactccaaaattntactggaagtctatagtacataagcctatattttgaccgttgggatctactagcaaatatccagaactcattctgcactgctctttccacagccaaccacacacaagcatttttctgcacaagccaaaatcctgctgcacctatttcacagcaaaaatctgcacaaagtgcagatttcgaaaatcacacttcccctcatccaatcttgcccaaatcaattcctacaagtaccaaatcatgtatcaatcatg

SEQ ID NO: 282923 - DNA, 500 bp, Glycine max
  unsure (1)..(500): unsure at all n locations
naacctggtgnngcctanngttcngaanctagnnnannnnngtcgagnancnatatngngataataanaatagagataanagtnttgnggtatttatatctaactgtctatanggggaggatcgttgagcctataataccaaccatancaatcaatggattaatttngtattaaagnaagaaaaggtagaacatantacttttttggtgtaaagatatacgagatgtatggaaagtgaaggggaaaatggagaatcctgacgcttgctaaacggattgggcgagcaagtgagagtgaaaacagatatgatgaagcattgtgtcattatattgacacacatgaggcaattaggggtgccctaacgggaaagaaatgaggtgatctatgataaacggacagatacctaactccgatgtatcgagagcattgacttcaaaaaaaaagggagaatctacatgtcgatcggagaccataactaacagaacggtttctgattcacg

SEQ ID NO: 282924 - DNA, 389 bp, Glycine max
  unsure (1)..(389): unsure at all n locations
agctnttatattatgtngacctcgagtgtatatgggttgtcttccatgtttcaatcgtacgtagcttgtgtcttcttcacagatagggcatgcacgatggcccttaacactgcatccactcaaattcttgtatgctgganagtcattaatggtagaaaataacattgcacacaatgtgaatgtctcatttcgatacccatcaaacacaacaacttccttgtcctacaactctgtcaagggttcaatcaaaggactgagataaacatcatagacaacatcaattatttttacttcatgcactaccaaggaggtaagttgtaaattactagcanaacaagtcacaaactatgctgagttcttanatngtcatagggattcattccatcact

SEQ ID NO: 282925 - DNA, 421 bp, Glycine max
  unsure (1)..(421): unsure at all n locations
agtggtcgaagaaacacgtcattgctcgtcgtggctaagagtgaaacacaatagacagcattatacatgcaagcccattctgacttagtttcatgaactaccaacatataaggtctggcagtgaaaacctatctataaagactaatacacactgtctcgatcgataatctatgaacatctagaaagcttgctattggagataatgcaaccgccaatggtctagaccacatcaaggagagcaaatattaacttacacaaccttgagaaagtctatgtntanaagagaacaattggacagagtctatagtccgcctttttttttttttgataatcatagtgtcttcaccggaagaaacgaagtggaaactcatccttaaatcgtggtagtaaaaccacattaaactcaaaaccatactcgact

SEQ ID NO: 282926 - DNA, 435 bp, Glycine max
  unsure (1)..(435): unsure at all n locations
tctagttaaattgattaccaattattttgtttcgattacatagnnnagnngagaccatgtgttttcatgagtctctattttaatccattatcaggtgatcgtaatcgattactatgttcttgaaagtattccaaggagtgatcaagaacactttaatcaattaaatcaagaatctaattgattatattattcttgatagctttctagattttgggaagaacactttaatcgattaaaatgggaatctaattgattacttcttcgagataatcgattaccttggcaatctaatcgattacaagcagttataattgttctttataaatagtcaccttgtgttttcactttgacatgatttgaataagtgttgtaaaatgagcatttgcaactcactcactctagtcttcgtttctaaagcattcatggntaaagtga

SEQ ID NO: 282927 - DNA, 392 bp, Glycine max
  unsure (1)..(392): unsure at all n locations
agcttgttattgtttcacgaaagctctcgagaaattcagatggtcataactnttcatacggaagtctgattcaggtgcataatatatcgagaagctcgaaattgaagcacggaagctctcgagaaattgaaatgatcataacttatgacacggaagtccaattcaggcgcataatatatcaagacgctcgaaattgcacaacggaagctctccagaaattcaaattgtcataactcttcaaacggaagtcagattaaggtgcataatatatcgagaagcttgaaattgaacaacgtaagctctcaagatattcaaatggtcataactgttcacaacggagtccgattctgacgcataatataccgagacgctcgaaattgaacaacggaagc

SEQ ID NO: 282928 - DNA, 447 bp, Glycine max
  unsure (1)..(447): unsure at all n locations
cagctnctgctgcctctgcttcctggttagtctcctctgcttctgcaatggcagctgctgcttcagcaactgctcgagcagcaaatgcagctgcctcttgtggagtcatagaccttatcttttctaactctaaatctatctgagatctagtaaggatgttggtctcatccctgtcaattttcatagaggctttatgcctcccttccaaatataacacagatgagtttcttcttctgtcagaatatgctgctataggtgcaattctatacttgcgatttacctgaaataccaaagtcagccctaaagtaagatctctaatagaaacaacttaatataactcccactcaaaatgagaacattcagaatacttgtcaagctcacgtaaaaccaaatgactaataacattaaatcaagacagtggagttcctgaaattatattatataaaa

SEQ ID NO: 282929 - DNA, 377 bp, Glycine max
ctaacacatctattcaacacttgttgatcccataagagttaccaatgtcgcgtatagtgtaatgcaatgtattagttgagattcactaataaagttttcagcaccaggtgaatatgttttagtcacatctttagctttcttttcttttttgccagacagaaattattataaacacacatgtggaaaaagaagtggaacaaagttgtatagatattttcacctcaacactatttttggttttatcctaatatttatcaccccttacttcattagaaaattataagaattataattaattaccaaattaaaacaattactaatttattgtactaaatattcttacttcaatagattacaataataactttcatttttaa

SEQ ID NO: 282930 - DNA, 361 bp, Glycine max
  unsure (1)..(361): unsure at all n locations
tctccaccgncgncaccatcatcttaaaattttatttttatattatgagnacnnngatnnggagccttgtattttggctatattactatcgtattngaacaatntactattttcctattttgcatggtatgtttgaacaaatattaagtttgttgatagactatatgggttgtatagttaatctatttatgaatgttgcttcatgatacttgcttcatggattggttgttagtttcttaatgaatgccgtatggatgtttaattatttcaaattttttacgcactttggctttttgttgatgccaaagggggagagaaatgggattaaatcaagaactcacatgagtaatcaacttaattt

SEQ ID NO: 282931 - DNA, 322 bp, Glycine max
  unsure (1)..(322): unsure at all n locations
agcttgttattttggaaganaagaataccgcaagtaggcgagatgatgaatgacagccaacacaatacgaatgaattgaaagcctcatattcaaaaacttaccgattgatgaccgaagaacgaacgaacaacggcgaagaatggcggaaaatcttcatggaatcgctcatggaaatgtctcggaagcgttacggaagcacctcgacttggatttccttcctttgttaacttcttttcgctaaacaaaactaaaatacacagcatagaggtcaggggcccttgaaactcagcctcctccccctatttataggagataatggga

SEQ ID NO: 282932 - DNA, 435 bp, Glycine max
  unsure (1)..(435): unsure at all n locations
gcatcctgatactactgtntgtttatgtgaaatctaactggaagtgcggtgggtcgtcgagtaaataattaaaacagtgtgaatcgagtatcgaactcagggaacttgttttacatggaaaagcatcattcagtaaatatgaatttacgtaaagaattgattatcatgaagtaaaaatagaagtaattctattctaagtagaagcagtaattgtgagcaagtgagtgtgaaaacagatatgtaaaagcattgggtcattctactgagatacttgatgcaattagggtttttctctacttgaaattatttatgtgttctatgatgaagggacaaataccaaacaccgatgtctcgcgagtntggcctaattcaaataaacttcgttctcaaatgtctgttgttgaacttagcctaacagaacaacattacaattac

SEQ ID NO: 282933 - DNA, 169 bp, Glycine max
cactatccatgttcacacattattgcagcatgtggttatgtgagcatgatctactaccaatatatagatgttgtttacaccaatgaacacatcttatgagcatactccgcacagtggtggcctcttgagaatgaagcggcaattcctccttctgatgaggcatggacac

SEQ ID NO: 282934 - DNA, 465 bp, Glycine max
actccgcttcaggttgctaattgctccaggttgctgcacggaaggctaatgtctgtatggtggtcagcagaggagcacagaccacaaacccttgcgacaggtacagatttctgattcaaggccagctgggttaccaagttgaccaacgcatccagtttgccttcaagcttcttagtttcagatgatgcagatgggtttgtagctacctcatgcactcctctaatgactatggcatcatttctggcgctaaactgctgggagttggaggccatcttctcaattaaatttctggcttcagcaggggtcatgtctccaagggctcaaccactggcagcatctatcatacttctctccatattactgagtccttcataaaaatattggagaagaagctgttctgaaatctgatggtgggggcaactgacacatagtttcttaaatctctcccagtactcatacaggctc

SEQ ID NO: 282935 - DNA, 398 bp, Glycine max
  unsure (1)..(398): unsure at all n locations
agccttttgtcttctgattgtttggaacttgcttaactcttgattccttggcatcatcaaaataatcttggaagtcattgcttccacatctaagtctattctatacatgccttgaaatgtcatgtatgtctgtcatttgtaacatataagagaaagaacaacatgataaaaatgacagaaaatgaacgaaaaaagagttaccttttgttgatattgcacctccaattgcacatccactcaacaaagcaaccatttattntcttccccaatcctttttatttattttctgattagaaaaaaaactaaggaactatagtagaacaaagcctagataataataataataataataataatgaaacaaaaccaaaataattcccaagttttcttccctaatc

SEQ ID NO: 282936 - DNA, 329 bp, Glycine max
gcacatggttcgcgtgtatgatatccactcgatatgttttatttttatgagaccttcaatcctataaggcatcgtgacagacaaaagtgggtacttaactcgaatggccattattgtcaatgcggaaggtattccgcgctacactatccatgtacacacatgattgcagcttgcggatacgtaagcatgaactactaccactatatagatgttgactacacatatgagcacctcttagaagcatactccgaacagtggtggcctctggggaatgaagcgagaattcctccttctgatgatgcatggacacttatgcgtgtcgcagatac

SEQ ID NO: 282937 - DNA, 331 bp, Glycine max
  unsure (1)..(331): unsure at all n locations
caaacgtctcgatatattatgcgcccgaatcggacatccgtgtgaaaaattatgaccaatagaatttctagagagcttccgttgttcattctgtagagcctctatattgtatgcgcttgtatcggacatctgagttaaaagttatgaccatttgaatttctcaacagcttccgttgccaaattntgagcatctcgatatgtgattcgcatgaatcagacatccatgtgaaaaggtatgaccatctgaatttctcaagagcttccgttgttcaattatgagcgtcacgatatgtgattcgcccgaatcggacagtcgtggtgaaagttatga

SEQ ID NO: 282938 - DNA, 416 bp, Glycine max
  unsure (1)..(416): unsure at all n locations
cgatatattatgcaccttaatcggactaccgtgtgttatgtttgaccattntaatttctcaagagctggcgttgttcaattccgagcttctcgatatattatgcacctgaatcagacttccgtttgaaaagttttgaccatttgaatctctcgagagcttccgttgttctatttcgagggtctcgatatattatgcgcctgaatcggacttccgtgtgataagttatgaccatttgaatctctcgagagcttccgttatgcaatttcaagcttctggatctattatgcacccgaatcagacttccatttgaaaagttatgaccatgtgaatctctcgagagctttcgtcgttcaattttgagcgtctcggtatattatgcgcctgaatcggacttccgtgtgacaagtactgacca

SEQ ID NO: 282939 - DNA, 435 bp, Glycine max
  unsure (1)..(435): unsure at all n locations
gttggaggaatcaaatcctggaggctgctgcatgtagacttcttcttgtagaatgccatggagaaagacattgttcacatccagctgctgtatgggccagtgataggtgacagccaaagtgagaagaagtctaacagtaataggcttaataactggtgaataagtttcttgaaatctgtgtcatattgcttgagggcaaggttgattgaggctgtgatttanatgaagaggaagagggaaagaggtcatanggaaatctggactcattgaacaccacatccttagatatgtagattctgccttcagaagaaagacattagtagcctttgtgcgtaggagaatatcccagaaaatgcattcttgagactgaattggagtttattcttcttgtangagaggaanacaactaggaagtctattaattaaatagacact

SEQ ID NO: 282940 - DNA, 414 bp, Glycine max
  unsure (1)..(414): unsure at all n locations
tcaagctttaaaatgtanattcaattctctaaaagttgttatttacaatttaaacttctggtaatcaatgacataccttgtgtaatcaattatagcctttcacaatcaaattcaaaatttgtcaaactgtttcaaaattcaatttggccactggtaatcgatcagagagaaaatatcatatttttgaaatctcacaaagattttgtaaaatatcctttatccaaacctgtgttgcatcagattaacgaatctatctaagatcctatgaactaagtacatcattcttcttgaatctctggattcttgacttgaattgcgctcatctctggcatcatcgaaacttcacatcatatatgcttccacactggtagcaaccataatgtcaacctaacattcaagagtcagtgttatatt

SEQ ID NO: 282941 - DNA, 165 bp, Glycine max
ggggggggaaaaataaaatagtaagagagaagaaaaagaaggaaaaaaagaaagggaaaaaaaaaagaaaagaataaggggaaagattaaaagaaaatatagactaaaaagaaaaaaagtagaaaggtggaaagaagggagaaaaaaagaaaaaaaagagggaaa

SEQ ID NO: 282942 - DNA, 405 bp, Glycine max
  unsure (1)..(405): unsure at all n locations
acacatagaaactcagcttctgtcacctcctccttacaaagtnnntgaacacatgttttgaaggctcataaattgcacataccttaagtcctcatgaacattccctacctcaaacctctccatcacctccctagctactccctcagcattggccacaccctcccctacaataactgtgtttttcctcctcaccaactcactcagcacactagttacatcattattgttaacatggtctaaattacgcttcgtgaaggagccagcagcaacttgaccaaaaggtccagatgatggagacacattattactaccaccaagaacaacatgatggtgcttggtgatattntctttggcatggctcctatcagaagaagccttntgtgaacaagcttccattgaaacagc

SEQ ID NO: 282943 - DNA, 454 bp, Glycine max
  unsure (1)..(454): unsure at all n locations
agcttgtttgattatggtgtacccgacatatgtggggggaggtgtggatcgggcaatggtgcaagtcnactctccacatccacaaatcacacataaatccaccatccctagttgcccaccttcaactgagctcacgtactcccacgtagcccttatcctcgttcctctcaacaccgggtccgcatcaatccatccaagcattcacaacatccaagcaattcaacatgcaaacatcatgaactatccaaaccaagagaatagggccgaggcaganaactctgcccaaaacacattccaataccacagtgttcctcactcaaataccccagtaacattctcttcgttgtgatttgctaaccgttggatcgactctaaaattntactggaggtncctagtacataagtctacatgttgaccgttgggatctggctataaacgtccataacccaatat

SEQ ID NO: 282944 - DNA, 454 bp, Glycine max
ctagaaaacataccatcaaggcaaagcatgatcaagagggaaatcatttttagcgggcagtatctctagcacctctctcaataggaaaattaaagtgttaatgcacactccaactctatgtaacacctacaaagagaaaaagttaacaaatgcaatcaaagataactatataaaaagcattcatggatgaatttagttacttcctcattttctttctctgcttttgatatcactagctttaaggaagcacttaattaagacaaaagtatgcttatcagttatgacaatatttcttgcaactaaaatagagaatccatgtttcccccctcacgtaattcatgtcaaaacattctaaaatatttagtgttaaaaagcttaatatcatgtgaaaattatatcgtgaatacgatcttatatacaagggttgtgtcccagtgtcacttgaatcctatat

SEQ ID NO: 282945 - DNA, 450 bp, Glycine max
  unsure (1)..(450): unsure at all n locations
caattgcttcagattgttgcacagaagggcaattgtttgtgctgtggtcgacagaggagcataaaccatagagtctggcgacaggtgcaaatttttgattcatggccagttgggttaccaggttaaccaaggcatctattttaccttcaagcttcttagtctcggctgatgaagatgaattcgtggctacttcatgcaatcctctaatgacaatagcatcacttctggccgtggtcctggaagcaaggaaatttttttctaagaatactctcttgaggtcatcccanctcgtgatagaccgtggagcaaggtaataaagccagtcctttgccactccctctaaagaatgaggaaaagcctttagaaatatgtgatcctcctgcacatctaggggtttcatggtggagcagacaatatggaattctttcagatgtttgtatgggtcttcac

SEQ ID NO: 282946 - DNA, 435 bp, Glycine max
  unsure (1)..(435): unsure at all n locations
agcttggttcgatttacttacccgtngaagatcgaagaacgatgaagaacgaatgaagaacgtcgaagaacggttgaaatctttgcgaaattcctcacggaaaacgttacggaaacgtttcggaagcgcctcggcttagattttcttcacggaaacagtntttccaagcaaattcgaaagagagaaaagtgcctcagggctgaaccccttccttcttgcattcctcccctatttatagcaaaataggggaggtggttgccgcccagctcgcccaggcgagctcagctcgcccaggcgagcagggttgcttcctccagaagcaaccgccttctggaggaatattccagagggcccaagtgggcctgggtgctatttgcacccccatatatactangtacacccncctctgctgtttttgggattctttttcgtaag

SEQ ID NO: 282947 - DNA, 409 bp, Glycine max
gacaaactgctgaacgtctgccttctttcccctccaatatttatttgccgctattcttctttatgcgcgacagaaaccataatgaccaccttcacgagtagcatggaattcttccagaaattttggaatccaagctaatttctctgggatgacgaggcgatttttataataaagtaccccttgtctatatacaaatccagcattgatcttctccccctgtcctttgttcacttcttcgattattgttcttaacttctcatctgtgtgcacctcatcattgatttcttgccaatccaaccataccgggaagtaaatcacattgctcagtttcatttcatctctactacgggacaaatcatcagcttgtctgtctcctttccagcttataaatatctcaaattatacccta

SEQ ID NO: 282948 - DNA, 407 bp, Glycine max
  unsure (1)..(407): unsure at all n locations
gcttggttctctttgcatgcaatggctaaaggacaaggtgtgtgaagcaactaanattatattcaaattcgttctactcttgtttttgaagttcatgttattgaaaataagttattgtatcttgtaccagcatgttaattataaattgcattaattatctcaatgtatctatttggtaaataactgtatagtgtatgcatgtntgaattaactcttttatttaatagaaaatatagcagaaatatatgaacattttttaacagaagagtgtatgttgaatacaatatatatgaatgcacatatttgcatgccacttngatttagttttccttacatacatacatgatacagtgtgagtgtcgtaacatgagtaaaacaaaaaacaatgtctttttttttaatcatgt

SEQ ID NO: 282949 - DNA, 384 bp, Glycine max
actagcttcaggcttcaaaattaactcttcaaagagtatatttttggtgatcgggatgacagatagttgggaggcgtctactgctagttatctaaattgtgagcttgtggacataccttttctctatctgggtatcccgattggttcatacccaaggggctcaaagctgtgggatcctattgtcaaaaaatgtgagaggaaattggtgaaatgaaaacaaaaattatcttttgggggaagggttacactcttaaatgctgtcctaaatactattgcgatatactattttctgtttttcagggctcctgcaagcattctgtatagactgttcatggcacacgagtggtttttgtggggtggaagggcatatcgtatcattatatt

SEQ ID NO: 282950 - DNA, 374 bp, Glycine max
  unsure (1)..(374): unsure at all n locations
cttgtaacaagacaaccttatcacccnctataaatntaccatattatcaaaagagcaaaggcaacatgttatcccctctctcaaacaatccatgcacatttctttctcaatggaacaccattcccacactaaatcttcaacctatcaatccaattggaattctcaaatacaactgttctaaataatcatattgcgcaagaatcttagaatgtgggtttaggcctaactcaaccccaaaagctagctcatacgatgagggttgcccccacttatatactctatattggccttatccctagctaatgtgggacttgtgttnttcacaatacacccnctcatgcccaacacttttgagcttggtgcgtggataatat

SEQ ID NO: 282951 - DNA, 182 bp, Glycine max
  unsure (1)..(182): unsure at all n locations
cacattgaagatggtgatgccagagataatagattcattacagttctcattcataggcggangaacactgtaccacagagtattgtaaacattgcattctgcgtatgaagcatagaggcgacatatgccatgcttgctgttcaaagtagactatgaaagagcataccactccgtctcgtggg

SEQ ID NO: 282952 - DNA, 342 bp, Glycine max
  unsure (1)..(342): unsure at all n locations
ttcatcttttcatccctctcccttgccaaaagaattcccaaggactactgatgcaacctaccccgcagggcattggataaagacccagtagaatgggccaagatgcaagagaagccctaggttcttatgaccttatggtagatttcggcccatgggataatacgagcccactatctttgaaatatagataaggttcattatttggcctggatttaggctcatatgaggagggaccctaaaataangattttcacccttgtatttagggccctaacagttttgtatangggagtttgtaattacatgcactagtggatattgatgggtggtggaaaaaattaa

SEQ ID NO: 282953 - DNA, 294 bp, Glycine max
tagagacatttacattggatttaatgacgaaatctgtgcattttcacgtcaaaaagaggctaagttctgaatcgcacaatgtaacagttgggctaagctcggcagttggactaaacgcatatccaccgttaagcgcagcttcagagcgctcaccgcataggagaatctagcaaagcatgaacatcaaatccgcgcactaagtgccagatcattgcgctaatcgcataaagagcctttagccaggctaagcttgagactggcgctaagccctatttcacttactcacgctaaaca

SEQ ID NO: 282954 - DNA, 373 bp, Glycine max
  unsure (1)..(373): unsure at all n locations
agcntactttgtttattgaatatgggcgcaaagagggagcagaggtgcatgcaatgcaaggagatcgaagtactatggagaggctgagaaaatgctcagaggaagtataatggtaactgcctaaggcagtcgccttatttgatggcagattcgaatgactcgctgagcgcatggacacgctaagcccaatacaaaactatgaaattccatagaagtttttggtcttagcgcgaaggtacacgttgggtgagatctgcatctgtgataggtcttgcaactctcgcttagcaagccgcagccactctgagcgaataaaatgctccttanatgcagtagtggactgtgcgtaatgcatcgtgctctcttaacgcta

SEQ ID NO: 282955 - DNA, 447 bp, Glycine max
  unsure (1)..(447): unsure at all n locations
aatgttacttgggcttgnatcttaaanatnaaaanaagcggaggcattgtngggcgtgatagcaagaagccagcggtaagtttggacagnacngcgctgggtgatatgtgtganacaaagatcctctcccactctgtgtcttatgattgacaaggttactaaggatcaaagttaacttggcggcgcacaatcatgtgttatgatccttacccgtgagaaaagacattgttatatacatgatatggatcttatcagaggtctgggagctggagatggagggaacccttcgctgctgtgattcctagtaaatggtataccaacaactgcgtgtatcggcatgcttatcatatggttagaactgaagtaaggaagaaaatatatgaccacctgttaggcagtgcantgtgaagacccggatcgggtgtntgctattgttgcgctccaccc

SEQ ID NO: 282956 - DNA, 316 bp, Glycine max
  unsure (1)..(316): unsure at all n locations
gtgatgtacacgccacctgacccacangcccgatagtggaccttgcatgnaaatggagataaccagctcgcggggatgcgcacccctgtcgggaggcatagccccttgcccganagagggaagtgctgtgtgcatgagaccgttgtctccaagggaaaggagatccttattttatataacccacatgaccagcagaggagtgataatgttgggccattttctgctatctacacccccaccacactaccatcccaacatcttgagaccttaatgaagggaattacggacccaaatggttccagcatgcatcatacac

SEQ ID NO: 282957 - DNA, 451 bp, Glycine max
  unsure (1)..(451): unsure at all n locations
actcagcttaagttgcccgagtcattcatccctatgaagngtgttgattattggcgatcgaaangccattccctggttatggggttgaaccaagctcatgctttttcgaaaaaagttcatcaaatcaagttgaagaatggaagtaactatcttgcaaaaattggggcaaaagatgaatcgagtcacatcactgcttcgtctactgccaaacatatttaggattgttgatgttcttgttacttccagtttcaccttgacaaagatgtcatagaccatgtggaaaatctaaattgattcaaccccatatcctgcacaatacttcaactgtacatcattcgcatacatccatgcttttcattggttgcattgctcattgcattctttccttgaaaaagacacataaaataaataaataaataaaatanaatcaaaatgatcttaatcattggta

SEQ ID NO: 282958 - DNA, 364 bp, Glycine max
  unsure (1)..(364): unsure at all n locations
gctggatcatttttatccacagtgctntattgaatgctgtggttcacaggtagagacctgactcacacatgttacatcttcctgttggtgaatgcagaatcaccttgganagtgttgctcttcaacttgatttatgcgttaatggacgactagttactagtgcaacatattatgattgggaacaaatgtgtgcaacatatataggtgttgttcccccaaagaatgcattggtgggatcaaagcttaaactataatggttaatagataacatgttgactctcccaacagaacccttaccacaacaattagcagcccgttgtaggcatacattatacggttgatttatggttgttgatgctaaacc

SEQ ID NO: 282959 - DNA, 431 bp, Glycine max
cttgataataatggtttttggtagtacttgctatcttgaaatattgacaatatattttgagtgtttgctggagctgttttggatataatgaggggatgattcttttattcataaacttagatgtactagaataaacaaacccacaacttgggcttatgtgacaaaggtaatgtgattatcgtcattgtttattacattatttgaattaatcaaacaggaataagaaagttttgcaaattctttttttttttttctcaatctgcatggcctgattatgggaacctaattaactggttatgggttctgatgtgtgttatgaataatggtgatagataacataagagtggtagtggtgggtaccagagcaatttggaaacattaaattgtggtgtaaagtatccctgattgtcggcgaaataatgcatggtagt

SEQ ID NO: 282960 - DNA, 503 bp, Glycine max
  unsure (1)..(503): unsure at all n locations
naatttgatcttgaganctaggcaantagnnccggatgttcatcaccgcggctgcaagctgaatgtcatcttgtgataggacgaccagcgaagtgggaagagctaccgatgttcactttcccgctcctcgacatattatgcgcccgaattgtacatccgtgtgataagtattgaccatttggatatgcgagagcttccgatgcttaatggcgagcgtatcgatatattataagcctaaatcggacatccgtgtgaaaaggtatgaccattggaatttctcaagagcttgcgttggacaatttcgagcttctcgacatactatgcgcgcgaagcggacattctagtgagaaggtatgaccatgtgcatatctacagaacttccggacgttaatttcgagcggtgcgaagtgatataaacctgattcggaccctcgtgcgacaagtatgactctatgatttcccagagctccgtgtcaattgcagcactcgattccaatggatct

SEQ ID NO: 282961 - DNA, 438 bp, Glycine max
  unsure (1)..(438): unsure at all n locations
gataatggcactggattaaaaaaaatgtcctgtattctaatgtgattggatggngaagaagagaagagaaccctaaaaaatttatgcctatctcccaaatgacgatcttgtcctctgtaacttttcaattcatccgcgctagtgaaagggtgattctgcctttgtacagtgaaatttgctgcatctctagatataattaaatgtaaaatcaataactaaatttggatgcaaaaaatcataatcataataatcatttttttatatagaattcttgaaagggaatggaatggcctcaaccgcatccttttgtaacaacttgtggaaatgccatgtgcaacgctcaccacataatattctctatcttttcctaaatagcaatctttctctgccaatctcagaaaagaaattatactttctatcctaacagaatatactata

SEQ ID NO: 282962 - DNA, 355 bp, Glycine max
  unsure (1)..(355): unsure at all n locations
gagtagtcgaagagaagttcaagtccatagccatcanagtctgaaaagagtatgatgaactaagggacgtcaatatggccaccgctgaagccttggaacgagaaaccaagaaggcccganaggaagaacacgtgccagcaaagttttgaggggctttatagggcagcaatagtaagctcaagctccgaagaggtgaaaggaatcatcaagggtcaaaggcatgatcttgaaagacgagctaaaggcttaccttatgtcgaanagaaatttgtcccaacagttaagcgagactgaagggaatatgtgggccgtcatcgatgagtgcaaagagaagctaaatctagcggcgactcac

SEQ ID NO: 282963 - DNA, 451 bp, Glycine max
  unsure (1)..(451): unsure at all n locations
tcttagtctcggctgatgaagatgaatngttgtgcttcttcattcactcctctaatgacaatagcatcacttctggcactaaattgctgggagtttgaagccatcttctcaattaaatctctggcttcagcaggggtcatgtctccaagggctccaccactagcagcatctatcatacttctctccatgttactgagtccttcatagaaatattggaggacaagctgctcataaatctggtggtgacgacaactggcacataatatcttgaatctttcccagtactcatactagctttctccaccaagttgtctgatgcctgaaatgtcttttctgatggcagtggtcctagatgcaaggaagaatttctccaagaacacccttctaaggtcatcccagttgaaaatagacctgtgagcaaggtagtatagccaatctcttgccactccct

SEQ ID NO: 282964 - DNA, 341 bp, Glycine max
  unsure (1)..(341): unsure at all n locations
agcttctttgatatctttcttgagaagctagagcttactacgcacgcccttttatatctaagctcacctccttgagaagcttccttgagaagcatccctgagaagtttccctgagaagattcctagagaagctagagcatagctacacacacccatgtatagctaagctcacctccttgagatgagaagctagagcttagctgctacacaccccctataatagctaagctcacccccatgcaaacatacatgagaatagaggagagtccttactagaaagactactcanaattccctgaaatacaaggctaaaaccctatactactatagtggccaaaata

SEQ ID NO: 282965 - DNA, 457 bp, Glycine max
tctagccaaatggacttaccttgaattaattcctttgatagcttttttgagccttgtttccctttccttgttgtgaagctcactacaagccttaagtgaaaaaccatgatattaccatatccttaaggaattttggagctttggaattgttttgggaataagtgtggggggtttttgtttcattggacaacttgttttgttgactatgcttcatgatgtattttgggccatacttgatgtacattgtatattggttaaatgttggacatgctgaatgaaatgttgtttctcaaaggcagaaaaaaaaaaaaaaaaaaaaattcgaaaaaaataaaaatttcgaaaaaaaaaaaagaaaagcattaaagttgagtgaataagatcttaaatggcacaagaatgacgaaactctcggttctactctacatgttaaacttttatctttacttcttttatt

SEQ ID NO: 282966 - DNA, 306 bp, Glycine max
  unsure (1)..(306): unsure at all n locations
atggcctctcggatacgcaccgccattttgcataacataacacacactagctccttatatggaagccccaaatattggtggttgattcgatgtgaattagaacttggaattgtacaaccctgaattctgagatccaactttgttaaacgactcttcataggcccacagctcataatcgaaacgaacccgtaaccctacttcttgttcaatcctccaaagccaaactttcacgttggtggtanaaagtacgtatgccgctttctacattagaaaccatgagaatctctatatcacaaacctatgtgt

SEQ ID NO: 282967 - DNA, 456 bp, Glycine max
tatacgttagtaacatgacattgtgtcatactttgacatattatcgctcaacaaaaaaatattttattagctgaattgcattgttttaaactccttttatatattgttgttagttttatgtgacatttactattgacattttgttaaccatttgacaagtgtaccaaatgtccaagtagtaaagactcaaaagtctgagtgttgattttcacagggattttattttgtacttgtgttggataattttcaatttatacgaggacaagataagatgaggtataaaagatgaatttaaaagaatagtaattaaataatagatattaatagaaaacaaaaggaaataatagaaaattcaatgagatgagaatgttagaacctaacatgtcttatttgcctaaaatgtattcattgagatttttctctatcaattagggttaatttttctacccacatcta

SEQ ID NO: 282968 - DNA, 451 bp, Glycine max
  unsure (1)..(451): unsure at all n locations
agcttcatgttgctcattgactccagatngctgcanagaaggacagagatctgtatggtgatctgcagaagaacatagaccacagactcttgcaacaggtgtagatttctgattcatggcaagctaagttactangttgaccaaggcatcaagttctccttcaagttgtttattttcagtagataaagatgaattcgtggccacctcatggactcctctaaggacaatagcatcatttcttgcactgaattgttgggagttggagccatcttctcaatcaaattcctagcctcaacaggggtcatatcaccaagagctccaccactggcagcatcaatcgtactcctatccttgntgctaagtccctcatagaaatatcgaagaaggagttgctcagaaatctggtggtgaggacagcttgcacacaatttcttgaatctttcccagtact

SEQ ID NO: 282969 - DNA, 449 bp, Glycine max
  unsure (1)..(449): unsure at all n locations
gggttcgaggtacttacctgttgaagatcgaagaacgatgattatctattgaagaatcgtcgaagaacggttgaaacctttgcaaaattcttcacggaaaacgttacggaaacgtttcggaagcgcctcgacttagattttcttcacggaaacaatttttccaagcaaattcgaaagagagagaagtgcttaaggggctgaacccttttcttcttcacttcctcccctatttatagcaaaataggggagatgcttgccgcccagctcgcctaggcgagctcagctcgcccaggcgagccaggttgcttcctccagaagcaacagtcttctggaggaatcttctggagggcccaagtgggcctggttgctatttgcacccccatttttactaagtacacccnctctgcttttttatggtgattctttnttcgtaatgttacggaaactta

SEQ ID NO: 282970 - DNA, 410 bp, Glycine max
  unsure (1)..(410): unsure at all n locations
gcgcatcactcgctgtcgcacttgctcaccctcaagccgcaaaaatctcctcanacagttccggtaatttctttctatcattntcctcccttttatttgtttaataattgtatttccgtttattaaaatgacatggtaaaattatatcgtcaaccaatgatntgtaccatcgagcaccggatgaactgatataaattgttctagcttaatcaatagtctcaagtttatgagatataangttggcccctgtggttaacaaaactgacaaactaacatttgtggataaaaaaataaaataaaaatatgatcttgagtntactgtattcagtatgcagttgtgttaaataatcgaaatgagacatttgttgcatacagtaattttagccggctcgaacaagattgactctaac

SEQ ID NO: 282971 - DNA, 435 bp, Glycine max
  unsure (1)..(435): unsure at all n locations
tgtcttcacaaataatcatcatacagcagaaacctatctagacttttcatcatatctccccaaaccccatacccacgaaaatcaaaggagaaagaagtccacccaaacctgaattttcgaagtcccactcgtagccacgcacttcacgaccccgaaaatgctctcctttcacgatttggtgcataaatgagcaccaaatgttgaagctttgtgtggagcttcaatggtgaatgaggaagaagagaatggcaacgtgagggagagagagggctgtctgaaattttctgttttgctgagtgaggagagagaaaagctttttggtcttaaataaaaagggttttccctttttccattatattatttatgcaaaagccacatgtctccatttgagtggagcaagaagggcccactntcccttttgactgtgacccacac

SEQ ID NO: 282972 - DNA, 412 bp, Glycine max
  unsure (1)..(412): unsure at all n locations
gcaagctttctatatannntctatgtcccgggggggccacggcgggtgttgagtattattattctcattccatttacttcttataccccctcttgacgtgcttaagccactttacttaagtcatatctcgcttaacttagaaataaaaataaatctccaccgaacgtttgaattgcattatccgttaacttcggttaaaatgaatgccgaccattcggtcgtgccgtaaccacgttggatatcaaaaagagaggtaaaaaaaataatataataatcagaagacatcttttagtataataaagtggaaaatcaatcggacgttttctctttgggatntctcattcttaatcgaattgagaataactaaagtgaaactaaggctaatatcaactcgcctagtctagctcgtcca

SEQ ID NO: 282973 - DNA, 438 bp, Glycine max
tataaatactaagcttcgctaaatattattgctttgaaacgctcatgctacgctactcatgcatattagctatcttatgacaggagcagtgatcgtttaagcaatagtcaaataccgagccaaatccagagacagagacgaatcgaggtaagcggtaatgtggccactatttgttgcgcaatgtcgttgcctgctttcatgtacttacggatgggcacgagtggaggctatgcccatgatcaatggatcgtcgtgccacgtccagcttgtgacaagcgagaagcgctactgggaagcaggctagtatcctttaaattcctacttattattgttgttgtttctttgaggagatggtcgaatgcctaatttaccctaaggggttcgagtaagcgaacaccgacccatatagagcgcgtacctttgtgttagaaaaaatgc

SEQ ID NO: 282974 - DNA, 353 bp, Glycine max
  unsure (1)..(353): unsure at all n locations
atattgatgattaatctcatagtatgataaagtgaccatagttttntaggatatctcaagggctaatcaaggtgtcagaggctctacttatggtattaaaaaatattatttttctataaaaaaaaatattaaggactactttttgtctccactaaagaaagttactgaatcctccactatatttaagccttttggttatgcatatgagattcttacgtttgagcagcaatgcattttcatacttttcatgtaaatgaattcaatgtataaccttaatgacttgagttaacctcaaagagtttcataatcgtgttcgaaaactcaaaaaatcaattgttaaatttagttgaact

SEQ ID NO: 282975 - DNA, 420 bp, Glycine max
  unsure (1)..(420): unsure at all n locations
agctntgaacttacatctaaaaatattgaagggaatgttacacaattaaatcaaatcaatcactattgtgaagtgaatcanatatataaagaattaaatctagacgtataatcaaatatggacggtaaaatttaatcttaacaagtcatgtgagttttttaaaaagtgtgtgactttntaagtaattatatcacataaaatcttaacctttcatgtatgattaaacaattcanatttaatcttttcactttcatataagatattntatctcataacatatatcttatatatagaaagaatagatacccatcaatttatgtcatcatgggctcattggcagctntntttntttttttaagtataatggttatctaacaataaataaaaacagaaaacattgaagtctttgaaaaatataaa

SEQ ID NO: 282976 - DNA, 450 bp, Glycine max
tactcaagctcgataggatcaatgtagcgagcgtagtgtttgctacaacttatgtatacacaaggcctaactgagaaatgacattgtgggggcaatggaaagaaggaaaattgataaaattgttattctattatctcttattcacaacaaaaacacgatattactctaaggagctactatgcatacatcacatttcatatttacatacaaacacacaaaaactcactatttttatatgttctcgccatggcaaaaggaaattttgctctggcgaaaacatttctgacatgattatgtagaagcagtcatataaatttcaaagctaacactcacaagtatcctataaacaatcatcaactacaaagcttcctaaactagtttatcgctcgcatcctattactacttgttgttgtggatgtgatatctaaccggcaagtgcaccgggtcgtc

SEQ ID NO: 282977 - DNA, 415 bp, Glycine max
agcttattattattggtttacggcaattacctgtagtctttgtgtcacatccttccatctgaatcttgttgattcatgttgtaatctatatgcattccactggacatgcatagcacatttacatacactgctgaatgataaactgtttgacctcactatcaaagctgttaatgatctttaatggtttccattttttgatagggggcaagttgaatgggatgcctttgaatggatgcatgttgagtgctttcctaatttgatacagctggcttgcttgttacctcagaaagaagataatttatgaagttaaatttcaaaggtcacttgtctatcttgtgaagttgttaatttaattattttatgacttctgatcatagtttgttcggagcttttgctggcataagtcatttagaca

SEQ ID NO: 282978 - DNA, 437 bp, Glycine max
tgcttctacaggcatgtcttgatacgtccaagcaaagacgtcttggtagtccctcagcagggccactaattcttcatggatggggcggtcatacccgtgcctacttttacttccttcttttcactgccggtacctaagtttacgagttctgtctcttcttgatgggccttatctcttgatccttatgagtaaatatcctctctagctctgggggaagccctacgtcttcgtcttcttcatcctttgtccaactcgcttcttgctcgaaatcgacggctgggtccccgagattagtaccttggtgggactcgtcgttgaatctgtaccgtgtaagcgtaacaaggacataaacatgcaaatgaatgataatgggtagacgcgcatgaacagatcaagagaaatctttatattataaattctagaacaaaagacataat

SEQ ID NO: 282979 - DNA, 345 bp, Glycine max
  unsure (1)..(345): unsure at all n locations
tcattaatttttttctttaccttctcttccattgttgnttcttcaattttctccatgtatctcctcacatgtcttgtactacatgttattaacatgattctgtagaagtttcaccgattaaacttgctatacaagctagatttgattgtctatggttcaaatgtctctgtcttgttcttgaaccatgaattgtgataagtataggttcctttgagtgttgtcttagtatgctttgtggctgaaacctataccataatattcttacaataatatcaaagtatactagactctcgaatatctagagtgacttgatcacctattgacgtttgtcatataagtcatgtc

SEQ ID NO: 282980 - DNA, 452 bp, Glycine max
  unsure (1)..(452): unsure at all n locations
cgaagctgaatntggtcgttgcttacgtacgcttaatcctccttatacatgtaagaagtaagaaaaaagaactgaagataatactaagaattatcaaagttaattaggtcccatagaaactacaatcattcttaaaagtactctaagccccaccttttggggggaacatattggcaggtatggtcaaatagtgcaaggtcgactaagttgtcttatttcgttattgcagccattgttgtgcacatgaatttcttgcaagcttaattaggttcttttgatctttaacttgtaattactaattgttagatatataacttttcacctgctttgattgctaatgctactatggtcaaattgaacaattagtcagaattaagtaaccataatggctgttttagagtcattacaagtgtgagatcacactatacttacctaccttacacaatatcgct

SEQ ID NO: 282981 - DNA, 453 bp, Glycine max
  unsure (1)..(453): unsure at all n locations
agcttattctttcttgtacgtgaatttcaaccatggaccatatgtatatatatagatgagagatcccgagttcaactcttccattaataaagaattaacaattaacaattaataactagcatttgttgataaatatatgtctcaatctaccattccaccacctatatggaagcacattgtgtcattgtgtgtatgttttaaggtgaagctatataaagttatatgatattacatcatttatattataattgaaaaaatttatactattttttaaatgagaaataaattctcttaaaaaatgaaaactaaatataaattatcgtatgagatttttcttctataaatagtggattggtattacttatattttgaaacanatattcagaataacaaacaacttctacaaatcaatgtttttcataccttaagcangcatanataattgaacacact

SEQ ID NO: 282982 - DNA, 447 bp, Glycine max
aactataaaactcaagctgggcccttaattgaataagtcacgccagaatccagattgtctgtttaataggggtcccagtcagaaaccatactccaagggaaactgtggagtttgcataccatatccagaaaagggacaacaatcttgtgggcagtgtatttagggggtaacacaccaaagtgggctctttataatagcgatctacaaccaccagaatagccgtgaaatcgttggaagggggtaagccgatgatgaagtccacgctgaggtcttcccatattgacgacaaaatgggaagaggttgcaaaagacccgtgggcttcttggactcgtatttagtttgttggagagtggaacactgagcaagatattggcgaacgaccgaatgaatttgtggccataagaaattggcctatagatgatgaagtgtcatggcgacacccatgt

SEQ ID NO: 282983 - DNA, 408 bp, Glycine max
  unsure (1)..(408): unsure at all n locations
agcttctcatattataccacaagttcatcaatgatctgtcgctgtttcataacataaatccataataataattaataaggctgataattgaagtgaccgaaccattcataaagttcataaaaaagtacaccctggtttactaaggttgagaataggtcatcatttacaaaatcaattatgatatgacacgttggctacaaaatcaacagtaatcagacaaaatgaatgattatataccgtctgaagtagtntgttctctggctgcatgagtccagcctacaatatatctttgaatcagaatttcatataatatttgattaacttgggaaaaactctcangaagagaatatgacggaagagaatgtaaaacgaatattctatcatccacattcatactgattgaaaaat

SEQ ID NO: 282984 - DNA, 463 bp, Glycine max
ctcagcttcccttcaactcttcaaagctctctgagcctcttctcttctcttgaacccatccttcttggtaagttcagtcaatgggttagctatcttgccataatgtttgatgaattttctgtagtagccagttaaccctaagaaccccctcactcccttcacattcattggggttggccattgaatcacactttcaatcttgctaggatccactgctacaccagcttgggatatgacatggcccaagtattcaatggtgtgttgagcaaaatgacacttctttttgttggctactaacccatgtactgctaacagttgcaaaacagtttgcaaatgctccaaatgggcttcccaatcaacactataaactagtatatcatcaaagaaaactaatacgcatttcctaagcaaggggttaaagacatcattcatgaggctctgaaatgtcgagggtgcattcatt

SEQ ID NO: 282985 - DNA, 291 bp, Glycine max
  unsure (1)..(291): unsure at all n locations
tccaaatgaaacaatagatgatggtggacacttgaccatagtttcctttaatcttgtgttacagccactcccttgttgacatgggagacatgtttgacgtagcaacttggactttgaagaaatcccacacttggagagactaataacaatcacgaaataagtggaggattgtctcattgtcttggttgcatttgcaacaagtatgattatgagaaaggtgacgctgttacanaaaaaggttagtaggcaaacaatntatattagataaccataggaagtgttaatgtatct

SEQ ID NO: 282986 - DNA, 452 bp, Glycine max
  unsure (1)..(452): unsure at all n locations
gggagagaggaaagcataatcatttcttagaatatttanaaatatgagacaagaggtagagtttcaacggatgagacgaaaaccagcttaatttacaatacgattttcagtattttataatttgtagcagtaccacctattagggttggggtgtgggcatattctcatagacagaaaatgggtgacatacgcatgatatgataagcttacattacgcaagtaatttttttttatatatattaattatagtatttcgtaaaatgcgctgtgcttttctttttataacttttagggtacgaaaatacctttgtttaagtgcacactagctataccaaaaaattacgatagtaaaatgtgtgttttattaaaaagtacgatagtaaactttattaagggatatacgagcatagtcttttatttaataaaacataaagtttgggtataaatattac

SEQ ID NO: 282987 - DNA, 331 bp, Glycine max
  unsure (1)..(331): unsure at all n locations
tgacaatatatgtctgaggtaacattccagtatgatcatattatagcaccattatgaagactctctatctatagttcatgtgtggctaatcacatccatagatagctatgtgtcataccctaatntcgtccggagactattgtttgatggcatgcnaaccttggttgaccgcttcgaggtactttggcaccctttgttgcataatacgtgaagtttcgagacatgccggaaatcaaaaggaagcattgtacgcaatccgtgaatttcgtaacatgccggagatcaaaagaaagtntngttacgcaatctgtgagtntccgtaacattccga

SEQ ID NO: 282988 - DNA, 448 bp, Glycine max
taatgattaaggggttgtgaagcatacaataattaatgatgggtgagccttattcttaatcagcgcaatatagtaactttgagaaaccacgacacactcaataaattactagccaagagcttattgttcaatgcatatattctatgtcgtgaacagcttcattttcttttatcaaaccaaaatgtactttgtaaagatcccaaaggaactgatggaccatagcttatactttttgtatttggacagtatgatacaccattatgaaattgtaactttttattagcatcacgaattgcaatacaaaacagcaggggtacataagtcgaattggtaatttgtgaataaatatcggcttagatcatggccatcacagtgtacgtagtgattaatcatgcatcataattgatacataattgaccattatgtcacattctcctttctcattgaa

SEQ ID NO: 282989 - DNA, 408 bp, Glycine max
agctttattatgtttagagagagagagacattaccatgcttgtgtcacattgtagttatgcttaatgttatattactatgtttatgtcatattgtacacttaatattatataatttttcaaataaacatgtgcttaatgtgtgtgtgacatatatgggcgtaatatcaactgatgcaatcctagcccccaagggcattggatagaagactccaagaagattgggccagagatgcaggagaaggcccaagggttttcaagggccttatgatagatatggggcccttgggctcagtagatcttgggcccatttcatgctccttctctccttctacctccactcatgttcttctaccttcaagctcttatccatggcttactatggtggtgagcttgttcttgaatcatct

SEQ ID NO: 282990 - DNA, 441 bp, Glycine max
tatcaaactcaagctgtcgacatcgttcgcgtgtatgatatccactcgacaaggtttgaagtagatgagaccttcaatcctataacgcaacgtggcggacaaaaatgggtagttaacttgaatgaccattattgtcaatgcggaaggtattctgcgcttcactatccatgttcacacattattgcagcttgtggttacgtgatcatgaactactaccaatatatagatattgtttacaccaatgaacacatcttaaaagcatactccgcacagtggtggcctcttgggaatgaagcggcaattcctccttctgatgtggcatggacactaatccctgacccaactacaattcgtgcgaaaggtcggccaaaatcaacaaggataatgaatgagatggattgggtcgaaccatctgaccaccgacaaaaatgtagtatatgt

SEQ ID NO: 282991 - DNA, 355 bp, Glycine max
  unsure (1)..(355): unsure at all n locations
agctntatactttgtaccgtaagatacacgtatcattcgaggtgagctatttggtcaaaagagcttgtgtctatacaattcatgaccttcatcatgttctgagttatacaaatgattctagaattcatagaatcatgcaaagatcattattcacagttagtcattcactcacagagtaaggtcaaactctcaccggttnttggttcaagctcttctttcacacttagtctatctagtgactaaccattctattataagttcacactcttgtgctttctttgtctaacatacacatatgctcaactcatgataagagacacaaactacatccaaatcatgcactcgattcaaaata

SEQ ID NO: 282992 - DNA, 467 bp, Glycine max
  unsure (1)..(467): unsure at all n locations
ntgagccanaatcctgactcaccatanaccttgacccagggtgttattgtcaatccttaccctcggaagcaaaaaaagaatagaggggaaatttccaatcaaagaaaaagagaaggaaaatttccaatgaaagcaaaaaaagaaaagaaggaaaattccccaatcaaagagtgggagaaagcaaaaagaaaagaaaggaaaattcccaatcaaagaatgggagaaagtaaaaaaaggaagaagaagaaggaaagaaagctcctgatcaaggatcgaaagaaaacagaagaaatgtgcagagaggtctttggaccggacaatatctgaacaatacagaattgccaccaaatgaacgaataaagaaggaaagggaaccacgacctanaatagtcttctccctttgattaccaaccaaaatcccgtgcgctagcgaccgcttttttctcgccccgcactaaacaaaaaaa

SEQ ID NO: 282993 - DNA, 404 bp, Glycine max
atggaggaaaagacagagggagagaaagatagaggggggagcaccacattgaaggaataaaagaagtatagaagtggaactttgaagtatgtctcacaagactctcattcatcaaagttacaacaagtgttacacatgcttctatttatagactaggtagcttccttgagaagctttcttgagaaagcttctttgagaaaacttccttgagaagctagagcttagctacacacacccctctcataactaagctcacctccttgagaagcttccttaagaagattcctagagaagctagagcttagctacacatacctctctaatagctaagctcacctccttgagatgagaagctagagcttagctacacaccccctataatagctaagctcacgcccatgaca

SEQ ID NO: 282994 - DNA, 446 bp, Glycine max
  unsure (1)..(446): unsure at all n locations
atcaaccagcttcacaagcctgccttaaaatgtttcctgcctntttttttacttgtatccctagctataactctaaggctagtgaaatttatttcaaagaggcatgtagtgcattaaatgcactgtagactttggatggacacaacaattttccccttccagccagaggggaatatcctcaatttctcataggcaatccatatcgattagctcgacacaaagttgaagcttttctcgtgctacaactttactcatcatattcgtaggatttttatcaatgtgaatcttttccaacttgaagtgttgttcttccacttctcgttgcaacaaatggtatcttacatcaatgtgatttgtgagagagtggtacatcacattcttacttaaatccaaagcactttgactntcataatgaatcatgtaactntcctgcttcattcccaact

SEQ ID NO: 282995 - DNA, 169 bp, Glycine max
  unsure (1)..(169): unsure at all n locations
agnctctatctcttacactctctaggcggggaagctctggcgggcatggcttattcactagtgggtggtgcctcctctcacctctgcttcttgatcgtccgatgcatctccgtggttgagtatcaccggtgcaggacctcattgaagctcaaagatccaaccttcatat

SEQ ID NO: 282996 - DNA, 447 bp, Glycine max
  unsure (1)..(447): unsure at all n locations
agctntgactttattgtgatgcacttagaanacacaacagcagacaagtataagaaattatcctttttttattangttgttggacttaatggatacaaatacttgtatttgttttttttttgtgtatttcatatgcagggttggatctgctcattgggctctaaaaaaactattacagaatagccttagagacctatgtagtgtttgggaagccatgaacaacatgatcacgttgcaacacactgaaattaagatatcttttgagacaagtacacatatggttggacatgtatntaaagttaccttatacaagagactatttggcatggtatctaggtatgctatacatcagattgctattaagtttgagtgtgtacattatgctagcanaaaccattctcgttatggaggtgtcatgataactattcacgtcttccacatgcatgt

SEQ ID NO: 282997 - DNA, 428 bp, Glycine max
tctttccttcctaagatggttctctttcccagtccccctcattaagaactagctcctttcttcctctattgcccttagttgaatacacctttgtttggttctctatttgggtcttaaccctctcatgcaacttctttacaaactctgacctagattccccttctttatgtataaaagaagtgtcaagcgggaggggaatgaggtctaagggtgttaagggattgaacccatagacaacctcaaaaggggatcgcttggtggttctatgaacccccctattgtatgcaaattctacatgagcaagatactcatcccaagacttatggttgccttttagaagagcccttagaagagtggataaagacctattcactacctctgtttgcccatcagtttggggatgacaagtggtggagaaaagaagctta

SEQ ID NO: 282998 - DNA, 188 bp, Glycine max
cactaccgcagctccggccaagctgtgctgaatgaagtgtatcaacagctgttcatctctagaatgggcgcccatcttacggcagtacattatgagatggtttttgggacaagtcgtccctttatacttgtcgaaatccggcactatgaacttcgggggaataactacatcgggtactaatcaaagat

SEQ ID NO: 282999 - DNA, 434 bp, Glycine max
gtgagggtgcgtagcccaccatcttttcatagtagagtattgattatgtgtctaccatcacgattatcggctccctttccatcattgggagtaccacttgggccgccagatccctccaccttttgggcgtgttctttgaaagatccgtccccctttttgcaaatgttctgtagttgcatcctatccagaaccatatcaaaattgtactaatactgcctaacaaaggcaaccattatgtccttccaagaatggactcgggaaggttccaagttagtgtaccaggtaacagctaccccagtaagactttcatggaaggaatgtatcaacaattcctcatcttttgcgtattcccccatcttctgacaatacatctttagatggttcttgtgacaagtagtccccttgtacttgtcaaagtccagcaccttgaactt

SEQ ID NO: 283000 - DNA, 402 bp, Glycine max
  unsure (1)..(402): unsure at all n locations
agctttatgtatatggagtacccatcacatgtggtactaggtggcggtcgggcgatggtgcacaacaaattattccacattcacaatgcgcacataaacccaccatccactgatgcccacctccatctgagctcacgtactcccacgtaacccatatactcatttctctcaacaccgggtccccatcaatcctcccaagctagcacaacatccaagcaaaacaacattcaaatagcacaagctatcacagccaagcaaaacatagcagaggcagattactgtgccaaaacaccaaccataagcacagcttctctcacttaaagaccccaggaacaattccttcgttccaattacataaccggtggatcgactcaaaaantttactagaagtctctagtactt

SEQ ID NO: 283001 - DNA, 449 bp, Glycine max
  unsure (1)..(449): unsure at all n locations
gtgagccanaatcctaactcaccataaaccttgacccattgtgtgaatgtcaatccttaccctcggaagcaaagaagaagagaaggaaaatttccaatcaaagaaaaaataagaaggaaaattcccaatcaaagagtgggagaaagcaaaaagaaaagaaagaaaattcccaatcaaagaatgggagaaaaaaaaaaaggagaagaagaagaaggaaagaaagctcctgatcaaggatcgaaagaaaacagaagaaatgtgcagagaggtctttggaccatacaatatctgaacaatacggaattgtcaccaaatgaacaaaagaaagaaaaggaaaccataacctaaaagtggtcttctccctttgattaccaaccaaaatcctgtgcgtcggtgacttgctcacctcgtgtcaaacaaaaacagaaaaggagatatccaaaacacac

SEQ ID NO: 283002 - DNA, 372 bp, Glycine max
tactcagcttcttgggttgctggctttatagaaagttcattgattttttctttttgcattgcccctaactaagggactctaagaatgagaatttttctggaatgagaatgtgatcaaagttcaagagttgaagagcggttgacgacagctccatgttaattttgccgaccctaaagacatttgaagtgtattgcatgcagcgggcaagctgggtgtgttgatgcaagaggaaatagtggctatcttccgtcatacgtctctgaattactatcactatgactgactacacggtggtttgcttaagattgaggctttttgcggtctcgtttagtttcagtgtcacaatctaaatacttgtcatcaaagactcat

SEQ ID NO: 283003 - DNA, 461 bp, Glycine max
  unsure (1)..(461): unsure at all n locations
agctntgtatgttctanatagcttatcactgcattttttgagaagaacaatattgcaactgcttggttgttttgtttcaataatatgcataatgttgggtacattgaatatggaatataagtttgtcatgtacaaggttatgtgcaggctaaaaattaagtggctttcatcgtgccacaagaatactatgttagatttgtattagaattgtatactaatgttagttagatattattcttcttatatgattatttatgcatcaacatttattgatatcgactnttttactctatatggagtttagaattgatgaatgaatattacaggaattgctacgaaatagcatagataatgatgcagattactagaacacctaaggagatgttcatcaccattataccaaggatcaangttaacaattattgtgatattattgtcattntgattctgatataacatat

SEQ ID NO: 283004 - DNA, 329 bp, Glycine max
  unsure (1)..(329): unsure at all n locations
tgtatccagtgtccttganaactgagaatgccacagtccttcctttaatatctaatgaggaacatcaacaggtcggaggggtctctccaattcttgactgttatgtatagccgaaaacttccttgaacatgttgtctcgaaatccttgtgctatgtgccgtgtcctgaatctatgtgctatgctattttccttaatttgttcatgccacctatcatctatgggcatgtcgatacatatgactagcttctctttattatgatgataaatgagaaacccttcaaagccccctaatttctctcagacattctgacccccatgatatggaccc

SEQ ID NO: 283005 - DNA, 397 bp, Glycine max
  unsure (1)..(397): unsure at all n locations
agcttcatcttcttcctcgggagtgaatgttncttcaacttcctcatgttcccctccaccctgtccctattgcttcctcaacttcctgaaatgtagataatagtgtcaatggttcctcantttttctctgtaatgtccaagtctatttgcattggcattttttgtgaagtgtgatttcattnttcggtgaggtttactctatttatttggtgcagctacttaaagaattggagagttacacttcaatttttaagaataatcaatttctatattttggtggaaaattatgatttgtaaaagtcttatcaatctgtttaattctaatttaagaggaaaatcttattttgagtaattntggtaatgttgacatntttaaaaatagaatatttattcttga

SEQ ID NO: 283006 - DNA, 418 bp, Glycine max
  unsure (1)..(418): unsure at all n locations
gatgattctctacattaatgtataatgttttatattatcgagactcatcatgcaaaagtgtaaatcgtcaaatttttaatttcaattatgacatcattaaggttaatatataatactttaactgatattattaaaacattcattcaataattaacatgtaatcaattaatatttatccaatatatccaatgtcggtgctaatagtaatacttaacatattatttcgagcgaattttgtataattatcatcatcgttattgaatcagatcatctaacatacaatgattcaacatcttaaaaataaagagattcattgcattcattactacattcgattcattatatgagcacattcactatccttgatcgncactatgagtacaaaattatcagcgtatacattttcattattttgaat

SEQ ID NO: 283007 - DNA, 422 bp, Glycine max
  unsure (1)..(422): unsure at all n locations
tgatgagggtgttccatatgttctcaagactggactaatagattttctgcccaagttcatggtcttgcangtgaagatcctcataagcatctttaaggagtccatattatnntgtccaccatgaagccttctgatgtccaagaagatcatatctntctaaaggcttttcctcattctttggagggagtggcaaaagattggctatactaccttgctcccaggtccattntcagttgggatgaccttaagagggtgttcttggagaaattaatccctacatctangtccactgccatcagaaaagacatttcaggcatcangaaacttagtggagagagctngtatgagtactgngaaagattcaagaaaatgtgtgcaagttgtccccaccaccagatttctgagcaactccttcttcaata

SEQ ID NO: 283008 - DNA, 282 bp, Glycine max
  unsure (1)..(282): unsure at all n locations
ntataagtgcgggtctgggagacgaaggtcatgtgttccgatattgaaatgagtccagacttggattggtacgacatgccttctgatttgcgctgggaattggccatggcaggaacgccccgacatttacgcaacaatcttattgtaaacctatccggttatgaaagctctatagcgggccctaggctttaaagataccttttgataacggcaccgcgacttttggatgcgaatggataatacacggatcttaattcatcggaacctgggcattgcccattc

SEQ ID NO: 283009 - DNA, 213 bp, Glycine max
  unsure (1)..(213): unsure at all n locations
tcatatactcaatgggattggcaactnggctggatttttttcttcttctctgatgtatgttctttatctgttctcgaatatatcttatcctccttgtagatatactntacttccctcttctataataaatcttactaactaaaaaactatatatatatatatatatcagactgcctgaacctgangtatcacttctttaactggctcgctaca

SEQ ID NO: 283010 - DNA, 453 bp, Glycine max
tcagaaaactatagaagataatgccacggcggtcgcctccaattctctagggaagcggaaccggtgctacagcccgcaataaacttgggccgagacagaaacacgacggtgttaggtcggaggtatagtcctcaagcctacccttatggtttgcctccggacttcactccccatactactccggacgatttgagccaagcccctaccttcgaggggcaactccctccttatgtcgactatcccctgcaagaagatgaagaaggagatgcctatctaggccccctacttcccctcaaagatccggccccccataaattgccccaaccaaacatagtctgccatgtcccgtctccactcgcacccgttaaagaatctgttccctttgcaaaagataaaagaaaggttgatttacttgaagagaggctgagagcggtagaaggcctcggcaactac

SEQ ID NO: 283011 - DNA, 367 bp, Glycine max
tctgcatctgtacctgttactgttgcaagagtctgtggtctatgttcttctgctaatcaccatatagatctttgtccttctttgcagcaatctggagtcaatgagcaacctgaagcctatgctacaaacatttataatagatcccctcagcagcaaaatcaacaacagtagaataattatgatctttcaagcaacagatacaatccaggttggaggaatcatccaaatctaagatgggaaaatcctccacaacaacaacagcctgtccctcctttccagaatgttgttggtccaagcaagccatatgttccttctccaatggcagcagcacaacaaagacaacaagcaactgaggcccattctcaac

SEQ ID NO: 283012 - DNA, 457 bp, Glycine max
tgagatgaggaagtgttgaagggtgaaacttcctgcttttattgttgaccacagagtggtacctggagatatgtcgcgggggtcaggagaccttggggacgtcaggtggggtgctattgcccaaaaccaagcttgaccaatcccgacccaacccgggcatagtcggtcagtgagaacctgtgatgtacctaagcaggcgagctcctggcagtcaacagataaaaggaaaacaagaccacaaagcaaggaggcttgtggtggctggccagctgtgaattttgtgtaatatgtggattgtggcctctggtaatcgattactaagggtgggtaatcgattacaaggcttaaaattgaagacaggaggctaagatggtctctggtaatcgattaccaaggggtgtaatcgattaccaggcttgaaaacgaagtcaggaaacttaaggagtctctggtaatc

SEQ ID NO: 283013 - DNA, 446 bp, Glycine max
  unsure (1)..(446): unsure at all n locations
tgcaagcttttctattgtacatggatncaaataacatgtacctagctacaagcataacaaagaaacctctgtatgtcacacataactagaatccattaataaaatgtattattttatagagtgagccaagtgaatgggaagtcatgtctaacctggttttctactttccataagctccaacattgaggagactntgaacttgatgatctcgaaagaggcacttcatgaatgtttgcttggctaacaagatccatccttggacagcaaaacagatccacacgtggagcttcatctgttctggagacaacacatnctatagaaacataaccaggaggagctataggataccagaagaaaacttcatcaaaccctttccctacaatatgggaaacattgtaaattgacaggtttgaaagatatacgactgcattcttgagatattctag

SEQ ID NO: 283014 - DNA, 432 bp, Glycine max
  unsure (1)..(432): unsure at all n locations
tagactcacccccggcttctttttggtgtgatgattccaacttgaagagcttggtcacctcctttttcaccacatctagaatgatggggtcaagtcgtcgttgtggctgcctcactgactgagctccatcctctaaaagtatcctatgcatgcaggtagatgggctaatactatgaatgtttgctaaagtccatccaatagctttattgtgcttctggagcactaacaacaactactcctcttgctcggcagtaagggaggcagagatgaacactggatatttttccttgccctccaagtaagcatacttgaggtttgctgagtagggcttcaactctgatgcgggtggtggatgaatagcgggaggaaccagtgtgagagaacaagatganggttcctcagcctgtacctcataaagcatgtcataagtat

SEQ ID NO: 283015 - DNA, 174 bp, Glycine max
ttcccaatcaaagagtgggagaaagcaaaaagaacagagagaatattcccaaccaaagaatgggaatagtcaaaaagagaagaatacagctcccggtcaaagaaactacaagaaatgtgcataaaggtcttttgaccagacaatatctgaacaatacagaattgtcaccaaatg

SEQ ID NO: 283016 - DNA, 459 bp, Glycine max
ctctagtgaacttctcgtcatctctcttcatcatgaccgtaattatctttttgtgcatctcttcttgctgagccattatcttgtgcacaatgctctcacaaaaacacttgaacatctcaaacctatcaggcctcttcctcttgcggtcctttgtgatcttttccactgctagtgcctcgtcgctttgctcgtattgttttgtcaccaatgcgtcaacaacgtttctagaatccccttctacttccaactccaatgcatggtggcccatcttgtcttgtttctgcagtggtggctgagtcgtattttcaagatgatgatcaccactacccccttggtgataaagctgttcaagctcactaacacaccgataatcgctactattactattattattattattcttgccgtaattaatgttgttgaaatatctactctcttcttcaaacttctccttgcact

SEQ ID NO: 283017 - DNA, 463 bp, Glycine max
  unsure (1)..(463): unsure at all n locations
aagtgaaattaggtgcagccatttcccttagaggcctctcatgatgtggaggttgngccatgttctcagaatgttcaaaatcangatgttcaaaatcacaagtaacagaatgcacagactcaccagtaacagaatgctcaggatgcacaaaaggtataaaatgatgcctaattaatctatgaaatgtcctatctatctcaggatcaaagggttataagtcagatggattgcctctagtcatacactacattcagcatgcacaactagttgccttcttatgcaagtaacagtgtaggtttgaactacagctaccattaaatgatatccaaatgacttgaaattttgtaagcaaccttataaaatcatgaaaaggtagcacaaaaanttttatgcaaaaattcaaagtctaactatggaaactacctaangaaagtttagaaaaataaaacaataaaacttgaaa

SEQ ID NO: 283018 - DNA, 409 bp, Glycine max
  unsure (1)..(409): unsure at all n locations
caagctatgttgtatattntacaatagacctcctcaacctaagcagcataatcaaccacagcagagctattatgacctttccagcaacagatacaaccctggatggaggaatcaccctaacctcagatggtccagccctcagcaacaacaacaacagcctgctccttacttccgaaatgctgctggcccaagcagaccatacattcctccaccaatccaacaacagcaacaaccccagaaacaaacaacagttgaggcccctccacaaccttctctcgaagaacttgtgaggcaaatgactatgcagaacatgcagtttcagcaagagaccagagcctncattcatagcgtaaccaatcagatgggacaattagctacccaattgaatcaacaacagtcccagaattct

SEQ ID NO: 283019 - DNA, 356 bp, Glycine max
gttatgattatttgaatttctcgagagcttcctatgtttaattttgagcgtctcgatatattatacgcctgaatcgaacctcagtgtaaaaagttatgaccatttgaatttctttagagcatccgttgttcattttcgagcgtctctatatgtgatgaaccttaatcggacctccgtgtgaaaagttatgaccatttgaatttctcgagagcttccgttgttcaatttcgagcgtctcgacatattatgcgcccgaatcggacatccgtgggaaaagctatgaccatttgaatttctcgagagcttccgttgttcaatttcgagcgtctggacatattatgcgcccgaatcggaca

SEQ ID NO: 283020 - DNA, 335 bp, Glycine max
  unsure (1)..(335): unsure at all n locations
tcttcgagcttagtgccagcctgctgcgcttagcgcctgagtaaaatttcataatgcgcgctaagctcagcatgttgcgctaagcgcccagtctaaatttcagtcttatttttctgtttgtgaaaataacctgtgttaatctcttgtgtttagtttacattttgcagatggcatccaagaaaagaaaatctccttctacacctacccaagccagatttgataggtccagattcacatccctagaggcttgtgagagatacactgacattgtggtgcctcgaaagctactaccacataggaatgtggtagtttattacacagagtntgacgagatc

SEQ ID NO: 283021 - DNA, 450 bp, Glycine max
ctgcttgtgaggcttctatggaggctggatcttgagctttattgggtcctttaatggtgattttccaccatggagatgcagcagaagacaaaggaaaataggtgagaggaggcgccatccattaaggaataagccatggaagaaggagcttcaccaccaagatgagccttggataagaagcttggagaggatgcttcaatggaggaaaagaaagagggagagaaagagagagggggagcacgaaattgaaggaataaaagaggtatagaagtggaactttgaagtatgtcttacaagactctcattcatcaaagttacaacaagtgttacacatgcttctatttatagactaggcagcttgcttgagaagctttcttgagataacttccttgagaagcttctttgataaaacttccttgagaagctagagcttaactacacacacccctg

SEQ ID NO: 283022 - DNA, 390 bp, Glycine max
  unsure (1)..(390): unsure at all n locations
aaaataacatgttagaggaagtatcccacaatttaagcaagaataacttcattntggttcacaaccttactggtatctaggcattagtaggtaacacatacgttntctactatgacatagtgcatagatcctaccaataattctcaagtactaattaattaaataattgaaagttgaaactacactatcgatatacattgattagcttccacaacttgctaaacactagaacactgaaacattcttcattttacaaaaaaaatactaataagaaataaaaagacggtgtggtgttggaagaaccaaaaggtagcaaactagactactactcattgcttaaagtatgaacaatcttaacctgaggaagacaatctagtgcacaacactggc

SEQ ID NO: 283023 - DNA, 459 bp, Glycine max
  unsure (1)..(459): unsure at all n locations
tcattcaattgaataaagagagctgttntgctacatctattagtatcaatttagagttgttgcgcttgtttaattgggtgtgcctctctctttcatttagttattgttttttaatcacctcattcatcattgaccggtacagaaagtccttgtgcagattgttttttcccatgaaagcatttttttagttcatattattataacatgttgttgactttgaattgaagtaagtaattggaaaagtgattactcccaacggttgtaatatcttttacgttaaactatctacttggtatgtaatgttctctattttaagtttttttgctatatcattgtcatcaaatatctatcaatgttatttattattaatttttgttagaaaacttaatcagtcacctttaatggaattatttcttttcattcacatttttgtttattcacaaaattcatacttattta

SEQ ID NO: 283024 - DNA, 347 bp, Glycine max
  unsure (1)..(347): unsure at all n locations
gagagtgagttgtgcccacaaagaaagtaacttaagaaaaccaaaatattagagtccgtagaaaacanaaacaagaatcatcagcatcaaagtgatattttgagaaatgaagagataatgagatatgantatatatacatgtgacttgactttcaggtgatccaacaactatttggttggccaggatccanaattcttgaatatggcccaataaaagtgagaagctgtgaagatggaagagaaatagttataactataatagcctatgctattaaaagtgtgcctgccatagagaaattctctaacttataacattggtagaacattcatcanacaaaaagaacatg

SEQ ID NO: 283025 - DNA, 318 bp, Glycine max
tgagatgaggaagtgtacaaaggtgaaactacctgctcttattcgttgaccacagagtggtacctggagatatgtcgcgggggtcatctacgactgactgttacgatcactctttgtgtttttatatgggtagacctgatgtataggaatatgatgattgtatatatctggctgaagccgccactgtggacacctttgctatgatatgacgctttttatttaatacagctcccctcttttcgtcacctgcatacgacgtgcgcagctatgagccttcttatgctagtaacagagtacggttgcatctattatttgttt

SEQ ID NO: 283026 - DNA, 455 bp, Glycine max
  unsure (1)..(455): unsure at all n locations
agctntgttggtcgtatcccaccatcttttcatagtagagtatcgataatgtgtctaccatcacgattatcgtctccctttccatcattgngggtaccacctgngccgccagatccctccaccttttgggcgtgttctttgaaagatccgtccccctttgtgcacatgttctgtagttgcatcctatccgaaaccatatcaaaattgtactgatactgcctaacaaaggcaaccattaggtccttccaagaatggactcgggaaggttccaagttagtgtaccaggtaacaactaccccagtaagactntcttggaaggaatgtatcagcaattcctcatcttttgcgtattcccccatcttctgacaatacatctttagatggttcttgggacaagtagtccccttgtacttgtcanagtccagcaccttgaacangngaggggtgatgatatt

SEQ ID NO: 283027 - DNA, 376 bp, Glycine max
gcgatataattcgttgtaacccgtcactaaccaattaatattatcaactactcctttggttaagcaaggaaagtgttggtccaacaaaaatcatttacgcgtacagcatacatcattgtcataattgacaacacataatgacatgcatgcgtgttacagattgagcgtgacaacacatgggttgactatagtacacattttgaaactatcagtcgctcaacaacacattgggtgacttgactacacattagcgacaacacataggctgacttgactacacatttacgcgtgtctatgttttcgaaacatagttaaacaaaggctcgcgtccaaccatgtatatatatggcagactaggctactaaatcacacatta

SEQ ID NO: 283028 - DNA, 185 bp, Glycine max
ctttattgtatcaagtcttatcttatccagatattattctatctagattttatggtattcgagatttatttcatcacatcttatcgtatcttatcttaattttattgtatttcgtttatgggtgtggacttaaaatagatttgtaagttgtggggccgaggacctatataacagcaccaaagttt

SEQ ID NO: 283029 - DNA, 351 bp, Glycine max
tattacccacaaccacccaccaaacctatctatttttagattatgacatcggcagaaatgcagttgagaagagaaaggggcctatgctttacttgtgatgacaagttttcccctagccatcgttgtcctaataagcaatattttgttccacagtgggaagaagaagatgaacctgcattacaaccagatccaccacacgaggttgagacagctggtgaccccagtttgcaagatcatcatttgtcttataatgctttaaaaggctcatcatgtcttgggacaatgaagtttcacggatcaataaatggattgagagtgtagattctactagatagtgggagttcagataac

SEQ ID NO: 283030 - DNA, 405 bp, Glycine max
  unsure (1)..(405): unsure at all n locations
ctcttctaaggacaatagcatcatttctgcactgaattgttggagtnggaagccatcttctcaatcanattcctagcctcagcaggggtcatatcaccaagagctccaccattggcagcatcaatcatactcctctccatgttgctaagtccctcatagaaatattgaagaaggagttgctcaaaaatctggtggtgagggcagctngcacacaatttcttgaatctttcccaatactcatataagctctctccactaagttgcctgatgcctgaaatgtattntctgatggaaatggtcctagatgcanggaagaatttctcaagaacaccctcttaaggtcatccctgctgaanatggacctgngagcaaggtagtacagccaatcttttgccactccctcta

SEQ ID NO: 283031 - DNA, 381 bp, Glycine max
  unsure (1)..(381): unsure at all n locations
tcggaagatagtgatgaggtacaagccctnatgcttactttattagcctgngtagtcgaagagaagttcaggtccatagccatcaaagtctgaaaagagtatgatgaactaagggatgtcaatatggccaccgatgaagccttggaatgagaaaccaacaacgcccgacaggaagaacacgaccaaagaaaagtcttgaggggctctatagggcagcaatagtgagctcaagctccgaagaggtgaaaggaatcatcacgggtcaaaggcatgatcttgaacgacgagctaaaggtttgccttatgtcgaaaagaaatttgtcccaacagttaagcgagactgaagggaatatgtgggccatcatcgataagtgcaaagag

SEQ ID NO: 283032 - DNA, 432 bp, Glycine max
actcagctcagcacttctgtaggttcaggcttccatctctctgatatatctgccatatactcagccggtattaggcctcatgagctttctcatatccagcttactggatttagtttgggtgacttcccttttagatacttaggtgttccccttttatcatcgagattaaatgtatgtcattatgctcccttgctttccaagattactggcctgatttagggatggagcaagaagtctttatcttatgcaggtaagttagagttgattagagcagttattcaaggaattgtgaatttctggatggagatttttcctttgccgcaatctgttctggaccgaatcaacgcttcgtgccgtaattttctgtggggcaaagcgaatattgcaaaaacaagcccttggttgcttggtcagtagtttgttctccgaaaa

SEQ ID NO: 283033 - DNA, 465 bp, Glycine max
  unsure (1)..(465): unsure at all n locations
ctcctctntatttcgttcattntcgatttcttttcttccgtctttatcgcgcttttaccgtttatttaagccgttttctcacctaataaatgataaaatgaatttcaaccgatcatttgtgttgtaatctcatttaatcactcttaaaatgaaatctaaccgatcgttcacgctataacctcggttaaacaaaaaaagtaaaataataataaaataatcaaaatatcttgaaaaataataataaaataaacaaaatatctttgaataaaataaaacaaaaaaatcaatcggacgttttttctttggaagtttccttgaatgaattgattaataaccaaagtgaaactaagactaaaatagactcacaaatcaagttntgtccgaaaatcactaaaaaccgttttaaggtccaacgccttatacggtcctctntgcttttatcggttaacatggaccgttcaaaag

SEQ ID NO: 283034 - DNA, 389 bp, Glycine max
  unsure (1)..(389): unsure at all n locations
agctttttgattataatccacatcagcacatgaacggcgtagtcgtatcgagatccagcgccaataatataactccgtgaatgaaggatatataccataactgtcctgtttattatctatcggatgagcgaattctagtgaggtctatatcttgaaatcaagttatattcattggaccaactaaagagcgagagacatggaagaccctcgtatgaataaagacaagtcactctaccaatgtgcattgngaaactgcaatgatctgtacttgcataaagacaantagcttgccataaacatctgatatgggtagccttatcatggacgtattggccgctaccatattgatagtgacatcatccaccgttctaacctanatgcaaccacac

SEQ ID NO: 283035 - DNA, 460 bp, Glycine max
  unsure (1)..(460): unsure at all n locations
ggcgagcagaagaagaaggagaaggagaagagaagttgtngagggtgntcctattctgaggcacacgatgactggtaatggtagtcatgatggttcctcctcccattgatgggggtactgcatagagagtttctagttattactcttccataacataatcttctattaggtggatgatgagataagatgttggcatttgcttcttggacccacttttagatgttggaatttgcttcttacaccccctattttgcttcatgcacgcccctaaagacatgaacagatccaaatacccctgcctctcccaagcaagtggggcccacccaaaacctccgccaacccaaacaccactgccgtaactgtcaacaccaccaccgacaaccatgatttanaaaacaacacaaatcaagttgttcaagtcanatataaaaaagaggagtaaaactataccttactctgg

SEQ ID NO: 283036 - DNA, 322 bp, Glycine max
tgggagagaaatgttcatctaaagcatacaagtccctaatattatcaaatcctaaaatttgagctcctagggagcaaaacaatgtgtgtctcctagagagggcatcagctaccacatttgtatatccctttttgtatttgataacatatggaaattgctctacgtactctacccattttgcatgcctcttgtttaacttgctttgccctctaatgtacttaagtgattgatgatcactatgaatgacaaattccttggtaacaaagtaatgttcacaagtgtggagggctcttattaacgcataaagctctttatcatatgt

SEQ ID NO: 283037 - DNA, 302 bp, Glycine max
tcatgtgcttacgatagagtacaacatgaaagtatgtattacagtcaagctgtgaactcaactcatttctagacatgttttgttttttctgatttctcatgtagtgtcaactatccctactctaatttaatatattatgtgttaatacttaaacttctatacttttgtagattgaatcaatggcttcaaatatactacagggagattggagaaaaaagtgggaaacatgagatcaaatttagggagaagggaactgaattctttttaactaaactgaatataggttgacaaaaagggacttt

SEQ ID NO: 283038 - DNA, 438 bp, Glycine max
  unsure (1)..(438): unsure at all n locations
ctcaagatgtcgtctatctttatgatgaaataagaaccttanaaactacattatccaaatttgtcaatggaataaataatcttaacaaattattggaatactgtagaagttccatagacaaatctaaaaatgtatatgatgggaaggtatatgttcatgatgaggacaccattttttgttatttttgtggaaaacctggacacatgacatccaaatacaaggattatgctaagaagggttcagccaatccctttatggctaacacaaaaggacccaaaaatatttgggtaactaagaaaaatattattgcagttgcagatgtccttgatagtaggaaatagatgcctatcatggtacctagacagtggtaactcatgacacatgtcangagaaaagtgtatgttccaatgcctgactccctatcatggtggaacaatc

SEQ ID NO: 283039 - DNA, 181 bp, Glycine max
  unsure (1)..(181): unsure at all n locations
tatgtatctcttcatagagtatggccaacgacattgttctgatgagtcatgtangtgattgtgcaacgacatcccttctgatatcaggttttaatcctcccacaaagcaatccaatagagcttcttgtgtaattacttgtactcgcataactanagccgtgaactgcacgtaatatgactg

SEQ ID NO: 283040 - DNA, 205 bp, Glycine max
tttggattaaataacaagggttctccctttttccattattctattcaagctctgccacatgtccctatctgagaggagccaaaagggcccactttccctttctactgtgacccaccctcagccacaaaagtgagaaatcatcttacctctgatacgctaaaatcctgcctccattggcatgtcacttctctgattccagcatctc

SEQ ID NO: 283041 - DNA, 412 bp, Glycine max
  unsure (1)..(412): unsure at all n locations
ctctgcgtgctatcagggctttcatcttacagacagcaaaagaaagtntatacggataaccactcgggtatttccacccgtcaacgtgactcanatgtcagtatgacagatcttgtgaaggtggccgacaaaagcgaggctcttgctcctacgtatcctccaatgaggaactcagacctacgtagttcttgataacttgtgagacttgacaaagtctccaccggaagatgctgacatctccggaaagggcgcagatgaccacattggcctctgctcgtcaatcacacttgnggtcactgaatgacgaggtgcggataaccgtaaggtgtctccgcgaactaccagctcttgngtcatggtaacaaanagcggtgcggtcgacaaaagcgaacctcttgctcctacttatccc

SEQ ID NO: 283042 - DNA, 270 bp, Glycine max
gctttttctttattttcaaatgaacaaatgaagtgtcgacagtcattggatggttgctcggtacacgtacatgtaattaactaataagatttcctacatgttatgtataattattaagaacaggcactatgtatatagacttttatatataaatcttattagagttttaacacaatctccactggtggttgaaacttattgagaattataagatcagaacaatgactcatcaaatgactattgtgacctgccaaatatgtgatttttaat

SEQ ID NO: 283043 - DNA, 429 bp, Glycine max
ctcaagcttatattaattaaatataaagcaaaatcatagcgggaattgtgttttatattccaaagtctgaaaatggagatctttctatatggagaggggaaattccgtctcagagtttggagcaaactttctaagtaataatttcacggattcatatgaaagtactaataatttcacggagtaagacgtaagattggcaatcccaaaaagccgtataattgactactaattactcatcatagagctcttgaattaagtctgcagaatttattatgttgactagttaaggtgatgaaatttcgaactaactatagtgatagtactatcttgcttctgcataattcacaaagaccagcataaccaactctttgacgggtgacttgagttctaaagttttatatagaaaaaatggagattgaatcttgtggc

SEQ ID NO: 283044 - DNA, 410 bp, Glycine max
  unsure (1)..(410): unsure at all n locations
gtgaacctcaggggttcctattttcgtcttacatagatantttntttaacaatcacaagcgtgtgcggtttcatccagatccgactcaaagcaaatagcatcctgatcaatggcttattggcttgaacgtggttagggggtagagacctatgaaagaaanggatagaaaggctcanagggtgtttgagggttacattgagtaagaaaccttagagcgttgcttgtatcttttgggttaggctctactccttntgtattattcagtaatccttntcgcacttttgtgcatttcttgtanaatctggagatggttgtctntcttttttttcttcactcacctttgggcggatntatnnttcttnttcttttcattggtgcccaacttcatgcatgcgttatttgcattgccn

SEQ ID NO: 283045 - DNA, 420 bp, Glycine max
ctcagcttgtaatgctcgaggcacatgttgtagtaataatcagaagttgatatttgtcaatgtgaatgctccttgtgagctggttgggaagaaagctttatgggatgagttgaggcagctgaaggcttctaatcctagtggaatgtggtgtttccttggggacttcaatagcattagaagtgctcacgatagaatcaacttatctcagagaatggcagatccttatgacattgcagcctttaatcacaggattgatgatatggagcgtccagacattacctgttatgggaatagctctactcggattacgcctagtggctgtgtgaaaagcatgcttgatagcttcttggtctcacataattggatatctctctggcctgagagctgtcacactgtgcatcaaagtaacctctctgatca

SEQ ID NO: 283046 - DNA, 434 bp, Glycine max
  unsure (1)..(434): unsure at all n locations
agctntatatttctatgatatcgcgatgctgcgcttagcgccaccctcacgcttagcgcgagtaagtgaaattgggcttagcgccagtctcaagcttagcctggctaaaggcacctgctgcacttagcacactgatctcgcgcttagcgcgcgactttgatgctgatgctctactagattctcctttgcgttgagcatgctgaagctacgcttagcggtggatatgtgcttggctcaactgctgagcttagcccaattgctaaattttgcaattcataacttagcgtctttatcacctgaaaaatgcatagacntcatcattaaatccaatggaaatgttctagagacaacattaaccataatacatgatgtatntacaaaaatcactacaaaataaccataaatttgggaactatacaagctttagaaaatga

SEQ ID NO: 283047 - DNA, 224 bp, Glycine max
  unsure (1)..(224): unsure at all n locations
cttctccttagattcaatgcctctgctgcttgagcttattcccacatagagccatgtgttgaatattganaatacaaaccaaacccatatactcttaaaatcatagtgtatttacttggcaataggcagtaattaattctggtctcaagatacaaaatcgagaaccaagtgcagtatagttggcatcacgaggagttactctgtgaccagttgtcacgatggtg

SEQ ID NO: 283048 - DNA, 310 bp, Glycine max
taaggaagcagctccattgatatcatctaatatatgctatgcttaagcccgaataagaaaacttgtatcacaggaaaagatctaatccaagttgaattaaggatcatactgattgtggtggtaaaactggcttgaagtagccatctgggtcatatcctgaccaggaagtttgctttggtattaaaacagtgtcgtgctcaaactgctaatgtataaaatgagattacaaatatctaagctttcctcatgagatcaactaacagtatcctattcataatatcacataaatacatttataggacttaccatg

SEQ ID NO: 283049 - DNA, 431 bp, Glycine max
  unsure (1)..(431): unsure at all n locations
tttatctgcaaacatggatggtttgcatgctcaaactcagtgcaatcatgagatccgatgcaccaaatctggcaataactcagccccaaatccaatgattacccacannaaatcatcctncatctataccagagagcaacggaaattaaacacagaaaaaaagaaaaagaaaaatctaagccatttggctgatacaaatngcaatgagctcaacttaaagtctggactntagaattataactgccaaatgaatctcagtactttaaagctgcaactcaagtgctgggaggactgggtgcggtgattcccccaacttccgggttccctctgcttctaactaccgcatttctcccatgtttgtagggaccttggtgattgcattgttatttggaagtagaagtgacanaataattntggctcattatgacatc

SEQ ID NO: 283050 - DNA, 397 bp, Glycine max
  unsure (1)..(397): unsure at all n locations
tgaagctaacagagagtagagaagcaggatattctctcttgaagctgcgagcnnncattgataatttttacatgtgttcaagcttccttacttgagaatgtctctgaaattgctggttttttttaccatatacccaatatgaaatttctgcttaaatgtatgtctttatgaaaatttgttaaggtgataatcataaggattaagccatatatagtttaagtgcaaggttctaatgccaaagtattatttggaaacaataattgtcctcatatcaattagatacccttctccagtcttcctctccttagttgccattttcatggccaccttacactttggtagacttatatatatcatcaaaccacttagagcacatgcacatgttctatgtgacagc

SEQ ID NO: 283051 - DNA, 439 bp, Glycine max
  unsure (1)..(439): unsure at all n locations
ntataagcgcgggttcaggagacaaaggtcaagtgttcgcgatatgctaagatgatattccgagtactttggatttggtacgaccatgccctcctgatttccagctgggaaattggcgagtggaggaacgccccggcatttacgcaacaagcataatgtaaacctttacggttctaaaagctctatagttgggcctaggctttagagttttcattttgttaaggctttgtgtcttctgtttttgaatatataatacaaggatctttcttcatctgttcctggtctctacccattctcattcatttgcatgtgtacttctttttctaagacggcggatacgatggcgagtccgccgaaggtactaatacctgggacccgtctatcaacttcgagcaagaaatgaatcaaacggaagatgaaggagatgaggatgtgggac

SEQ ID NO: 283052 - DNA, 337 bp, Glycine max
  unsure (1)..(337): unsure at all n locations
tgcttagacgaatgagaaaactggggcaaataaagagggtgaggatgagggagaaacccatgttgtgactgccattcctatacggccaagtttcccaccaaacccaacaatgtcattactcagtcaataacaaaccacctccttacccaccacccagttatccacaaaggccatccctaaatcaaccacaaaacctgtctaccgcactctcaatgatgaagaccacctttagcacaaaccaaagaaaacaccaaccaagagatgatatttgcagcgaaaagcctgtatgattcaccccaaattccggtgtcatatgctaactngctcccatatctac

SEQ ID NO: 283053 - DNA, 464 bp, Glycine max
  unsure (1)..(464): unsure at all n locations
ctaagtgtataaagtatnntaaaaatatacataaagatataatttttttaatatgattaatgttatagtattaaatatataaacaaaagtaaaactttattctaaaaatagacatacaaaaaaagattaaattgtaacttttatccttatttaattcataatcagtaattttttgtctccctattttttcaatgattttaatcttcacattctagaaaaattataattttggttcaatttttaaatttttgtatattttatttctttttctttttacattttaattaattaaaatatttcttgatataaccttaaatgaataagtaacatttaggatttaattagactaaaataaaagaaataaaataaatgtaaaatgacaattnttttaaatataaggactaaaataaaataaatgtaaaattacaaattntaaaaatatagggactaaaataaaataaaaa

SEQ ID NO: 283054 - DNA, 394 bp, Glycine max
  unsure (1)..(394): unsure at all n locations
agctntgtctatatgtctagtacctcatcactttgtttcgaagctgtacactgattgtctctcacaccctctatatttgcgagccactccaatccttgtgatcggactctcatccacttatgatatgcgccgatgatcccattactgatctctctaagctctatgttctttcttcacgccgcatcccatgccttgcgaactccttggagtaccctcgcgttgcggtcactgaaaccccgtgcgatgaaagacgtgatgctttcgtctgatggcactcctctcatggggtagccaagctgtcttatggcgacgacgggattataattaatgcaacccctttgtcccatccagggaacatttggacatacttcgcatgaagatagaatcctgattc

SEQ ID NO: 283055 - DNA, 460 bp, Glycine max
  unsure (1)..(460): unsure at all n locations
agcccgcgacatgtaacccaccatcttctcatagtagaacatcggttatgtgtccattatcattgntatcatctccctctccatcagtgggggtactacttgagctaccagatccctccacctttgggcgtattctttgaaagattcatgctccctcttacacatgttctgtagttgtattctatccggagccatatcagaattgtactaataatgcccaatgaaggcaaccattacgtccttctgggaatggatccgagaaggttccagattactatatcaggtgacggttgtcctagtaagactttcctagaagaaatgcatcaataatttttcatctttcgcatatgccctcattatcttgtagtacattgtcaggtgattcttggggcangtagtccccttgtacttgtcgaaatccggcatcttgaactntggaggaataaccatgtcaggcact

SEQ ID NO: 283056 - DNA, 149 bp, Glycine max
atagctgacttcctccgcttctatcacttatgcatgcgtacgaccaaccattaatggcaccatgactgcttaaaaaatacgcgccgactgcagctcatgagggtgcgtagtaatagcatttacctactataaccgtccagagagcttat

SEQ ID NO: 283057 - DNA, 204 bp, Glycine max
gatgtgctgacaaatattttgcacacattccttggctctttagaatactaatagtgatggtgatcgcggcggtatattactaccggtgggaatttgcatgattctgagcctgaggcctctgatttgaggcatgcggaagagtactcattgtcggaaagggtgtgttccgttgcgcaagtgatgctctttctcagctgtggggat

SEQ ID NO: 283058 - DNA, 99 bp, Glycine max
agcttgttgtgtttcttactaattcagcgatctctgacactcgttgaacttttatcttatgcatagtatgactatacagtgtccaacaatattgactct

SEQ ID NO: 283059 - DNA, 422 bp, Glycine max
  unsure (1)..(422): unsure at all n locations
ntgagtatagactcatctctctaattgagtgcatgtacaaggtgttatctaatttgtcggctaatacactcggcaaggtgatacaccaagtgattgatgacacctaatctgtgttcatccaagacaggcatatactggatgacgttcttattggaatgagcttgttgaggaagcaagagtaagtggcatggaaatgattatgttcaaggttgatttccagaaggcatatgactcgatggatcgtgattgtcttatgatgaagacggaagatatgggttttcttaagacatggcatgtatgaattcaagaatgcctgtaaactgcaacaatttttggtatactaaatgggagtccatctaaagaatatgtgtatggtcaaggtcttgggtaacaagatcctttatcacctttcctgtgtctga

SEQ ID NO: 283060 - DNA, 384 bp, Glycine max
  unsure (1)..(384): unsure at all n locations
ntgagaaaggtgatgtgaacaagcggttactgtatatagccttcaataagaccccaattctgagttcatttctttgctttggttgctttccattgtcgaagctcttcaaagcgcgtttgaggattccccaattgaaggtagaccacacaactgaacgtgtgttcaagaacctcgttgcttttgagcagtttcactatccagacaagccttacttttgcaactatgtttctttcattgactctctgatacacactcagctagatgtggagttgctggttgagaaagaagtgattgtgcatgaacttgcgagtgatgaggaagtggcaactcttgttaatggtgtatgcatacatgttgtcacaaactcaacttgttaccatcaca

SEQ ID NO: 283061 - DNA, 356 bp, Glycine max
  unsure (1)..(356): unsure at all n locations
tctcttctggattatctggctctttaaataatgcattatttcatacaaaagttaactacactagctagtatgataaaatcattctccttgactaanatatcctcattaaaatagttaaaatctaattgtaaattagtctaaatagtaatatttttgccatagcacagtatacaatataaattgttatttttatataactaaattcataataataaaaacattaatatgtaaatcatattacaattaaagttcataatanataaatatctagaacatataaattatatgttagatntacaataaataatctatattgtagtacaagagtactgttaactatntgataattcttttaa

SEQ ID NO: 283062 - DNA, 300 bp, Glycine max
  unsure (1)..(300): unsure at all n locations
gtacagagaagagtggaaggtgccgccgctggcaacctttattaactccatgagcgtgtccagcacgagttccttgagcatctcatctccctatggcaaagcgaggacgttgatgagggacttaaggaactcttcgaacttggaacggaaccaggagaagtagatgaactcgaatggtcgtcaacagtggagggagcggcggcggcggagagtaaagncccttcagtccttaaatgaatgatacgatatgtttcttcttttacattcgagtaggtaggctattatagtgtccccttgaat

SEQ ID NO: 283063 - DNA, 442 bp, Glycine max
  unsure (1)..(442): unsure at all n locations
agcttgtataatgtctatacatgatacatgtcanggctcggtttggttcaaggataaaagggatgccccacattatttccatgacacatatgcaaaaatgatgatttggnaaatttatgcaaaactggtcatgcatgcacctatgcgaacactcaagtgtcaaatttttatggtcatgtgatgctagggctcangattcattntcctctattttaaatcaacccaatgtttccaaaatatgctcttttatccatttgtgcattcatccgagtccattttgggcgtccggggaaatattcacagcattcacccttcaggtgtatacacatttttaaaaactagttatgatcagtgaatcttttcaaagaaaatgtggaagtcatctcttttcaaaagcatgttggttgttcagcttgacaacatatttttctcttttctctct

SEQ ID NO: 283064 - DNA, 395 bp, Glycine max
  unsure (1)..(395): unsure at all n locations
tcttgcgtagccgctcttggtgctcagaanatcccanaaacatatccctcttattactagctattttgaattctttagttcctgaatgtacaaccttcaaattgttggtcgttcccctatttcttttctgcaaaaaagaaaatcaaacgctgtgaaacacatggatgaagtcctaagaaaatcaatatcaaagaaaacatggatgaaatcacaattaaaaagcacaactacctatcttttagagtcctttggttaatttgtcttgtctccttatgtggaggggtttagcttaataatgttatactttcgccttccaaaaaaaacttatgactaatcctcttttcattaatccaattgtgtatgttattgtataaaagatcatgggttctccacct

SEQ ID NO: 283065 - DNA, 457 bp, Glycine max
  unsure (1)..(457): unsure at all n locations
tgtcttatatctagtactctcatgccacagtggttgtcttttagaccacatataccatcttacagaatatattttatatgaacttgataggattactctaaatgatgcaactgtctttctaattatgtaacatacgtgaatatcttgaatctcaatgcataacatctaattacacctgactaatgtgatgtgaattgatcgagactcggtggtgtcacaatgaagttatacccattgaagtcgacacgtccggaagttgaattacacagaactcttgcacagtcaaatcagactatgtntgtttgtctcttgttatcgtgcatcccagcgaatatacgatgaatacgtgtactggcactgtgaataacaattcaggatcaacaaaaggcaactgaaagtgacccacttcgtaatngtcatgtcaccttactatctacagcttgagtggatctatgtn

SEQ ID NO: 283066 - DNA, 371 bp, Glycine max
  unsure (1)..(371): unsure at all n locations
agcttgatagatcttgggtagtcaaagagaagttcaagtccatagccatcatagtctgaagagagtatgatgaactaagggacgtcaatatggccacagctgaagccttggaacgagaaaccaagaatgcccgataggaagaacacgaccaaagcaaagttttgaggggctttatatggcagcaatagtgagctcaagctctgaatatgtgaaaggaatcatcacgggtcataggcatgatcttgaaggacgagctaaaggtttgccttangtcgaaaagaaatttgtcccaacagttaatcgagactgaagggaatatgtgggccatcatcgataagtgcaaagagaagctaaatctatcggcgactcac

SEQ ID NO: 283067 - DNA, 436 bp, Glycine max
  unsure (1)..(436): unsure at all n locations
tattaattagtgcggtcacattcaaaaccgtcgccgtggttctttttttttatgttggcacaaactctttgactaggtcaccaatgttgaagttacggaccttacggtgcaacttggtatcacacactcatgatctcggcggcaactatcacgttttcacgtcaaagttcttacacagctatagttgcaacgacacaaagaacatgtgcatttccatagcttaaaagtcgatgttgcaagagataatataaacaacaaaactaagattaagatgaacgacgtaaaaataaagaacgttaactgtgagatccataacttacctgtcatgttagaattaatattntattaacccttgaactggaaagtatgctatgaagtctatctctggccaattggagcactcganagttctggtcaaataacgtttaattgatta

SEQ ID NO: 283068 - DNA, 389 bp, Glycine max
  unsure (1)..(389): unsure at all n locations
ctactatngaattcaaagctgaggatgatgtatgtgtttggagacttaacctcacttattcatcaactcaaaggtgaatgggaaggttgagatgcaaaattaatctcataccactcttacattaangtaatgctggaacagttcgatgaaattactttccatcacatcccttgtgagaataaccagatggctgatgttctagcttctttatcttcaatattcatgataagtcaagaagaagaagtaccactaataaatattcagaattgtgttcagccagtgtactgctaagcaatataagaagaattagacgggaaagccatggttntatgatatcaagcattatatgacagataaagaatatcctcccacactntagaaaatgataa

SEQ ID NO: 283069 - DNA, 400 bp, Glycine max
  unsure (1)..(400): unsure at all n locations
ntagatgaatattcaatgtcataattatactttatttacatttttaatatttttataaaatgaacactctacagaagatttttttaaaaattgcattatgcatattttctatttcatcaacatcttttttttacgcaaataagaaaatgaatataataattattttcagaagttattggtttgtttagtcaaggactttgggcatagaaaagataattaaataggaaaattattcaaatcttaattaagtctagtccaacaaaaatttatcagcgggtttatttagcaattattaagctcaaactcaaatgtcagataaatacttggaatttcacaccacatctactcagttatggagcccatcaccgatatatagtcaaaccaataagtccttaattca

SEQ ID NO: 283070 - DNA, 514 bp, Glycine max
  unsure (1)..(514): unsure at all n locations
naacgcgaatccattagaactgccagnnaanttagnnncgcgcgctgcgatacagtagagctgccgcatggcagctctacccttatgttgttncatgttgctgctcgcttatctttggcgatggtgatggaaccacatgtaccatcttgcgagtatcctacattctttcactgacacatcatgtcgagcatgcttctgaggaatgattcggtggattatgacgacggatcaaagattcctctgttcttggagggatgaccatcgacatgaccagatctactatggttctgatactcccaggagttctagatatgctcctcgacatgttcttgcattactcggaggacgttcatggcgtcctgatagattatctacacttacaatgcacgtggattgctgttgatgacactaaattctatagtgtgctcatatgaggaaagacaaagaatctccttctccctccgcaggaatgtctttcgagactagaatacactcgcaacagacctctataatc

SEQ ID NO: 283071 - DNA, 447 bp, Glycine max
  unsure (1)..(447): unsure at all n locations
ntgaatgctctattcaatggagttgacaagaatatcttcagtctgatcaacacatgcacagtggccaaggatgcatgggagatcctgaaaaccactcatgaaggaacctccaaagtgaagatgtccagattgcaactattggctacaaaattcgaaaatctgaagatgaaggaggaagagtgtattcatgacttccacatgaacattcttgaaattgccaatgcttgcactgccttgggagaaagaatgacagatgaaaagctggtgagaaagatcctcagatctttgcctaagagatttgacatgaaagtcactgcaatagaggaggcccaagacatttgcaacatgagagtagatgaactcattggttcccttcaaacctttgagctaggactctcggatagggctgaaaagaagagcaagaacttggcgttcgtgtccaatgat

SEQ ID NO: 283072 - DNA, 388 bp, Glycine max
  unsure (1)..(388): unsure at all n locations
ctctaatatctcccacactgtgtggggtggccattcttggatggccttgatattctcagggtccacttggaccccatttctaccaactacaaaacctaagataactatattatctacacaaaaggtacacttctctatatttgcatagagggtgtttttcctaaggactgaaagaacttgtctgagatgtcctaagtgatcatctangctcctactatacacttaaatatcatcacaataaacaactacaaatctacctatgaaatcccttaagacatgatgcataagcctcataaaggtgcttggtgcattagatgagcccaaaagcatcactatccattcatacaaaccagacttggtcttgagagcagtgtctcactcatcaccc

SEQ ID NO: 283073 - DNA, 409 bp, Glycine max
  unsure (1)..(409): unsure at all n locations
ntgcggatntggtctttgccagtgaaaggatcgatgtgggtcttattaaaggcaaatntantcatcctgcttggacgaatgagaaaactggggcaaatgaagagggtgaggatgaagtanaagcccatgctgtgactgccattcctatatggccaagtttcccaccaacccaacaatgtcattactcagccaataacaacctttctcattacccaccacccgatcatccacaaaggtcatccctaaaatcaaccacaaagcctacctaccgcacttccaatgacaaacaccacctttagcataaaccaaaacaccaaccaagatatgaattttgcagcgagaaagccttagaattcaccccaattccagtgtcctatgcgaacttgctcccatatctacttgataattc

SEQ ID NO: 283074 - DNA, 259 bp, Glycine max
  unsure (1)..(259): unsure at all n locations
tataagttacagttaccagaacagtctaagatacatcctatnnttcatgtctctttattgaaaaaagctattggggaatattctgtgttaggagaacttcccaaggaattagaggttggtcctgttgatgacatatatccagagaaggttattggctcaaggctgatcacacaggggggtgtctcaattcctcagaaccttattcaatggaagaataagtctagtgaggatgttacttgggaagacgatgctgtcatac

SEQ ID NO: 283075 - DNA, 371 bp, Glycine max
  unsure (1)..(371): unsure at all n locations
ctaactaccttgnaanntccattancnantccgntgaaangnnttaaattaaaaacttattccanannaaanaaaccgaattttaataaatgccccccaaccaannaccnnaanaaaaaaccaaaaaaatttaacaattaccttctccactacactctctacccccacctccaatattaccctttattaccactatcaaatctatacnccccttactcttcctacctctctctcctctctccccacttcccccctcctcccactaccatctccccacttcttcccccctctacttccctcccattcccctatctaccccccccattcttccanatcctcccctacctctttcctctccttttcctcccccc

SEQ ID NO: 283076 - DNA, 442 bp, Glycine max
  unsure (1)..(442): unsure at all n locations
agcttagctgttatttatgtttcaagcccaaatgacccttgcatgaggggatgtgttattcacaatcatcattggtcctctagctaactcgttaagcttttaagattattggttcttgacatgttntattcagatgctctttgtgggtctatttataaaccatatgcatacaatgtgaaatgtttcatctattcttgaaaactgattccttccataaatagccttaagtcactgttaatttttctgaaattggtccaagcggactggagagaggacattaattatggtcatggttatagattggaanaatcctttaatatcagaatagtctccctgctcaaattttcattatgatgataatttaagtgctcatattgtacattggtttgttggattgcagaatactttaacccattccttttcaggatcaaactgcatatat

SEQ ID NO: 283077 - DNA, 450 bp, Glycine max
  unsure (1)..(450): unsure at all n locations
tccctanttattggatatataaaaataattttttattctttcattagnnaaataaccaagtaagacattcatttattttcgaaatcatcattttaatgtatttattttctaatactatgaaacccttattttaattaaaaaaatctttttctttcatttatttaatttttaaaaactctattaatttttaaatntttttatttaaaaaaaaggggtgttacaaagggaagaatttgtagggctctgtgttcttgctgcaaatgcaaccttgctgcttcagtgcttctttgctaattactggggcattattttggttacactgtttgtctctcccacgttaatgaataatttatggcaaatgctanagacactggttagtaagaaccttatttattgatnaacaaanggaatgatttcattcanaacttacttattatatttggtatatat

SEQ ID NO: 283078 - DNA, 395 bp, Glycine max
  unsure (1)..(395): unsure at all n locations
agcttcctttatattatttctatagaagctagagcttagctacacgtacctctctaatagctaagctcacctccttgagatgagaagctagagcttagctacacacccnctataatagctaagctcacccccatgaaaaaatacatgaaataaaaaaaaatccctactacaaaggctactcaaaatgcctcgaaatacaaggctaaaaccctatactactagaatggccaaaatacaaggcccaaacgaaggataaacctattctaatatttacaaagataagtgggctcatacttagcccatgggctngaaatctaccctaaggctcatgagaaccctagggccttcccttggatctctggcacaatctacccggagtcttctatccaatgcct

SEQ ID NO: 283079 - DNA, 370 bp, Glycine max
  unsure (1)..(370): unsure at all n locations
cttgtagcttcaatgcaaggaaacatgcttatggctatgaatctcaaaattggttatagagttagaaaaacatgaaaattaggatttgcttgtgagagtatttgctcgaattagggctgccccatgtttgatacttcacatagaggcagcgtggaaaataccttgcaatagtgtgtatacataggtaaatataaggagtatgaaattcctagcanagtgtgaatgaatgtatgatagcatggaatgccctcttgaatgaaaatgtgtgcaggatgtaattagctttccgatatgcatataaataaatatgagagaaacaatacaaacttgtatggtggacttcacatgtatgtaagtagtttgtgatagc

SEQ ID NO: 283080 - DNA, 491 bp, Glycine max
  unsure (1)..(491): unsure at all n locations
gggagtctcgactgcatgancacgtgtnnttaatatacccctctgtggacatagtgccgattgtagtgacaacacccgctctttttatgcttctncattttccttgggggggggtcatatcaatggactcccaaaaacaattcactgtgtttacaatgttgactgatgcataatatcatactttcacctcccaacacatgtgaacctcatgggttgcataccttcttttatattatcagcttccattcactccagccagataatctatttatggattatcaatcagctattcaaatgcgtcaaaccatgtttatattgacgcacaaaacatatcgaatcattacggcatatcgattgcgaaaaacacataatggccgttctaacgctgttcacttggatcctactcccactttctgatgtttatccaagacgtttcttctgtcaattcatacttaatattcaagttgaaatgtgacatttttcccacctcg

SEQ ID NO: 283081 - DNA, 408 bp, Glycine max
  unsure (1)..(408): unsure at all n locations
aacgnnnacgcgnggatagtaggagttagtaagtattctcttctcgataaatagattgtctaaaagattatatctgatcttgtcgctcttgcagtcaacttgataacaatgacttttgtggatatagcattccacaatcttatggcaatatctcaaaattgcaaaattgtaagtgcatattgtgattccatgtttggatgtatgatgccacatacaagtaatggagcttatgtgtatgagcctttatcttcatgtatggagtgaaataccagtctacatgccattcttgtatataaatcttcaattggagaaaaactttgtacgagattaataatatatgtcaaacattcaactacattattactatggttctataaatgatattaaacgggcaccacttttatatct

SEQ ID NO: 283082 - DNA, 293 bp, Glycine max
atagaaggtatgttcctaatttctctacaattgcatcactctctttatgatctggtgaagaagaatgtggcatttacctgtggtgaaaaacaagagcaagcctttgctttgctcatagaaaagctgactaatgcacctgttctagctcttcctgacttgtctaaaacttttgagctataatgtgatgcctctggagtgggagttggagctgtattgttacaacgtgggcaccatattgcttattgtaatgaaagacttcatagtgccaccctcaactaccccacctatgataa

SEQ ID NO: 283083 - DNA, 415 bp, Glycine max
  unsure (1)..(415): unsure at all n locations
taatgaaacggcgagatgatgcactccatgagaagttggatcanatggagaatagagatcataatgaataagaaaggaggagacgatggaatgatggtgttcctagacaaaaccgaattgatggtattaaactcaacattcctccatttaaaggaaagaatgatccggaggcctacttggagtgngagacgaanatagagcatgttttttcatgcaacaactatgaggaggaccataaggtgaagctcgccgccacggagttttccgactatgctcttgtgtggtggaacaagctacaaaatgagagagcaagatatgaatagccaatggttgatacatggacagagatgacaaagatcatgangaagcggtatgtgccggctagttactcaatggacttgaaattcaagcttca

SEQ ID NO: 283084 - DNA, 442 bp, Glycine max
  unsure (1)..(442): unsure at all n locations
gagcttattaanacccttaaaangttgccccattttcgagnntgcnggnnnnnanaatnacctccnnatacaacatactgctatttttctgaccatagaattatcaccgctgtctttataattttggcttcccaataaatgcacctatctactttctttgaaagtttgaccataaaaatctctatactctctattaaatttcaacctctacacatatatgcacttgaatcggacttcatttgaaagtttgaccattaaatttctatgacattctttttaatttcaacgtctcatatattatcgccataatcgacctcctgctacaattataccatttaatatctcacacttcngtattaacttaaactctcatatatatcccctaacctaattctgtaaaattatacatttaaattcaaacttcttttaattcaaccctcag

SEQ ID NO: 283085 - DNA, 382 bp, Glycine max
  unsure (1)..(382): unsure at all n locations
agcttgtctcttagatgtccaggaangataaggcggccgaagggactagttccgctcctgagtatgacagtcaccgctttaggagcgctgtacaccagcagcgcttcgaggccatcaagggatggtcgtttctccgggagcgacgcgtccagctcanggacaacgagtatactgatttccaggaggagatagggcgccggcggtggacatcactggttacccccatggccaagttcgatccagaaatagtccttgagttntatgccaatgcttggccaacagaggatggcgtgcgtgacatgaggtcctgngtaaggggtcagtggatcccgtttgatgttgacgctatcggccagctcctgggatatncattggtgttgga

SEQ ID NO: 283086 - DNA, 198 bp, Glycine max
ctatgttggatttaaaatttttataatctgttaggaagggcttaacatttctggataaaataatttctttactgaaaagtagtttaatgaaagacatggctaccattcccgtaccacttacggcaccaagaaatggcgactacataaccctatgagcgaccataatacttaatagattaaagatcagcgctcacacat

SEQ ID NO: 283087 - DNA, 365 bp, Glycine max
agctttctttttgataagaagaggaaacacattatagttggccacttggctagctagctaactactaaactacatctcttgcctttttcttggagcccactatttgtattttcttgtcaacaatcaaacactagtttcttcttaagtccgaacagatcatcgaagtgagttttgtgtgatagaacaaagtcctctccactacattccttgtctctctagcttgtttagcaaagctgtgattagtgcatccctcttctcagccctagcttcttccctaatcctcctttgttcctccctttctctccatctttcttccatcattatcctctcattctccaacacctgcatggcttgcctacactcca

SEQ ID NO: 283088 - DNA, 277 bp, Glycine max
  unsure (1)..(277): unsure at all n locations
accatatctttgagtaggtttggcctgttttttctctttatcctttgctagcatatagtttgtgagactttctgantttgatttanctgttggttccctttcattctgaatgggaacttccctagagtttgttactcctcctaaaaactccacctcaagttgggattggtttggttcttggatctcaacaacttgaatagttttcaccaagattgtcatttcttcctctttaaatacaacatcacaactgataaagcatttagtgaaactcaattca

SEQ ID NO: 283089 - DNA, 359 bp, Glycine max
  unsure (1)..(359): unsure at all n locations
agcttatgtctggtctagtacagatntgagcatatataatactcctaacaattgatgcatactaaattgcttccatttgttntcgttccatatcatttctaggacattgtgcgagactaaatttgtctcctttctgaattggaacgggtgatgctgagcacttttccatcctaaacctctctagtantttattgatatatgctttctaagacaagcctaacaatccttgtgatctatttcagaataattctatccctatcacatagcttgcctcacccatattcttcattttatagttactagaaagaaacttcttagtgtctgaaaaaactatatcattagttgcagcattatcatca

SEQ ID NO: 283090 - DNA, 366 bp, Glycine max
  unsure (1)..(366): unsure at all n locations
tggaacaggaagaagccatcagcaaagcacctaagggctttgttatctatatgctacattcatattctagacatgaagaggcacaagcttgaagacaagactatacgaggtatcttccttgggtatagcaatatctctaagggctaccgtgtctacaacttgcaaactaagaaactcgtcatcagtcgagatgttgaagttgatgaatatgcttcttggaattgngatgaagaanaagtggagaagaacgttcttatacctgctcaactacctcaagaagaagatgaggaagaagacccaggtgaaccaccttcactctccaccacacaacaagatcaagaactatcatcacccgagtctactcca

SEQ ID NO: 283091 - DNA, 439 bp, Glycine max
  unsure (1)..(439): unsure at all n locations
tttaagtttcagttgactaatacttgtaattagttaaagttaatgaaacttggtagtttgtcaataattgaacacaatttcagtggtagagatgaactagtataaatctttgtaacttatatgtttccttgtgtttttctgctttaaagtgacataaggtttaaatttgattttgttttggaaagttctatttgttttacaaagtttctcttcanatgataactttgttttgttaaaaaaagacttgaaaattttctaanaccacaattcaatctctcttcttgtgatatttgcatttacaatatatatatatatatatatatatatatatatatatatatatatatatatatatatatatatatatatatattctaacaactctctcattgtctaaagtctaattacgagttgactgtgcccatcaagaatattgctg

SEQ ID NO: 283092 - DNA, 269 bp, Glycine max
  unsure (1)..(269): unsure at all n locations
tgcttcanagagatccagtaaggataaagcggctgattgaactctgttccgctcccgaatatgacagccatcgttttatgagcgctgagcaccagcagcgcttcgaggccatcaagggatggtcatttctccgggagcgacgcgtccagctcagggatgacgagtataccgacttccaggaggagatagttcgccgacggtgggcatcgctggttacccccatagccaagttcgacccagacataatcctcgagntttatgccaatgct

SEQ ID NO: 283093 - DNA, 518 bp, Glycine max
  unsure (1)..(518): unsure at all n locations
ngggcatggactgacgctgnacccctggcaaantcagccgagtcccgcgatgctctagagatacctgcaggctagctgccngctcgttatcttctgtttgcagacatagaccaccgcgcacccttagcatagtcatgccaaacgactactctgcatggtcaacgcccaccatatcatgactatcccgggcatgacgatagggaacgacatgccaatcttggcccccttgtccacctaagagatacgtctacccatgaactaccagcgtcaaactgcggccgacatatcccggactcacccacacccggaagctaaactgaccggtgatcacttgatacagtaaagagcgacgctcttgatgagacgatatgatcttactatggacatgactcttacaccattgtcggatgtatcccatggatctatcgatggcggacacctactcctccccgatgagagcccggactttgctctatcgtcaggcgacatgactaatgacacctatagtgtatcgccta

SEQ ID NO: 283094 - DNA, 330 bp, Glycine max
gactggaacatgacctacatccctatcctatcttattgtctgtacctcagcagatgacaatatctttatgctctggacacagcttacaaattctctacagggaattataagttcaagaataagataataaacctgaataagagtaaatagtaggggctatgaactacaaggaattgactacttactcccaagggtcgtcaccaacaagaagaatgtcgttttccatcttaacactcccacttttcctttccattcccactaattattgcactgctaatagttatgaataacttcttcagtcatttaatactcacaagattcaatatgtga

SEQ ID NO: 283095 - DNA, 404 bp, Glycine max
  unsure (1)..(404): unsure at all n locations
tgcttctcatggaagtnntcttaagaaagcttctcaaggaagctacctagtctataaatagaagcatgtgtaacacttgttgtaactttgatgaatgaaagtcttatgagatacacttcanagttccacttctttccctctnttattccttcaatntcgtgctccccccttctctctttcttttcctccattaaagcaccctcttcaagcttcttatccaaggccattcttggtggtgaagctccttcttccttggcttattccctagtggatggtgccctccctctcctcttctccttgcctttcgctgcatctncatggtgaaaaatcaccattgaaggacctcattgaagctcaaagatccaccctcatagaagctcacaagcaagcttcaccatgacatc

SEQ ID NO: 283096 - DNA, 272 bp, Glycine max
  unsure (1)..(272): unsure at all n locations
tgtattcaaatgggagatgttacaatgattaataacatattttataacatgatcgtttggatgtcctaacctgaaacaacagattntgagcctatgctagagctattattgacagtagcaattgaataagagaagtcagcatttgtaacaggggcagaagtagacatcagcagggaaggattgccttgaagctggagattgtgaaatgaataaatgccatcaacacccacaactccttgaaggaggaccttatgtgtctnctgagatttcac

SEQ ID NO: 283097 - DNA, 398 bp, Glycine max
  unsure (1)..(398): unsure at all n locations
agcttatccttatgtgtctgcctccggacttcaccccccgtgccacctcggaagatttaagccaagcccctactttcgaggggcaactcccaccttatgaagactatcccgggcaagacgatagggaaggagataccaatcttggcccccttctccacctcanagatccgtccccccatgaactaccccagccaaacatagtccaccatatcccggcctcacccacacccgtaaaagaatctgtccccttcgcggaagataagggaaagattgaggcgcttgaagagaggttaagagcagtcgagggccttggcaattacccattgtcggatntagcggatntatgtctcgtgcccaatatcgttattcctcccaagttcanagtaccggactttgat

SEQ ID NO: 283098 - DNA, 460 bp, Glycine max
  unsure (1)..(460): unsure at all n locations
ccacccagctcgcccaggcgagcaaggttgcttcctccagattcaacaaccttctggaggaatcttctggagggcccaagtgggtctggttgctatttgcaccccctttttactaaatgcacccctttttctattttttgtaattctttttccgtaacgttacgaaactttacgaatttcgtaacgatacttattttccttccgtaaggttacgaatccttacggattatgtatttactcttttttacctttcgaagaagttacggaaactcacggattgcgcanaaacacctctttccgacttccgccacactacggaatttcacggatcacgccagcctgcttccttttggatttctgagacgtctcgggacttcatttattgcatgtcatcaagtaataatccctggacgaaaatanggtatgacagtaccaatatcctccccaacaatatcactac

SEQ ID NO: 283099 - DNA, 431 bp, Glycine max
  unsure (1)..(431): unsure at all n locations
agctnctaattanatantttgaatatccagaagattcatggtgagccatgatagcaataagctagtacatggagagaaatgataacaatcgaaatccatatatcgaaaagcactaagaacacaaccgggcaaaagaaacacatattccaatccaaattcagctcagataagaagaacagnaaatagaaagaaataaaaaatatataaatactaaccagaaatgaggataaaaggattggcatatccagcatgagactcaaggaatggaatctgctaaagccctcaaaagatgaactctagaataagcaacaaccagagagttgtaattatttattgagaagcaagtagattcgaatagttaacagctcaaaaacgcaatagatgtacagggtagatgaaaaatanaacatacacactatgatctgaagaag

SEQ ID NO: 283100 - DNA, 444 bp, Glycine max
  unsure (1)..(444): unsure at all n locations
acaaaacttcagaatttggatattgacctatatttgttctccttttatttcataatggttgtcttcaatgaaagagtatgtcatcgactttatacactgttctatagaatataacctggcaatgaanatcttatagcagatcttttgttgctgcagtggagtttgcgattgatgcctccattaatggtgagacagtaggatatgctactatagtgcagattaatagcagcacagctgatggatacaaagtgggctgcagttcttntaatcctgcttataaacaaggtcatgatgataatataactcaagattcttctggaggggacacaatcccatcaggaattcctgcagtatcggttgcgtcagttgatgagccctatgtgggccaggagtttgaatctgaagctgcagcacatgcattctataatgcatatgctaaacgtg

SEQ ID NO: 283101 - DNA, 392 bp, Glycine max
  unsure (1)..(392): unsure at all n locations
agctaacaatcntttttatagtttgagcttgacctctgtagctagagaggcttcttaaatagcttgagtctgacctttatggtagacaaaccaagtcgagccgagccttacatagaccgagccaaagaccctcgataagctgctcgactcattntcaccactagacgtaaccaatcaaaagttcaagatgtattggaataataataaagtcatcactgaagtgtgtgctagttattgagtaatacacaccaaattaatcaattcaatgataagcattagtcacattaatcacattcaatacaattattaaaaaattatctatattttacatattcgagatatattacataaaataatatgagaaaatatattacatattttagataaataaa

SEQ ID NO: 283102 - DNA, 355 bp, Glycine max
  unsure (1)..(355): unsure at all n locations
cattttctataattagggggagaagcgaagcgaattanggtctcaccccttaggcacttctctctatttcgaatntgctaggaaaaatcgtttccgtgaagacaaatcatgccgaggcgctttcgaaacgttttcgtgaggaatttcgcgaaggtttcgaccgttcttcaacgttcttcattcgttcttcatcatccttcgatcttcaatgggtgagtaccttcaaccaagcttttcgattcattccatatacccgtggtggtccacattgtgtatcgtgtatctttattctcgtttcatttacttttatacaccttcttgacgtgcttaagcgcatttatttaagtcatttctc

SEQ ID NO: 283103 - DNA, 184 bp, Glycine max
cctcatatattgccggtcaaaagtctggcaatgttttccagaagctttttactcatatattatacatgttgatgactatgaatttgaagtcagttattggaaaagtgattactcccaacggatgtaatatcttttaacgtaaactatctactatggatgaaatacaccctattttaagctattt

SEQ ID NO: 283104 - DNA, 297 bp, Glycine max
  unsure (1)..(297): unsure at all n locations
agcttggcatttgtttagattcactngacaggaacgtctgaactcgacagagtggctgcgagcgatggcanaagattgtggaacagagctttcaaccttccagcagagaaagtgtactggttgatctcctcanaagattcatcccgtggcacataaacaggatgaggctnttcaattctactctcagacagtggatctaattgcattgacattgcaccaattacacaccccattagacatgctatttgctcattccanaacccaacacaaaaagtaactaacaagaaagcaaattta

SEQ ID NO: 283105 - DNA, 320 bp, Glycine max
  unsure (1)..(320): unsure at all n locations
aagcttgataaagtttccacttcccgtgttaccggcaaagagatattttatttattgtcaaccacattgcaattttaagtgtatttttggaagaagaaaaaatgtttttttaaataaaaatattatttctcatacacgagtgagaaataacacaagttcttgttcccctttntatttatattgcgtgactgtgacttagccgcacatgcaacagataaggaagagcaacgtcatgccttcacttttcaatactgcttggattcagaanaaataaagagtgcaaatattcctgttttggagggagtggaggtttcacctga

SEQ ID NO: 283106 - DNA, 517 bp, Glycine max
  unsure (1)..(517): unsure at all n locations
cggggcggctgagccatgcagacngcaaggtgaatnagctccggcccgggatactctgagccgacctgcggcatgcaagctttgcgtttcttcatgatccattacgacacgagccgcgtcagatagacatgacggtgcgctcacgggccacggggagatagacaagaccgatgactctctcagagaagaggatatggaccgcatacgaagaatgtgccccttcgccttgtactaggtgcgtggcttcgtgaacaaccccagccaaaggtgatgcctcatgggctatacacaaccctgacccatcccatgtgcacctcgcgtagacatataaatggaatttatcctcgcgcttgctaagacgcaaagagcagtagacggcctcgtcgaggaggcggagacggatatcacgaaggcacagcctttgccatgccacaaagtggatgacgcttaccaactctgaggacctgttataacggaaggacgacattgctagggggcctatgacattaggtgcaag

SEQ ID NO: 283107 - DNA, 517 bp, Glycine max
  unsure (1)..(517): unsure at all n locations
nggggtctttttggggctgnantacgtgacnttanaatactatacttaagcgtctattacgtcggattatcgcatgtccaatgcatgattgttgtatggttagtccaaacaaaatcgatcgtgacaattataattgattttgacaaagaactcaatgtgttatcaatacatatattttctgttaaacgtgatcaaattaagttactatactttaatattgatgaatgaggacgttacattcaatacatgtctatatatatatatatatatacatatatatagctatgtatatatatctctatacatagatactcgaaagcggaactctagaatgcacgatgaattctcacaagagagagaatattgatgtgcctgatacaatcgagtgcacaaatttattgatacaacaccatcataacatctttctgagtactagattaacacacatttgtcctcctgaatagaaacatgctctcatgattttgacactgcatgcgcttcgcattgttatacatag

SEQ ID NO: 283108 - DNA, 421 bp, Glycine max
  unsure (1)..(421): unsure at all n locations
agcttttaattattctagaatttaagggtcaaccttaagatgttgccaaacttcataaggaaattagaaccttanaaactacattagccaaatntgtcaatggaatagataatcttaacaaactattanggcactatacaagttcctcaaacaaatctagaaatggatatgatgggaagatctatgttcataataagaatactattatttgttatntttgtggtaagactggacacatgacgcccaagtgtagagatcgacctaagaagggtacaaccaatacctctatggctaacacaaaaagacccanaaagatttgggtacctaagaaaaagattattcctattgcagatgtccttgatagcagaaagtagatgcctatcatggtacttggacagtggctgctaacgacacatgacaa

SEQ ID NO: 283109 - DNA, 444 bp, Glycine max
  unsure (1)..(444): unsure at all n locations
tcatgggaaaccagtggttggaaggcaaggttggatggtgaatttatgtgtgaaagtcacaatcatgaattggccaagtcattagttggacattcatatgctggtcgattgactaaggatgagaagacaactattgttgatatgacaaagtcaatggtgaaaccaagaaacaatctcctaacgttgaaggagcacgatgccaatagttgtacaacaatcaaacaaatatacaatacaagaagtgcatatcgttcttccataagagacaatgatactgaaatacaacatctaatgaagcttcttgaacgagatcagtatattcattggcatatattanaggatgaagatgttgtatgtgatatcttctagtgtcatcctgatgcaatgaagttatgcaatgcatgtaatttggtgtttttgataggtagtaccctacaaacaaat

SEQ ID NO: 283110 - DNA, 397 bp, Glycine max
  unsure (1)..(397): unsure at all n locations
agctttaagtgataatggttcaaagccncactttgagggtgtgtctctgtttcttcttctgtccatgaaacttctctgtgtcacttgatgaatgagccccacttaaaaagtttgaatattgaggtgaattatctttctgggtgtttttcaagagagcaagttcttgaagtacttggggtttatgtggaatcctctgtctgggttatggacgctgctgctataatggcaattgcacttgccaatggangggtgagttgagcaaattcaatcttgggagtttttaatcactatggttgatgctccatagattatcttttaatttttttttatgcaggtgagccccctgattggcaagattttgttggatcatcaccttgcttctcatcaattcactatc

SEQ ID NO: 283111 - DNA, 314 bp, Glycine max
  unsure (1)..(314): unsure at all n locations
acatcaagagcacaacanagaaagtagtgatatagttatttcttcaaattatggcagtgttgaaatgccacaagaaattgaatgtgaggaacacaatgttgttgatgagggaaggaatcatggtcatgaacaacataaggaagatagagagaagaagaaagaaagaagaaatgataatgcacaacacatggatgattattattctaaaaaattgacaagtaagttggagcataaacgcgacatgtcaagagctctataggaggtttgatgagaacaaaggagttgtacaactgcagttgtggccctttcttttg

SEQ ID NO: 283112 - DNA, 384 bp, Glycine max
  unsure (1)..(384): unsure at all n locations
agcttgtgattggctatacatgatacatgtcanggcttggtttggttcaaggataaaagggatgccccacattatttccatgacacatatgcaaaaatgatgatttggaaattttatgcaaaactggtcatgcatgcacctatgcgaacactcaagtgtcaaatttttatggtcatgtgatgctagggctcaggattcattttcctctattttaaatcaacccaatgtttccaaaatatgctcttttatccatttgtgcattcatccgagtccattttgtgcgtccggggataatttcacagcatttacccttcaggtgtatacacatttttaaaaactagtaatgatcagtgaaatttttcaaagaatagtnggaagtcatct

SEQ ID NO: 283113 - DNA, 319 bp, Glycine max
  unsure (1)..(319): unsure at all n locations
tactaagctntgaatgctctattcaatggagttgacaagaatatcttcagtctgatctacacatgcacagtggccaaggatgcatgggagatcctgaaaaccactcatgaaggaacctccaaagtgaagatgtccagattgcaactattggctacaaaattcgaaaatctgaagatgaaggaggaagagtgtattcatgacttccacatgaacattcttgaaattgccaatgcttgcactgccttgggagaaagaatgacagatgaaaagctggtgagaaagatcctcagatctttgcctaagagatttgacatgaaag

SEQ ID NO: 283114 - DNA, 338 bp, Glycine max
  unsure (1)..(338): unsure at all n locations
agcttttggtatcttgtcgttgattggcacaccaacggatgccccttgacctgcaaaaatttcttgaagctttgcaagtaagtgctcctaattcctctttccataaccctaaactctttttcaattntattatcgggtcttcattccttattattattcgataattttttgggtgcttctgaaacaaaaacccttattgctcaacgaatgtgtggtttgggaagcaatatttggtagcattttaagcgtttaaggtcactgaaatgtgtcgtttaagaattagaaaataagagaggatagggtggttttcttattgctatgttacatttatgtgatgg

SEQ ID NO: 283115 - DNA, 277 bp, Glycine max
tactaagcttgccgaatagtttcgccgggaaggatgaagttgttttatataggcaattgattatcctgctgtgagaatggaagcctaagcaaatggagagaataagaaggagagaagacccatgctgtgtctaccattcctacatggccaaatttccacctgctcaacaatataatacttaccaatatcagcccttctcattacctaccaccctattattagacacccatcatcacaaggccaccctaatcagcacaaacctgctactgcatattcg

SEQ ID NO: 283116 - DNA, 512 bp, Glycine max
  unsure (1)..(512): unsure at all n locations
nnnttcgggctggacctacagctangcannacangggagttgagctcgtacccggtgtcacccgagtcacctgccgcatgcttctttgcttatcangatcgacagtagatgaagatggacatcatcctcaagccttgaagcagcagcaagctcctcactctcaagaccctgcacactatgcattacaagataaaatatgcttacgaaccatccattgtcttcattctagtgttacagctcaagcctatgatgtaatccagagattcagatcaacatctgcaaaaggcgcttatattctacaatcgatcatctcatgtgtggtttataggtgagttgttaccanattgattctgcgtaaaactaattctaacgtgatgcgagtcatgttcgatgttattattcgtaaacaaagtactaacaaactcagtataaatgtagctagatgctggaaccaaaatgtgaaacttatcgtgatgcacgtaactgggtatataacatgaatcaacgatgcn

SEQ ID NO: 283117 - DNA, 360 bp, Glycine max
  unsure (1)..(360): unsure at all n locations
tactcagctacgcatttaatccnattaaatataggtgtggcttatctttatttaatccaaccaacacattgtgattgtggtgggaagacaagaataatttacagggagggtagcagcatggtaagggaggagggcaataacgtaatttgaagtggtgtgaaaattacttgacaggcaatctttgtctcatatgcaatagagttacacccaaggcagcacacaacacagccattcccaaagagaaacaaacacagttgcattgttgcaattgcaactaatatccgcgcctgtgatcgcaccttcatttcanaacctgctccatttttttctttctttctttcgcattcgtagctctatctc

SEQ ID NO: 283118 - DNA, 137 bp, Glycine max
  unsure (1)..(137): unsure at all n locations
tgcttgatgcttctatangcgangaaaagagtaatggcgtgggagagaagatgtgcaagctctctgatgaatatgtgagtgtaaagtcaagttcatctactacatcaagttctcaacaacctactgtggaagaagat

SEQ ID NO: 283119 - DNA, 216 bp, Glycine max
  unsure (1)..(216): unsure at all n locations
tgtaagtcacaagtgtttggtggtctttctatgataaaaaccttgggcgtttctgtatcctttactcatttataattgtgcaatntgtctttattatttggctaaattactattttggtttanaactacttccacaatccatgacccacgcaacaaatccaacttcgtcgaggctgaagtcttgttcgatggccataattatgttgtcgctctcgt

SEQ ID NO: 283120 - DNA, 363 bp, Glycine max
agctttctgttgagacttctttgagaagctagatccttatctatgcacacgcctctattaactaaattaacttccttaaacataattacagatgaaaataacgcaacgtataatcaaacatcaaacataatgactaataatatatagatatatatatcacggtgtgacactgtcgccccttgtgacgaatatgtggggtgctaatacgttccccatgcgtgaatacaactcccgaacctttcacttaaagttcagagatctcatcttttccggattttccaacgtgttgctcaaataaacgttggcggcgactccgcgcgcattcctttcttggaagacgcacccgcgagtcacgtgtcgctc

SEQ ID NO: 283121 - DNA, 392 bp, Glycine max
tatcatactcagctggaaggatgcttcaatggaggaaaataaagacggaaagaatgtagagatgggggagcacgagatagaacgaatgaaagagggagagaagtggatctttgaagtatgtctcacaagactctcattcatccaagttacaacaagtgttacacatgcttctatttatagactacgcagcttccttgagaagctctcttgagaaaacttacttgagaagcttctttgagaaaacttccttgagaagctagagcttagctacacacacccctctcataactaagctcacctccttgagaagcttccttaagaagattcctatagaagctagagcttagctacacatacctctctaatagctaagctcaccttcttgagatgag

SEQ ID NO: 283122 - DNA, 378 bp, Glycine max
  unsure (1)..(378): unsure at all n locations
agcttcggattaatgtgatgaggtacaagccctaaaggcagagcttgaaagagaccgagtagtcgaagagaagttcaagtccatagccatcaaagtctgaaaagagtatgatgaactaagggacgtcaatatggccaccgctgaagccttggaacgagaaaccaagaaggcccgaaaggaagaacacgtgccagcaaagttttgaggggctntatagggcagcaatagtaagctcaagctccgaagaggtgaaaggaatcatcatgggtcanaggcatgatcttgaaggacgagctaaaggcttaccttangtcgaanagaaatttatcccaacagttaagcgagactgaagggaatatgtgggccgtcatcgatgag

SEQ ID NO: 283123 - DNA, 452 bp, Glycine max
  unsure (1)..(452): unsure at all n locations
tgtagaatggctagacatgatacatgtcagggcttggtttgtttcatttgtaaaaagggatgccccacattatttccatgacacaaatgcaaaaatgatgatttggaaactttatgcaaaactggtcatgcatgcatctatgcggacactcaaatgtcaaattnttatggtcatgtgatgctagggcccaggattcatttcctctattttatatcaacccaatgtttccaaaatatgttcttttatccatttgtgcattcatccaagtccatttcgggcgtccgggaaaatttcacagcattcacccttcaggtttacacacattntttttcccanaaactagctatgaattagcgaattttcttcanagaaaagttggaagtcatctcttttcaaaagcatgtttggttttcagctagacaaactatttttcttttttttctccttttttt

SEQ ID NO: 283124 - DNA, 300 bp, Glycine max
  unsure (1)..(300): unsure at all n locations
caaaaaatgcttgggagtatgtcatggattgcctaggtagtctggttgattgtccttctgaacagcagttcgctgagtgccttcagaagtntcaaatggcttgttcaccttggctaatgttcgttgactatgttaacgaaacctagataatcccacacaagaaaaaatttattacagcctgaatgaataaggtgatgcacttangcaacacaacaacaaacgggtattaaaatgttacaatntttctagtaatggttattaattcatggaatttaattgtagnatattnntaattttttt

SEQ ID NO: 283125 - DNA, 306 bp, Glycine max
  unsure (1)..(306): unsure at all n locations
agctntgagctctttttctgactcaccataaaccttgacccagggtgagaatgtcaatccttaccctcggaagcaaaaaaggaagagaaggataatttccaatcaaaggacaaaagagaggatagganattcccaatcaaagagtgggagaaagcatatagatnagatagataattcccaatcaaagaatgggagatagattataaaaagagaaggagaagaaggaaagatagctcctggtcaaagatcgaaagaaaacagatgatatatgcagagaggtcttttgaccagacaatatctgaacaa

SEQ ID NO: 283126 - DNA, 382 bp, Glycine max
  unsure (1)..(382): unsure at all n locations
tacccatcacatgtggtactaggtggctgtctgtcgatggtgcacaacaagttttccacatccacaatgcgcgcataaacccaccatcccctgttgcccacctncaactgaactcacgtactcccacgtagcccatatcctcgtttctctccacccgggtccccatcaatcctcccaagcttncacaacatccaatcaaaacaacattcaaacagcacaagctatcacagccaagcaaaacagagcanaggcagaaaactctgctcaacacatcaaccaaaatcacagctnttctctcttaggaccacaagtacaattccttcgatccaattcgttaaccggtggatcgactccaaaattttactggaagtctatagtgcat

SEQ ID NO: 283127 - DNA, 239 bp, Glycine max
  unsure (1)..(239): unsure at all n locations
ctaagattggtataacatacgcaccaattatagaataaattttgagccaaaacaacaagcacacttncctttcactttttattttctagatactgatttttctgccaacttgtgtgaattttagtattttttccatgtatctaaatcacttggttctttctgtataacttgtttccagatgtctaataaattcagtaaacatttcagctataaattcanagtaaccaattctcagtaat

SEQ ID NO: 283128 - DNA, 278 bp, Glycine max
tatacgatatatgtcgaccaactttgcagaccttgtctttaccggagattgaatctagtccggactgatgaaaggcaagtttgaatacgcctacaacgctggccccaacagcaatagaagagccccagtggtgggcacatggaaaaaggaaggggatacccacgcggtcaccactgccccaacgtggatgataacgccccagaatgctcattactcataccaacacaaccacccgaacttctcgatccgagccgggagttccctcccaactcaagtag

SEQ ID NO: 283129 - DNA, 442 bp, Glycine max
  unsure (1)..(442): unsure at all n locations
ctatttagtcttctatgccatgctcgatcctgatgtgtgcgtacgactcgtattaactagattaacatccttgctcattattactgatgatacgatgcgagctgatgatctatcggacacatctttggcactcaattatggatatgtactataaggattacagctgtgcacgttgtgacgatgccgtgaagtgctagatggcttccctatgcgtgcatacaactaccgaagctgccactaatagttcggagatctcatcctttccgggctttacgatggacgactagctatagggttagcggacgttccgtacgcattcattccttggattacactctactgaacgacgtttgcgtcttctgtctatgggtgcgtacgacactatgtatatccagtgctgaagggcactatnttctcgcagttatcccctatattctggtgt

SEQ ID NO: 283130 - DNA, 270 bp, Glycine max
ctgaatgcaacagttcataatcaacaactttaataatctcacttggatactgagtttctgatgcttctatatatactgaagacatagctttgtctctatatagcacaagaaaaaaatttcttcatcctataaagagaaaatgaaaccactacaattagttaattatctaactcagagctactattatctttagctgtgcattaataattcattgcaagaagtcgaattttgaggtttatctggtgaaaaagggaaaggaccaattccctg

SEQ ID NO: 283131 - DNA, 324 bp, Glycine max
  unsure (1)..(324): unsure at all n locations
agctttatttatgaattgattatagccttagtttcactctggttattagtcaattcgattaagaaagaatatcccacagaacaatgtccgaatgattnttttttattgtttaatttaaatatattnttttattattatattattattttgcctctttctggttttaaacgtggttatggcatgacagatcggtcggattttattccaacatagattaaaagatattacaactctcatgatcggtggaaatatattttattgttgattacgcgagaaaatgacttaaataaatgactaacgcacgtcaaaagggggtacggaaag

SEQ ID NO: 283132 - DNA, 367 bp, Glycine max
  unsure (1)..(367): unsure at all n locations
tgcttgtggagcttctatggaggatggatctttgagcttcaatgatgtccttcaatggtgattnttcaccatggagatgcagttgaaggcaaaggagaagaagagaggggaggcaccatccactagggaataagccaaggaagaaggagcttcaccaccaagaattgccttggataagaagcttgaagaggatgctttaatggaggaaaagaaagagagaagcggngagcacganatctaaggaataaaagagggaaagaagtggaactctgaagtgtatctcataagactttcattcatcanagttacaacaagtgttacacatgcttctatttatagactaggtagcttccttcagaagctttct

SEQ ID NO: 283133 - DNA, 356 bp, Glycine max
  unsure (1)..(356): unsure at all n locations
agctnttatctatccaagatcatacaaaagtgttacaacagaacctaacggtttctaattatatgggccatcaaatctatcatgtgttgacggtaattgattagcccgtgaatttcctcggnggttgtacacacttcagcgatggcctttgctttgactagtagtcgcgggaggtcttgacttccattcaaggtcaaggcgaacctatccatccacatggtcgcttcttgatgtaatgcatcaatcaccctccctcttgcttccttctcggcgtacgcttgcacaaaatcttctaactagctttgttcatgggtcaaagactggttaactcttccttgtactgccctatgatagct

SEQ ID NO: 283134 - DNA, 349 bp, Glycine max
  unsure (1)..(349): unsure at all n locations
atataaatactaagcttcagaccaaagcaacacataatctaggtatccaaaactcctctatttaatggattntcaaggtttgagaagtgaaattgagaatggggtaaatttggagcaaactctcacctcacacgagtctataacatcaattgaaacttgttcanattggatttacacctaaaatttcgccgaacccaaaattgactcctcaacccccaattntaccctagaaatggctctttattcactttggtcatctgtttttctctctagcacagcccaaactttctnctaagtcctanatgaaatttcaagctaggattaactcacttttaacctcaaataccac

SEQ ID NO: 283135 - DNA, 333 bp, Glycine max
gaagctttcaatttttcttattcaatgcacttccagccactgcatagattatacttgatttggaacactgacttaataagaagagttaacacgtaaacgaataatgttatgtcgtctacataaaaatggtaaggaatataccttgtgttcacaacaaaaaaataccttgtgtaggacattatcatatacatgattttgtgtttctatgaatttaaaatggtcaattgcttctgctatgagtaagcaatctgatatacactgtgtcaaagccacccctagaccgtcacctattaactactaatatctgcaaaccttctgtacatacatagtact

SEQ ID NO: 283136 - DNA, 246 bp, Glycine max
  unsure (1)..(246): unsure at all n locations
aaaatnanacacttagaaatgcgtcaattangtgtacaagctcagggccctataaatgaaatacaaaattgatttaaacgtattacaatatctacaataaataaaagtctaacacctactgatctctattgatggcncttaattaatttttaaatacaaattaacaactgaatcaattgtcttataactctagagaatatcatgcgtcaacaatccttttacaaacaatcttgtatgcatatacta

SEQ ID NO: 283137 - DNA, 318 bp, Glycine max
  unsure (1)..(318): unsure at all n locations
agctttagcttatctgttgctgccccacaaagctccacggaagttgtctcggcagtgttcttccctacaagccctcttggtttctcattccaaggctttggtggtagccacatttacatctctcagtttggtattcttctttcggattntcagagctgctgatttggatctttctttaactgtntgggcttgctcgagttccaccctaagggcctgcacctcttcgtcttcctccggtgcctcaacttcctctcttttagcggttctcaaacttggaagccaatcctaacctttcacgtgggcttttaaccacttatg

SEQ ID NO: 283138 - DNA, 311 bp, Glycine max
  unsure (1)..(311): unsure at all n locations
tgagatgaggaagtgttgaagggtgaaacttcctgcttttattgttgaccacagagtggtacctggagatatgtcgcggtggtcaggagaccttgnggacgtcaggtggggtgctattgcccaaaaccaagcttgaccaatcccgacccaacccgggcatagtcggtcagtgagaacctgtgatgtacctaagcaggcgagctcctggcagtcaacagataaaaggaaaacaagaccacaaagcaaggaggcttgtggtggctggccagctgtgaattttgtgtaatatgtgagatatggcctctggtaat

SEQ ID NO: 283139 - DNA, 113 bp, Glycine max
ccttgaatcttcttcatcaatgatgttacttgcttcttgaagatcaatgacaacagaatggagaatgaggaatggtgatcgaagacgtcacttcacatataatatgagtcaag

SEQ ID NO: 283140 - DNA, 329 bp, Glycine max
  unsure (1)..(329): unsure at all n locations
ntgaattcaaaaatatgagccacaatggtggtgagactagctttaaatatgcgttctttggaccaatctctgttttntgaatttatcttaaaaaatacccatttgtttttaatgaaattggtctggaataaaacagataaaattctaaacaaattctatgttggatcccttgagagatgaggtcaaattagttcctatgtgtgacatgcaaggcgacttcactgttgtgcaaatagagtctagtagtgtgtagctntccttgattgtgagtctctatggtggtcaaattgaaatggtgtttacaatttattaaactagagagaaatttt

SEQ ID NO: 283141 - DNA, 374 bp, Glycine max
  unsure (1)..(374): unsure at all n locations
agcttctccttccttttcctataaataggggtaggagggaagaacataaatattcaaccctcttggtatctgagaatcacttanaattagtgagaaanattgttccatgaagaanatccaagccgaggcgcttccgtaacgcttccgagacgtttccgtgggtgatttcgcgaagaattcaaccgttcttcgccgttctttgtttgttcttcgtcgttcttcggtcttcaaccggtaagttccaaaatcgaactttcaatccattctatgtacccttagtggtccccacttgtttcgcatgcttttattttcatttcatttactttccgtacccccttttgatgtgcttcagtcatttatttaagtcattttct

SEQ ID NO: 283142 - DNA, 326 bp, Glycine max
  unsure (1)..(326): unsure at all n locations
tgccccgagaaggaatccacggaagaaatgcttaccacctctttagactgganagcggtttctaatgaatcctctgcggcctccacatacggcatanaggatgggcagctcaccaagatgtcttcctcgcctgatatgatgaccagatgcccatccactacgaatttcaacttttggtggagtgtagaggaaacaactcccactgagtggatccacggacgccccaacagacagctgtagggggggttaatgtccattatttggaagtaacttggcatgtgtgagggcctatctgtactgggagatcgatctctcccctaacctct

SEQ ID NO: 283143 - DNA, 356 bp, Glycine max
  unsure (1)..(356): unsure at all n locations
agcttaaactttatggtagacaatttacaggttttttagttgcatttatgtttagctntagtgttttcaattntagggtttacaatgtagtgtttagttaggtcttagagcccaataggggcaattcctgtaagaggggtgaagacccctcatttctgctggaaatcatgatgaacgcgctaagcgtgccagctgcgcttagtcggttcatcgcaactatcannattttagatttccaaatgatcgcactaagcccgaccatgtcgcgctaagcatgttcatccttctgatgagtttcaatgaagagctcactaagcgcatctacgcgctaagcgagagtagtgtttcagacactt

SEQ ID NO: 283144 - DNA, 410 bp, Glycine max
  unsure (1)..(410): unsure at all n locations
ctcaagcttatgcaccggaaatgtaattatgaaattgagatgcccgaagattcactatttcctagttaaccatgcattaggtaccatgttcaattattttttaaagtgaaacgggtttatgatcccaacatggttggctcgtggtgcctaacacatgaaactaagaatgtagtgtgaagtttcacgcttcccccttttttgtttttgttttgtagaggaaaacgcaaggatgagcaaacatganaacaaatggtatgcgattntgcagatcaaaaagtttgttgaacgcatatgcatgatgatgccatgactcatgcaaaatgtgaggctggaatatgataacggacaaatgcangatatgtccattatgatgttatgaagagatgcttatgcgatgcatgatatgaatg

SEQ ID NO: 283145 - DNA, 374 bp, Glycine max
  unsure (1)..(374): unsure at all n locations
agcttcaccgtatgtcgccgatcgaacatttcctaaccgacgtcatgcatatttcgttcagggattgaattgaanactcgttaggcgacatctgtcgtgaagtagcgaccgatatttttcagccgacattgcacaattctttttagaaaagctcgctggtcgataatggtctttttacggcagagtaagttttcttgttntggtgttgcataaaaaagttacaatgtacttcggctaggttnttcgtgcgagttcaaccgacattntgtttcggccaggaaaacattagcccacctctgcanaaaaaatatttgctaaccgtcttcatgcatatttcattcaacgaatgaatagaaaactcaatagccgacaac

SEQ ID NO: 283146 - DNA, 309 bp, Glycine max
  unsure (1)..(309): unsure at all n locations
tcaccggatgacgccgatcgaacatttcctaaccgacgtcattcaaattntcattcagggattgaataaaaaactcgttaggcgacatttgtcgtgaagtagcaaatgatacttttcagccgacattgcacaattttttttagaaaagctcgctggtcgataatggtttttttacggcagagtaagttttcttggtttggtgttgcataaaaaagttacaatgtacttcggctaggtttttcgtgcgagttcaaccgacantttgtttcggccaggaaaacattagcccacctctgcaaaaaaaaaata

SEQ ID NO: 283147 - DNA, 515 bp, Glycine max
  unsure (1)..(515): unsure at all n locations
aaccgcggaagggctgngnaccgcttatcntatagaatantaagcttgaaccttttaggtgccttaatccttgggtggacacatgagtntttattaatatatgtntctcgaatggtnngaaatggtngtaaatcaagccccggtcccaataagtaaatgacgcctaanaacaattttaagaagactttattttggatgtgctagggcccttttttttactctaaatgaaaatactataggtagactttttttcaaatacatgtgaactttttttgtcaacatgtgtcaccttttttgttttataaaaagtaatagcacataatattatgttagtgggcctaaagcttgaactctntagttgtttactcttggggcaccatcagtttattatatagttctccaaatactctgtcagataaaagatgtagaacataaaattttgtggtgctttcacaaatgcagatcanaattattttgaaaacanttacatattgctaatccatgataataaaatn

SEQ ID NO: 283148 - DNA, 430 bp, Glycine max
  unsure (1)..(430): unsure at all n locations
agcttgaccattccttacccaacccgggcatagtcggtcagtgagaacctgtgatgtacctaaacaggcgagcctcctgcagtcaacagattaaaggaaaacaagaccacanagccaggaggcttgtggtggctggccagctgtgaattttgtgtaatatgtggatggtggcctctggtaatcgattaccaagggtgggtaatcgattacaaggcttaaaatngaggacaggaggctaagatggtctctggtaatcgattaccaaggggtgtaatcgattaccaggcttgaaaacgaagtcaggaaacttatggagcctctggtaatcgattaccagcctgtgtaatcgattacacagaggaatgggtcactggtaatcgattaccaggcatgtgtaatcgatacacagtgtattattgcatatttcatg

SEQ ID NO: 283149 - DNA, 359 bp, Glycine max
  unsure (1)..(359): unsure at all n locations
gtaaaactaagctaaaaagtcttagatgggagtgggaccagnccatacattcgttacctgcaatgaacaacgaagcactcgagaaattcaaatttcataacttttcacacggaagtccgtttcatgcgcataatatatcttgaccctcgaaattggtcaccggaaagctctcgagaaattcaagtggtcataacttttcttacggaagtgcgattcaggcgccatatatatctangtgctagaaatngatcaccggaagctctcgagaaaatcanatggacataacttttcaatcgcatggtctgattcaggtgtagaatatatcgagacgcactanattgaacaatgaaagctctcaa

SEQ ID NO: 283150 - DNA, 151 bp, Glycine max
  unsure (1)..(151): unsure at all n locations
acctttcattctttaacatgtttacatacaaaacacgctcanaagtcacactgactatcaaaagggaaataagaagtgccaattaactctgtttgagataccacactgactagtgatgtggccaagatggtgngtattagtataatacact

SEQ ID NO: 283151 - DNA, 183 bp, Glycine max
  unsure (1)..(183): unsure at all n locations
tactcaagctntttggagtagaaacatgggaccaactcattntatttcanaatatgaagtcgtatctagtcaaggtctgagagaccatacaagtttcctaacgatttctaattatgtgggccattaagtctatcatatgctgacaatagccgagaagcccgtgaatctcttcgggggcggagt

SEQ ID NO: 283152 - DNA, 293 bp, Glycine max
tacaatgtaatgtttagttaggtctcagagcccaatatgggcaattcctgtaacaggggtgaatacccctcatttctgctggaaatcatgatgaacgcgctaagcgtgccagctgcgcttagtcggttcatcgcaactatcaaatgtctagatctccaaatgatcgcactaagcccgaccatgtcgcgctaagcatgttcatacttctgatgagtttcaatgaagagctcactaagcgcatctactcgctaaacgagagtagtgtttcagacacttacaaacatttcaaaatt

SEQ ID NO: 283153 - DNA, 228 bp, Glycine max
ggaaattgtattatatttcaaacttttagaatattatttagacaatgacaagatattattcttatcattataacttaatacgttagtaatttggttttaagatcaaaatataacgttaatatttgaatttttgttacatttatctttataaacaaaactaatgaataagagttctacgaactcctacacataatacatctcttgtttcttttacatatatttgccaca

SEQ ID NO: 283154 - DNA, 389 bp, Glycine max
  unsure (1)..(389): unsure at all n locations
agcttttggattgatcaagaagtgccttatgaatcctcccgtgcttatgccaccagtacctggaaggcctctcattntgtacatgacaatcttggacgagtcaatggggtgtatgctggggcaacatgacgaatccggaaagaaagagcgcgctgtttactacctgagtaagaagttcacgacctatgaaatgaattactcgttgctcgaaagaacgtgttgtgctttagtatgggcatcccatcgcctaaggcagtacatgctgagccatactacctggttgatatccaagatggacccggttaagtacatctttgaaaagccagctctcacgggacgaatcgcccggtggcaagtcctgctatcncgaattgatatagtctacgtca

SEQ ID NO: 283155 - DNA, 417 bp, Glycine max
  unsure (1)..(417): unsure at all n locations
tgttgaaccctataacaagaaattccaagagttgaaactcctatcaactcanagccctttggtaaccctaaccaagattaaaacctacaaagaaatcagaattggatagaatacacctttagtatgcagattacaacttcttcaagctntatcaattatcaaaccatgatgcagattgcaagatcttttctatgttgataatcatcatcactcttggaaaatcctcatgatatcttcctctcaataagtcacgaaattggaaaacaatttggaagcttagagactcgttgcanagaaagctatttataaagaatctactatataacatataatcgattacgaccattnntataattagtaaattcctaanagtagatatggatttctatctaagatcaatgtaatcgattacatata

SEQ ID NO: 283156 - DNA, 346 bp, Glycine max
  unsure (1)..(346): unsure at all n locations
agctttctatctgccccaccaacttcgcgaccaaagaagactctcttttgtacaattggaggaagaccattattacctccatagttatcaacttctataagccagaagttgtgatccgggtttttcaactntactcggccctgagaacaaagtgaccaaacaatgaaagataaggaatacattcttgcaatagtatccgttcaataaatgacaagaaatttcattcattgtaacacatctgacttcataagctaaaaaataaaacgactctggcaagcctgaatganaacaaatggggaagacaaggggcccatatgaaanaagtaaaacgatactcaatgaatta

SEQ ID NO: 283157 - DNA, 297 bp, Glycine max
  unsure (1)..(297): unsure at all n locations
tctccctttgagtntcttcattaactcctctattgttatttgcttccctctctcttttaatctgagtcatctctatgtcatactgagtgtacacagagacaaactctccaattgccatgctacaagccccagcaactaatcctgcaaaaccagcaagaagcatggcactgatgtctntcttaacagctccaacacccatcatcagtgaagcaacagaaaccaacccatcattagctcctaacactgcagctcgaagccactgggccctttgagagtaatcaataatgctactactct

SEQ ID NO: 283158 - DNA, 343 bp, Glycine max
  unsure (1)..(343): unsure at all n locations
agcttgtaactcttggcaatttctttaaaactagtcacttaaaaagttatgacttttgaaagaatcttcacaaacaagtcacttgaagaattgtgacttttggaaatgtatttttcagaatcagtcactggtaatcgattaccattaaggtgtaatcgattacacatcaacagatgtgacttcattttgaatgttgaaaatcttaacattntaaaacactggtaatcgattacatgattatggtaactgattacagctctgtgaatcagtttgaaaaaaatgctggctactggtaatcgattactaccttctggtaatcgattaccagagagtataacacttt

SEQ ID NO: 283159 - DNA, 227 bp, Glycine max
  unsure (1)..(227): unsure at all n locations
atatatgtgtgtgtcagacttcanaaagtatgagagagatattctaagagaacttcattgtcanatgctctctcaataactcttgggcaaatacttgcaaatctattgagagttcatctangaaaatcaaattgtatatccactctaaaggagagaaatctctctattcatctcagaaagtaagttgtaatcaagagactggtngtctcttgaatngtgagtttcat

SEQ ID NO: 283160 - DNA, 421 bp, Glycine max
agcttctaattcttgttgtatagaagatcgaaatttgttgttacttaagctgatgggtgttccagatctctcttcctagcaatattcctcgatttcaccaagatccctgagttgtcttcaaaatatcgatttgaagcttccaaatcttcagaatgtcagaacttacttgctgtgcttgccattaatttcttaaaacgtcagaactgttactgttgcacctatgcacattgttggacaaacaacctatattgtgctcacccctaaatagaagggagtgttgaaagccccacatgacgggttgccatgggcaaaaagggacatgtcgaagtcccatatcgactaaagataatgctgaaataaactatataagtggaaacaatcctcacctacagccggttttgtggattgattggctcaaacc

SEQ ID NO: 283161 - DNA, 357 bp, Glycine max
  unsure (1)..(357): unsure at all n locations
tgacaagatactagaaagaacacttttacattcatatctcatgtgttttatgtntacatttatgtaaaaacttactataatttactggaggcttgattctactgctcaattttcacacaagaatattctttgttaataatgaaaacatctactgtcatctttaatttatttttattcataacgtttacttacttaaatttaataatttataagatactctaactggaagttagttgcaatntatggttaattntacttagtgttgagtntatctttatcattaattgttatttcaacaatgacttgtaattctccctaatatagttagtgaagcaattccatttccatgtaaaactc

SEQ ID NO: 283162 - DNA, 294 bp, Glycine max
  unsure (1)..(294): unsure at all n locations
agcttgtnttcttttcccttcatctcttcggtgtggcaagcttgttttcttttgtgttaggaagtctcacatcgtctgcctcagtctttgtggtgccagttatatatctgttggaccaacttcacttaatgccaattgatttaagatgaaatctaacatgatatcagagcttatagtccgtcttagttttctctaccatgtnggttgaaaaagcagcagtacctgagattntcatccagttgtttgtctcttagaagagcacctacatactactaatctcattaacagttaatc

SEQ ID NO: 283163 - DNA, 269 bp, Glycine max
  unsure (1)..(269): unsure at all n locations
tatacttatattatatttatgtgtatgtacactaagttgtagttaacatttaatatctaaattntattatgtatttagtgtaatagacaaaaaggaagcacttagtgtgactattacgtgatgcactggatgtccactataatcttangaacttttatgaataattgggaaacgttaattatttatttcaaacaacattgattctgttataattggtattacattattaacttatgttgtattttatcatgccagattttaatgatgtt

SEQ ID NO: 283164 - DNA, 329 bp, Glycine max
  unsure (1)..(329): unsure at all n locations
tgcttgagtgtaacaatgactgtgaggttttggttgatgatccttccatgatttcaatcatgcttactagcttatttcagctatgactctaatgtgtatgctcctatctttgaaaagctgcatgcttgtgagaagtgattgatttaagcattccatgatattcagttcatatggttgaattcctttatgaatcagacaccattttcttttgattgaccactgtctttgtcacttgatgacaagtgaactgttctttctttgcttcaggacaagcaaaactgtaaatntgggggagtntgttagtcgccttatacgactaacatttgtat

SEQ ID NO: 283165 - DNA, 316 bp, Glycine max
  unsure (1)..(316): unsure at all n locations
tctgagaaccgctaaaagggaggatgttgaggcaccgaaggaagacgaagaggtgtaggctcttangacaaaactcgagcaagctcaaacagttaaaagaaagggtcaaatcagcagctctgaaaatccgannagagaataccgaactgagagatgtanatgtgactaccaccaaagccttggaatgagaaaccaagagggctcgtagggaagacatggctggaacangttccgaggggctctgtggggcagtaacagcgagcttaagctctggaaggaggaaagggaccaatcgcgagaagaccatttgatcttg

SEQ ID NO: 283166 - DNA, 373 bp, Glycine max
  unsure (1)..(373): unsure at all n locations
cccgggatccttaagtcacctgcggcatgcaagcttagggtttcttgtcgtgatttgccaccaacaaatgccccttgaccttgcaaaatttcttgaagctatgcaagtaagtgctcctaattcctctttccataaccctanactctttnntcaatttattatcgggtcttcattccttattnatattcgataantttttgggtgcttctgaaacaacaacccttattgctcaacgaatgtgtggtttgggaagcaatatttggtagcattttaagcgtttaaggtcactgaaatgtgtcgtttaagaattagaaaataagagaggatagggtggttttcttattgttatgttacatttatgtgatgggtctca

SEQ ID NO: 283167 - DNA, 319 bp, Glycine max
  unsure (1)..(319): unsure at all n locations
gcttgccgantagttttcgccgggaaaggattgaagtgggtttgagaataggcttatttgattatcctgctttgatgaataggaagcctaaggcaaatggagagaataagaaggagagaagaacccatgctgtgtctaccattcctacatggccaaatttcccacctgctcaacaatatcaatacttagccaatatcagcccttctcattacctaccaccctattagttaagaacacccaatcatccacaaaggccacccctatatcagccacaaaacctgcctactgcatattcgataccaaacaccacccttaacac

SEQ ID NO: 283168 - DNA, 368 bp, Glycine max
  unsure (1)..(368): unsure at all n locations
tctcgacccgggatccttaagtcacctgcngcatgcaagcctgtattaattttgataatcaagaacaacttgtcgcacatcttcggtgtcgatatccctcgacaaggttgagtagagagaccttcatcctatacgcaacgggcggacaaatgggcagtacttgatggccttatgtcaatggaaggtttctgccttactatcatgtccacatattgcactgtggtatgtgacatgactatacatatatagatgtgttacaccatgacacatttaaagctactccccagtggggcctttggatgaacggcattctctttgagagcatgacactaatctgaccactacattctgcaaatgcggcaaatcac

SEQ ID NO: 283169 - DNA, 350 bp, Glycine max
tgaagagagatccttgttctagtttaattgattaccaattatctcgtattcgattacatagtttagttgagaccatgtgttttcatgagtctctattttaatccattatcaggtgatcgtaatcgattactatgttcttgaaagtattccaaggagtgatcaagaacactttaatcaattaaatcaagaatctaattgattatattattcttgaaagctttctagattttgggaagaacactttaatcgattaaaatgggaatctaattgattacttcttcgagaaatcgattaccttggcaatctaatcgattacaagcagttataattgtttttataaatagcacctt

SEQ ID NO: 283170 - DNA, 374 bp, Glycine max
  unsure (1)..(374): unsure at all n locations
agcaacgatctgcatttacttattacacanggccacaggcgcacaagtgtactgaccacccactgactattcgcttgttatgtggttcacttctctgcaccaattatggtcatgcttaaatgtctctatctgaaaagagtgtctaacttcattctttgcatagtaaatatcccaatcacataatgcgcttctagcattttgctctaaccctctgtttatcattcttcttccactagaactccctgcccgtcaatatgctatactcccttatcgcagatctaaattcatctagagtatcaactccatcctaattccaacttctgtcaccaactcactctttgacatattgagataacttaacatcctctattatc

SEQ ID NO: 283171 - DNA, 325 bp, Glycine max
  unsure (1)..(325): unsure at all n locations
catctacctcttgaagaggcagaggtaagggcatattgatatgtggtttatgtanacgacggngagatcagacactattataaaatacactttcaacatcggttatttggggccttctacatcggtagtaaaaccgatgttgaaagcatccatgatgaatgtattgttgttaacatcggntttaaaaactgatgtcaacataaagaaataacatcagttttataaataaacgatggtctgaagaaagaactacagcaaaataagtgtatgcgtgacggacgttggcatctgttttctgtaaaggcccatgtgaatatgttatatt

SEQ ID NO: 283172 - DNA, 412 bp, Glycine max
  unsure (1)..(412): unsure at all n locations
agcttctccttctttctctataaatagggggaggagggaagaacaaaaacgttcaaccctctcggtatctgaggatcacttanaattagtgagaaaaattgtttccgtgaagaatatccaagccgaggcgcttccgtaacgcttccgatacatatccgtgggtgatttcgcgaagattntccaccgttcttcgtttgttcttcgtcgttcttcggtcttcaactagtaagttcccgaaatcaaacttttcaattcattctctgtacccttggtggtccccactatttttccggacttttattttcatttcatttactttttggacgcccttttgactagctttaatcatttatttaagtcatcttctcgccttatcagacataaaataatattccactgatcattcgtattg

SEQ ID NO: 283173 - DNA, 275 bp, Glycine max
  unsure (1)..(275): unsure at all n locations
aaccggtgagagtgtgatcttaaactgtgagtgatcgacctgctntgactaatagtctntgcatcaatctctgaattttagaatgaaatgtatgaatgaggacatgatgaaggccatgattgtatagacaaaccaattgaccaaaaagcttaccttgaattataattgtatcctttgcaccctttgtgagctaaattacattttcaaaattgaaccctgaacttgaatgaatatctccagataccttgtttagattctaggagagcagatagttc

SEQ ID NO: 283174 - DNA, 395 bp, Glycine max
  unsure (1)..(395): unsure at all n locations
agcttgagctttattttaccattgatgccaactataatgtgatggtactggtcaatgagcttaactaatggaaaactgagatacagtagtgcctacttcatcctcctaccctggcacttcccaccttgaatctaagcaaaaagaaaagaaattcgcattacctctgatagttttgaaaatttagtcaagaagcatgatattacagtctctntcaactggttgtcatccaattgtactgctgacattatcttcatagctgaaacatcatcttcttgagatccataaattatgttctctgattctctagaaacagcctgcagcctgacatcatcaatcaactcaagaaaaggatctacctgtggatttacaacactaattaatttaactgatcatta

SEQ ID NO: 283175 - DNA, 292 bp, Glycine max
ctgagctggccttagttgatcccaagcgggctaagaggtttgtctatatttcacaaaataaatagtgccggttaatattgttgtaattctaaataggtagatcaaaatggattcaattgccaatgtcttatgtttgagtcttgtggatggaaaaaacatagttggaggggagaaccccactaaatgtggccagccagtttctccaatgaagattagtaatcggcaaaaccgttagatactccataccaataacgtgatttgattaaaaaaatggattcaattttcttaaaaa

SEQ ID NO: 283176 - DNA, 247 bp, Glycine max
  unsure (1)..(247): unsure at all n locations
agcttttcatgatgtgagctnaacaccnacaagggcgcgggtactaagctctagctattcaccgaagatntcgcanagaagcttctcaagatagttttctcatgaaagcttatcaaggaagctatctagtctatacatagaagcatgcataacacttgttgtaactgtgatgaatgatagtcttacgagatacactncagagtgccacttctcgtcctcttttattccttcaactttgtgctccctc

SEQ ID NO: 283177 - DNA, 334 bp, Glycine max
  unsure (1)..(334): unsure at all n locations
tactcaagctaatcatgtgagtgtcgtaggacatctcccaattcaatttaatttctctcccaacacacatcanatagtgcactgaatgcatgtgaaattataaaactacccctaatacaaaactaccccanaaataatgaaaccctaatctaatatgtacaaagataagtgggctcatacttagcccatgggccaaaattctaccctaatgccttcttcagcagctctagcccaatattcttggagtcttctatacaatacccttggagggaggattacatcatatgtggatattattcttgatagtttaatatgccaatgatggacaaagtct

SEQ ID NO: 283178 - DNA, 371 bp, Glycine max
  unsure (1)..(371): unsure at all n locations
agctttgtactttcgttcaaccaaaataaaaactataaactgaaatttaaaagctgaaatagaaacataaatctaaagactgaagcataaacataaatctaaattataaaatgtactaaagacatgataataataaaacttttcaaaacacagggaaataaaaatcatgatcctgtcaatgatcctgcatagagtccatggcatgctcattcaaatccagtgcaagagtgcctgatgatgaatcctaaggaaggggcangtctaacactggtgcagatgactcangctgagaagaagacatgtccagcactacagtggaaggctctggtgtcacaggtggggtagttgctactggatcaatctcanaaatg

SEQ ID NO: 283179 - DNA, 312 bp, Glycine max
  unsure (1)..(312): unsure at all n locations
tgtaatcgattacacacatactgtaatcgattaccagagcatattttcagaanatattctcaacagtcacatctttntatgtggttcttgaatggctatcaaaggcctatatatatgtgacttgagacatgaatttgacaagagtttttntgaacaaaaaggtcttatcctcttaaaaagaanaatcgttttatcctcttacaaattccttggccaaaacacttgtgattcaataaggaattatttgagtgctcaaattgttcaatctatctctttcaagagagatttcttcttttcttcttcttcattctg

SEQ ID NO: 283180 - DNA, 300 bp, Glycine max
  unsure (1)..(300): unsure at all n locations
agctttgactatatattgctgctgggaagggtctgatctgtgaattgaatgggtgatgaacacatggtatgagaggatgaggaggcaagatttgagagcctgagttcaagaactgatgaatgtggttgaactgtcttggatcacggtccactganggtgcaatatatggagcatatgtggtgaacattgatggtgtagcagaagatgagccacacaataattgagagcccgatgaatgtaatgactaacaagattggatttgcacaccattgttgccactgcttggattaggatctactt

SEQ ID NO: 283181 - DNA, 347 bp, Glycine max
  unsure (1)..(347): unsure at all n locations
ctctcccctaacaaatgaaccaacttctttaagatantttatctacatccacagcaagatgctcgaaaacctcatacatgtcaagtaaccgaaaacatttttctggtgtgtgtgttcccattgccacggcctcaccataattcaagagatgcagcatgaaactctgagaaatttcagataagcagcattgataaaaggatccaaaatcaccaaggatttgctcacacaatcgtttctcactgacgaggtacacccgaacaatgatcttcatggctcgaatccatttctttatctcgttgttcaagcaatgccactccagttttatcacatccttcattcttaacttt

SEQ ID NO: 283182 - DNA, 399 bp, Glycine max
  unsure (1)..(399): unsure at all n locations
agcttgtgattacccatgatattatnatnggccatggaaacacaactgtttgccatcatcgagagattctctacaaactcttgttccaaacgaacgaagttaaagatagtcttttctttatgtgtaattaataacaaatatattgatcgaaccggtccaaaagttggataggtagctgcatacacgtattactcttacaattaactagaggcatggatttaacgtgccaaaaacaaatcacgcggcagataagtgggcccccactaaaggaatcttgagacatctttaagggtattgctangggcacccagcaacattgcaggtacacccagctatctttcagatacctccaaatacccctcaacgtattttttgtacaaaagctggttgattattttt

SEQ ID NO: 283183 - DNA, 318 bp, Glycine max
  unsure (1)..(318): unsure at all n locations
nttgcaagctggaatcatttatcctatctccgacagccaatgggtgagtcccgtccaggtagtgccgaagaaaaccggcctcaccgtgataaaaaatgagaaggaggagttgattcctactcgggtgcagaacagttggagagtctgcatcgactatatgaggctgaaccaggttaccaaaaaggaccattttcccctgccattcattgaccagatgcttgaacgcctggcaggtaaatctcactactgtttccttaatggtttntctggttatattaaatcactattgctcttgaggatcangaanaaaccatattc

SEQ ID NO: 283184 - DNA, 415 bp, Glycine max
  unsure (1)..(415): unsure at all n locations
agctttttgtctcctgtttgttnggaacttgcttaactcttgattccttggcatcatcaaaataatcttggaagtcattgcttccacatctaagtctattctatacatgccttgaaatgtcatgtatgtctgtcatttgtaacatataagagaaagaaaaacatgataaaaatgacagaaaatgaacgaaaaaagagtaccttttgttgatattgcacctccaattgcacatccactcaacaaagcaaccatttattttcttccccaatcctttntattaattttctgattagaaaacaaactaaggaactatagtagaacaaagcctagataataataanntatcatataataatgaaacaaaaccaanataattcccaaggtgtcttccctaatccttatgatttttttctaa

SEQ ID NO: 283185 - DNA, 340 bp, Glycine max
  unsure (1)..(340): unsure at all n locations
tactatgcttctgttgaacctcctccttactaatgaaccatgaagcttatgattatgatgctcataaatngcacataccttaagtcctcatgaacattccctacctcaaacctctccatcacctccctagctactccctcagcattggccacaccctcccctacaataactgtgtttttcctcctcaccaactcactcagcacactagttacatcattattgttaacatggtctanattaagcttcgtgaaggagccagcagcaacttgaccaaaaggtccagatgatggagacacattattactaccaccaagaacaacatgatggggcgtggtgatat

SEQ ID NO: 283186 - DNA, 424 bp, Glycine max
  unsure (1)..(424): unsure at all n locations
tagangaccccaacatatgcaggcgtgcatgtgcttgaagacgcatcatcgcgaatcgagccgaggctgttgagcaagcaatcaatcgggcttatcacaccaaacgaatatgatgatgagatggtcaaattctcacacttgtagactcatgacttataaataagcctatcttaactatcatgacttgtaaaagatagtcagagattgtaggtcgcaacatgtgtcaactcacatattcataacaactacccgactcttgaacatatcttgtaactcagagaaatacatgcaaagtcgtcatgctcacaagattgacccttagtattaaacttcgaatccgactaaactgacaacatgtaacgttagcactgctttctgcatatctaatcccacggaactagctacaccaagagacctccccacg

SEQ ID NO: 283187 - DNA, 483 bp, Glycine max
  unsure (1)..(483): unsure at all n locations
naagccgcgtgttctgataccctcggcannnacgnganantatnnaatactcaagcttgcttgacgagctactatggaggcgggatctttgtatcttatttangacctcnaangganattctccaccatggagatgcaacggaagacgaaggacaacatgtgtaatgaggcgccgtccacttgagaataatccgtggaggaatgagcttcaccaccatgatcagcgttggataagaagctcgctgaggatgctctgctggcccagacnaaacacggaaaaaaatacagaggtgggagcacgatctctatagacgaaacacgggaagaagaagactattggtcgggttctcagactttcttcatcgagtacacaagtgtacacatttccttttttatctagaccctccttgaaaccttcttaaatacttcttgtaagcttttcaaaattcttttaatacagcttttcgccacctttgtaattac

SEQ ID NO: 283188 - DNA, 403 bp, Glycine max
  unsure (1)..(403): unsure at all n locations
ttgctatgcttggataatgaatcatgaagctgagatgcccgacgaatcaccatatgctaattaaccatgcattatgtaccatgtacaattatntcgtgtgtaagtgaaatgggtatatgatcccgacatggttggctcgtggtgcctaacacatgaaactaagactgtaatgtgaagtttcacgctaccaccttctttgttcttgttgtgtctaggataacgacaagatgatcatacatgacatcgaatggtatgcagttgtgcacatcataaagtatgttgaacgcatatgcatgatgatgccatgactcatgcgatatgtgacgctgaaatatgataacggacaaatgcatgatgtgtccattatgatagtatgatgagatactgatgcgatgcatgatat

SEQ ID NO: 283189 - DNA, 233 bp, Glycine max
tatgctgcagacatttacaacatacctcctcaacctctgcagtttaatcaaccacagcagaacaattatgacctctccagcaacagatacaatcccggatggaggaatcaccctaatctcatatggtctacccctcaacaacaacaacagcagcctgctccttcctttcaaaatgatgctggcctaagcaagccatacattcctgcaccaatccaacaacagcaacagaccca

SEQ ID NO: 283190 - DNA, 427 bp, Glycine max
  unsure (1)..(427): unsure at all n locations
agcttgcttctatcttagggagaagagagacacanaaagaattcaggcgattaatcccttgtgaattctttttggccaagggaaaagagaatggaaaagatgaattacacaagttttttatcaaagaacttttcttggaagagaaagtgttgaccaaaacttttagatagatgaagagaaatgaatcagaaattctgtagaaagagttgaaagagatngaaagagataatggattganactcatgtcatggtcacatatntataatctcttgatgactcaaagtcaaagctggtaactcttggcantntatntaaaaactaatcacttataaagttatgactttngaaaaaatcttcagaaacaagtcacttgaagaatttgactntngaaatggtattttgaaatagtcagtggtatcgatacaat

SEQ ID NO: 283191 - DNA, 392 bp, Glycine max
  unsure (1)..(392): unsure at all n locations
tctgcatagctgtatatgacataacaatctctaatggcttatctcatctttccttcgatatctggaaagtgtgcgagtgttgtgcaaagaacaaagganagggattcaagagatggcaaatagattgttggcacaaaactatggagttgtgtgcaatttgaagcactaagagaaacaaggttagcgagatgtccaactgatttatgaatgctaaccaggttctcgcatccatcaagtatcaattntcttaaattcatggctctagacacatcaggaaattcagaaaccttatcacaaccggagatattcatgtaagtcaaatggtcaaactgcaaaacatacataanatcagataatcaattaacaacagtacatcaaaatcatgtcaatta

SEQ ID NO: 283192 - DNA, 284 bp, Glycine max
  unsure (1)..(284): unsure at all n locations
ggatgcaactgtgatcttatacccatatcagctagatcttgacgggtatcaagccatccttcgtcttgccttgaatgttaaagagcgtcccaatcacactgtcancaaacattttctccacatgcataacatcaatacaatgtctaacgtcaagatcacaccagtacggaagatantagaaatggacctcttcttcatatgcaactctgactttatccttcttttgggcttcccaatacactgttcaggtgtgaacccactgatatacctgctcaccagtcaac

SEQ ID NO: 283193 - DNA, 386 bp, Glycine max
  unsure (1)..(386): unsure at all n locations
agacatcaaccccaactcttgtgcatcagtgcagattcacttatttattagttgggttcatccttgttcctgtcactaaaggatcgaaaacttaccattctgttgaggggtctctctgatagtaacttgtcgatgtcttcgatgcgtacgtgtccaanagaacgaggggagaggatacccataaaaggcacttcgacgctcaagtaagggtttggctcaaagctatcaaggatgtcaagtgaatattcaagtaaaaaacaatccttttnacctgggagctctttgttcgctggtcaacgatgctaattggcaagtgcaccgagtcgcacaagtaatataaaacgatcagaaccgagtatcgaatccacaagggacttgtttcactc

SEQ ID NO: 283194 - DNA, 398 bp, Glycine max
  unsure (1)..(398): unsure at all n locations
agctntgcctttatttctnngtttctcatcancttcttccgaagctntaacctcattgtctctcacagtctttagacttgngagccaatccaatccttgtgtcccgactctcagccacttatgatagccgccgatgatcccattactgcttcccctaagctctctgtcctttcttcacgccgcatcccatgccttgagaactccttggagtaccctcgcgttgtggtcactgaaaccccgtgcgatgaaaggcgtgatgctttcgtctgatggcactcctctcatggngtagccaagctgtcttatggcgaggactggattataattaatacaaccccttgttcccatcaagggatcatttggacatccctcgcatgaagatagaatcctgattcttc

SEQ ID NO: 283195 - DNA, 324 bp, Glycine max
  unsure (1)..(324): unsure at all n locations
aagcttgaagctcagggaaaacttgaagaagttatgaagaagnnntgtctnctacattcctaactccttagagtgacgtatgtattggttgttatcttgatcaatgcatcttactacatttgacatctgctttgtatcatgcattatcatggatagtatgaagaaaagaattctaattagaaaaatttcttcaaagctaaaaactctctgtttaatttattagagttgccgtaattgattacaacaagctatatgaagcttatgaaggtaagctcgtatcatcttaattgattacaatagtattttaatcgattacagtgttat

SEQ ID NO: 283196 - DNA, 369 bp, Glycine max
  unsure (1)..(369): unsure at all n locations
agctngctatcttttatnnttcatacagtggaccttcttctagtaattatgacttaccgcagccgcctatccctcttccatttccacctagagcaattccaatacaaaaatatggaagaagcggaaaaagagatcttggagaccttcaggaaagtagaggtgaacatacctctgctagatgccattaagcagattccaagatatgtcaagtaggagttgtgcacccacaaaaggaagcctcagggaaatgaaaggattagtatgggcagaaatgtgtcagcattgataggtaaatctgctcctcacattcctgngaaatgtaaggacccaggtactttntgtataccttgcattattggaaacagtaaa

SEQ ID NO: 283197 - DNA, 403 bp, Glycine max
tcttccacgccaataggttccatctcagcaagtaaggccatattgactttatcaccatcagctgtaatcgaggaatctgggaatatctcatagtcatccagccttgcaggggcttgtctatttctctgaggtctcgttgatactgcatcatcatgaacaacattgtcttctgttcctacatccgtgtttagaccttcaattctggttctcaattcagatgtgccctacttatcactccaattccaggattgaccctcatcaaacttcaaatctctactcaacactagtttctgagtttgaggattaaaaaccctgtatgcaccagtagaatggtaaccgagaaatatgaagttctcactcttgtcatcccaatttctctttattgcgtctggaatatgcttat

SEQ ID NO: 283198 - DNA, 343 bp, Glycine max
  unsure (1)..(343): unsure at all n locations
agcttcgcactagtcttgggttgtccatacattaaccaaatgtgtgtcaatatcttcctagacacagaattcaccaacaacatactctagtgcctcgtttgcattttgtatcattataccattgtggtgcanaataagagtgatntcatcacaaatcctataggtaaacacaaacatcattatttgtattttcacaaaccttgtttatacacaacatcagtaatgaaaaagtataaatacaactttgagaacccaaatataaacctccaaatgaaacatcattcaaaaaaaaggaacaagaagccaaatgataaatgagcaaacaatgcacaaaaggaaatga

SEQ ID NO: 283199 - DNA, 395 bp, Glycine max
  unsure (1)..(395): unsure at all n locations
tgttgctttgtgtgagggaaccatantcttttgttttctctctgnctttnacaataagtatgtggtcaagatacaccacttgagtcatgaaacccgttccagtggagacaataattgaggttccaagggtgttagacatcatggttgcatggtangcaaacatctcactcatgtggttcttcaacacttgaccaatgttaggtggcattttaccacttggtatagtggcttttgtttgcaatgctactatgtgccttacttgcacaacttttagtgggaacttttcattaagctgttctctagacaacattattccgttagaaccttcttgaacaacaattacctaaattgatacctctattctggttagagtcgggtgaacaatcatgttgtct

SEQ ID NO: 283200 - DNA, 409 bp, Glycine max
  unsure (1)..(409): unsure at all n locations
agcttttttttaattgcttgtcttccataagcagagtcagtagtgcactctcacccatctccattacaagcctttcttcttcctgaacacacatggtcattaattcattgatagaccatttatctttatgtgtgttgtaggaaatcttaaatggcccatattcatgcggaagggtgttcaaaatgaaatgcactatgaaggactcagacatatcaacctctagtttcttaagttgagctgaaatatctcgcattttcatgatgtactcacgcacacctttcacactggtgagccgaagagagaaaacttcatgatcaaggtgctngctaaagtcttatctgaagtgatgaactggtcatcaatggccttaagcaagtctcggaccttttcatgctggtcaacagaacca

SEQ ID NO: 283201 - DNA, 609 bp, Glycine max
  unsure (1)..(609): unsure at all n locations
aaaataccggccagggtgacganngtagtgancgtctcananatnnnangactnangccctagactgtactactacaaacncgaagtggtatatacccgcccatagtcctatttacttctgaggaagtccgtcaaggcnctcgtttctcgctgattcanggtccaacnccatannnatcattnntaacacagcagaactatacgnctatganngctatgcaatacnnacacaactaccctcaattatttntcaaaaatattcaaattaattnttcaaaaatatgggttttaacctcacttgggcactntctaagtggaacttaaacctctgctctgggtttggcaccanatgggagcnccantnncacaaaatntcattctgcacaatgataccctcgttcaccccttttaagggggtcttaatagttggtgtgaatggcnnatagttcataagcctcaccagttcattcgcataacttcacttattccccatatatcatattatacattcataacaatgtttaccagacacaaccactacacanatcataccacanatatatatatatatatatatatatgtatatataacgcattatacatatattg

SEQ ID NO: 283202 - DNA, 346 bp, Glycine max
ccgggatccttaagtcgacctgggctgcgctttcatatgtgtctacaggagacttggtgtgcgacctctggaattcacaggactgttatcttgatttggctgctcaccaaggcaatgtgattgatgacctttgaaacgaactcaccaaggacggttgttgctttgctattgtggttggggtgttgacaagtacgagtgcttgccctacctgtcaaaactttataccttgactttgattgatccattgtgggatatggctaaggaaccgttttgatattggtgtttcagtgaactttctacttttattgaattcttgaataccttgcttgtcattagtgaatatcat

SEQ ID NO: 283203 - DNA, 326 bp, Glycine max
  unsure (1)..(326): unsure at all n locations
ttgtactcaaagactgccatagctgactttaccttctatttttatggngcataaatattaaccacaagcgagagtgaatattgaagaaatcaacatgactaagcataatcacaagctcccacaaatgcaagagtgaatatagaagaaagtcagcaagtaatttgagtataagagtcccaactagatagagggaagaaaatggatgcaggacagaatcaaatatattatttataatgtcatttagccttttttttatttaatttgctaaacactaaattatgctaccatactattttcagattccattaggagcgatcttagccatt

SEQ ID NO: 283204 - DNA, 422 bp, Glycine max
  unsure (1)..(422): unsure at all n locations
agctttttatttatttacccgcgctaagcgcaagggtggcgctaagcgcaacgtcgcgaattcagagcctacttatagcctgtcttgtgcaaaattagggtacactttgacacacanctttacagactnttagacaaattgtaggcagaagatagggcatagattctagagcacaccacaatgcctattatgggaaaaaagccctagaagcatcaagaggagcaacttgtgcattgaaacctaggttttgtaagattattattgtttgggtttctttgtaatggctagctaagcaccctagttggggatgtctaatgaacatctgatgtaaatacctaatatctaattgattatgttttctgtgttcaatgcttccttcaattcttaatggttgtatgcttttggtctgatcatccattcgt

SEQ ID NO: 283205 - DNA, 363 bp, Glycine max
  unsure (1)..(363): unsure at all n locations
tgccacccagctcgcccaagcgagctaggttgcttcctccagtagtctccgccttctagaggaattttcgggaaagcccaagtgggcctggttgctatttgcacccctnattttactaagtacacccctcgccttttttggtgattctttttccataacattacgaaactttacgaatttcgtaacgatgcttgttttctttccgtaatgttatgaaaccttacagattacgtaatcatcccttttttgccttccgaacgtttacggaattntacggattgcgcactaacacttccttttaatttccggcatgtcacggaacttcacggattgcctaacgatgggtgccaagtacctcgatgt

SEQ ID NO: 283206 - DNA, 304 bp, Glycine max
agcttgttctatttattatctacaatgctttattgaatgctttaaggcgaaggtagagacctgagtcacacatgtatcatcttcctgttggtgaatgcagaatcaccttgtaaagtgttgctcttcaacttgatatatgcgttaatggaagactagttactagtgcaacatattatgattgggaacaaatgtgtgcaaaatatataggtgttgttcccccaaagaatgcattggtgggatcaaagcataaactaacatgggtaaaagaaaacatgttgactctcccaacagaacccttaccaca

SEQ ID NO: 283207 - DNA, 290 bp, Glycine max
cctttccttgtggtgaagctcactacaagccttaagtgaaaaaccatgatattaccatatccttaaggaattttggagctttggaattgttttgggaataagtgtggggggttcttgtttcattggacaacattgtttggtgactatgcttcatgatgtattttgggccatacttgatgtacattgtatattgggtaaatggtggacatgctgaatgatatgttgtttctcaaatgaaaaaaacaaagaaagaaaatattcgaaaaaaaaaaaatttcaaaaaaaaaaaa

SEQ ID NO: 283208 - DNA, 252 bp, Glycine max
ttttggtggaaagaacattcgtcataatgtacgttactgtcgttaaaatgatcatataatatatatttataggtgatctcttccgttttccctaatatgtaatgtgaccttttctttttagctgtcttgtaagatgagcatacactgaatatcagtacttgtgtgtaaattaattatagagtatatgacactcgtctcttttggataaatatattaattactacaactctctacttaatgttgtaaaaactc

SEQ ID NO: 283209 - DNA, 414 bp, Glycine max
  unsure (1)..(414): unsure at all n locations
atcttttacatgactntgnnnctatatatggggcannatacgatgaacaaggatgtnctatgattggaaaatatccaaaagtaactacttgtcttaattatcaattagaggtgaaaaagcctaataccaaaatcatgtacataannttgaaatgaatntgtagcttattttatagaaaatataccatttaatatgaacatggttattaatgttagagataaatttttttgacagcattaaggactagagatattgatgcacgaattatcagttcttttaattaaaaatacatttattcaacactttcatttgttctctatgactttttcaatntttntaataccttaatngatatccaattttttttaaaatattntggttatattatgtagnggttctntattttattcttat

SEQ ID NO: 283210 - DNA, 305 bp, Glycine max
  unsure (1)..(305): unsure at all n locations
aatactcagcttaaacttcattgcatccagccactntctcttttcttcactttctcatgacctctctaaagcactcgggttctccatcatctgttaggatcacatactcattaagagaatacctcttagaaagttgtctttccctattagacctcctgataattggtaaatatgagctatctttgataataaaagtatattgaaaatatctttaaaaatatttatttaccagttattttttggcttaaatggtaggaattgatatttttcttatttacggcttgcagatatgaaaaggagggatt

SEQ ID NO: 283211 - DNA, 263 bp, Glycine max
  unsure (1)..(263): unsure at all n locations
agcttgccttatagaggtccaggaaggacaaggcagccgaaggaactagttccgcttccgagtatgacagtcaccgctttangagcgctgtacaccagcagcgcttcgaggccatcaanggatggtcgtttcttccggagcgacgcgtncagctcanggacgacgagtatactgatntccaggaggaaatanggcgccggtggtgggcatcactgggttactccatggccaagtttgatccagaaatagtccttgagttttat

SEQ ID NO: 283212 - DNA, 587 bp, Glycine max
  unsure (1)..(587): unsure at all n locations
aggaagttctgattgactgattactatnagcannnaccgcgacactatagaaatacctcaagcccttcttatccaaggggctcanntcttggtggggtgaaagcctcncnnttcttcncattgtgtcttatntcnncttanatggngatgngcngccctcncnntctcacnnctatnntttcnctnnttgtctntcnnncgctgcatttctcccattgggggnnngaaannatcacncatnntaaagggaaaccccannttgaagcctcannagaatcccagcccctccattagaaaagctccacaagccaagcttccattcagatgggctnntaaaaaattcgcggcttttactgcaaatacaaagaggaccgaaacanaaagccaaatggatcanatccaaaatctgtcagagattaatcatcaaaagaaacatanattgatgctaaatataagtatcatgatgcttaatatgaagtgaaagagaacataaattgatggagtatgacttcagatccccgtgacaagaccataattgaataaaaaccaactgaacaaaacaatttttatcatgtggatcaatggag

SEQ ID NO: 283213 - DNA, 279 bp, Glycine max
  unsure (1)..(279): unsure at all n locations
agctnngattattcatggatcgggttagtccgtttcacactgttacacgaatgtaatattttgatctacccccgccagccaaacaagttgattcacgggtctatttttttaaaaaagaaaaactataaatttaaaataaatatattnttttctcttaaaaaatagtcaattacactcaattatatatatatattaaaaaaagtcttaataaatctctaattaatactcaattacaaaaagtttaacacaactaaataaattttcaacataaatgtaaat

SEQ ID NO: 283214 - DNA, 410 bp, Glycine max
  unsure (1)..(410): unsure at all n locations
ctaagcttgtaccgaattcttcatcgctctaattatcagattgatgagattcgattaatataaatggctctggatgtggtatgaaataattacactcattcctttccaaccatcatttacgtcaataaactttcacattttgaaattctccaatttacaggctaggggcatgaattgcttacacaccagcacacctacaattgttcatcgagatctaaagtctccaaatcttttggttgataagaactggaatgttaaggtatatgattgaaaacttatgcaggttataatatttgcttattctttattatcgcataacataactaaagagtgccataaaaagtagtgcaataaaataataacaagacgatgatgatgatgtctngttggatgatagtttatgatggaaa

SEQ ID NO: 283215 - DNA, 379 bp, Glycine max
  unsure (1)..(379): unsure at all n locations
agctntntggttattataaaacaatgggcaatggttaaagaaagattgtgaaaaagaattggttggaagaatatcatatatgtatattgaatgtgtgcaaaattcatgcttttatagactcttcatgtctggtcaaagaaaccattggaagagtnatgacttttgagaaaaccatgttaagagttataactcttaaacttttcttcnaaactgttcactggtaatcgattaccacaaaggtgtaatcgattacacaatgcattttatgaanagttgtgactcttcacaattggatttgaattccaaccgtcagaatcatttgtaatcgattactaatatanggtaatcaattagactatttgaanatcattttggaatg

SEQ ID NO: 283216 - DNA, 370 bp, Glycine max
  unsure (1)..(370): unsure at all n locations
gatggaatacttacttgttggtgatgaacaacaacgcttaactgtttcaaaaaatgcaaaanatgatgaccctagggctgcaaactcgtaaatcccgtgggtatggcttttgaaaggggggtgtcataccctaatttcgtccggngacctttgcttgatgacatgcgacctttctttggtccttgtgaggtgcttggtacccatcattanggaatttgtgaaattctangacattgccgaaaaccaaaaaaatattgatgcacaatccgtaagtttccgtgacacaccagaaatcaaatggaagcatcgttgcataattaagtgaggttccgtaacattccgtaagtcaaaaaggggatgatttatgtat

SEQ ID NO: 283217 - DNA, 225 bp, Glycine max
  unsure (1)..(225): unsure at all n locations
ctgctagangttgcaacatgtatgcggaaattgctttccattttccacggtaaggtgggagatgatgattgaggatgtctctcagtaccgaacaagcctatcaaacattttcaggtgctcttcaaatcaatcccaaaggattgagttggatgtacataaatgagaaagtgtgtgtacaaatacaggaatgggcctacaaaaatggctgttggtggatggttgtgt

SEQ ID NO: 283218 - DNA, 289 bp, Glycine max
aggaacccccagctataatgcgttcttttgaacctctatgtcgtctggaggatgaaggcaacgagttctatatccagagtaagaacaatatgtgttgggtgtggtgaaggaaaccactacttacggtatcaataatcccatcgtgttacaaaacacatttcccttgacatctgaaaagccatcgttctcatgacattgtcctactttgtgtggatttccttgaagttgcacatgctgctgcagaaaagtatatgagaaaagtagctgttgaatttgggattcctctcta

SEQ ID NO: 283219 - DNA, 376 bp, Glycine max
  unsure (1)..(376): unsure at all n locations
aatttcacttacttgcgctaagcgcaatgtcgcgaattaagagcctatntaaagtctatcttctgtagaattanggtaccagctttacatctattttacacacctttatgataacttctacagaacggccagggcacagaatngcagagcagctgtntggatttcggcaagtgcaccggatcgcacaactagtataaaacagtaagaaccgagtatcgaactcttcgtgaacttgtgttatttggtaagctatttcagcaaattgatgtctagtgtgtaaagataagtgtgaatatgaacagggtgtaaaactatctatgcaaaaagaaagaanatcacgcgagagaaatgatgntgtaaaacaagtagaaacaca

SEQ ID NO: 283220 - DNA, 140 bp, Glycine max
  unsure (1)..(140): unsure at all n locations
ttccctagtagaatactagtaatgtttctactatcatngncatcgttntttcgtcattgatgtgccacttgagctgccangttctccacctttgggcgtattctttgaaagatccgtgcccccttttttgcacatgtttt

SEQ ID NO: 283221 - DNA, 518 bp, Glycine max
  unsure (1)..(518): unsure at all n locations
nnnggcttatgatagctagatagactggcannncnactgagncccggcgatgctgtatatatgaactggaaggcttgcatgctaaggtatacttcttttctcaccccaagtggcctangaggaaggctaccactatatagagccttcatcggcctcacacagacacactacactgtgtctcacagtccctctcatcaggagcaagatattgagagccaacccatcatagtgaaccgtgacggctctganaataagtacgaaactacgttgcttatgacctcagaagatgtggagaatacgagttggtgtacttcaagaggctcgatgatgaattcaacanagtgggacaagtttacaagtcaaaagtggacgaagtgatgaaggaagcttgcatgctcaacaagcanatgggatgcttgatagctttcacgatcaagggtgagaagccaagtttgtcgtatttgatcattctgtggagatgactcgtctggcttctgatgttgctcttcatctgcagg

SEQ ID NO: 283222 - DNA, 325 bp, Glycine max
  unsure (1)..(325): unsure at all n locations
tcttataatgaatgattagagtaagaatgactcctcgtgttagttttgtaattatctagtagtagaagataaacttccaatgtttgtcttgctgatttcaaccataacattttgtattgtgtgccatttttggctaaaagattattaattgtagtgcangtcttacttacgcatacagccgaatagcgatagtgttaagaatactaaagcaagtcgttttttaaagtacttgttagatataaaatcaatagcttaagcttaggagtcggtatgttctcgatcgtctcagtttgcttattaattggtatgttcttgatcgtctcag

SEQ ID NO: 283223 - DNA, 380 bp, Glycine max
  unsure (1)..(380): unsure at all n locations
agctttttctcatttctcattccagacaaacttctcattcttatgagtcagtttagttaggggtagtgccaatttagaaaatccctcaatgaatttcctataatagccagccaaccccaagaaactntgaacttctgttggagttgtcggttgttgccactccataaccgactccactttaattggatccacagcaaccccatctttagaaatcacgtgccctaagaactgcactttctctaaccaaaattcacatttcgacaatttggcgaacaatttcctatccctcaggatatgcaacacaattctcaagtgcttttcatgctcctccttattccttgaatacactaggatatcatcaatgaacacaaccatgaact

SEQ ID NO: 283224 - DNA, 282 bp, Glycine max
  unsure (1)..(282): unsure at all n locations
accctgatgaggatgtcccatatgttcttatactatactggtccatttgcttccaaagtgtcatggccttgcaggtgaagacccgcacaaacatctaanagaattccatattgtctgctccaccatgaaaccaccagatgtccaggaggatcacatatttctgaaggcctttccttattctttagagggagtggcaaaagactggctatattaccttgctcccaggtccatcacgagcttggatgacctcaagagagtattattagaaaaaattttccctac

SEQ ID NO: 283225 - DNA, 439 bp, Glycine max
  unsure (1)..(439): unsure at all n locations
agcttgttctttntatggaanggaggagtggttntctttgcttatcttgttagcaccgagtttggatcatgtaggaaatcgttagaatcccttgaacctaagcgagagttatgagtcaagtatatcaaagtggggaagatcttgttgaagaagaaaaaaaacttacattcgaaggtaggtaaatcatgtattctcgagagtcacgtgtggactangattggtagagtgttgaagtctcgaaacatatactttctttcttgaatcatctcatgtttgagacaatgtcggtcatgtggctaatcatgtttccttgtatttgcttgttcatttcaaatttcatcagtgtctcctatgctattacctaactccaaatagtatgtcattcatattctattatcattgagatgtcacatttgtgataaaacttaacttatgaaat

SEQ ID NO: 283226 - DNA, 325 bp, Glycine max
tgtgcctcttcatgtctagaatatgaatgtagcatatagatttttagacccttacgtgcttttctgatggcttcttcccgttctaagcttcaattggagtcttgtcttttacagacttagttggacatctgttgagtatgtaaatagtagtgtagattgcttcagcccagaatgtgttaggtagtcccttctccttgagcatcgatctagccatttccataactgtgtgattctttctctcggacactctattttgttgacgagactatgcgactggtagttgtcgctcaatgccttcatcctcacaaaatctttcatactcacg

SEQ ID NO: 283227 - DNA, 362 bp, Glycine max
agcttctatatgaagcctcttaatgaagcttctagagaagactacatggagctgactcggtagaaacgctgcccagccttcgttaaccgttggatcgtctcgaagtttggtttgcaacttcacaagacactttaccatgatttaaccgttgggatctttgagaaaatatctggagtgtgctagaagcttccgttcccgagagcatctcttatttaagcatttcagcctttgctttcttgtagcttaggaaaaatgccatttcttcttctttctttcttccaaatccatttctaaagttccaagtactttctccatcacccacagccaccattagccaccacaaaccatcattgttctccatt

SEQ ID NO: 283228 - DNA, 303 bp, Glycine max
  unsure (1)..(303): unsure at all n locations
ntaacctcatcgtccctcacagtctatagatttgggatccaatccaatccttgcgttcggactctcaggcacttatgatagccgccgatgatcccattactgcttcctctaagctctctgtcctttctgtatgccgcatcccatgcgttgcgaactccttggagtaccctcgcgtttgtggtcactgaaaccncatgcgatgaaaggcatgatgctgtcatctgatggcacttctctcatggtgtagccaagctgtcttatggcgacgacgggattataattaatacaaccccttgttcccat

SEQ ID NO: 283229 - DNA, 348 bp, Glycine max
  unsure (1)..(348): unsure at all n locations
agcttttgattattatattatataaccacacatagaatggtgagatgcctcanaatagattgccttatcagtaagagtaagtgtgccaggccatgccatattattctcccatttcaaaacaggtcgcttactgttggaaccaatgcataaaatcctctcctcagaaagttgaggaaactctggaatctgatatgatatctgtctttgacgcactctgcagtaatatcagtaccagttcatcacagaagttgtcataccaaagaatgtcttgaagttctgagagcattccagcactatcaagcaatgagcatgctgtacaacagacataaattgaaagatggaactaac

SEQ ID NO: 283230 - DNA, 274 bp, Glycine max
  unsure (1)..(274): unsure at all n locations
atgtnngnngatatatcttgatttcttataactcgccttggattacgaaaaaaatattaacattctattggggttcttacctgtcaagtntggaaaaaccagacaagggatcaactcagtcattgcatctatacaatcaatctttctcagccattgtcattttgatggctcttacctctaaccttcacacatactttcggcttatgaatgaacgtgcaaggaggcacctttcacttgtgctaaataatgatgaatatcaaatgaagtttctagt

SEQ ID NO: 283231 - DNA, 285 bp, Glycine max
  unsure (1)..(285): unsure at all n locations
tgcttttgattgactataccaagctctangaaccagggacggagaaagatctatatataggcttgctaagggtagagagaggaagactagagaattggatcaagtaaagtgtgttaaggatgaagaaagcaaagtcttagtgcatgaaaaagatatcaaggaaaggtggaaggcgtatttccaccaacttattaatgatggatatggatatgactctagcagtctagacacaagagaagaggaccganactataagtactatcgtcggattcagaaacaggaagt

SEQ ID NO: 283232 - DNA, 302 bp, Glycine max
  unsure (1)..(302): unsure at all n locations
ntacagcagatnttagtaatgacccactaacctagaattaatataacttaatgccattaacctagggaattaaaacaaactaaatggctgagtgtaactgaaattgttggcaaccaaaagtcacccccaacagccaacaagtcagccaccatttggtctcccaaaaggctgatgcctatgttgccaattgngcccttattacaacttgaactaaagcccttntagttgattaacccanaacatanttttggtcagccaactttacaaggattgtgccattatntagacaaactaaacactct

SEQ ID NO: 283233 - DNA, 419 bp, Glycine max
  unsure (1)..(419): unsure at all n locations
ttgcttcttatgtgtgacataaaatagtcacgataagatttgattggttggcaatacacatttaattatattatttgtatttctctcattatttcacttctcatatatgatccacacaaacatataataaagatctaagacaagcttgaaagatgatctgttttaagaaatctggaaggtgattattaagaaggaaaaatattttattcagattaattttattgtcactgagaaagaaaaaagggttatgtgtgtaaaaagtcctacacgattaagatatcattattataatcataagtgagggtggtaagttttaaaaaataattatnttatgatgaattanatgatgatctatcattgacagagaacgtaaatttattttacacatatgtatgaacatcaaactcatanattacata

SEQ ID NO: 283234 - DNA, 291 bp, Glycine max
  unsure (1)..(291): unsure at all n locations
acttctattggcatgactttngcagtttgaatatgatttataatcgggtaatgcatacctaattccctatttgaacttgtcagcccagccttctcagtcaaatcttcttgttatccaccactcttctccaattcgggcttccattctgaattcacccccctcttttacttcactaaatgtaaattcagtgctttatttcacacacatagcacaataattcaattaaataatagagcagcatacatactttaattcaaacatgacataacattacatgcagacatataattt

SEQ ID NO: 283235 - DNA, 135 bp, Glycine max
  unsure (1)..(135): unsure at all n locations
tttcngttttcttcgcgagcttctccgacagcccttggacccatttgctntcgaggtaggtggccttcttcttagctntggttatgttatgcactacattacggtaggttagtgtaacgttaagttagtggaacc

SEQ ID NO: 283236 - DNA, 328 bp, Glycine max
  unsure (1)..(328): unsure at all n locations
ctcaagcctgcattctatgcccagaaagtactcaagagtgctattttgcttaatataanaggnancatncaacttgttcacgatgaggttaatagcagtgttggaggaacccgtgatgattatatcatctacataaatgagattaagcaggcagcaaccatgttttgtgaatacgagaagagagggatcacacttggattgttgaaaaccaaaggagatgagagtatttgtcaaactctcataccaagcccttggggcttgttgtaaaccatatattgccttgtgaagtttgcatacaagagtggattcacccttgattaaagccttg

SEQ ID NO: 283237 - DNA, 359 bp, Glycine max
  unsure (1)..(359): unsure at all n locations
ttaagtcacctgcngctgcaacttgcctttatgattacagttgataaaatgacatatcctcaacctgaacacaacagctctcacttcagacctgccattatgctcacagataataagcataaaaccacaattcatacttcagtattacagtaagcctatatttaatcagagatcaataacatctgaaaggccttatatctaaaacgcatctcatgtggtttatggggaggtaccaatgatttggtaaataatttaagtgatgcagtatgttgatgtatatttaaacaagtactacaactagataaattactaatctgaacaaatggaattactaatcactactggatttacatgatcac

SEQ ID NO: 283238 - DNA, 394 bp, Glycine max
  unsure (1)..(394): unsure at all n locations
ataaaatattggtgtggcttatctttatattaatctcaaccaacacattgtgattgtggtgggaagaaaagaataatttaaagggagggtagcagcatggtaaggggaggagggcaataacgtaatttgagtggttgtgaaaattacttgacaggcaatctttgtctcatatgcaatagagttacacccaaggcagcacacaacacagccattcccaaagagaaacaaacacagttgcattgttgcaattgcaactaaaatccgcgcctgngatcgcaccttcatttcaaaacctgctccatttttttctttctttctttcgcttccgtagctctatctctaagcgtgcacgcgcgcgtctagtgcaattattagttagtttgattggaatggt

SEQ ID NO: 283239 - DNA, 342 bp, Glycine max
  unsure (1)..(342): unsure at all n locations
ccttgaatcttcttcatcaatgatgttctttgcttcttgaagatcaatgacaacagaatggagaaggaggaanggtgattgaagacgtcacttcaaagagaatatgagtcaagaagaaactcaccacaataggaagtcatggataagagctngaaggtangagaagatgagtgaagggagagggaaagaagagcacganatttatgcctcanatgaggtctaaactttgaagtataattctcaaatgatcaaagttgaaaaaaatgcacacacaagacctctatttatagcctaagtgttacacaaaattagaggaaaaattgaatttctattcaaatttca

SEQ ID NO: 283240 - DNA, 351 bp, Glycine max
  unsure (1)..(351): unsure at all n locations
atggtggtgagacaagcattanatttgggttctttggaccaatctctgttttttgaatttatcttanaaaatacccatttgtttttaatgaaattggtctggaataaaacagataaaattttaaacaaattctatgttggatcccttgagagatgaggtcaaattagttcctatgtgtgacatgcaaggcgacttcactgttgtgcaaatagagtctagtagtgtgtagctttccttgattttgagtctctatggtggtcaaattgaaatggtgtttacaatttattaaactagagagaaatttttttaagcatgtaaattagaaaaattatagaggttaccttcaaattt

SEQ ID NO: 283241 - DNA, 347 bp, Glycine max
  unsure (1)..(347): unsure at all n locations
catcttggtggtgaagctcctacttccatggcttattccctagtggatggcacctcttctcacctcttctcctttgtctttcgctgcatctccatggtggaaaatcaccattaaaggacctcattgaagctcaaagatccagccctcatagatgccccacaagcaagcttccatcaagtggtaatcagagcacaagagcttcaagtaggtgctccttanacctccattaattgttttgctntaccttctcttccattgttgnttcttcattnttttctccatgtatctcctcacatgtatngcgctaaatagttgtaacatgattctttaaattttccactgattaa

SEQ ID NO: 283242 - DNA, 271 bp, Glycine max
  unsure (1)..(271): unsure at all n locations
atttcttcttctactgagacagngtgttatatgaatctgaatatnagannnaaaagttattatggaattgttaatgctcgtgattttgacttataagtactgcatatatgtgtttatgttattataaaatggttgatattgaagttcaaactcaatcacaagtgatacaagctgatagtgagggtgatgctgatcctacttattcaccttcatatttaagtggggatgacgatatatacttggatgatgagactatagcatcgtttatgtc

SEQ ID NO: 283243 - DNA, 214 bp, Glycine max
gcatgttctcatgcactctgtcaagataacattagcccacatccgaaagataaaataaaagaaacattaatctccgatattgatcgaaaacatgctggttgacgtcggccaggaaagatgaccgatcgaggtctataaatataacgatcaccgtatgacgccaatccaacatttcctaattgacatcatccaaatattatccaatgattggata

SEQ ID NO: 283244 - DNA, 356 bp, Glycine max
  unsure (1)..(356): unsure at all n locations
cctcgaataaacatcgaaactcttagactttcatatggccataactntncacacggatgtctgattcgggcgcataatatgtcgagaggctcgaaattgaacaatggaagctcttgagaaattccaatagtcataagttttcacacggatgtccgaatcaggcttataatatatcgatacgagcgaaaataaacatcgaaaactctcgagatatcatatggccataacttttcacaccgatgtccgattcgggcgcataatatgtcgagaggctcataattgaacaacagaagctcttgagaaattcaaatggtcataaactttcacacgggtgttagattaatgcgcatcacata

SEQ ID NO: 283245 - DNA, 426 bp, Glycine max
  unsure (1)..(426): unsure at all n locations
tgctttcttattatnctctacccttctgcctcgtgtaagggttaatagaaggcactattggaaatcagataaaaattactattccctgataagtaatccaagccaaacatataagacttgttctgttacaagataaacctcttgccattatacttctcacccttttcttgcaccctaattaacaagcccctcatgtaaatggtgcagaaatctctcttctaaacgaagtatngctttgaacctcacatgtaagaaaagggggaaattccactttaatttactacccncaagttccaaagccatctccatttaaacgttctcttttctatnggttgtgtagaggaaagactgtngatgaacaatatatacattanaattgctataaggagaaactaagtatgcttaatattgcatgtcaaacaacac

SEQ ID NO: 283246 - DNA, 224 bp, Glycine max
ccttcatagccacaccaccaacatctatgctagtgttattgagaatatagaagtaggatagctgtggattagaaagcattctggtgtaagtgatgggattagcgttcttgacaactgaagactcattacccataactaatgacccagaagaaccagcttctgttgttggtaagcagtatgagaaaactcctccaaatgtggcattagtttgagataccaatgag

SEQ ID NO: 283247 - DNA, 445 bp, Glycine max
  unsure (1)..(445): unsure at all n locations
agctgttgnctttatatgtcgagtgtctcgatatatgacgagacttaatcagacatccgagtaaaaagctatggtcgtttgaatgtgcaacgaccatcaacattcaatttcgagcctctcgatatattacgcgactcaatcagacatcagagtaaaaagttattgtcgcttgaatgtgcaacgaccatcaacattcaatttcgagcgtgtcgatatattacgcgactcaatcagacatcagagtaaaaagttattgtccgnttgaatntgcaacgaccatcaacattcaatttcgagcgtctcgatatatttcgcgactcaatcagacatccgagttaaaaggtattgtcgtttgaatntgctcagagctttagcattcaagtttcagtgcctcgatatattacgggactcaatcagacatcagagtaaaatggtatcggcgttc

SEQ ID NO: 283248 - DNA, 213 bp, Glycine max
ttcttcgcgcgagctcacgcgaagttgtatttctgccgacgccggcattttgtctgccaggataacattagcccacctcggcaaaaaaaaaacatgattcaccggtattgacagaaagaaatgctgggcttagtcggccacgaaagatgaccgaccgaggtctaaaaaataagcgtgaccggattacgccgatcgaaccgctcctaatagata

SEQ ID NO: 283249 - DNA, 381 bp, Glycine max
  unsure (1)..(381): unsure at all n locations
agctttttatgtgatataggtgcagccatctccctaagagtcctctcacgaagtggaggttgagccatgttctcagtataaaaattagtagtggatgctcanaatcagaatatttagaatcaccctcaacagaatgctcagaatgctcaaaatgcacagaatgaccaggatgcacactatgcctaactaatctatgaaaggttctatctatttcangatcaaagggttgtaaatcacttggattgaccctagttatgcactatatgcagcaaataatgtgtttctcaacaagcacctaacaaggngtaaaactacagctatactcaaatgatatcaaaataagctgaaattntgtgaggaacacccttaaatcatgaaaag

SEQ ID NO: 283250 - DNA, 362 bp, Glycine max
  unsure (1)..(362): unsure at all n locations
tgtaactcttggcaatttgtttaaaactagtcacttataaagtatgacttttgaaataatcttcagaanaaagtcacttgaagaattatgactcttggaaatgtatttttcgaaatcagtcactggtaatcgattaccattaaggtgtagccgattacacatcaacagatgtgactcttcattntgaattntgaaaatcttaacgttctaaaatactggtaattgattacatgattatggtaattgattacaactttgtaaatcagtttgaaaaacaatgctggctactggtaatcgattactaccttctgtaaaaagattttgtgaaaacttcatgtgctactcaatgttttgaaaaactt

SEQ ID NO: 283251 - DNA, 438 bp, Glycine max
  unsure (1)..(438): unsure at all n locations
agcttattgtatcaaaattgcctcaatcatttccaaatatgcatgtgaattangacgcatcaacaagaatcaagccaaggctattgtgcaagccaatcaatgggcaaaacacaccanatgattatgatgatggatggctcanattctcacanaggtaaaatcatcactttcaaattgagctntcaaaactatcatgacatgtagagaagaatcaaggatttcaagtcacaaaatgtcaagaacttttattttcaaaacaattacccatttcttgaacatatcctataattcanagaanaacatgcaaagtcgtacgtgcacacaaaattgacccaaaatattaaactaaaaatccgacgaaactaataacattaacaaattaacacaactaacaaatcaacaaactagcaaaccaaagacactcccccccccccccat

SEQ ID NO: 283252 - DNA, 378 bp, Glycine max
tatttgaatcactaagtaaaatttatgatatccctgttaagtttatttgtgtaattcatacctaattattatccaatttagggcccattggcagctggttgttatgtgtcctacaagcaatgttgtcgtctggttttgttcattgtttaagaagcttgattttcgtatcaaagctgcaataaacaagttaagttttatattataagacatttaattcatttttaagttggatacataaatagtttttccctcatttacacgtccatatctttctatgcaatgcattcaagacattaaagactacttctgacggtaacattgatcaagctacacctcagtggattgagtaaaggtagtcatataattaatggtatttct

SEQ ID NO: 283253 - DNA, 381 bp, Glycine max
agcttttcgtctcggatttttccgactatgctcttgtgtggtggaacaagctacaaaaggagagagcaagaaatgaagagccaatggttgatacatggacggagatgaaaaagatcatgaggaagcggtatgttccggctagttactcaagggacttgaaattcaagctccaaaaactaacccaaggcaacaagggggttgaggagtatttcaaggaaatggatgtgctcatgattcaagcaaatattgaagaagatgaggaggtaactatggctcgatttcttaatggtttgactaatgatatccgtgatattgttgagctgcaggagtttgttgaaatggatgatttgcttcacaaagcaatccaagtggagcaacaat

SEQ ID NO: 283254 - DNA, 338 bp, Glycine max
  unsure (1)..(338): unsure at all n locations
tgaaattgaacaacggaagctctcgagaaaatcgagttgtcttttatattttcacacagatgtccgattcggggaaataatatatcgagacgcacgatattgaacaacggaagctctcgagaaaattgaatggtcataacatttcactcggatgttcgatccggggacataatttatcgagacgctcgaaattgaacaaccgaagctctcgacaaattagaatggtcgtaacttttcacgcgaatgttcgattcggggacataactcatctagacgctcgaaattgaacaacggaagctctcgagaaattcgaatggtcataagttntcacacggatg

SEQ ID NO: 283255 - DNA, 262 bp, Glycine max
  unsure (1)..(262): unsure at all n locations
ttgcttgatcttactagnnnntntctcaaccttatcgtctctaagctagcaacaagtatttttctcaactttatcttcaccagagctagcaacaattcatccccatagaggttttacgataaanacagagtgtctctcanatatagagatggatatacagatataagctcactatagagttacaagatgaaaatccaacaaaatcacaaaggaatctctacatttcttctttcttttcatttttccttagccttctattctg

SEQ ID NO: 283256 - DNA, 276 bp, Glycine max
  unsure (1)..(276): unsure at all n locations
aactcaagcttgcaattaaaggttgtaaagaaccaaaaggtgtaatattctcttccataatcagcaatgtcaatgatgtgctcattttgcattccatacaaaggatcgggaacggctntgttcttcaccaaggtcgctagaacactgttaagtgattgcgcggaatgaagtcaataaattaaagaggatgtaaaatactaaaattgtgaaatggaaaatgagattgtgattacgttccatgaacgagagcttgcatccatggtgaaaaggggcgtg

SEQ ID NO: 283257 - DNA, 387 bp, Glycine max
  unsure (1)..(387): unsure at all n locations
agcttcttgttatattatgtggcagaatcggacttctgtttgaaaagttatgaccatttgaatttctcgagagctntggttgttcaatttcgagtgtctcgatatattatgcacctgaatcggacttccgtgtgacaagttatgaccatttgaatttcacgagagcattcgttgttcaatttcgagcatctcgatatattatgcgcctgaatcggacttccgtgtgacaagttatgaccatttgagtttctcaagtgcttccgttgttcaatttcaagcttctcgatatattatgcgcctgaatcggacttccgtgtgacaagttatgaccatttgaatttctcgacagcatacgttgttcaatttcgagcgtctcgatatattatg

SEQ ID NO: 283258 - DNA, 258 bp, Glycine max
tctcgatatattatgcgcctgaatcagacttccgttacaaatgttatgaccatatgaatttctcgagagccttcgttgttcaattacgagcgtcttgatatagtatgcgccttaatcggacttccgtgtgataagttatgaccatttgaatttgtcgagagcttccgattttcaatttatagcttctcgatatattatgaacctgaatcggactttcgtgtgacaagttatgacctattggatacctacatagcattc

SEQ ID NO: 283259 - DNA, 132 bp, Glycine max
gctcaccgtgtcttaacagtagtgcaccatacgcttgtgaccatcaatatgttaaacccactatacattgttcgcagatgactactcatggaggtgattgccaacactgacctgtggatactcggatccttc

SEQ ID NO: 283260 - DNA, 686 bp, Glycine max
  unsure (1)..(686): unsure at all n locations
cgcctcccgctnacncnnatcntcacattcntaaantntanacatgctatacggataccaactggantatgtntantananaanannnnnnnagcgaggantatttgaaagcactgcgaacacgcgacactanannanactcatactnncatcacgtcggtcaatgctggacatttgttgacagtgactacacttggcaatctagactctcacaacacatcaatatctactgactccatgagttggtctacncagatatatgttgatcacagcacgcgagaatctaacacactatcctctgacaaacacactttgataatcatcaatttttctgtacgatatgccacacggaatgttgacaattagaactctctgacaacgtccgtataatcagcctcacaacttggtgactgtcaccagtagcccaacagacctgatgaagtccatgatctcctctgcccaccgatgtaacctctccacacgaaatctaatcacaagcaatgcacagcgcgtatactactagatcttccaacactctctgctatggcacatgcgatgtaatcgagccgccagtccaactggtgcatcaacggacactcgtccgcgacccgcanttaccatgttgctgtcggacacttatgatgtgcatagcatccacatgcacatatctcactacgagcgcaccg

SEQ ID NO: 283261 - DNA, 455 bp, Glycine max
acatatataacagacaactactttacaaggacactagtcacgctatatgctaacatgctacagaaaatggacaattgccgcataaatttataagaaattcacatacaccatagtaaatgtcctactagaacatcactgattgcttgtaatctcttggtgactcttaagagtcatgaaaatagagaataattccacaagtgtcatacatcatcaaatttggcataaatcaataaactccttgatgtatgaatctcttctacattctgacaacatttcaacccattattaactattcgcatatgaaatgaccaaaatgctctatcactgacacacatatttagaagcagaaaatcgcaattgttactctaaccaaaccctacaagataactcttgctcataatcaggattaaacttatgacaccaatatgtgcatgcaaacttcacatgatagatcg

SEQ ID NO: 283262 - DNA, 531 bp, Glycine max
  unsure (1)..(531): unsure at all n locations
agttaaatgaaccttagtacctcgaacaacaaactcagcatcatcngccgtaattgcctaatccgtatctactacaacctacattagngagtttctacttcattcggctcgggcgtcaagacaantcattcacattactgtcaacacggtgcaacggactctaaacttgtacacaggtctggctatctcggcacatatgcgccataaataatgccaacccagcgtcttgatcattgacaccttatgcatgtacttaattcgtctgataacatgctacatctggaatcaacaacaatagtacttttttagtataagttctccatatctctgacaatttagcgtggctgtcttccactccatgatgcctatacgacgcgctgccgttaactctaactcgtttagctcacactaatcactcaccatgacgcctgctcacacatgaagtaaacttgcacatactcttatgcctcataattttgatattcctagctgttcagacaacgtcgatcgaatcatctttcgctactctct

SEQ ID NO: 283263 - DNA, 455 bp, Glycine max
  unsure (1)..(455): unsure at all n locations
cacatgtggtactttgtggcagncgggcgatggtgcacaacaaagttttcacattctcaaatcgcgcataaatccaccatcctcctgtccccaccttcaactgagctcacgtactcccacgtagcacatattctcgtttactttaacacgcggtccgcatcaaacctctcaagcttacccaacatgcaagtgaaatcacaattaaggatgcaccacatattgacagcctatataatagatcaaatgcaataaaactctgccatagaccctaccgaaaagacaacttgtttcacttaaagaccctagaactattccttctgatctaatctgtataccgttgagatcgactcatatactgtactaggaagattctattacataagcctaccatctngaccggtgtgatctaactatcaacaatcataacgcattttgactactcttctacagcaacn

SEQ ID NO: 283264 - DNA, 347 bp, Glycine max
  unsure (1)..(347): unsure at all n locations
tcaagccctaaggcagagctnganagagttcgggtagtcgaagataagttcaagtccatagccatcaaagtctgataagagtatgatgaactaagggacgtctatatggccacagctgaagctttggaacgagaaacaagatggcccgaaaggatgaacactaccanagcaaagttttgaggggctctatatggcatcaatagtgagctcaagctccgaataggtgataggaatcatcacgggtcataggcatgatcttgaatgacgagctaaaggtttgccttacgtcgaacagaaatttggcccaacatgttagcgagactgaagggaatatgtgggccatcatc

SEQ ID NO: 283265 - DNA, 421 bp, Glycine max
  unsure (1)..(421): unsure at all n locations
cacaccatcaatcatcaatgcggcctacaacaatgccttatatacgaatctaaccttgtctaatactagatccctgagtatgatgctcgaagtcatccatactaatttatatacttgactataccgagcactctttcgggaatcatatctgccttgcacatacctctataaagaagatacgaccaatgcgaactgcttgggaaatccagctgagtcgtactggcgccgtgccggggaattaatccatcagacgagtctacccacgttacggcatgctctaatacgtatcatgaatcgtagatctgtatgactattgacgatacaaacattttagcgatttgactggaacttgcggatctagttatagccgcgataagaatcattgcagggacttatncccatgattagacatgatgccacg

SEQ ID NO: 283266 - DNA, 614 bp, Glycine max
  unsure (1)..(614): unsure at all n locations
acactgacgccacacntcacactactgtatatagttctatctctgtcanggcgatcgcgataaaaaacaaaaanagagatggatttgatccctggaactgcgaacatcgaaactccgcactactgatcatatcgcaaagatgggttgataaaaactacatatttatgcgactcattactgagaaangaaacatcgcacatactatgacctgacgacatgagcaccgaactaagcggtaacttgatggagtacggaatagaagctcgaaggacgctactcttgctcctctatatatctatgccaaacaagatcagaacgacctatgctatcagtaacggcatggaactatacaagacacatgaggttaaacacaccaaaccgaacttgctagttttcatgacaatcgacggtctctttagagaatcatctaccaatgagcgccatcacgtggaagaatcggagacactacacatacacgaagataaactaagacataacaattgataagaacagacgttgaacatcagacgagatgaatgttgctacgatactgtggaatcatctcagtgagcatcaatacgatacacaaccagacgtgagaggcgcgaaaggcn

SEQ ID NO: 283267 - DNA, 364 bp, Glycine max
agcttatgctgcatacatctacaacagacctcctcaacctcagcagcaaaatcaaccacagcagaacaattatgacctctccagctacagatacaatcccggatggaggaatcaccctaatctcagatggtctagccctcaacaacaacaacagcagcctgctcctttctttcaaaatgatgctggcctaagcaagccatacattcctccaccaatccaacatcagcaacatccccagaaacaacagacagttgatgctcctgcgcaaccttgcctcgaagaactcgtgaggcaaatgactatgcacaacatgtatgttcgaacaagagaacagatgctccattcatagcttatctcgccagat

SEQ ID NO: 283268 - DNA, 438 bp, Glycine max
  unsure (1)..(438): unsure at all n locations
tctttgggactatgaacaggcaactaactcctctatcanaatcatgctatgtgctcgcgactggtccctttcttcccttcgcaacttgagttcactattgctaccccatagagctccgcgaaatttgttccggccatactcttacttgcgagccctcttggtctctcgatcaagggctcttgcggtaattgcattctcttcccgtgacccggcacactccttccgaacgtgtgtagcagccaacttgaacttctgcttggcgagtattgcctttcctaactcgcttttgagagcttggacttactcgtcctcttccggtgcttcataattcccttcgctgacgactattaacttggcgagccaatctaaacctcgtatgcgaactttcagccattcgtggtacccaccaatgatgccattacgaatgcctctaagctc

SEQ ID NO: 283269 - DNA, 67 bp, Glycine max
tgctgtgttttctctattgtcacgctaccatgctggcagacacatgcgcttatctgcatactgtgtg

SEQ ID NO: 283270 - DNA, 434 bp, Glycine max
  unsure (1)..(434): unsure at all n locations
atataaagagggagagatagagagaggtgggagcacgatattgattgaacatatagggagagaagttgaactttgagtggtgtctcacaagactctcattcatcaaagctacagcaagtgttccacatgcttctatatacngactatgtaactttattgataagctatcttgatgaaacgttcttgtgaagccttttagagataacatccttgagaagctacgatcgtatctactcacacccctctagtaaatatagctaccttctgagaatcgtccttgagaatatacctaatgaatctagagcttatctacacacacacttattatacctaatgttcaccccatgccgatatacctgaatgtttatataaatgctctattatgaatactactataatggcctgaatccaatgctataatctatctactatag

SEQ ID NO: 283271 - DNA, 396 bp, Glycine max
  unsure (1)..(396): unsure at all n locations
tatgataggatgagatagaattntatttctaatgttcttcattaagtgttccttcctcaacagctaatttcaatcattatgcatngtattaattcagtccaatctaatctattgtggaatggtcatagggttgcccctttcttacctcaatgtggcttgagacaaggagatcccatgtctccgtatattgttgcgacgtgtatggataagtcatctcatctaatcctttaagctcttcatgcaggtcaatggaagcctatgagagctggtcgaaatggaccattcatctcacacttaatgtttgtggatgatcctttactctctggaaaagcatcaataagtcaaattaaatgtattcaacatggcttgacgactctctgtgatatgtcatgacaa

SEQ ID NO: 283272 - DNA, 132 bp, Glycine max
catatatacgcgtatctaccaggtggtataaggcacgcgtaactgtcgtaaaaattgtacccatggcatgtcactatcgctgtaccgtataaatcattaagcttaatcgtacgtggctgcctatcgtacgcg

SEQ ID NO: 283273 - DNA, 426 bp, Glycine max
  unsure (1)..(426): unsure at all n locations
tgcttctactaatgatatntttgttacttgggatgtttccctagcttagcttgcttatgctgtcctaattgatgctttaagggtcgttaggagagatggaattacgtcaagccattccttatgggcttttggtttagcctatatcaaacgcaggtcaattcatacttttttgcaaataaactagacttaagctcttataaaaaactatgttttgttagaaatgttaaattcaagcctttcaaaaagtcttttagtcctaacatgtatcctatataagtaaatataaataatattcttattgggtaactattatattaatgcttatctaatgtactaaacttatatatattctggtctaaatatcaagtatgttaacctacctaaaaagtcagcctagcagctattattggataatttttgcatatt

SEQ ID NO: 283274 - DNA, 423 bp, Glycine max
  unsure (1)..(423): unsure at all n locations
tattaaattaagtntattntaatttattataataaatgttatgatcaaatttatgatataagttctaataagatatgataacttattaaataagcaattgattagttaatctaacaacatctatgtattctcatgaattattatctatctaaaaacattntatttattattcaaaacattactttcacaaaaatcaatgtttgaacagaagtttataaacacagaanattataaattaaattgaaatgcattgaaaatataatgattttttataccattatttaatcatgtatatgataaatttgtttatttttataataaatattttaagtcatttataagatgaattttatttgattcatatagcgtanaaattaaattntcattanatatttaaaaactcacttcttaatagatatctag

SEQ ID NO: 283275 - DNA, 426 bp, Glycine max
agcttataattatgttatactaatgggacaacaatttctaacatattatcctatttcaatgccttgtatggcttcacaacagtctttctcatttgacaagttaaaaccaagtatagcaattcctggattaagtacgaagtccataatacatataaaatctaaacctgaagttgtggcctgaatttgctacaccaactctatattatattacaatgccagtgtatgacattagtagatttgcaacttccatgatggagggtgacattagcagattttatgtgtgatgtgtgtgtgtcattacggtgtgtgtgtgtgtgtgtgtggcaaggataaaccaactgcaccaagtcattccttgctacaaaacacaatgccgatctgcaattgcacaccaatgttaggtccaatcattaagaatgaccaatt

SEQ ID NO: 283276 - DNA, 387 bp, Glycine max
  unsure (1)..(387): unsure at all n locations
gaatgaaagaagcggttgattctcgcaaaaagaatttttcaaggacgagaaatagttgaaggactttttcagttgacgggttaagtcaaatgactcctatacttgataacttacttctctctaaaattntccggaatgataaaatgaggtcacatgaacgtctatatttttacttgaaaacacagtcaatcaaatggctttttctttttctttttgaactgtcttgctttactcgtcgttntacggcaccctcaccaaatgtgtagcacgagtaatctctaattgaacggtcttggaagtcaacactcangagcgcatgttgcttgagcanacagagcaatggctngcactcacattcngatggaagttgaataagcaatgatgtgt

SEQ ID NO: 283277 - DNA, 288 bp, Glycine max
agcttgttagaaaatctaatggtcattacttgtaactcggaggtccgattgaagcgcatcacatatagagacgctcgatattgaacaaccgaagctcttgagatattcaaatggtcatcacttttacctcggaggtactattcatgcgcatcacatatagagacgctcaaaatcatacagcggaagctctcgagatattcaaatggacataaattgtaactcggaggtacgattcatgcgcatcacatatagagacgctctgtattgaacagcggatgctctcgagat

SEQ ID NO: 283278 - DNA, 261 bp, Glycine max
gtgatcaccttggcaatctgatgctcacaatcatccatatctatcactccatcaagtggtctacccagatattagccgatcacatcatgggagaatatatcacacttgcctctgacaagacactctcgatcatcatcactctttctgtctgatatgtcagagggaatgctgacaatgaataccctgactaggccttcgtaacagtcttccagcttggtgactgtcttcagtagaccagcagacttgttgatgtccatgatc

SEQ ID NO: 283279 - DNA, 382 bp, Glycine max
agcttcaacgttcattttcgagcgtctcgataagttacgggactcaatcagacatccgagataaaagttattgtcgtttgaattagctcagaagttcaacattcaatttcgagcgtctcgatatgttacgggactcaatcagacatccgagtaaaaagtcattgtcgtttgtattggctcagagcttcaacattcaatctcgagcgtctcgatatattacgagcctcaatcagacatccgagtaaaaatttatggtcgtttgtattggctccgagcttcaacgttcattttcgagcgtctcgatatgttacgggactcaatcagacatccgagaaaaatgttattggtcgttgcattggctcagatgttctacactcaattt

SEQ ID NO: 283280 - DNA, 309 bp, Glycine max
ctcagattcagacttccaacatcgtacttttactcgatatctgaggatccgtattacagaccagatgggttgagggggcaactaacacacttctttgctcgagcggtagagggcgctgattacaacgctgaaatggatggcatctatgagatgtgcagcacgagctttttgtactgctgatgatgccgcactatcaggacctcaaggaagttatgcgcgaccttactacaactatgtatatcgatgccgaagatacgctctactgacgcctactgttgcgagcttgacttttgggacacaactttactt

SEQ ID NO: 283281 - DNA, 397 bp, Glycine max
agcttgaaaggatgctttaatggatgaaaagatagagagaaggtgggagcacgaaattgaaggaataaaagagggagagaagtggaactttgaagtgtgtctcataagactttcattcatcatagttacaacaagtgttacacatgcttctatttatagactacgtagccttcttcagaagctttcttgagaaaacttgcttgagaagcttctttgagaaaacttccttgagaagctagagctttgctacacacacccctctgtcgtaacctacccttcggcgggaggccgacgcgtgactcgcgggatgcgtgatccacgataggaatacgcgcagagtcgccaccaacgtttatttgaggaaaacgtcggataaaccggataagacgcgatctac

SEQ ID NO: 283282 - DNA, 509 bp, Glycine max
  unsure (1)..(509): unsure at all n locations
cgacactatagatactaagctgtctgtttatactcactctctcgttattgtgattggagttatatataagataaaatgtcaccaaatataatgagaaatctgtcttanataataaagattgaaaagaagctntggtcttgcttttccttttattcttctttcattntgaccacttgttctgtctatgtcaaatngtctaatgtaacaggctttctgttgggctggttgcacttctccaaggtgttgatgcaaatgatcactgttcctggtgccattatctgtcttgtgttccaacttcaaaatggagctgccatacagaggcagcatattgtcaggtaagcaattttttacctgaaagcctcttcatatgaataatattatcagatcctctgaattacttatgttcaccgacatnttatgaatgggtatctttaaccccttttcatgcaattgttatattgaatcattatatctctaaacaaattggtgatctctaaaagtataatcat

SEQ ID NO: 283283 - DNA, 349 bp, Glycine max
  unsure (1)..(349): unsure at all n locations
agcttgccggtgtacctaaagatgctattaggctcggtcagttntcattntctttatcntgggaggccaagagatggttgcattcattcaagggcaatagtttaaagacctgtgatgaggttgttgagaagtttctaaaaaaatatttcccagagtctaaaattgcagagggataagttgtaatttcttcattccatcaatttcccgatgaatctttgagtgaggcattagaaagattctgtagcttgttgtggaaaactcccactcatggtttttcagagcctatacagntgaacatcttcattgattgggtacgaccgcagtcaaagcagttactcgatgcttctgt

SEQ ID NO: 283284 - DNA, 390 bp, Glycine max
  unsure (1)..(390): unsure at all n locations
tgctcatgcatacgcatacacatgcatatttgttatcttgtgacaggggcaggattgttttatgcaatagtcaaacaccgagccaaatccaaaggcagagacgaatcgatgtaagcagtaacgcggccatgatttgctgcgcaatgtcatttcctgctttcaagtacttatggatgggcacaagtagaggttaggcccatgatcaacagatcatcgtcccatgtccagcttcagacaagcgagaagcgctactgggaggcagcctagtatcctttaaattcctagatattattgcttgtgtgtctntaaggggatggtcggatgccttgtttaccctangggcttcgagttagcgaacgccgacccatagagagcgcgtacctttgtttt

SEQ ID NO: 283285 - DNA, 440 bp, Glycine max
  unsure (1)..(440): unsure at all n locations
agcttacttgtatgtcttgaacaacaataatgaagttntgccatacatagttaagcatgaagctttagtcaaacagaataatccgaaaatgtcaaagaattgggtgttgaaaaagcataacaagactttctgtgattggtttaaagatacaatctttgcagatgagaatgcttcagaaacattaagaaagctagcagatgggcctaaaagaaatgttataacctggcaaggatatgacaaaagtacaatgtataacagtggggtcaccctaagggctgaatcttaacactttgcaaggtactaggggcattgcacaggccgaaaggcatcctcctatangcaaaagtgccgaaggggcaggtgaatgtggtcttttcctgatcctcangagcaatagtaatatgcatataaccagaaaaaccatcaaggaaacagtagtg

SEQ ID NO: 283286 - DNA, 417 bp, Glycine max
  unsure (1)..(417): unsure at all n locations
tagtagagtaccgataatgtgtctaccatcacgattatcgtctccctttntgcacatgttatgtagttgcatcctatccggaactatatcagaatagtactgatactgcctaacgaaggcaaccattaggtccttccaagtatggactcgggaaggttccaagttagtgtaccaggtaacagctaccccagtaagactttcttggaagatatgtattagcagttcctcatctttgcatatgcccttatcttccgacaatacatctttggatggttcttggggcaagtagtccccttgtacttgtcaaagtccagcaccatgaacttgggaggggtgatgatattgggtactaagaacaactcttctaggttagcaaaggcataatctatacctncttcaatggccctgagcctttcc

SEQ ID NO: 283287 - DNA, 210 bp, Glycine max
  unsure (1)..(210): unsure at all n locations
atctcgacatattgtgtgcccgaatctgaccatcgtgtgagaagttatgaccattngaatttctcgagagcttctaatgtttagtttcgagcgactcgatatattataagcatgaatcggaccttagtgtaaaaagttatgaccattagaattctcaagagcttccgttgntnnaatttgagcgcctcgatatattataagcctgaatcg

SEQ ID NO: 283288 - DNA, 423 bp, Glycine max
  unsure (1)..(423): unsure at all n locations
ttctctacaattgcatcacctctcaattatctagtgaagaagaatgtggcatttaactggggtgaaaaacaagagcaagcctttgctttgcttaaagaagagcttactaaggcacctgttctagctcttcctaacttttctaaaacttttgagctaaaatgtgatgcctctggagtgggagttggagctgttttgttgcaaggtgggcaccctattgcttattttagtgaanaacttcatggtgcgacccttaactaccccacctatgataaagagctttatgccttaataagagcactccgaacttgggaacattaccttgtttccaaggaatttgtcattcatagtgatcaacaatcacttaagttcattagagggcaaagcatgttanacaaaaggcatgcaaaatgggtagagtaccta

SEQ ID NO: 283289 - DNA, 461 bp, Glycine max
  unsure (1)..(461): unsure at all n locations
agcttaaccgagactcgcgctcccggttaaggagccagtagtttccttttatcagtttctgggccaccccncctgatattggagggcgaccaactgtgcaagcacaaccagagagggaggctatcacgcagctactatgcataccggggtaagatttcacccatgccgctgcanagagacgagtgtggatcatgtgtaccgacatgaccccttttacacagatataaatgatgttgctacttagcaacattctgcccagcgaccgcaataccgatctccccctgcggaagtatcagttggtctgtgccatcccgacatatgtaggtatgcattatttccaactaatntctaatgccgtctactatttgcagggatcgcgcccgcaagacacccagtggacccggagacgtccaatannggccctgggttccagctctggtacaggcctctataaatcgaca

SEQ ID NO: 283290 - DNA, 332 bp, Glycine max
  unsure (1)..(332): unsure at all n locations
tttgagagggggtgggctactgcacaaaaaagacaatggatatttcaggaatggggaaaagggtctcgggagttttagctgangcgggagagtctgtattattatattattatttctttctctttcctttntatttaaacggtgcatttcattcgtcccacttgataaacattcgtcctcgaattatgatctatgactaaccttgagttcaaacaagtgaggatacttctcacgcataatgatttctggttcccaagtcatctcctctcctgctggccctcttctagccactttcactgatacaacatccttagaacgtatacgttcacacg

SEQ ID NO: 283291 - DNA, 432 bp, Glycine max
agcttattgtatcattcaccctttgatatatgatctctaagataaagatatcttatctctacatgtttggttctagtatgcatgacaagatttatagacagattaatagcaattgtgttgtcacatttcaagggaatgcgatcaatgattactctagagtctccaagttattgtgtcatctagagactttgagcgcaatgactttcagctgcaaaatattctgcttccgcggtgaatagtgctacacaagcttgtttcttgtcattccaagatacaagagagctttctaatagatggcatgtcccacttgtgctttgtctatctagttatgatccttctaatagatgttaagcgaaattgcttaagattatcttgatacctagtcacatgaaacactaagcatttatatggttgattgcagtaagtaaaaat

SEQ ID NO: 283292 - DNA, 439 bp, Glycine max
  unsure (1)..(439): unsure at all n locations
tcaacgggatcgacagacccttggcatcactctatcaggatattatcacttggtcacataccaaagtgtgacaattcattgccatccttcaatggggcgcacaattgatcccatagccttacgttttcttgctgtgcagaaagagacagtcaatctatgttntccacaaatggaaaaaaaagaagcatagaaaatcagatcataatcaatatcgcaaaaatatggatagaatgtcatgagcattacacaattttcatgattcanaaccttctgcattactagcatttcaagatgaaggttgcatgcatctgcatcccanatcatgttcatattaggctataagtgcatagatntctctttacataccactntcccaaatctaatctttcatgtttaggatgagaggcccttntatagagtcaacctcttgctntctcat

SEQ ID NO: 283293 - DNA, 404 bp, Glycine max
  unsure (1)..(404): unsure at all n locations
agcttgctctanatttacattgatgtttgtatttattggaggaggttgtatgccatctttgntttaagggtagcatttcttggtaaaactaactttccaaatgtttgccttcgcaagaatggccccgaggaagcttgcctcaaagaggtccaggaaggacaaggcgaccgaaggaactatttccgctccggagtatgacagtcaccgctttatgagcgctgtacaccagcagcgcttcgaggccatcaagggatggtcgtttctccgggagcgacgcgttcagctcatggacgacgagtatactgatntccaggaggaaatagagcgccgacggtggacatcanctggtactctcatggccaagttcgatccagaaatagtcctttgagtttatgccaatgctt

SEQ ID NO: 283294 - DNA, 459 bp, Glycine max
  unsure (1)..(459): unsure at all n locations
cgccacccagctcgcccaggcgagctcagctcgctcaggcgagcanggttgcttcctccagaagcaacagccttttggaggaatcttctggaaggcccaagtgggcctggttgctatttgcacccccattnttactaagtacaccccctgcctttntttggtgattcttttttcgtaaagttacggaaacttacaaatttcgtaacgatacttgttttctttccgtaatgttacggaaccttgtggattacataatcattccctttntgacttacgaaatgttacggaacctcactaattgtgcaacgatgcttccatttgatttccggtgtgtcacggaaccttacagatngtgcatcaatattttcttttgctttccagcatgtcccggaattcacaaattgcctaatgatgggtgccangcacctcacaaggaccaaacaaaagttgcatgtcatc

SEQ ID NO: 283295 - DNA, 331 bp, Glycine max
  unsure (1)..(331): unsure at all n locations
agcttgatgaggttgatgttaatcttgtgacggataatatggcagtcaattttgatgttnttagttcgtttctggaacacaagattggaagctatttgtatggtggactaattatcacaataaagaatggctggttgaaggaatgaaactctaaaatcttggagaagataagtgagccactgaagctcgcatgttgtggatgctaaagcacgacattcagcttcggaaaaactgcgagagactgtggattgtttctttgatttccaggagatgtgggaggtactgagataaacagtaaacctagtgatggagtgtctggaatcccgacacc

SEQ ID NO: 283296 - DNA, 460 bp, Glycine max
  unsure (1)..(460): unsure at all n locations
ggtcactcatcactgcattgatctctctntctctctctggttntggtctgtaaggtgagcttctatagaccccacagtgttaactgcagttaagcgtgtgtagtcatttgctacaacttcgtactattcagacagacgtatcatcttccttcttaattactacatcaacaatacaagtgcaaactcggtttctgatggaattttttcacaaacggaaaagttacttttacatgcattntaactgaaatgagacaaagtgttcagtagacgttgtcacgttgataagaacgaaagtatacagagagagaaggaaaatattaaacaaaaaaaataaagggcaggtcatatgtaatttttnttaacatatttactanaggtgaaaggtagtactctaattaaccagtcattntaattttcaccacttttcgcatatattattatggtgggctatgccgacctg

SEQ ID NO: 283297 - DNA, 293 bp, Glycine max
  unsure (1)..(293): unsure at all n locations
tagcttggtgaccttcataagcttggctaattcactactttgaacaacattcgcagttgagttntgtaagacatgatccctgnttgttgacctctttaattgcctcaatatattctctaccatcatgaaggaatcccatagcanagcaagcttctctagaagtaggatattctacgccaacaatagttataatttctttgtagctacatggtcctttaattgcagctaacatcattcttaagtanaataatttcgcaatgtttggtggatcccatatagtctaccgatattat

SEQ ID NO: 283298 - DNA, 362 bp, Glycine max
  unsure (1)..(362): unsure at all n locations
cgaggcaatgagactacatangcacatgacacgttcacattcgaggatccttgccggaaggcacaacgtgtttgtttgtcaactacacttggggcactccaaaacaaataaatgaccttttgtttgatgatacattacatcctcgtagatgttccacaaatattttgagaaggggaatgtacatgtaactaaaccctagagtccaatcaccaaccgacattagtaattggatgtgcatgtatccacgtaccatacggcgaatactagataatctcatcaatgtgattacttgattgcttcagaggagaatcacgcatctatctcctaatgatatatcattgcgtacgttgtaaacatgcacg

SEQ ID NO: 283299 - DNA, 472 bp, Glycine max
  unsure (1)..(472): unsure at all n locations
agcttaggcataagtgcaatggcttcatccacgggaaggtaacatactgggcatgctgaaacacaaacaagccanaatgttcaagatcataccactaacgttaagcaacctanaatattcacctgccttccatatcctcataaactaccctagctcaacaaacttactactatctacatggaagagggacactattgaaaataccatataaaattacctaacataagatatgtgcagaaacaatagatccaatggaaaaacctgtcattctccttcagcgtcttcgtgggtttgcgtgttgattgaataagtgacacaccattgttctgtagctggtactgctgcttctccaaagacccatgatctacaagaatcaacatacatatctatgtccncatgatattatgtaaaagatcagttacttaagcacaagagaataaatnggagcttggctctgatatgccaacattct

SEQ ID NO: 283300 - DNA, 462 bp, Glycine max
  unsure (1)..(462): unsure at all n locations
tcaaagttggccaatagtacctgactcttagaactcttatggccattggtctctccctagaatgcataccacanacaccttcatgtagttctcgaagaacatagtaagcctggtcttggtcaagacattntgagtagaggtgaggagaaacctctcctatatagtttgtcagtcactaaggtataccagacatcttgcattcttagttgtctggcttttcccttgtctattgtgagtgtctcatgttttaagtactcgactatctcttttttccatctcgaagggccttcctccacctgtaagcattcttttcccgagatgttgggttcgggaaccaaatggagtgtgaatgttnttagttaccaaggtttaggtcaagttgcaagttaagccaactcgtcggctttgtcattaacttcttagcttatatgaatcacctaaacttcctcanactcttccttg

SEQ ID NO: 283301 - DNA, 301 bp, Glycine max
agcttggttcgaggttcttacccgttgaagatcgaagaacgatgaagaacgaatgaagaacgtcgaagaacggttcatacctttgcgagattcctcacggaaaacgttacggaaacgtttcggaagcgcctcggcttagatattcttcacggaaataatttttccaagccaattccaaagagagagaagtgcctaatgggctggaccccttccttcttcatttcctcccctatttatagcacaataggggaggtggttgccgcccagctcggccaagcgagctcagcttcgccaggcgagc

SEQ ID NO: 283302 - DNA, 321 bp, Glycine max
  unsure (1)..(321): unsure at all n locations
acactatcaaactaagctanagacctatattaactttatatgtacaatatattaaacagtttcaataatttagaaccggccttcttattcaacctattgtataggattatagagatacaaaccaagtttctttctttctatattgctacgtgctccatacaatatataattaaactgtcatataattaccaataaaattgtcatataattaaaagtcattggaaattatgaaaattacgttaacaattagatttaaagtattatcctatttggtaaaatctttatacttacatatatcaaaatcaaatcaaataattatgg

SEQ ID NO: 283303 - DNA, 348 bp, Glycine max
  unsure (1)..(348): unsure at all n locations
agcttgcctaattaacctgaaattgagagaaaatgattattttacacacaanatgaanatactaagtatttattacctatacttaacagaaaatacttataacattacaaaaaaaccataaattgggagagtttgatacaatttatacaagttttatacacaaaaggtaagtcgtttcaccgactaacaagcacaagattagtttccaagttgaacctcactatcattccccacccaaaaccttataaacttcaatgggtcaatgagcatggagaaatgatagttaaccaacaaatgaaaggtactttctgcattgggatatatatggatgaaagtaattggcatata

SEQ ID NO: 283304 - DNA, 485 bp, Glycine max
  unsure (1)..(485): unsure at all n locations
gagatccatagatctaatccaaggtagatgtttcataaatgggatntcgttgcttgtgttgtttgattccagtgccacctattcctttatatcctgtttgtaagtagaaaaacttaagctnttctgtgtcttctttaaataaagatctagtggtggagacccctactagtggttntgtgttaacttcttatgtgtgtttgaattgtcctgtggagatttctagtagaacattcttgattgatttgatttgtttgcctttgagccagattgatgttattcttggtatggaactggtatcttccaaccatgtcttgttaaactgttttgataaaagtgtggtgtttgatgattctgtagtgagtaaagatatgatgtttatctctgccaacaaagttatgacatctntaaaggaagatgctcaagtgtacatgattctgtctaacctggatatagagaacaaggtttctatgtgtgaacttcctatt

SEQ ID NO: 283305 - DNA, 435 bp, Glycine max
  unsure (1)..(435): unsure at all n locations
agctnttggagtagatacatgggaccaactcattntatttcanaagaagaaatcatatctagtcaaggtctgagagaccatacaagtttcctaacgatgtctaattatgtgggccattaagtctatcatatgctgacaatagccgagaagcccatgaatctcttcgggggcggagtaggtgtctgccatcgccttggccttggctaacaatcggtgaagttcttgactcccgttcaaggtaagagcaaaccgatccatccacatggttgcctcttggtgtaaagagtcgatcacccttcctctagcctctttttccgcatatacttgggcatactcatccgcgattctatgctcgtgggccgtggctagacccaactcttcttggtacttggcgatgatagctaacatgttggntactgtctcgcatagatgctg

SEQ ID NO: 283306 - DNA, 431 bp, Glycine max
  unsure (1)..(431): unsure at all n locations
ttgctgcatggaagggaaaaggtctgtatggtggtcagcagaggagcacaaaccacaaacccttgcaacaggtacagatttctgattcaaggccagctgggttaccaagttaaccaatgcatccagttttccttcaagcttcttaatttcagatgatgcagatgggtttgtagctacctcatgcactcctctaatgactatggcatcatttctggtgctaaactgttgggagttggaagccatcttctcaattaaatttctggcttcagcaggagtcatgtctccaagggctccaccactggtagcatctatcatacttctcttcatattactgagtncttcataanaatattggagaagaagctgttctgaaatctgatggtggtggcaactggcacatagtttattaaatctctcctagtactcataca

SEQ ID NO: 283307 - DNA, 441 bp, Glycine max
  unsure (1)..(441): unsure at all n locations
agctntagaatgttgattagcggattcccttgatgatggtgaatcaggtgataatgaatcagaaaaataagtctcctcctcaagaatggacgcaactgttctgtcttgtaacagtttccttctcctctcagccctgttccttcttagtgtagcttctatttctaagtccaaaggaactaaagttcctataggagatctatgcataaacagtactaacagagcagtggttatccagttcaatttgagaagataaatataaattaaagaacaaatattcacagaaacaatcacagaataacaaataaagattagacacctaataatgagctaacttcccaaataataagaagttccttggcaacgacaccaaatacttgttcgcaaccggcaagtaaaccggatagtacatgtagtataaaacggtatgagtattgaactctc

SEQ ID NO: 283308 - DNA, 309 bp, Glycine max
cactatcatactcagcttcggctattcaattgctccagattgctgcatagaagggaaatggtttgtatggtggtcaccagaggagcatataccacagagtcttgcgacaggtacaaatttttgattcatggctagttaggataccaggttaaccaaggcgtctagtttaacttcaagcttcttagtttcagatgatgcagatgaatttgtggctacctcattcacttctctaatgactatagcctcatttatggcgctaaactggtgggagtcggaagccatcctctcaattaaatttctggcttcagc

SEQ ID NO: 283309 - DNA, 294 bp, Glycine max
  unsure (1)..(294): unsure at all n locations
agcttgtatatgtagtcatacctcacanaatatatatatgtatgtttaggtagtgaaaataccttagatatgcatgtatgtaaacaaaatatatatatatatatatatatatatatatatatatatatatatatatgtatgtttaggtagcaagataccttggatatgcatgtatatagcanaaatatctcacacaacatatatatgtatgtntatgtagcaagataccttggacacgcatgtatatagcataatacctcatggaaaanaagagagcaaatagagagcgagcac

SEQ ID NO: 283310 - DNA, 436 bp, Glycine max
  unsure (1)..(436): unsure at all n locations
tccagtaaggatattgtaagaattgcagctgatgtagctgttgngatcaagtntaagaatgatcacggtgttgcatacagagatcttaatacgcagaggattctgttggataagcatgggaatgcttgcttgggtgatatgggcattgtcactgcctgcaagaatgtcggagaggcaatggattatgaaactgatggttatcgatggctagcaccagaggttngcccctaatcacactctnttcaagttagcaaagcaattgctgaaattatgaagaaaacaaatgtatcaggccactangctgcatagtcttgtttaattctgtattgcatctcgcataaatattccctatatttctccntgagtttctttcaatagaagaatanaattaaagacctaaattctttaagacctagactctgcaatctgcatcaca

SEQ ID NO: 283311 - DNA, 351 bp, Glycine max
  unsure (1)..(351): unsure at all n locations
agcttatctcttaatataacggngtgttcttgttctggaggagaagcaatgagggtgtctagcaagtgggttctgaaggccgaaacttcagattcagcgacgatgccttctttgtggagacccatcaagttcagcacctggtggaaagagtcttgctgccatttaacgttgtcagattgcagtctcgacaatttgtgttccgccgcaagtaacggtcgtttcttgaagctgaaaggaagaatggtcttgcacagagaggtgagtgagtcatggagggttgagtaatacgtgggggtgtagtatgagtacaccattctcgagtgttcaagttanatgaagaaaggcgttctc

SEQ ID NO: 283312 - DNA, 495 bp, Glycine max
  unsure (1)..(495): unsure at all n locations
nntgctgagaaaatggctcttttaatatttccacagaagataaatcagttaccctgtcgcctacaaaaaaagtatgtatagttgcaatataaatgaagcatctatcctacaaggacactatttcaaacatatcgtaaaaattaacagtaatgaaaaagacagattcattgctagacaaatgttagcctaacatcaagcaaaatggaagcacataatagccagaatacctagtaacagaagtggcatgattaatagaacatcaagcaatgtcaaaatacctatcatgcattgtgaagtaaacagttcagcagcctgagcaagatatttatcacacagagagtcatcacttgaatttccttcagcctccactaactcatgcctctcagaacgatcaccactcagaagaatatgactagccttggaaggtgaacacatatattagaaaaggatacagaatanaaatcaagatagtgacagtgacagcccttctaacct

SEQ ID NO: 283313 - DNA, 402 bp, Glycine max
  unsure (1)..(402): unsure at all n locations
agcttttatccattatactctcttggaggtgaagctctgtcttccatggcttattccctagtgggtggtgcctcctctcacctcttctcctttatcttgcgctgcatctccatggtagataatcaccgctgaaggacctcattgtagctcaaagatccaacctccatagaagcttctcatgcacgcttatatcagtttccctgcatactgataaaagcccaccttagatgtgcatatggctttaccttctgcacatcanagaatatctctgctcacgtcgttggacattaccttcttaattcattcgtctacacattgaacattatatactgaatgaataaacgattaaacaatggaaattctgactgtgaagcttatatatgcctgagtaactaattattc

SEQ ID NO: 283314 - DNA, 491 bp, Glycine max
  unsure (1)..(491): unsure at all n locations
ntntctcaggtttctctgcaaaggtttccaagcgttaaagtataggaatatagattggagccacaattctactgtctccgtgcgagatacatttctttatgaatacattatttctaagatcccaacagtgagaatgtgcaaaaatgacttccaaaggtggtgcccaaatttcaggataatccaacggttaacgagtctacgatcgtaatgttactaagacaagtttgggtatatgcggaatagagagaggttttgggagaagaagaagacagaatgaacttgggaggagcaaaaagcatagagacgtatcctangatgtaaactgacctagtatgtctctatttatagctacgggactcttaagctattatttattntattatttctctaaaaaaataattctattctactttttcatcagataaataacanattagaacatccatttatgtctacaacatcatgttactctatttattttctaatactat

SEQ ID NO: 283315 - DNA, 441 bp, Glycine max
agcttgaccaagcgttacattaatgattagtgaaccatgtgccttagctccttataaaacaagtataatgtataacttcgctataattgcattgtcaacattgcattatctgtcatcatacttgattatgattttttcttcatccttttcttttgtcttatataacttttagcacttttcttatttgggtagactaaatggtgttttgcattgaatgtttgctaactctttaaaagttgttctgacagatatgtattgaaaccaatatattctcacgattcattcatcagcatgctaaaaggttagtgctttcaatatcaacatactacattatcctgttcttcgcttttgtctgtctcattctgctttccacaaccaatgttccatatcacgtctatcatgagatcacttaatacacaaccatattatagaagaactata

SEQ ID NO: 283316 - DNA, 387 bp, Glycine max
  unsure (1)..(387): unsure at all n locations
gacactatgaatactaagcttgttatgatttaaggtgggatcaacaacaaattggctcagatgttgctcaacatatgtgtcgcaatctacccttcggcgggagggcgacgcgtgactcgcgggatgcgtgttccacgaaaggaatacgcgcggagtcgccaccaacgtttatttgaggaaaacgtcggataaaccggataagacgcgatctacgaacttttaagtgaaaggctctggagttgtatttacgcgcggggaaggtattagcaccccacacatccgtcacaagggacggcaacctttaatcgaatgtgcaaacttgacttttgattttacgttcccttttatgtccttatatcctttatacccttnttatattntattctc

SEQ ID NO: 283317 - DNA, 415 bp, Glycine max
  unsure (1)..(415): unsure at all n locations
agcttccatcattntatatgaaggagtcgtacctatttgtctaactccaagaattatacctttgttgttgtctccataagtcacatgtccactattctttggagaaatatgagtaaagtttggcgcatctcccgtcatgtgtttggagtagccgctatcaatgtaccaacttttgttcaatgaatccttcatgcatataaccatatttttgatttaggtaccccaattttcttgggtccttgaatgatagttttgactagagatccttttggaacccataccatttttccaaagctactactgattttcctaaaataacatgttgatgcattatgtgcattcttaccacaataaaagcatgtcatgataggagaactagtcttttgagtagatgacaagaaaattttatacatct

SEQ ID NO: 283318 - DNA, 178 bp, Glycine max
tgtgctaacactattctgtacttgagaagaatcggaatgatcgatatgtatgaggacttggaattaggataaaatctaagtatctgaatagcatcaccacattaacaaataatataaatgtcatgttatggagagcccgataaaaacaaaacaaattaatgaagcctacactaataaa

SEQ ID NO: 283319 - DNA, 370 bp, Glycine max
tcacgatcgtcacgtgttgattcaactattgttattcgtggatatacgagacatcttgccacacaatgtcaggatagccataactcgcctgtgcttcttcttccatgccatatgtagcacagatgttgatcctgtcaagtttgatgaacttgaaaatgacgccgtaattatactgagccagttggagatgtattttccccctgctttctttcacatcatgattcacttgattgagcatctggtcagagatatcaaatgttgcggtcctgcttattagcggaggacgtacctggttgaacaatacatgaagatcttagagggtatacaataatctatatctccagaagcatctattgtgagaggacattac

SEQ ID NO: 283320 - DNA, 416 bp, Glycine max
  unsure (1)..(416): unsure at all n locations
agcttctcaatcgagtggattgcctactcctcgtagacgtagcctctgaaggatcatctgaatgcataggggaccttcggngtattgccatgactccgtgcaaataaaacaaattcattaatgtaatatgatatacattacttttataatgagcagttatgtcggaatgctctcccttanaccttcatcatgatcattacgaattgcatgtacatcatccacctcatgttcttcatttatggaaggcattcatggggagaaaccaagtgtctcacaaatatcaagggtcatagcatcatcttggtgattgataccgctagttcttccttgtagaaccattgaccatgttgaatcacacagatcttggacataaaagacctgtcttgcttgttttgcacaatgataaggtcgtcctt

SEQ ID NO: 283321 - DNA, 481 bp, Glycine max
  unsure (1)..(481): unsure at all n locations
tatggacgtgtatcttagcaacccttgacttgtagtcaaatggtatctaataaccacatcctaatatgttgggtttgtttgagttttattcctcggtgtatgtttctatgcaatgcttctaatgtgatgtctcgtatcacatgtaatatttcacattntctagaattgaactccactccttcaacaaaatcactcatttccccatcgtaatggataatagcctgaaaggcttgcttttgagtaaacattattttgggaatggactaatgacaaaattgagattgtactttggtgatatttgtgaatacactagtagacattataanatagatatagttgaatagcagtattatataccaatcaattatgaaacaactgtggacagtgtgaaattcacataatactgcctcangctctacatcatgtttgcactgatcaatccantgactcattggattcctaccttattttcacctctatg

SEQ ID NO: 283322 - DNA, 330 bp, Glycine max
  unsure (1)..(330): unsure at all n locations
agctntcataagtgatatcaggtgcaaccatctccctaagagtcctctcacgaggtggaggtagagccatgttctcaatatgtaaattagtagtcgaatgctcaaaatcagaatattcagaatcaccagcaacagaatgctcanaatgcacagaatgatcgggatgcacaatatgcctaaataatctatgaaaggttctatctatttcagtatcaaagggttgtaaatcaccttgattgcccctagtcatgcactatatgcaacanatcatctgtttctcanacangccctanngggagggttaaactacaactatagtcaaatgatatc

SEQ ID NO: 283323 - DNA, 421 bp, Glycine max
  unsure (1)..(421): unsure at all n locations
aaaacttgtgctattcattcttttcatctcttctcccttttccanaaagaattcgccaaggactaactgcctgaattctttttgtgtctctcttctcccttttccaaaagaacaaaggactaaccgcctgaattcttttgtgtctcccttctcccttgtcaaagaattcaaaatgacacagtatgagaattcttttgattcttccctttccctaatacaaaagtgttcaaaggactaaccgcctgagacttcttttgtacccctattcacaaagtatcaaaggtttaaccgcctgagatctttgtcttaacacattggagggtacatcctttgtggtacaagtagagggtacatctacttgngtttgactgataacaagagaggttacatctcttgtggatcagttctagtagagggtaca

SEQ ID NO: 283324 - DNA, 477 bp, Glycine max
  unsure (1)..(477): unsure at all n locations
agcttgcttaaagacgtctttgatcaattaattatgttaaaatctagtgaaatactaactaaaaaaaagaaacttataaaatttaatatgagtaatgtacaaatccaaaaataattgataaacaaaatcatattgaattcaagtagttaaaatacaaagaatataaaaaaaatgaacaaaagagagcataatattaaaaaatacatacaaagacaaggaatgactttaatcaggatgggtaagactatttggtgtagatacaaaacttagagaaagaaaatgaattaagaaagtcagaatgcanagggacgtgtgcagaggtgaaatacttataggttacaatacaacttaaaagtacttttattntctatgtattattttataagaatctgaagaattctanaagttttctatttaataatgatacttattattattattaataatacttanatagaccagtttgtcaagttaaca

SEQ ID NO: 283325 - DNA, 576 bp, Glycine max
  unsure (1)..(576): unsure at all n locations
ctctttactctctcaactaatcttccgaccctcacttattgcgctgacaactatnnnanaannannaaagagaatattganacttgttcagtcgcatatcaaactcaactgtggcgctcgtacttagggttcgctttgattttcgcgctatttgttgcattctctactagcttacctcttatatgccatttttccggcgtggtcctcgtgctgtgttaaagtgctggtttttgaaaatgtcgtgatgtgtagtcggaaccgagctgtttcatttctactcgaccgacgtatgaagtgttcttcgttaactattagcttttatggaagaagcttttcctgagaaatttgaacatacggaagaagttcttccatatgattcattatgcagaacttcactcccaatgcatactctatccttcggaaatatctaatttattcttcctcctcctcgattcccccaactgtacccgctataatactcctataatgctcactcatcgtttttctacgtctgattatgcccatatcataacttatttcctaatacttctctcgatatctgcgcgcgcgctttct

SEQ ID NO: 283326 - DNA, 396 bp, Glycine max
  unsure (1)..(396): unsure at all n locations
agctntagcttctcatctcaaggaagtgagtgatgtgtcattattntcttctatttcttaatcctttctgtcaccattttaattactgattagccataattgtcaaattcattatgcagtcttatcatttgggcctacttgactaattgtgtgtttttaatataatttcaggagaattataagcaattgngcatgaattcggaattgggcttggacttggacttgaagagagcaaacaattgtattttatcaaatcttatcttatccagaatttattccatctagatcgtatttcatccaatcttatcttatcttgtccagaatttattttatgttacttaggggcttagacttataatatatctgtaagctgtggggctgagaatctatataaca

SEQ ID NO: 283327 - DNA, 459 bp, Glycine max
  unsure (1)..(459): unsure at all n locations
tatgcgcatatttccctacgaacgttcacttgcacaagacatcctattatctaagaaaaatgcacccatatacaatcaaggtagcttcattacctagattatttacatgtacttccaaagtgtatttgttatttacatcatacacgccatcttgtcaaaatttacacacatgcatactcaaagcatttcggggtaccaaaaattgcacatgcgctcatcttggtatttctaatatctatacatatacaaacttcatgatgaatcttgactacctacgcaataaggtgctacatttcatgctctgtgttttttttttttttcaagtttttgctacctaaagccatatgcaaattcaagcatatcttcctttgctgactaanattgtattcaaattagaagggatatatttgtttggaatatgtttccttcacataacatgcaacacatctatatatatat

SEQ ID NO: 283328 - DNA, 377 bp, Glycine max
  unsure (1)..(377): unsure at all n locations
agcttgganaacactgtgctcctcccaattcgtcaagcaactcatcaattgtcagtatgggaaagcagtccttgacggtgagggaattcaatgccctgtaatcgacgcagaagcgccaggttccatcatgcttcctgacgaggaggaccggagaagaaaagggactgttactaagttgtatcagtcctttctgaagcatggactcgacctgcaactcaatctcctgcttttggaagtgcggataccggtaaggtcggacatttactgngttagactgaggtagaagatgaatatggtggtctgtggtgcactctgaggtaatgtttgtggtggttggaataggacattatatttggtgagcaaggcctgaatgggtg

SEQ ID NO: 283329 - DNA, 432 bp, Glycine max
caacgaagacagatgagaatatcagtgaatacttctcttttatctccatattatgcctagacttgttaccctacaattgttctcgaaactaccactaaaactatccgttactttatataattcctctcatgggctatctaacctctattgttttatgacaaattatgagagatcacattttctttgatactaatatgatagcatgtgcatggtcaagaatatcatatacatcgataaaatatatgaaagaaaaataaattgatacgatttaagaacaagtcgcttgcttatgtatcaggtaatttgaaactgacacgcatggaggcaagagataacgatgaaattgttgactagagagtgaagaacatagtaagaatctcaatatctaatgtgtattatacagattcgatgcaagaaatgtgtattgatata

SEQ ID NO: 283330 - DNA, 302 bp, Glycine max
  unsure (1)..(302): unsure at all n locations
tatgatgatgtattaagttgattcaagtagttttgatgatgagaaagatgatgacaaanagcccaagaaaatgatttcaagattgagtcaacaagttcaagatcaagattaatttcaaatttcatgagaagaaatcaagaagattcaagaatcaagagaagtttgatttcaagattcaagagaagatgaattcaagattcaagagaagacattaagaagactttccgctgattagaanacaaagaagaagacttcacaagggaagtattgaaaagattttcanaaaacaaacatagcacagt

SEQ ID NO: 283331 - DNA, 472 bp, Glycine max
  unsure (1)..(472): unsure at all n locations
gctcatcaatntattaggaaggtacacccatcttaattttcattgccttacttcccttttcattntcctaatttgtattaagtgtggttttagtttctttatttttgaactttaataaatatggctcatttgttacttctctttnttacttaaaatctttacaaattagatttgattaaattgtttttctcagaactcattagtcaaaatatcaaaattttcacctaaatataaaaagaaattcaaaattttccttcttcacatcttaatttcacatctcataaaatttatgggaatttttcaacttatttcttacttctatgcttctaaaattatttcatctctagaaaaanaagtacacggaagaccaaatntactaaatntaaaggtanacttagcagaataanatcttntcgttgacataataaccttcctacagtttcagttctggcttctcttttgagtaagtcac

SEQ ID NO: 283332 - DNA, 594 bp, Glycine max
  unsure (1)..(594): unsure at all n locations
ctcccgccgaccntcccacttcttcttctgtctactcttgcaactggttcgttctacaatatacangcaaanncanncaaaggcgnctgagccttgatacactgcgattcggctagtacactgatctcgggatcctcctgagtgactgcacgatgctaacttgcttatggcgctttcatctctctcttatcacattaacaacgagattagttatcctaagttctaacatcactattacaccttagaatgctgataagaacatacattctcatgctctaccacatgacgcgctcgaggctctagatgcacgtgtaccacacctagcgaatattatcaaccagcggtactatctatagtaatatctgctggatgtcaaacaactgaaacgctctattcatgcaatacttcggcaatggtgtacgaactttattattctttggaatgtgaccatctgctctttagatacatgtcaaggcttgctttgtcgcgccaatactatactatataagaactcaatatatgcgtgaaattgcaagtccactattagacttctcaccatggtacataatatgaaatagtcctgaatgatagctc

SEQ ID NO: 283333 - DNA, 383 bp, Glycine max
  unsure (1)..(383): unsure at all n locations
agctttatggagactggatctttgagcttcactaaggtcctttaatggtgattntcaaccatggagttgcagtggaagataaaggagaaatggggagaggaggcgccatacactanggaataagccttggaagatgaaggttcaccaccaagagagtgtcttggataagaatcttagagaggaagcttcaatggaggaagagaatgagaaagagagagagagagagagagagagagaaagtggcatgtaaaattgaagaaagataggtagagaatttgaactttgaagtgtgtcttacaagattctcattcatcaaagttgtgacaagtgttacacatgtttctatntatagcctagccaatgactaaatgagattttatttt

SEQ ID NO: 283334 - DNA, 157 bp, Glycine max
acatatgttgatcatgaatggatcatggccggatagcacccttcaccagcaaacgacattcagatggatgaggaagctcagcaggagccacctcaccaccgaaacccttttgagtctctaatgattaagagaatggatgctatccttcatctccatc

SEQ ID NO: 283335 - DNA, 459 bp, Glycine max
  unsure (1)..(459): unsure at all n locations
agcttcttggcaatcctcattccagcgatctgtttggttnttgcgtaagagcttgaacaacggctcacaaatggtggtgagctgcgatatgaatctggcaatataattcaagcgtcccaggaaacctcggacttgcctctctgtacggagttctggcatctcaaggatagccttcaccttttcggggtctacctctatccctttctggcttacaatgaaaccgattaatttccctgatttgaccccaaaggtacacttagcggngttcaaccttaattgatatttcttaagcctttcgaacaacttccgcaggttgacaaggtgttcttcctcggatttagatttagcaattatgtcgtccacgtagacctcgatctcttgatgcatcatatcatggaacaaagctaccatggcctgttgataagnntgccccgcattcttgagtccaaaggacatcac

SEQ ID NO: 283336 - DNA, 438 bp, Glycine max
  unsure (1)..(438): unsure at all n locations
ntaatgaacttcaactttggcttgagggtatatcctccccaaccactatggtgatatttgctccacttaagagccaccatantttggaatcccttgtcctgcatccaccaatccatgattntgaaaggcttangtccccagtcaatgattntggatctcaaaagaatagggcagtggtctgaanaattcctatccaacacaaactgggtggtatcaggccattgaaccagcccaatttcagataagaaaaacctgtccagcttactcatggcacttccattaggtctgaaccaagtgaacattctgccaatagatctaacctcctctaaggccataagtgaaatccaagagttgaattcagcaatgctagaggagttgaccacattctgagatgaactcactctctcattntgatgtcagtggagaaaggtgatgaca

SEQ ID NO: 283337 - DNA, 455 bp, Glycine max
  unsure (1)..(455): unsure at all n locations
agcttccatcattntatatgaaggattcgtacctatttttctaactccaagaattttacctttgttgttgtctccataagtcacatgtccactattctttggagaaatatgagtaaagtttggtgcatctcccgtcatgtgtttggagtagccgctatcaatgtaccaacttttgttcaatgaatccttcatgcatataaccatatttttgatttaagtacccaaattttcttgggtccttgaatgatagttntgactagagatccttttggaacccataccatttttccaaagctactactanttttcctaaaataacatgttgatgcattatgtcctttcttaccacaatataagcatgtcaagataggagaactagtcttttgagtagatgagaagaaatttttatacatctttcggttgctttcacgtttataccctaatctagctntatc

SEQ ID NO: 283338 - DNA, 470 bp, Glycine max
  unsure (1)..(470): unsure at all n locations
tgtgcttaacactnttctttacttgaaaagaatcggaaagatcgatatgtatgaggacttggaattaggataaaatctaagtatctgaatagcatcaccacattaacaaataatataaatgtcatgttatggagagcccgataaaaacaaaacaaattaatgaagcctacactaaaaaaaaagtcatgcatgattgcatgttataactattttgttataattatcttgataccatttaccaactgtcgctgttgtgcctaacaaccaagtgtcaattagtggctgtgaagatcaaccacacaacgaattaatgactaagaccttgcaacaagaaaaccaactgaaatgtttaaaaatgtgctcattcgatcttttaattagcgtntacaatttccattntcctacattatgaaatctgtactttagaagaacaattacaccaatacaaagaaaagtaaatcatgctgtca

SEQ ID NO: 283339 - DNA, 452 bp, Glycine max
  unsure (1)..(452): unsure at all n locations
agcttatgcgcatatttccttacgaacgttcacttgcacaagacattctattaaccaaaaaaatgcacccatatacaatcaaggcagcttcgttacctagattatntacatgcacccccaaggtgtatttgttacttacatcacacacatctccttggctgaatntacatacatgcatactcaaagcatttcggngtaccaaatattgcacatgcgctcatcttggtatttctaatacctatacatatacaaacttcatgatgaatcttgactacctacacaataaggtgctacatttcatgctctnntttttttcaagtttttactacctaaagccgcatgcaaatncaaacatattttcctttgctgactaannatgtattcaaattaaaagggatatnatnntttgtaatatgttttcttcacataacatgcaacatanttatatatat

SEQ ID NO: 283340 - DNA, 471 bp, Glycine max
  unsure (1)..(471): unsure at all n locations
nttcgcanagcttacggtaaaatctgggacctagccatggtagaagtctccatagaggccattgcctccctcgcccagtattntgatcagccgttgaagtgcttcacctttggggacttccagctatcacccatggtggaagagtttgaagaaattctgggatgcccactgggaggaaggaagccatatctttcctctgggttctatccctccatgacaagagttgccaaggtagtgaaaatctcagcacaagagttggaccatgtaaagcanaacaggaatggngtagtcggagtaccaatgaagtggttggaggaaagggcaaagaccttgacaaatcaaggcgaatgggcttcttttattgacatcttggcacttttgatctttggagttgcctctttccnatatggaagggtagtggacctacacgatgacgctttctcgctttcatatggcaggatagccagtcgt

SEQ ID NO: 283341 - DNA, 405 bp, Glycine max
  unsure (1)..(405): unsure at all n locations
agcttcgattntattatttcgagcttcacgatatattacgcgactcaatcggacttccgagtgaaaagttattttcgttagaatttgctacgatcttcgantttaaatatcgagcgtctcgatatattacgggactcaatcggacttccgagtgaaatgttattgtcgttcaaatttgctacgagcttcggttttaaatttctagcgtctggatatattacgggactcaatcggacttccgagtgaaatgttattgtcgttcgaattggctatgagcttcaattttatatgtctagcgtctagatatattacgggactcaatcggacttccgagtgatatgttattgtcgctcgatttgctacgagactcggtcttaatntctatcgtctgatatttacggactc

SEQ ID NO: 283342 - DNA, 423 bp, Glycine max
  unsure (1)..(423): unsure at all n locations
tgtagcanattcgaacgacaataacatttcactcggaagtccgattgtgttccgtaatatatcgacacgctcaaaatttagaaccgaaggtcgcagcanattctaacgacaataacatttcactcggatctccgattgagtcccgtaatatatcgagacgctcgaaatttaaaaccgaagctcgcagcaaatgctaacgacaataacatttcactcggaagtccgattgagtcccgtaatatatcgagacgctcaaaatttagaaccgaagctcgcagcaaatgctaacgacaataacatttcactcggaagtccgattgagtgccgtaatatatcgagacgctcgaaatttaaaaccgatgctcgcagcaaattcgaacgacaataacatttcactcggaagtctattgagtcgcgaatata

SEQ ID NO: 283343 - DNA, 373 bp, Glycine max
  unsure (1)..(373): unsure at all n locations
agcttctcaaggaatttctctaaagataacttctcaaggaagctacctagtctatanatagaagcatgtgtaacacttgttgtaactttgatgaatgagagtcttgtgagacacaactcanagttcaacttctctccctttatcttccttcaatatcgtgctcccacctctctctttctctacctctttctgtgtctccattgaagcatcctctccaagcttcttatccaacgctcatcttggcggtgaagctccttcttccatggcttattccctagtggatggtgccgcctcctacctcttctcctttgtcttccgctgcatctccatggtggagaatcaccatctaaggacctcattatagctcatagat

SEQ ID NO: 283344 - DNA, 590 bp, Glycine max
  unsure (1)..(590): unsure at all n locations
ccaactcatccctnacatcatcaaatttaataattcgcctatatactannnnnnnnnaagaggggaatgaacctggactgcgaacattaaactagcttgctanagagatcaggatagataagcgactgagggaaccagctcctctcccgtatatgacattcaccattgtaggagcgctgagcaccagctacgcttccaagccatcgagggatggtcatttgtgcaggagcgactacttcccctcacggacgactacctatactgacttatatgacgagatagatgaactgagggcgagcattactggttacctncatggccaagttgactcagacactgtcctcgaattatatgcccatgcttgtcctaccatagacggcctgccagatatgcgactctcggtgatgggtcagtggatccctatcgatgccgatactctctgaacaatcctgggatagccctaatgtttgaggacgctcagcaatgcgaaactaccacatgacgaccngctccactggttcgatacagagccatcaccatatgcacttatacatcggcagatatgacagacttccgcaaatacagacccg

SEQ ID NO: 283345 - DNA, 237 bp, Glycine max
agcttaaacattcaatttcgagcgtctcgatatattacgggactcaatcagacatccgagttaaaagttattgtcagttgaatttgctcatagcttcaacatttaatttcgagcgtctcgatatattacgagactatatcagacatctgagtaaatagttattgacgtctgaattcgctcataggttcaacattcactttcgagcgtgtcgatatattacgggcctcaatcacacat

SEQ ID NO: 283346 - DNA, 133 bp, Glycine max
tatcttttactcgatgatgatcgttcccgtctataacgagacgctcgacaatgaatggtgaagctctgagccaattcatgcgactatatctttctactcggatgtctgatcgatgcccgtaatatatcgagac

SEQ ID NO: 283347 - DNA, 363 bp, Glycine max
tgctctcttgcggtgtctttatgtgaggttgtatctttgttcttcaatgatgtcctttaatggtgatcttccaccatggggatgtagtggaagacactcgataagaggtgataggaggctccacccactatggaataagccatggaagatggagcttcaccaccaagatgagccttggataagaagcttggagaggatgcttcaatggaggaaatcctatatggatgatatagagagaggggggaacactaaattgatggaagataaagggagagaatgttagctctgagttgtgtctcacaagacactcattcatcatagctacaacaatgtgtaacacatgcttctatctatagactaggt

SEQ ID NO: 283348 - DNA, 394 bp, Glycine max
  unsure (1)..(394): unsure at all n locations
tactcagcttctgatgtctanggttttctagagagagaatggtccacgttccacacatgtttgatatctctgttgtgtgaagactanccgagaatcgagctcgaagaggatgtcgacctgagagcataatatgagtctgcgagtgattgtgacgttctataggtggaggagacatccccaccactcgtatatcttcaatccatcatctttctactttctatgttgcaaagggagctttccagttatggagagctaatcctctgttggttctacctttgatgtacttgacgtaaatactctgtatatctattgcacgatgtcttgtgagtccactgtgctatcgaaacttcttattaccttgctgtgccttgatcacatagatgcatgtgtcttt

SEQ ID NO: 283349 - DNA, 306 bp, Glycine max
  unsure (1)..(306): unsure at all n locations
agctcggcattcatatcctgatttgatgtncatatgttctcaaactggactaatacattngctgcccaagtctcatggtcttacatgtgaagatcctgacaatcatcttaacgagttccatattgtttgttccaccatgaagccccctgatgtccatgaagatcatatctttctaaagacttttcctcattctctagacggagtggcatatgattggctatactaccttgctccaatgtacattttcaactaagatgaccttaacacggtattcttcgagaaattctcttctgatctaggaccact

SEQ ID NO: 283350 - DNA, 438 bp, Glycine max
actcagctatgttgcaacattataatagatctcctcagcagcataaccaacaactatctgaattattatgatctttacagcaacagatacaatccaggttggaggaatcatccaaatttgagatgggcaagcctccacacaacacagcctgctctgctttccagaatgctgctggtccaagctagccatatgttcctactccaatacagtcggagtcacaacaaatactacaagcaactgacgctcttcctcaaccttccttaaaagagttagtgaggcatatgaccatccagaatatgcaattacagtaagagacaagagcctttattcagagtttgacaaatcagatggggcatatggctactcaattgatccaagctcagtcccaatatcttacaaatattcttgacaactgtgcagaatctgaaaatgtgagtg

SEQ ID NO: 283351 - DNA, 575 bp, Glycine max
  unsure (1)..(575): unsure at all n locations
ccccactcaatattcatgattcagactatatgtacactaaaannaaaaaaaagatagatgaactgatacatcgaatacgaactaagatactgccgaagcagagaaggatactgcatcactgcgctattaagattgtagagcgaacaaaccatcctagatgatctgctcgaccacatactatgcctacatgcagcaccgcaacaaaatatggacttggagattcatatcgaccttgtataatccatcatgggtctaagactgcttaaggcatgaccttgcctctgacttcttgacataccaatcaaatgtgcgcatcacctgagactgatactccatacatgctccctcgaatgtccaagctataccagccgcaactcgaatgacactgtactctatcgcaaaaatgaagaacgctaccatagatatgcgacgacaatatcgcaccctgcgagccatgcatatgctttgaaatgggaaccatacatatctgaggcgctgcacactctgaaataatgtgcgatgngaaaaggaatatacaacacataacttagggcggatttctcaaaactattgcg

SEQ ID NO: 283352 - DNA, 475 bp, Glycine max
tcttatattgtacattctacccacactgcaagatctgactagagaaacaaaaatcacactctgcatatgctgcgaaagaaagccgcaccgtgcatcttgcacctgctcacacagacatgttggatcatatcgtctatagatacaaaggaaagaaacgatacaagtaaagtctggatcattggatcgcacaaactgaagtctaactgggcaaagaatggacaatcacaacctggtgatccgtaatgatctagccaactatgagacagaatcggtttgttgaacggggcatacggagttctgatgcaaactctactacatatctatcagaggcgagaaccagcaccatggaaggtacagacagttacagataattgacccgaactgtgtgttcagaccgtcatacaaaacggacgccgtatctgacgatggacactaaagtgtagtcaataaacaacttacgagccgcttggtaccc

SEQ ID NO: 283353 - DNA, 566 bp, Glycine max
  unsure (1)..(566): unsure at all n locations
cgaggacggaannactggataccttgataccccaccgatntangcgacactatagattactcaagcatgatccaagatatgtgatatgcatgtgctaaggggggcattatgaggttttgtcttattcggcatggctaggactctagtagccatggcttaatccaagatattagatctgcttgcactgataggggtgtattgaagttctcggagcggcatatccatccatacctccttcctagtcttgttaaagntgggcttgtccacctgcttcttggttaacatagcctcaactcgaacttgcgttctgataatgctcattcgtccatctgcctgaacatggtcgccttgtgctgccactcttgcataacgaatcgacgactccttgcatatgctatttgtgcacgtatccaccggtgcatcgaccactatatgcctacgtgcgggatatccaaagctatatttctgaaacatctcctgataccctgaagtggttctgtcttctctcgcatatgttgaccaacgtcatcaacgnctactgactgcgctggacaatacgcaactcg

SEQ ID NO: 283354 - DNA, 259 bp, Glycine max
agctttgtggctgatatctatacaacatcacaagggttctagtcttaagactctctctctctctccttttcgctatagttatagaactctctctctttttcgtcttagttctagagtgcttctctcaattcgttttagtctcttcttcgcttctgaagaacaatcctagctttcttcattttctactgattaatgcaatgctaagcctccattgttcgtttctctagaggatcaaacacctgtctctttgaagtatatt

SEQ ID NO: 283355 - DNA, 458 bp, Glycine max
  unsure (1)..(458): unsure at all n locations
ctcctactctcatgttagcatgcattntctttctttactcactcctcacgtatggtgttttagggataaacaccataactaaacgcgccgcatgggatccctatcgcaccagatccatatctataacgatgggtgatcaagaggagacgcatgaacagatgacagccgacatgtccgctctgaaagaacatatggcctccatgatggaggccatgttatgcatgaaacagctcatggagaataacgcgggcactgccgccgctgtcagttcggcttgcgaagcagacccgactctcttggaactacgcaccattcttcctcatacatagtaggaccgcgaagggacacactgatgcacgatggcagctctcacctgtgatacaaccgagcgggttacccttattgattgtcgncaactattaccacccatcttgcaaaatatgcgggcacattgttct

SEQ ID NO: 283356 - DNA, 444 bp, Glycine max
ttgacgatgtctttacggaagacaattaagagagaatggatgctacagatgatggaattattgaaggagatataacgatcaatgaagtgagtgtcataatacttgtattcattaatggtaccacaagtgttatacatgcttatatctattgagaacgttgctttcataagaagctttcttgagaaaacttcctggatttgacttattgacaaatcttactttagaagcttatgattagctacttacaagaccttaacaaataatctcagctccgtgaaacacggccaaagaagcatagcttaacttcactaccccttaataccgtatctcctcaccatacgataatattgagatatctaaaagtgtctctactcgagaatccctctactgactgaatacaatgctacattctttctacttataggccgaattcatcgccgtatt

SEQ ID NO: 283357 - DNA, 447 bp, Glycine max
cttctatgggcatgggtattgctagtttgctcgataccacttccttctataactaggaacatagtggcatctgctgtaacgcttgtttcgacttagtggtcctatacatgatgatatgcccgttgtggattggcatgttgaacaagccacgcctgacatgtgtgaactgattaccacggtgcgacctccactggactcgctgattattatgaccctgctggatacctgataactgtcttgagatactctttgatatttgatagctgggacagtgtggaacggatgtacgaatattgcttacatcatgcagttatgtggactttgacagatactctgtagatacgcagaaattgcacaacgttgggcacctcgctaattggggctccaaccaggaggaatcactaagtgtgttgacaggtcacaccctgttactcttcttctaacatc

SEQ ID NO: 283358 - DNA, 449 bp, Glycine max
  unsure (1)..(449): unsure at all n locations
caattttatacaatgacattttaaccacgcgccgcacaatcttaacatatatgtacacatgtagaaagccaccttaattgccatgtacacctagcaggccttaatatgatactaggtgatgacaatatcttcataacgacaacctacaaaagagattataggccgacatgaatcatcgtagtgcacacaagttatggtgtcaactattagtgtactcgaccactcaaagaatatctataaaacctgactagtaccacaatattcgggcatactgattgtacacatgcgaaatggtgaaatgagtaataccatagtacaacatcatacagagtccggtcatacattactcagttatataccactacgaatgctttgtcaatagtatagtagtagaatacatatacccgtgtatatattcaggagaggcggatgcgatgaagggcgcatcn

SEQ ID NO: 283359 - DNA, 460 bp, Glycine max
agcttgtaacatatattattcaatacaaggtcctctcaaggatttagtcaaaacatatgcaagttgattgtttgaactaacaaactcggtagaaatctaattggacagtagctttccctcataaaatgacaatcaatttttatgagcttagttctatcatgaaacacttgattataagcaatatgaaagtttgtctggctatcacaatacaatttcattggctaaattgcatagaattgtagttcttgaaggagatgtttgatccacaccgactcacatgtggttgtggccatggtcctatattcagctcttgcactacattgagcaacattaaactgtttcttactcttcctagagataagatctccaccaatggagacactatcttgtgttaaagagtctatctatatgagaacctgtgcaatctatatcacaatacccaaagaattgtgcatctcat

SEQ ID NO: 283360 - DNA, 399 bp, Glycine max
  unsure (1)..(399): unsure at all n locations
cattcactntcttctacatcatattctaacttgtccacacatgacattgagacagtctcgactcactgacagtcatatgagtcgtcatacaaccgatatagaacatatatcctaatgtcacatcctatccgagcgtggcgatcccgtgtcctctagcatgaggttcttgatagacatccacctattcatctgctcccccgaacacatgatccagatcatcacacgatctcaacacaacaacacacaggaagtgagctatcacattcctagctaatacagaatcaagacaattcaatatacttcttatatagttgagataccacttgctcaagcataactcacgtaacgttaccactgtcacatgtcaaaatcactcttcaattatcaaccacattacac

SEQ ID NO: 283361 - DNA, 206 bp, Glycine max
tagcttgagatgaggttgtgttgaacggtgatacttcctgctgttattgctgaccacagagtggtacctggagatatgtcgcggcggtcacgagaccttgaggacatcacgtggagtgctattgcccaaaaccatgttggaccaatctcgacccaacccgatcatattctgtcagtgataacctgtgatgaacctaagcatgcgag

SEQ ID NO: 283362 - DNA, 219 bp, Glycine max
cgagatgaggaagtgttgaagggtgaaacttcctgactttattggtgactcacagagtggtacctggagatatgtcgcggaggtcatgagaccttgtggacgtcaggtggtgtgctattgcccaaaaccaagcttgaccaatcccgacccaacccgggcatagtcggtcagtgagaacctgtgatgtacctaagcaggcgagctcctcgcagtcaacag

SEQ ID NO: 283363 - DNA, 406 bp, Glycine max
tagcttgccacccatctcgcccaggcgagcaaggttgcttcctccagaagcaacagccttctggaggaatcttctggagggcccaagtgggtctggttgctatttgcacccctattattactaaatacacccccttgctcttttttagtgattcttttttcgtaaagttacggaaacttactgatttcgcaacgatacttgttttctttccgtaatgctacggaaccttgcggattacataatcatcccctttcttgacttacggaatgttacggaacctcactaattgtgcaacgatgctttcttttgattttcggtgtcgcaccgaaccttacggtatatgcatcaatacctgctttcgacttctggcatgtcccggaacttcacaaattgtctaatgatgggt

SEQ ID NO: 283364 - DNA, 387 bp, Glycine max
  unsure (1)..(387): unsure at all n locations
tgtagaatggctagacatgatacatgtcagggtttggtttggttcaaggataaaagggatgccccacattatttccatgacacaaatgcaaagatgatgacttggaaatcttatgcaaaactggtcatgcatgcacctatgtggacgctcaagtgtcanatttttatggtcatgtgaagctagggctcaggattcatttcctctattttaaatcaacccaatgtttccaaaatatgctcttttatcaatttatgcatttatcctagtccatttcgtgcgtccggcgaaattntcacagcattcacgcttcaggtgtagacacgttatttcttcanaaatcggttatgatcaatgatattttttctcaaagaaaagttggaaatcatc

SEQ ID NO: 283365 - DNA, 458 bp, Glycine max
  unsure (1)..(458): unsure at all n locations
agcttctgcatgtctatggttntctagagaaagaaaggtccaagttccagagtgttcgagattntgttgtgtgaagacctgcagagaactgagcttgaagaggaggccttcctgagtacttgagatgagtttgtgagtgattgtgaggttctggaggtggaggagacatccccaccacttgtatttcttcaatccttcatctttctcttttctttgttgtaaaggaagcttctcagttttgcagagctaaatcctctgttggttcttccttgtaggtacttgatgtanatacatgtatatctatctaatgatgttntgtgtattcactgtgctatcagaacttcattctaccatgttnttgccttgatcacgtagatgcatgtgtnnttangatcattcaanagtggaaactggtttgattcttagaatangacaaggctagtttatcgtattatcac

SEQ ID NO: 283366 - DNA, 447 bp, Glycine max
  unsure (1)..(447): unsure at all n locations
tgatggtgttgagaagaaatcacatgtttgtcatcatcaaanagggggagaatgtgaatgtatgtatacatgattntgataatgtcaaaagaagaatcaaacaaggctcattntgcttcaagattaatacaagattgtttcaacaaacaaagccttaattcaagatttcttcaagatcaagccttgcctcacaatgaaaggtttcaagtcattcaaggcacatgtaattgattaccaatacatgtaatcgattaccaatggtttgaaagtgtgtaatcgattacacatcatatgtaatcgattaccagagactttgaatgttgggaaattcaaatttaaatgaagggtcacaactgttcaagaaaaacaactgtgtaattgattacactaattctgtaatcgataccagagaggaatttaaggaatatcgcaacagcacatcttata

SEQ ID NO: 283367 - DNA, 457 bp, Glycine max
  unsure (1)..(457): unsure at all n locations
agcttccttgagaagattcctaaataagctagaggttagctacacacacccnctataatagctaagctcaccccatgccaaaatacatgaaaatataaaaaaagtccctactataaagactactcataatgccctgaaatacaaggctaaaaccctatactactagaatggccaaatacaaggcccaaaagaagaaaataacctattctaatatttacaaagaagaaaggacccaaccttggtccatgggctcagaaatctaccctggggttcatgagaaccccaaagccttctttagcagctctagcccaatcctcttggattcttctatccaatacccttggggggtaggattgcatcatcccttccaccttggaaaggttntgacctcaaatcccaatggtcttcatattatgagctccttccctcgacacctgtaaaaagaataaaaacatat

SEQ ID NO: 283368 - DNA, 299 bp, Glycine max
  unsure (1)..(299): unsure at all n locations
atcctatctccgatagccaatgggtaagttccgtgcatttagttctaaagaaaaccggtctcaccgtgatcaaaaatgagaaggaggagttgattcctactcgggtgcagaacagttggagggtctgcatcgactataagacgctgaaccatgttaccaaataggaccattttgcactgccattcattgaccagatgcttgaacgcctggcaagattctacaggcgctctattagagaatttagcacggcacctgattggaccgccccatttgagctaatgtgcgatgcatncaattac

SEQ ID NO: 283369 - DNA, 406 bp, Glycine max
  unsure (1)..(406): unsure at all n locations
agctntcgagcaattcttatggtcataactcttcactcggaggttcgattaaagcgcataatatatcgaggtgctcgaaattgagaaccggaagctctcgagaaattcaaatggtcataacttttaactcggaggtccgattcaggtgcataatatatcgagacgctcgaaattcaacaatggaagctctggagcaaatcaaatggtcataacttttcactaggaggttcgactcatgcgcataatatatcgaggcgctcgaaattgacaaccggaagctctcgagagattcacatggtcataactattcactcagaggttcaggtcctgtgcataatatattgagacgctcgatattgaacaacagatgctctcgagatattaaatgagcataactcttcactta

SEQ ID NO: 283370 - DNA, 433 bp, Glycine max
  unsure (1)..(433): unsure at all n locations
tccattgttgaatctcgagcgtctcgatatatcatgcgctntaatcggtctctccgagttaanagttatgaccatntgaatttctcgaaagcttccgttgatgaatttcaagcgtctcgatatattatgcgcctgaatcggatctccgagtgagaagttatgaccatttaaatttctagagtccttccgttggtcaatttcgagcgtctcgatatattatgcgcctgaatcggacctccgagttaaaagttatgaccatctgaatttctagagaccttccgctgttcaatttagagcgtctcgatatattatgcgcctgaatcggacctccgagtgaagagttatgaccatctgaattgttccagagcttccattggtgaatctcgagcgtctcgatatattatgcgcctgaatcggacctccgagtgcaaag

SEQ ID NO: 283371 - DNA, 469 bp, Glycine max
  unsure (1)..(469): unsure at all n locations
agcttaatagtcttctagtaaagtattcactggtagcagtaaaattattaatcagctatatatcacgggtgatattaaataaactgcctaattatcaattatatcatgcattgggctgataagagctcgacgctattatctctatactcaatacatactatcaaggatactttatcagtggtcacaggaaatgtacgtggtaccatttcatcatactatntagcattaaaggtatgctctccctatatctatatctttatgcacactatacaagcttacaactagttggtttagaataatataataactgtgattatatatataatcaaactgtagcgtttacaataatatgatttaataagtagatattacataacgtagtaataattatagttgtttatctggactcgctgaatgttaagacaccaaatgtcaacttccacatgttcctattgtcagtacctacact

SEQ ID NO: 283372 - DNA, 452 bp, Glycine max
  unsure (1)..(452): unsure at all n locations
gatatagataaagggagagcatacctttaatgctaaatagtatgatgaaatggtaccacgtacattgtctgtaacaactgttaaagtatccttgatactatgtcttgagtatagagataataacgacaagctcttatcagcccaatgcatgatataatttataattacgcagtttatttaatatcacccgtgatatatagctgattaataatattactgctaccagtgattgctttactagaagactattaagcttcatagattaataaaggttttgaatgacgaataacaggccataagctgaattaatctgttcattcttagaanacaaaagaaggtacatgaaccttacaattccaccatttgtgtgtcttcaccccttccaatcctacattggatctcatgacaaccttgagacatcttacatgacattcgcaccatgtctcagaata

SEQ ID NO: 283373 - DNA, 467 bp, Glycine max
  unsure (1)..(467): unsure at all n locations
agcttgcctcanagatgtccaggattgacaaggcggccgaaggaactagttccaccccggagtacgacagtcaccgctttatgagcgttgtacatcagcagtgcttcgaagccatcaagggatggtcgtttctccgggagcgacgcgtccagctcagggacgacgagtatactgatttccaggaggaaatagggcgccggcggtgggcaccactggttactcccatggccaagtttgatccagatatagtccttgagttttacgccaatgcttggccaacagaggaaggcgtgcgtgacatgaggtcctgcgttaggggtcagtggatcccgttcgatgccgacgctatcagccagctcctgggatatccgatggtgttggaagatggccaggaatgcgagtatggccagaggatgaaccggtctgatgggttcgatgatgatgccatcgcncagctgctatgtata

SEQ ID NO: 283374 - DNA, 403 bp, Glycine max
  unsure (1)..(403): unsure at all n locations
ttgagccaatatcctgactcaccataaaccttgacccatggtgagaatgtcaatccttaccctcggaagcaaannaatgaatagaggggaaatctccaatcaaagaacaagagatggaatatttccaatgaaagcataaaaagaaaagaaggaaaattccccaatcagagagtgtgagaaagcaaaaaaagaatataaatgacattcccaatcaatgagtgtgagaaagcaataagataagaaagaagttcccaatcaaagaatgggagatagagaaaaaaggggagaaaagaaggaaagaaagctcctgatcaaggatcgaaagaaaacagaatacatgtgcataaaggtcttttaaccagacaatatctgaacaatacagatattgtaccaaatgaacaat

SEQ ID NO: 283375 - DNA, 464 bp, Glycine max
  unsure (1)..(464): unsure at all n locations
gcatgcttatatcttatgtgcagagggagctgtcctcaccttctagtgtccaacactaactttgaccattgcccttacttaccgcaacgctgattatgatgtcttgctgagtgggcttatagactaaaccatacattccacgatttccatgagtattgatcaagctagatctgccggcgtgttattcctaaaccatcccggtttctaaccgttcccaacatatctcgggccataattaccgctgcatgtgacagactatggtgcccacatagggagtccacagaggaaatgctgaccacgttcaatgacgtggaagcagtctcttacgattcttctgcgagcttcaattacgcatggatgatggagcagttacctagatatacttctcgtctgacacgactaggctagtgctctccactacgaatntctgctattggtggattgtacacggcatgactcgcacg

SEQ ID NO: 283376 - DNA, 332 bp, Glycine max
  unsure (1)..(332): unsure at all n locations
acgaatgagaaaatggngcaaatgaagagggtgagaaagagggagaaacccatgctgtgactgccattcctatactgccaagttccccacaatgtcattactcacactataacaaacctgctccttacccaccacccagatatccacagaggccatccctagatcaaccacacagactgtctaccgcacttccaatgacgaagaccacctttagcacataccanatgaacaccaacaaagaggaattntgcagcataaaagactgtatgtgtcaccccaaattccgttgtcatatgctatactngatcccatatccactcaatatttcaatg

SEQ ID NO: 283377 - DNA, 445 bp, Glycine max
  unsure (1)..(445): unsure at all n locations
agcttgactattctataagctttnntttcgtaagcatgctcttccataaaggttntttgtatcacactctgaaaaggaagaaaatatacatattcttatttccttatctcattcttatttgttaggaggttgtttgtccttttcaatctactatctttctatatacttgatattcgtaatcacacacccctttttaatgtactctcttctacttttatctctaaattaattatagtatattgttaaaaattatcaataattaaatcaatattatataaaaaatctaatttcccattataaataaaaaatataatgtacatattaaaaaatatttatttattatatattctaatttaattcatacatttaaaatatttatttattatggtcatataanattaaatatctattttatatacaaattaacatactacattttaagagt

SEQ ID NO: 283378 - DNA, 463 bp, Glycine max
  unsure (1)..(463): unsure at all n locations
tatanatgcatcactnttaatattctctgcataanaacttanatgatgttaatntaacaattatntactcanaaaggagaaattagaagagaaaaattacaaattcctttataatttaaccctaagatatactcataattagcagttatcatccaccttcccttaacacaaggtcagtaagtgttgacttgccaccagtcatgtgcctagagtagccactatccaagtaccatagtgagtctcttgcttttaggaacacctacaagacaaaatcaattagagagaggtggtacctaattgtggttaggtctaacgaggttaatttccacaattaattctttaggagtccaaacacatttatctctaggaacaccaaatctcctaacataacatttataggacgcgtgtcctctnttcttgcaataatgacaagtatttacattaagcttaagatgaactatac

SEQ ID NO: 283379 - DNA, 462 bp, Glycine max
  unsure (1)..(462): unsure at all n locations
agcttgtagaatggttatacatgatacatgtcnagggttggtttggttcaaggataaaaaggatgtcccacattatttccatgacacanatgcaaaaatgatgatttggaaactttatgcaaaactggtcatgcatgcacctatgtggacactcaagtgtcaaatttttatggtcatgtgatgctaaggctcangattcatttcctctantttaaatcaacccaatgtttccaaaatatgttcttttatccatttgtgcattcatccgagtccatttcgggcgtncgggacaattttcacaagcgtcacccttcaggtgtatacacatntttcttcanaaatgtgtatgatcaatgatatttttcaaagaanaattggaagtcatctcttttcannaagcatgttgtttttcagctagacaacttaaattttctttcttctctcattttcctttctatcatt

SEQ ID NO: 283380 - DNA, 465 bp, Glycine max
  unsure (1)..(465): unsure at all n locations
gtgatcatgtattccgaaatatatggggataatacggatgcacattntatctatatacaattgtttgttgcttgcttgaatcttgatttcaggtattgtattgtcatcatcaaaaagggggagattgtagttgcaattggctttgatngtttgatgatgatcatgatgatgtgttgcaattgatgcatatgggcttttcaagattaaaattcaagacaatacttcaagattacaagtcacaacatcaagatgatcactagaatattaggaagggaattcctaattgaattagcaaaggtttggccaagtgatataaaataaaaagtgtttttcaaagggtntactctctggtaatcgattaccagaggatgtaatcgattaccagtggccaaatacgttttataacagctataatnaattgaattcgaaatttaaaagctgtaatcgatacacaattgtggaatc

SEQ ID NO: 283381 - DNA, 447 bp, Glycine max
  unsure (1)..(447): unsure at all n locations
agctntggacaggattgaatctccagtctctcaatactttttggtaattggcctttcattgacaagcacgatagctctgaacaattccaaatgaacaaatgtttgacagattcaagtaactcaccacttcttgatatgcaggtgagagatggacaccagccaatgtacacatactccaaatgagaaatgattgtgctaccatgctgtacattgtcatcatgcataattattgatgaagaagtgcatgttccattatccagtacacatctcaagttcttgcaatctgatatctccaatgatttcagagagtgaggcagttgatccattgtgacacagactatggaatcacagtgacatatgtacaagcgttcgagaaaatggctagtgaccattagtactttacgtatagacttcatgatgttgcaatatctaatctcaattaatctg

SEQ ID NO: 283382 - DNA, 448 bp, Glycine max
  unsure (1)..(448): unsure at all n locations
tgcctgtccgatgcagccgtaatgatggcccgagttatgttggngaactgttacgaacccgggatgggtttaggcaaagacaacggcagcataactagcctgataaacgccaaaggaaatcgtgggaagtatgggttaggctataagcccactcaggcagatataaagagaagcatcgcgggaaggaagagcggtagtcaaaactcgcagttgagacaagaaggtgaaggaagcccaccctgccacataagtaggagctntataagcgcgggtctggnggacgaaggtcaagtggtcgcgatatacgaagatggtgttccgagtacattggatttggtacgaccaagccctcctgatttacagctgggaaattggcgagtggaagaacgccccggcatttacgcgacgagcataatgtanacctttacagttntaaaagctctatagt

SEQ ID NO: 283383 - DNA, 421 bp, Glycine max
  unsure (1)..(421): unsure at all n locations
caagctttgaattttctcacaaatgcataatataagtttgctttagtgagctataattaacctaagacaagtactagataaagaaatgttttttatgataaggtggttattttttcacataattatgtttcttgaaatgttaaatatttgagtctttcttcttttggtatcatacatttaaaaggttctatgcctaactctaaatgaaacanagtttagtaatatatattttactaactntaatcccanagagttatgatgctaacacaaatagtttgttaagggataaaaatacccttcattcatagatatactaaaatcgttacaacctttaattgttgatatgaatctcattatagggagtcaactgcaaacaacaacttcgcttagaatntgaccaaaataacatcacaacaaataa

SEQ ID NO: 283384 - DNA, 426 bp, Glycine max
  unsure (1)..(426): unsure at all n locations
taaccaanagtaaaagtgataattaaaagtacacagtgaatattaaagagtgtangatagaagaagacaaacacaagatttatactggttcagccacaaatcatgcctacatccagtccccaagcaacttacggttcttgagatttctttcaaccttgtaaaatccattacaagccaaagatccacaagggatgtaccttcccttgttctctttgaaaaaccaagtggatgtaccctccacttgaactgatacacaagagatgtaccctctcttgttcaaagtataacaatccccaagtagatgtaccctctacttgtaccacanaggatgtaccctccaatgtgttgggacaaagaattctcaggcggttagtccttcgaatctttgtaaaggggaaacaaaatatatctcaggcggttagtcct

SEQ ID NO: 283385 - DNA, 326 bp, Glycine max
tagcttgaatcgtggtatggcgggggatttcatagctcccacgttcgtgaacggttaagctgacattacgatagatgaatctgatgtttctgaggaattggaattctgggagaatgcgatcattctttctgcactatgacagtctctgtctatgaatgcggtaagaattcatggagaagacctagaatttcatttcactcccagaattatttacaacgatgaacgttacttcattgtgaaatgtaagaacagggaatacatggagctggttatggaacaaggtccctatgtctttatggtaaccggtatttcttccatatggacca

SEQ ID NO: 283386 - DNA, 453 bp, Glycine max
  unsure (1)..(453): unsure at all n locations
tactaagcttgtctataccctcttgaaataaatggtagagntatgctgctcctcaaaggaaagattaaaggcattctataacacccctcccttcaagtatgaaaccattgatcaggttagaatgattaacaaagtgtaccctctaaccgaacatccaaattntgttgggtaaaatatgttttcggtaccaaaaaatattgtgaaattcaagcttagttagttataaaaatttaatagtttagtcctaacatttgagggcaagcaaagttgtgcttgattactagttggtcatgcgtttgaatctagaaatacgtaaggataagactgttaaaaatattcgatctatgttaaaatgtaaggactaaaaacttactatatataggaactaaatataacattntgaaatattttgtgggacaaacatattctatccaagaatntatttcatgcacc

SEQ ID NO: 283387 - DNA, 420 bp, Glycine max
  unsure (1)..(420): unsure at all n locations
agcttcattcttagtatgaagtaagtagagatacatatatcgtgaataatcatctataaaggttatgaagtatttcggactatttgcatccatgtctggacaacatatgtctgtatgtatgatttctaataaattagaactcctctntgcaccctttttagacttgttagtttgcttacccttaatgcaatctacacaagtctcanaatcagcgaaatccaaagtactaagtactccttcatttactaatcgcttgattctttcaatagagatatgtcctaatctccggtgccacaacatagaggattcttcattcacaatacatcgttntaacccaacagaaacgtgcatagaagtagcgtcattttgcaattcaatcgaataaagaccatcaaccaattgaccacaaccaataatttc

SEQ ID NO: 283388 - DNA, 452 bp, Glycine max
  unsure (1)..(452): unsure at all n locations
tgtagagcattgattngatactgcttacctcataatgaggctcatgatgtttacaatggaatgatcgtttgctaccctgcagtgagacacacacggatacacacacacgacacacgtaggagactaacgctcgcggactcagacacatacagcaactcatacacacacactcacgcagagtgacgcacacattaagacatagacaaagactccaacacagtgagcgacagacacactcagaggtccacacgcaatgacacacacactgagtgacaaacacacagatacgcgtacacactcacacacatggacagacacacacactcgcacacgcataaagagacatacactcacacacacatagggagacagacacatagacacacgcagatgaagagacaaacacagactcacgcactcacacacagagtcacacacacataatgagacag

SEQ ID NO: 283389 - DNA, 428 bp, Glycine max
  unsure (1)..(428): unsure at all n locations
agcttgcttctacagtagagacactcatgtatctgcacctgtccatggtggttggccgcctgctggtgaactaaatgctgtagataccactccacacccagtggcccagccgaattaacttgccgaggtggcggtggtgcgcccgcgtcctaatgtgcgtcaccctgcgcctgcctaggagtgcagtacttctcgatgaaggctcgggtgatcggcggtcggattaccttgctgggggtgacaggaactctgtangactggcagaggcccctgatcagtgccggaaaccccagggcccttgtggacttctctgggtctagagggtgcctagtangcgccattcctacanacaaataaatggcatcagcaatcacctangcgacgtgaacgttcattcgtgtcaagatggcatacaccaactggcactt

SEQ ID NO: 283390 - DNA, 466 bp, Glycine max
  unsure (1)..(466): unsure at all n locations
tgggttggatgttgaattctggttgttcctggtgcggatatgattgtacagcgggtgaaccaggggctgaagtctcttttggtgaggtagccatggaaaagcagagcgtttggaatggtttagcaaatttctgagagctgttgggggatgctgaatacgagattatcacgaatatataagtttgaatgaagaatgtaaaaggccgtgtgaagcaacggtcgaatttgctttggttcagtagtgaacgtgctattaatgttaggtgattcgtttgggcacgtcagatatcagtagttgctacaattcctctagcagacaaatgcccagcttgcccctcagttattcaaactgttntgcatccaatgcctttgtaaaatatctgctatttgttcctcagtggtcacatgctccagtgtgataactctatcatcaacaagctctcttgatatagtgatgtctgatgtca

SEQ ID NO: 283391 - DNA, 389 bp, Glycine max
  unsure (1)..(389): unsure at all n locations
agcttaagggtaacttatctatcaagaagaattcttaattgctgattntctactaacagagaggctaggaagttacagccactcataggaaattgattcaattgatacttttagtgtaaaaaaaagacaagattaggtaattaagcacagaaccatntagttgagagagtaatcaaatcaacgatatgtgcatgctaattagggataactcccgacttagactgtcaaaggctaaggaccctatcaaaatacataacacagaattactcatgctcattggtccccctccaatctggttactccctctcctctgcctcttctacagactcaaacaagtcatcccagtcagaaattcttgggttgcttacacagatngtcttctccatatg

SEQ ID NO: 283392 - DNA, 400 bp, Glycine max
  unsure (1)..(400): unsure at all n locations
tcttcagttatgtcaacatagtctcttttcaacatcatttaattgttgtactgatacattctactaatatatggagttggtcacttgtttgcctgaggatgacaaatactagaccataacaatgttagagccggtaaaggacaatggtcttttaaataagcatgttatacatgcacaaacaatcttacgttattataacacaaatgattgcatacattaaaaataggattatcttgaatctacctgaacaaaatgaatgtcatagatgtgaccaatgcatantttgcgaagcacagaagaatctgttggtggttgacttctaagaggaaagaacgtcatgcttntgtttagagacaacgatacaaggattacattataccttgatcaatgacatatctca

SEQ ID NO: 283393 - DNA, 384 bp, Glycine max
  unsure (1)..(384): unsure at all n locations
agcttaagttgacggttccttatataaggctagtttgtttatatattaaaaagaaagtaatttataaaaatgtttntttataagcgcctatttaagaagtagttaagatctgtttctttataaaacaaaaaaaaaaactgcttatttttattaagtatatgcagtttaaacaaaaacatcaaaaaattataaagctacttattttgttttaaaaagtaattttttaaacataaataaactagcccataagaccataatgttagtgtaacgttggcccatttgcaaatattaataatgaatagttcataatctctaaataaatataatgaaattaatataaagaagaattatctgatattgatatgagtgatattgagtttgaat

SEQ ID NO: 283394 - DNA, 469 bp, Glycine max
  unsure (1)..(469): unsure at all n locations
aattatgagacgaattcgagaccagcttaactttcatgggactcgacaatttcctctcatataattacgatttttctatcttatattntataagtacacagtttatgttggagataatttctattgtgaatttattatatcaaaagtacaaaaataatttgttatattgaaaagttntgtttctgtttcttcgactcatgtaactaatacacatgacagaaaaacataatcttcaccaagaccttaatatgttgctatctacaactagattaaagcatgatgacaaagtgttgctagcatattatgtgggtttgaaaattanaataatgattgaagtgaacatataaataggaagagataagaaggttcatgggatccatanaatagcgatcgttttcaaattctctatctccatgctcaaaaagctaattggcaactagatgacatttggcagaacaacgacacatgg

SEQ ID NO: 283395 - DNA, 464 bp, Glycine max
gaaacgtatagattctaagggttttaataatattacaatatttggatgcattagacttgtactgtcctctggacaaatggaattagtaatatatagcatgagtgcatgaggtgacagttttgatatataaataataaaacctatagggtacatcatataaaacaaaacaacaaaaaagcccccctcaaagtggacacatgcatgccaaatatatatatatatatatatatatatatatatatatatatatatatatatatatatatatatatatatatatatatatatagtttgcacatagatattagataatattatagacatgaatctatctaataatctctccgtagagctcacaagacagatggaaagaagagataaaactcacatttcattttttctgtctgcacataagtaacagagaacaattgtatattataagttaacaattatgcttttctctt

SEQ ID NO: 283396 - DNA, 366 bp, Glycine max
  unsure (1)..(366): unsure at all n locations
aagtttggttaanaataagtttaatgtaacttgatttatatctggattctgtttacgttcaacaggataacaagagaggaatgattttgggataaatttcagtttgattgtataaatcacgttcaactcaactcaaaagaatagcatgttaaacaagcggngcagttattatgacgggcggatcttanaaaatgagatattaaaaacaaccattttcacggaattactttattgttggtaacagattagacagggataaaactaattatgagatactaatttgaataatttctagtagaaaatgtcatagactaaaatattaaatacagataatgataatatacatatggattntgaaagataaat

SEQ ID NO: 283397 - DNA, 468 bp, Glycine max
  unsure (1)..(468): unsure at all n locations
agcttctgcagtttgcagagctaaatcctctgttggttcttccttgtaggtacttgatgtaaatacatgtatatctatctaatgatgttttgtgtattcactgtgctatcagaacttcattctaccatgtttttgccttgatcacgtagatgcatgtgtttttaggatcattcaaaagtggaaactggtttgattcttagaataggacaaggctagtttatcgtattatcacgagggatcggngtacgataatctagttgttgtatgtttgtcttaatacggttctggtcgagtttagtccaacaagaggaatctgcggacgatgcctgatcaggattangctagactatcatgaggaatcggngtttagcatttcaggagacaccatagaacacatagtagagaatattcttttaacattatgcacgtattaggaaaaccaacatgttacctacttgtctttacaca

SEQ ID NO: 283398 - DNA, 483 bp, Glycine max
  unsure (1)..(483): unsure at all n locations
tgaggagggtaaatgagaaaagatacatttataattggtgcctgctattagtagataatgctaccaaggcttgtggttaaactaatataatcactgtgtgctttttcttttctttaagcttctcgtgtgtagttactgcatatttattntaatttatgagaaatcttcatgttaaaacaagactaacttagttcatgcaagagaagatttttcatagagtattcagctccagaagcagagcctacgttntttataatattaattagagaaaaaaaaattgaacttttgaaaagcagtttcttataagacacttggtttacttataataattatctttcaaagtataagagagaatttgtgcagagaaaaccatattcagtaatcagtagaaagtataaactactatcaagaaaaatagtgcacattcggaaacacgaagtataagaaaagttcanatttagaatatcacatatccatttattc

SEQ ID NO: 283399 - DNA, 512 bp, Glycine max
  unsure (1)..(512): unsure at all n locations
tgaaaaattgaaaccctgaaacccgtcgaanatgcgacactactagatagtaagactcancttagttgacactgatccatgataatgaaccgaagtgtttaacattattattcaacaattgctactaatactatctgaagcctccccgttgatgtcatccgaatcatgctactaaaactataagaactaccaaaactaaggtcaacatgtcaatactctacaactaggcaaaccaatttacctttatttgtacagtgtattaacaatcctgtgagctctcatccaaatttcctgaatgatgagtgaactagctcttgtgattagtcatttatctacaacaggtacaacagtgaaaaccatcaatataagataaacgccatgccaaaaaagataatgagattacgacccaatgttgtacatatcttcacaatcattaagatacaggatccatatatcatggatgacacgtctcactaaacaatgatcatcacaaacttgataccgctcgaccn

SEQ ID NO: 283400 - DNA, 448 bp, Glycine max
ttgtttctattagtatacagacagattatgcggctaatggaaccagcgacgctgccgacaatgatggccatccgtttgagagtgctgaacacccacctctctatgaggccatcagaggatggtcatttgcccaggagcgaccctctcatctcagggacgactagtataccgactgtcaggatgatatagacctcctccagtgcgcatagcttgatacacccatgggcccttcgacccagacatactcctcaattctcatgcccatgcttgcgccacagatgatggtgtgctagatatgctatcctgtgtagagagtcatcggattccatctgatgcggatgctcttaccagttcctggatattcttttatgctggagagggcaacacatcgagtatggcaaggaaaaccggcccgtggtctgttatgtgccatcgccattcttggacg

SEQ ID NO: 283401 - DNA, 443 bp, Glycine max
ctgctgcgagcatctactgcagacctactcaaccttagcagtcgaatctttcacgacatatcattgatgacctctccagtaacaggtaccatcccgggtggacgaatcataccaaccttatatggtcgcagacttcacatctatctctacgtctacagcagccttatcttcagaatgctggtggcccaataagaccatacgttccttcaccgactagcatctacaacatctcttgagtccataacagcaacagtgagcccctcgcaccttccttgagaacttggtgcaatgactatgcaactgctgttcacggaaccaatccttatcagacttactactagatggcaattggatccagctaataacactgtcccaatctgcagatacttttaactgccgatcctgaatggataccatactttgtcagaagcatgcatgactct

SEQ ID NO: 283402 - DNA, 355 bp, Glycine max
  unsure (1)..(355): unsure at all n locations
agctgttacttgagtcatcaagagattataaatatgtgaccatccttgaatcaatctttcaacatccttgaatcaatctttcaacatctctcaatattttcttttatctctttcaacactttcaaaagaactttctaattgatttctcttcatcattctaaaagtttttgctcaacactctctcttccaagagaagttctttgataaaaaacttgtgctattcatcattctcattctcttctccctttgccaaaagaacgaaggactaaccgcttgaattcttttgtgtctctcttttcccttacaatagattcanaggactaacctcctgagaattcctttgattcttcccttc

SEQ ID NO: 283403 - DNA, 472 bp, Glycine max
  unsure (1)..(472): unsure at all n locations
ggcctcanagagatctaggaaggacgccgcggccgcagggtctagtgctgctcctgagttcgatagccatcgtttcaggagcgctgagcaccagcagcgtttcgaagccatcaagggatggtccttccatcgagagagacgcgtccaactcatggacgacgagtacacggatttctaggaggagatagctcgccggcgttggacgtcgctggtcactctcatggccaagtttgatccagatatagtcctcgagttttacgccaatgcttggcctacagaggatggcgtacgggacctccggtcgtgggtgaggggccagtggattcctttcgatgcagacgccctcagtcagttcctgtgatatccgctagtattggaggagggccaagagtgcgaatacggtcagaggaggaaccgggccgatggatttgatgaggaggccatcgctcagctgctatgcataccatgtcaa

SEQ ID NO: 283404 - DNA, 439 bp, Glycine max
agcttgattcttctataagcaccatgagctaaccacaaatccatcaccataatgaagtcacacctaccattctaaaaacttaattccattccataacgaccatatatagggaccaaagtacaacattccatatcaccatctaaagagaagctcaacagtgttctacatatgttccaaccaagcacacacagacgaacatgtcattaacacatattataagcaaacatagataggaagaccgcgaggtggaatgagcgagggaatatgaaccttacaaacgatgagagagtgaagctattgtgagggcgagggcatgcaatgatgacgacaataacacacacgagcttcacaactacactggaaacttcgaataaacgctgtttgaacatcccatttttcgtaaagataataataaatgaatatagagcaataatagact

SEQ ID NO: 283405 - DNA, 476 bp, Glycine max
  unsure (1)..(476): unsure at all n locations
tgtacgattataagaaacatcttcttcgaccttggtgatccttgactctatctcatcgaatcgcatgtccacttgtaactccagagcatcaaacctttcaccaacaaaggtttgaagaccatcgaacctgtccaaaaccttttgaagaagagaggaatcttcttcaccatgtaaatgtccttcttcatcaatgggttgagcaccctttttaacccaagagccatcatgctctttacggtaaccaaaggatgcaatcacagtagcaccgattaagaaggatctcttgattgaaacataaggttcataatcaagagggatgttatagtgtttatggaagagagtgactaggtgtggatatggcaatggagcatttaatcccaatgccttatgcatgcgatattggactaagtgtgcccaatcaatntgtcggcctttatgaaaagcccacattacaataagatcttcttcagaaacct

SEQ ID NO: 283406 - DNA, 419 bp, Glycine max
  unsure (1)..(419): unsure at all n locations
agcttggatttccttttagtagggaatctatccttcctaagatggagccaaacccagtcaccctcattaagaactagctcttttcttcctctattgcctttagttgaatacacctttgtttggttctctatttggttcttaaccctctcatgcaacttctttacaaattctgacctagattccccttctttatgtataaaagaagtgtccagtgggaggggaatgaggtctaatggtgttaggggattgaacccatagacaacctcaaaaaggggactgcttggtggttctatgaaccccccctgttgatgcaaatctatatgangaagatactatcctaagacttatggttgctttcagacgacccttanagggtggataaaacctattactacctttgttgcccatcagttatggat

SEQ ID NO: 283407 - DNA, 458 bp, Glycine max
  unsure (1)..(458): unsure at all n locations
ctgtanggctaaagtctcacgaatgtcacgtgttgatgcaataattgttattcgtggctatacaagacatcttgccagacaaagtcaggttagccataactcgcctgtgctttgtcttccatgccatatgtagcanagtcgttgatcctatcatgtttgatgagctggaaaatgaggctgcaattatactgtgccagttggagatgtattttccccctaccttctttgacatcatgattcacttgattatgcatctcgtcagagaaatcaaatgttatggtcctgtttatttgcagtggatgtccccagttgagcgatacatgaagattttaaaatgatatgaatatctatatatccagaacatctattgttgagaggacattgcagaagngccattgaattctgtcagaatacatcgagaagctaaacctgttggccttctaagtctcagcatgatg

SEQ ID NO: 283408 - DNA, 376 bp, Glycine max
  unsure (1)..(376): unsure at all n locations
tagcttgtaagatctgcaagatcatcttccttgacaactccttgaaaattattgccatcaatacgcagagatgacaatttagagagtgatccaatactttcaaatggatttccactgaatttattaatagacagatagagatatcttaatgatgaaagctttccaaatgatcttggaagagcaccaccaattaagttgttggaaaaatctagcatgtctatatttttaaaagccccaatttgatctgtcagattgcctganagttgtgaactctgatctgcaagtgttgtgagtccatgggatatacaatgagcaagaatttctgaaagtcattaacctggtggctgagtctgagatatgataaacctatctccct

SEQ ID NO: 283409 - DNA, 271 bp, Glycine max
aacacaacttgagaatagagctgaccatgctgctgctgctacagaatatggaataagtgttgctcagtccctgacagagaaactatctacagtttctggactagatgctggtgtatgaagtggtgtgaagtccacagtttctggaactcatactagtagtatgggtgtggaacaggacaaggtggtttctgagaatgactatttggtggacatactgacgcgtggcgatgaagacaggtctctctctgaggtgatatcagatactctgcac

SEQ ID NO: 283410 - DNA, 180 bp, Glycine max
  unsure (1)..(180): unsure at all n locations
agcttctccatgtntttgaaaatggtttccggggcttccgtaatgctttcgtaaaatttccgaanatcttgngtaagcatattccacttaacattggtgaaagggaagagaaaaaagatgaaaatcaaatccgaaacacttccgtaacttttccataaaatacgaaaagggggggggggg

SEQ ID NO: 283411 - DNA, 484 bp, Glycine max
  unsure (1)..(484): unsure at all n locations
atntgctgcatacattccttttctggagggcgaattctctgnctactttttcaatttatacccacnanacatctcaaccggctcgagctagaggcggtcttcgacattggatgcgcggaagacaggctttgtggtagacttagggatggcccactgggataactgcccggggggaagggatacttcttcaatagtggcgcgcaccctattttacgcgagagccctcatgctctttaccgtgacctgtggatgctaacacatgagctcccactctaaaggatctctcgaccgtcacacaacgctcataactcagagacatgtcatactgttcacggtacacagttactacccgcggtattcgctcaggagcatgcatcccaatgactctgcatgccatccgccttattgcgcccgcaccttcctgcttctctantcgccctttacataaaatcctcctctaacctgtcacagcctcaaatttccc

SEQ ID NO: 283412 - DNA, 462 bp, Glycine max
  unsure (1)..(462): unsure at all n locations
agctnttatgaccactatgtatttgtgtttacgattgctaagacaactntatattntggtattatttgagttctagaagcttttattctttgctttgcggaactgatatctatgacccttcattnttattaatttcttgagcaaagtaatgcttagcctagctaggtatatactttaactaatgtttggttntcttttatatgacagccacaaaatgttccaagaataggccattattgtgttataatcaaagcgtattggcctaaatgattatattgtatataggtggcaaccanaacaaatggtattttaaaaaaatatcactttctaagtcgattctattggtaaccgtcttagaatgtaggccattctaagacagttctagcgccaagaccgtcttagaatggcatacattctaagatggtcaccaagatnacccatcttagaatgtatgacattcta

SEQ ID NO: 283413 - DNA, 473 bp, Glycine max
  unsure (1)..(473): unsure at all n locations
cacanaatctaggtatccaaaaccnctcaatttaatggattntcaaggtttgagaagtgaaattgagaatggngtaaatttggagcaaactctcacctcacacaagtctataacatcaatttaaacttgttcaaactggatttacacctaaaattccaccgaaccaaaatttgactcctcaacacccaattttaccctagaaatggctctttgttcactttggtcatttggttttctctctagcacagcccaaactttctcataagtcctaaatgacatttcaagctaggattaactcactttaacctccaaataccactaaacccagatttggccttccaactctcaaaacctcactctttntccactcataacaccatattctcactnttaaacttaggttaactctacccttcatctctaacagttntccataagcaatttcagcacataaacatcacaagcatcatcat

SEQ ID NO: 283414 - DNA, 409 bp, Glycine max
  unsure (1)..(409): unsure at all n locations
agcttgagagatntatgtaattttataaaatttccaggataattagtgtaatttattttatactttntgaacagcaaccaatataagtacatttttttatttttaatcattatctaaacatggtatttttttttaaagatgaatgtgataatttgttaataatatatgtattatataagaaacattaaatatgcttgattaaacatttcaaattaattttaaattacacattaaatgtttctaagtttaataaatgtgcattaataatataaacattaaaaattgattaatttatataaagaattttacttatatgaaacttttacatgtttctttaaagaggcatgtattgtttattcaatgaattttattccttccaacatanatctatctttttgttttaattacc

SEQ ID NO: 283415 - DNA, 440 bp, Glycine max
acactgagaatgtttctcactatattaatgcttatccctatgactatattatttattccgagaaagaatggtcaacttgcaaaattccaaagtgagtttgctactattgcaaaattttggtgaaatattggctaaatctatttataaaactgtcttaattcttttatgcagacctgctatgtcaaaacacttgagcatttgtgatcgctgtgttgcacgatttgatcatcactgtggatggatggttagtaatctttgaaattcctcctctttatttgtggtggtctcatttaatatatatcatgtgtgtgtctggagatctactaaaagttgctttactcacagaacaactgcataagggagaaaaacacccagtatttcatggcttttctattatggtgagttctatattcttacatgagtatcatttcatggaatct

SEQ ID NO: 283416 - DNA, 454 bp, Glycine max
  unsure (1)..(454): unsure at all n locations
agcttatgttctttttaattatttataatttcttgtctctcttatttattattttgagatttcatatattattattttttaataagaataaaattaaaaataataatcaatttcatctttaaattttaaaatgacaagtaaatgtttttttttcaaaagcgacaaataaaaaataaaattagtttcaaatattttttaagtaaaagaaagctctttattctatttttgacacttatacttgaatatacactaaaaaatcataattttgtataaaagttgcatcatatatacttgaccattcttttttgttttacttggtgatcgactccaatttatattacgatattattctttntcgtaagtgtctggttagtttatgtcanaattaattttgttaagattaatcttacatgattgaatataattaatatatacttaanttanatcactatat

SEQ ID NO: 283417 - DNA, 460 bp, Glycine max
  unsure (1)..(460): unsure at all n locations
ntcaccagatcatataagataaatgcattcaggcaatctgcagacatattctcccatacgtcaaattctccgcctatatattcaacctttccatcactggcacgtggagtgaatcttcctccatggtgcaatattaaagttatattgtcattcattctacacaatcagaaaccacaaacattgtcatatattaggaaataaaaaacctaactcanactcaaacataggcacatcacacaacaacatgcaatgtcatctataaaaatagagcatcatanacgaaaataataaaggaccataaacctccctacaaagcacgaagacaatgcatatgaaaccccttgaacatataaaaccccatatgaatccaccaaaacaatgcatatgatatgaacgcataataaccaccaacctgactgccaagcgcgaacactcacaatcaccgacaaagagaatatag

SEQ ID NO: 283418 - DNA, 432 bp, Glycine max
  unsure (1)..(432): unsure at all n locations
agcntttacactggatcagataaatgaggcatgctatatcgacatgaaggctaacaaagatgtcttttagaatttgaggaaaaacccanaagtcaactatgatgggcaacaattatcttacaaggttacttttattcatatgcatatatctgaacattttactcagatgttcctttacaaaataacttattcttattcattttttgtttgcttttggtctatagtcaaagtatggtattgaggacaaaacagagcttcttcaactggtatgaaagtatcccgagggccttgttgttattgacctcaaggatgcttaccccactgtgatggaagaattgcaggtagatgcctaatattctttgcacactttntttgtaaatgttgcattntgaatntatgacactgtgatgtcaatttgggagttattaacct

SEQ ID NO: 283419 - DNA, 503 bp, Glycine max
  unsure (1)..(503): unsure at all n locations
ntgacaagacagtacacactgctgtcttcttcaacanaatanaatagggttatctactctaaagatacatctaataatacccataattataataattaggattaggtaaaataaaataaataacattattaggtgctcttgaactattatatttcgattagttttcacgtgatatataattaagagttattgattctttctttagtaacttacaaaatttcttctgtaaaaaaataacttaaattntttaaatgtgtcatataaaaagattgattcatatcatgaatacgtgggtggataaagatcacctaatagatttttctattcaagagtagtgagaaaatttaatttaagtgacctataacgtcttagttataagttntgtacttaattatcccaccanaaatgaatcttattttccaaagtgagtattattcaacatatgattaagggtatatgtgagtgaatatttataaaaaagtaactttgactcagtgagtttg

SEQ ID NO: 283420 - DNA, 408 bp, Glycine max
  unsure (1)..(408): unsure at all n locations
agcttgagtcatggtcaaggtttctttgatgtagaaatcaatgtaaagacttccaggcttcaattntaaaatagatggaagatcacattctctcaatagattctccaatcctgggatgctcctgagcactntatccatatcttctgcattttaagtccatcatgtaatcgtcaaacttctaagcttaatctgagtaatgtgttaacaaaactaatcatcaagaattgaagaaagcttctgctaatcatcaccagatttaattaaantntaacctataataaaattgacttaatatcatttatgattaaatgcgtgtatgttcttatcccactcttgtaaattaatataaattaanatatgcaagaaacttccaagaattatacttttcttgaactttcgcttcactat

SEQ ID NO: 283421 - DNA, 426 bp, Glycine max
  unsure (1)..(426): unsure at all n locations
tgagttcatcttgtttaacttatctgtaacctatcgttgtttgttgtgtgaaattttccttaagcagttnttaactgtattaatttagtatttaatataataatttaataatagataataatctataggactaattatgtttttggttattatacttttttgcaaattaaacgtttagtttccaaaggaaatttataacattttttgtcctatatttttcctctatgaattattttagttttattgtcaaataaaacttataaattaataacattaaaattatattaacaatctaatgacttatcacgtctttaacgagtgtgatgaaacattcacatgtaatttatttttgagcaaaatatattgttaattcccaattaatcgatgttttatttttaagtctctaaacaaaaatttatctaattt

SEQ ID NO: 283422 - DNA, 375 bp, Glycine max
  unsure (1)..(375): unsure at all n locations
agcttgtatggttatatgtctacgatngtcacgtgctcatgcaacaattgttagccatggctatacgagacatcttgcccaacaaagtcaggttagcgataactcgcctgtactttntcttccatgctatatgtagcaaagtcattgatccagtcaagtttgatgagttggaaaatgatgccgcaattatactgtgccagttggagatgtattttccccctgctttctttaacatcattattcacttgattgtgcatctggtcagagaaatcaaatggtgtggtcctgtntatctacggtggatgtactcggttgagcgatacatgaagatcttaanagggtatacatagaatctatatcgtccagaagcatcta

SEQ ID NO: 283423 - DNA, 426 bp, Glycine max
cgctgtagtgaaatactggtacattcggaaggccagaagcgttgtgtagtcctaagtcatgtgggtagtgctgcagaatatagagatttgcggaccctctttatgggttggtcagtgcaactaatttagctgctagggttgccaatttggctgctggaagcaattttgacgcatgcataatggagcgtcattggtgtttgatattattaggcatgttacctctcattctagcaaattggagcgtaatgcctctatttatacttatataggggtggggcattttgggtaatgtattcgacttatagcagtgctttataaccttcttagtcgtggatgtcatattgtggtcatagtaggtatacaatttttatttttttattcacatatctgcaaaaaaatcatgcaataactgaacttaggtcaaag

SEQ ID NO: 283424 - DNA, 457 bp, Glycine max
  unsure (1)..(457): unsure at all n locations
agcttttaactgaatttgcaacattccaattggtttttaaatggtgtaatcgattacaatatattggtaatcaattaccagggtatctaaacgttgaaattcaaattcaattgtgaagagtcacatcttttcataaaatgttntgtgtaatcgattaccagtgacaagttttgaataanaatcaagagatgtaactcttccaatggttatcaagtttttctcaaggttataactcttccaatggttatcttgaccatacatgaagagtctataaaagcaagaccttgacttgcatttcaataactntntaacaattctttagaataactnttgagaaacctttgctacttattattcttcttcttcttcctttgccaaaaagccttctaagtttctggtttccaaccttgctctttcacaaaaaacaaaagtgtgctatatcttnttattctcttct

SEQ ID NO: 283425 - DNA, 487 bp, Glycine max
  unsure (1)..(487): unsure at all n locations
tgactcataccanacatgacaagtntagcatgctntcatcatatttcttcacaaataactatcataaggcataaacctagtaaaactacccatcatatctcccaaaacccaatacccacgaaaatttatgtgagaaaaagtctacccaaacctgaaatgtgaagtcccacaatggagaggtgcgcttcacgactccgaaaatggctttttttcgcgaattggagcaaaaatggtgtacaaaggttggagctttgatggagcttcaatggtgaggaagaagaaaggaatagcaacatgagaaagagagggagaanagcttctgaatnntattttttttgtggctgagtgaggagagagagaacgtggcttgtgtttaaaaggcttcctcttttttttttttttaacaaaagatgtgccacatgtcttcttttgagtggagcanaaagggttcattttttttttcttgatgtgactcatactcagtcac

SEQ ID NO: 283426 - DNA, 440 bp, Glycine max
  unsure (1)..(440): unsure at all n locations
agcttctggtgggacatcttgacttgctttccaatctgacattcaccacagattctgccttcttctattgtcagattgagaatgcctctaacagcacctttgtcaatgattttcttcatgcctcttaagtgcagatgtccaaatctttgatgccatattttgacttcatcttctttggaggatagacatgtggaggagtaactggtttcttgaggtgtccataggtaacagttgtcctttgatctgctgcccttcattagaacttcactcttctcatttgtcaccaagcattctgactttgtgaagtttacattgaatccttcatcacacaactgactgatgctgatcaagtttgcagtcagtcccttcaccagcagtactgtgttcagactatgaagtccatcattgactagctntcccattccagtgatctttcctta

SEQ ID NO: 283427 - DNA, 498 bp, Glycine max
  unsure (1)..(498): unsure at all n locations
nttcactcggagatctgattcaggcgcataatatatcgagacgcttgataatgaacaacggaagctctcgagaaattccaatggtcattacctttaactcggaggtctgatttaggcgcataatatatcaagacngctcgaaatgaacaacggaagctctctagaaattcaaatggtcataacttttcactccgaggttcgattcaagtgcatgatatatccagacgctcgaaattgaacaatagaagctctcgagaaattcaaatggccataacctttaactcggaggtccgatttaggcgcataatatatcgagacgctcgatatttaacaatggaagctcttgngcaattccaatggtcataactnttaactcggacgtccgattcgagtgcanaatatatcgagacgatcgaaattgaataatggaagctattgagcaattcatatgatcataactnttcacttggaggtccgatngaggcgcataatatatcg

SEQ ID NO: 283428 - DNA, 460 bp, Glycine max
agcttcttgagatgcctttcggttatctcattataggctgtagtacagtctacaatctcattagaaatatcgatattgaaaaaaacaatgaatcttgaggtcaaaactacatatggaaattcataatccaccagtcgatggatgttcaacatgatatcttcaatcaatagtgcccaattcatttgaatacctgatttcatcctatatatgatctgcaagtcatcatccgtaacttgagcatgattgctggatcttattgctagaatatatgtcataatgtataccaacattgtgtcttccgctgtcagaccaccaacaccaaatctattgcttgaaatccttcctaggttaagaagcatacctctgtatgtggccactttgctatagctatccacagattccttaaacttgaggactccacccatatctattcctactactgctgtccaaactacaacat

SEQ ID NO: 283429 - DNA, 428 bp, Glycine max
  unsure (1)..(428): unsure at all n locations
gaggtacaagccctataggcagagcttgaaagagcccgggtagtcgaagagaagttcaagtccatagccatcatagtttgaaaagagtatgatgaactaagggacgtcaatatggccaccgctgaagccttggaatgagaaaccaagaaggcccgaaaggaagaacacgaccaaaacaagttttgaggggctttatagggcagcaatagtgagctcaagctccgaagaggtgaaaggaatcatcacgggtcaaaggcatgatctggaaggacgagctanaggcttgccttaggtcgaaaagaaatttgtcccaacagttaaagcgagactgaagggaatatgtgggccatcatcgataagtgcaaagagaagctaaatctagcggcgactcacgagcaaaggctagaggatgagtacgccaagatatc

SEQ ID NO: 283430 - DNA, 445 bp, Glycine max
  unsure (1)..(445): unsure at all n locations
agcttgctgctgtgtgagagttntaatttgagaattgaanaaggagtctaaaggttaaagagaaattntgaccattaagggggcaatttttttttaatttaccaaacgggaacaatttttgaattatttaccaaatttcataagtcatatgaaatgctactaccattttaaatacaaaagttgtatattttttagacttttattttttaataaagtcgtatagtcatcatgacttttcctatatttgtttattgaaaaacatacaactttaaagtcatgtcttgtcctataacttcaaagtcgagtgttgcctatgactataaaattatgcaattatntattntctattctctaattttgcaacttattntggttctaatattatgaattattatttgcaagtttttctttcctaatattatgaattattggttggaaacatatt

SEQ ID NO: 283431 - DNA, 450 bp, Glycine max
  unsure (1)..(450): unsure at all n locations
acactatgatactcagctttagccnatggacttaccttgaattaattcctttgatagcccttttgagccttgtttccctttccttgatctgaagctcactacaagccttaagtgataaaccatgatattaccatatccttaaggaattntggagctttggaattgttttgggaataagtgtngggggtatttggttcattggacaacttgttatgttggctatgcttcatgatgtattttgggccatacttgatgaacattgtatattggttaaatgttggacatgctgaatgaaatgttgtttctcataggctaaagagtacataacaaaaataaaattcgaataaagaaaaagacaagcagtaaagttgagtgactaagatcttatatggcacaagaatgatgaaactcttggttctactcttcatgcttaattattatctttacttc

SEQ ID NO: 283432 - DNA, 103 bp, Glycine max
ataggcgtgtatcggcaacaataactgtcttatagaattacgccctagcctgcctttatcgaataactgtagtatccatatgcattcacggacaggaagtacg

SEQ ID NO: 283433 - DNA, 428 bp, Glycine max
  unsure (1)..(428): unsure at all n locations
agcttgtacgcacatcgttcgcgtgtatgatatccactccacaaggtttgaagtagaggagagcttcaaccctataacgcaacgtggcggacaaaagtgggcagtaaacttgaatgatcgtcattgtcaatgcggaaggtattctgcgcttcactatccatgttcacacattattgcagcttgtggttacgtgagcatgaactactaccaatatatagatgttgtttatacaaacgagcacatcttanaagcttactccgcacaatggtggcctcttgggaatgaagcggctattcctccttctgatgacgcatggacacttatccctgacccaactacaattcgtgcgaaaggtcgtgcaatatcaacaaggataagaaatgagatggattgggtcgaaccatctgagcaccgaacataatgtagta

SEQ ID NO: 283434 - DNA, 391 bp, Glycine max
  unsure (1)..(391): unsure at all n locations
tactcagcttaggttgctcattgactccagattgctgcatataaggacaaagatctgaatggtgatctatagaagaacatagaccacagactcttgcaacaggtgtagatttctgattcatggcaagctgagttactaggttgaccaaggcatcaagttntctttcaagctttgtattatcagtagatgaagatgaatccatggccacctcatggactcctctaagaacaataatatcatttcttgcattgaattcgtgggagttggaagccatcttctcaatcaaattcctagcctcagcaggggtcatatcaccaagagctccaccactggcagcatcaatcatactcctctccatgttgctaagtccctcatagaaatattgaagaag

SEQ ID NO: 283435 - DNA, 895 bp, Glycine max
  unsure (1)..(895): unsure at all n locations
cccctccaaccagcgactccgnnctcntnnntcctctccgtncntcttgcggacacgatnanagncgacntncgaatncnttgnactgttacaaagngtacgaataaactgatgcacntaaactnnntnnncncaacgaacggcagtagnaganccgttggacgnnccccntttggtnanntacngcctnctatcgacatnncnccancanncgnnancnncanannacncnncgtcaccgnccgaccgtganncacngcangtnaanacgntgcgccactcntacatngttcnctacatcgtcgtcttattatgtcatatgtatagttatagtgacaacctctaactcanagcaacgcgcgggggacgaatactcgcgctgacttgactgatgacgcacagcacatgcaatatatctcgcaacactcctacaacagagttatgacagcaacacgtccacactgatactcagagatgaacgcgtgataccgccgtgagcgactctctcgtcanaagacacataccgccgacactcgtcgacgctggctatcgccgctacagtcgcgccgccaccacaacgacggtacacgacgagaacgaccgctcactnagccgtcatattgaagtcgagactacaagccgataacaccgagcacgacgcgatcggcggcangactgaatacaacaatctctaagtatcatacaanatattcctcaccgcagtcagcgcactgcgcgcacacgtgacagatgtcttatgatatcggcggagcgccactcgctctaatggatcgtcgcaacgcggctcaagcaagatgcacataccggcgtcgcgcgcatcgaggcantcacgataccgcgtcacagactacccgatcacgagcgcagaaatgcg

SEQ ID NO: 283436 - DNA, 676 bp, Glycine max
  unsure (1)..(676): unsure at all n locations
ctcccgacgtgcctctcncacntctcnactctnnctacactntagcacntactaganancaaaantnnncnnacnnnnccacccccacatgagagagtttgactgcctttgagaggccacgtgatacacaacctananacanancanctgacacacatcaatacagatcacactctcagtcgaccacncgcatcttttcttatcntatattagctaattctagcactgactatcgctaatattacgcactggctgcactcaantcagcatacaccacgatctgaactctcacgatttatcacatctgatacatcattgcactcatatcaacgaccnttgtacattcanaggagtacancgtctacacggcacctccgagagctaggtactctacagcgcgcaatatcactatagagcaagtaatgtcacacactggagatagtgcgtgcgcatcgcatctgcgcgagacgatcgattgattgaatcggtatatactacgacaacatgatcttagtatgaagtgaacgcgcgactcctaatagaatacatgtgtgtcactgcaccgtgacgtaaaggaatacgtcgatgaagatcgtgatgtagacaagaatatacacgattaggacagcgctgtatacgtcacatagtacataaggacgtgaatcgtgccttctcg

SEQ ID NO: 283437 - DNA, 593 bp, Glycine max
  unsure (1)..(593): unsure at all n locations
tacacgactaaccggaccatcctcntatccaccataaagtcatttttcagctagangtattatacacatacacaacncaagagaggnaancgtgagcccctggacgtaccntcgaanancacncngaacccgggaaacactagaggaacctgcaagctgcagcaatcactcgctgtataacatttatcaatacactacactaaaggagaacaagggataaatacatcagaaagatcatacacgacttggtcttggagggatatctatgaacataacatggaaggggacataaaaagcttttaagattggcaaaaatgaacacttggtctctcaatatactccaattttgattcggacgaccgaaaacagattcgaaataagagtccattacaagcgaaatagcataagtggctacactcccaatcaacggtgacggatactcaaaagattaggacacgagacatgtcacatagagagcgagaatgtacgcattaagcgtaaataagacagctgacgctatcaggacaggcgaatgcacacgcataacgaaactgaaaacgaatgcaagacatgaacggcacacgtagccaccg

SEQ ID NO: 283438 - DNA, 73 bp, Glycine max
  unsure (1)..(73): unsure at all n locations
ccccccctccctccttcaaaacctataactaaccannccccagtgttgactgacctcaccccacacccccttt

SEQ ID NO: 283439 - DNA, 500 bp, Glycine max
  unsure (1)..(500): unsure at all n locations
gcagagtacccgtgaagacatttgatacacggtgaaacacctcgtacccgggatcctctgagtcacctgcagcatgcaaacagagctcagttttatagcttctatgttaactgttcaaagtcgcgaatataacctcggatccctgtcgatacaaaactactaagaaatccatgcaagcatattacttccttgatgttacactgcacgagttcctacatgctactcttcatttcaccagggaaaatttgagcatatttctgactctattactatacccacacaaatcattttcacgacttatctcggtaacctgattcaaatccatgatcaggcctaccattacattccagaattccaaagcttcaattctctgacgacgctgtgctaaccttactcttgaatgtctaaatatgctaaatataatgccatcttctactgcatgccacaaaacatgctttcattttggcatcttaacatcctcggcggaactagacaatttn

SEQ ID NO: 283440 - DNA, 363 bp, Glycine max
  unsure (1)..(363): unsure at all n locations
cccccccactctctgtcatgttaggtcacttctataannancncccggcggtgcctgaactgtagcccanacgagnaccttcgtgccagcacgcttttatttgggatggccctgctatttttattttgggcacaagcggcttgcctactcctcttagaaaaatgacactattttctacggatcacaactttactgaaggaattgagcgggctaaaaacctttctgaagctgataaattcaaacatttggacactgctagcaggtaacctattcttactataccttataataaatcataaaactcatgttttctattctaggattttatttataataccttttaccacggtcgacacgcgcgcg

SEQ ID NO: 283441 - DNA, 457 bp, Glycine max
  unsure (1)..(457): unsure at all n locations
atcangatatgattaaagacttcataagtctttcanaagaatacaaacaacttcaaggaaaacataaagaaaagatagatgattcctcagaaatttccaccgccaccattgtgatgacctttgaatagtctaaatgcctaaagacaactttaagcgtgtaccctctgataatcgaaggaaantctcgtaaaagaaagtatcctaattctaattggaaagacacttcagaagttgaaaaatcaactgagagggcttacaaatgagtctactagactcaataaacatcatgattggcctaattaggaaaggtgtaatctattggaagaatgccacaagttcatagaattatgaaacttcgaggcaagtgaataactattganggatgtgaagattaacaaagccaaaatctcaatgataacttgacatatgaggtctcaaaagaactcagatcttcact

SEQ ID NO: 283442 - DNA, 174 bp, Glycine max
atactgcagttgtaccactttcatcatcatagcaatagaccctaccaatcctatggcctggtctatgcctaccacaccacaagcactattacctaattatttaataagttgctgattcacttctgctaggttaagagaaagcagttaaagttaaattgtggtaattgaaacaac

SEQ ID NO: 283443 - DNA, 331 bp, Glycine max
  unsure (1)..(331): unsure at all n locations
agctntataatggactttctcttcattgctactatcatcagtaatagtaacagacttctgtttcaatataacaagatcaagatccaaaacactgaggtgtaattggacttactcattccagtcagagaagttaagcccattaaaattggcacaaatgatacataagaattcagtgaattgggaacatgtattgcataataacattcacataagtgttttgagacataaaatacatgtcatacatatgacttattcagataatgatcaatgtatattgatgctctgctttgggtgatacagttgcagaagcaagcttcatgatgaatcaaga

SEQ ID NO: 283444 - DNA, 352 bp, Glycine max
  unsure (1)..(352): unsure at all n locations
caagtgttgttcgggctgcttctgcaatgttgccatttggacttgcttcnnggtntgcatgtgaggtctaacatgtcatgtgagggaagcctgtatatttggcaactctgtccttttctaacagttggagaatgcattgaagacaaactttatgttttgtctgttaatgcagttgcgtgtagtgcacacgtattactcttgcacacgtgtcactcgtggagtgggcacgtactanatacgtgttgcgtgggatatgaagttgtcatgtggtctcctcttgccaatgaccaccgacacctcgaatttctatcttctttctctcgaagtataagatctccctcacctacacagc

SEQ ID NO: 283445 - DNA, 74 bp, Glycine max
aaatattacacgccgccctcgcactttatcgagtactgtggtattcattaacaatctagcgacatggaaacccg

SEQ ID NO: 283446 - DNA, 610 bp, Glycine max
  unsure (1)..(610): unsure at all n locations
ctcactcgntcatatcnttntacattttntcnctctcgcggtnntctcntactctactnnnnnnacncnccnncncncccccncaccatgacgcnnctttgancctttgtatacgtgtgattagcacacatanaatcacacagcngacggctggcagtatgacntataaagagtaccnggacactgttctccaatatttctctatatagaaccacattacacttcactgcccgtctatcaccactacggatttggaaacccttgcgttcccatctaatacccttgagatagttcactatcgttagtgtagtaatcctaatatgccgccacgttcccctaccacattttgacagcctgatagcgaatgacgcctctctgaattatctacttcgccttgagcggtttcccaccgctgatgcggacattcagtcgatctgctctgtagcgcataatataacatacccgaactcacctactccgctgatgcaacttcttgcgtcgatggaaatgaaatctatattgatacaaactaattgttaaaagtaccgtgtactaactgattaatttaccgcataaatataattgtacttgcttagtatacagtatcccg

SEQ ID NO: 283447 - DNA, 338 bp, Glycine max
actcgcccggtccttaagcactgagctgcactttttttctatagcaatgattgggcatcatgcctcttatgacttacatcatttagcctactgtgaagtgaacctctctcttaattctgtcataaggtatgcttaagctccacctgcagctcatatctttctcattactggccttctaaaaatggaaaagctgtcaaattgggggaggcacgaacaattttaatcctccatatcattagcttctcaaagtgattgacctattcaatctcaataaagtcaatccaatccaatgccgacacctacattgcttgatgtaaagccaaatgtagaagtgtccc

SEQ ID NO: 283448 - DNA, 588 bp, Glycine max
  unsure (1)..(588): unsure at all n locations
aacagcgcctatctcctccntctctcaaantaataaataattttttttggntgccccnnnnnnnnnnnnncnnccccagcgacgngttgggcccttgaacccctagacacanccaccncacaancnannaanacacncaccngcgcaccagagttaaaaacgagacctttaccattttgttcttcgtcacacacccccaaagacaacgccaaggataccactatcagtcttcactaacaactcttgcatcgtatgtcgcccatctcaagcagagcgactagcttgggttgccatcctctgtgtgcaaatataccacacactggcaacaggcataaagttctctatataggcgcatcatctactgcgtaacacaactgactgaattcggaacacgacataattaatacaacgccggtgctactgaggtactatctacagacgttcaagacagagatcgtgtcttctaactttatcgcgcacgattaacaaacgcccatgcggcgtagaagcgaccaagtaccttcatttacctcagaacggaacacataggataagagcgcacttctcgagatatagatgatctccccg

SEQ ID NO: 283449 - DNA, 438 bp, Glycine max
tctataagatgttatctcattcatatagcggtgtgagacactagcgtctacttctcatcgaagcttctaaaacaaatcgtctcgacgcagtttttcaagggatcttgtcatagaaatatctaaatgaagctatcctggcgacacatttaagcatgtggaacacttgttgtaactctaattaatgagaggcgtgagagactctctttagagatcacctactctcccgctttcactacatcaattcctagacgacccctctagctcttactctgtgtctgtacttacctacataagagagtcctcgctcatctacatatcacggcactcccttagtggagaagctccttcttaattgtctctccgctaacggattgcccttacttcacggtttgtttctatctcccgctggattccatggaggaaaataactctgacgac

SEQ ID NO: 283450 - DNA, 350 bp, Glycine max
  unsure (1)..(350): unsure at all n locations
ctctcttgctctacggaacatgagtaatacacaaacaaccaaatatcttatgaaatntcagagatggtttgtaaccatactaaacctcaaacggtgtttgatccttcaatgctctggtgggaagtctattctgataaataacaacagtacttgctgcctctgcccataatttctatggcaattcttctcatcaacatgcatcttgcatctccaaatatatctattatcctctactaacccatgttgtgtggggataaaactgtaagttatgttcatgcctatcctacaaattgataattatcaatgtgtctcgggccttgcaacctaaattgatctgaaccgttcatctc

SEQ ID NO: 283451 - DNA, 394 bp, Glycine max
agcttcctcagagccttattctatgatgacaaacatttggaaagttagtctacacgataatgcttactttatcacaaaaatgatatgctaatctttacgatataaaacgaactcatgcacacattaatgtagtacatttatgaacatgcgcatgtgtaaaatatcctactatatatgtcaacatacgaggacattcatcacattctagttaccacacatatatacatctgtgaaaagaatacacatttccatgctcaatgcattgagcaaaaattacacctattcacatactatatatattgctatcacaaactacctacacatatgtgaagatgtatcataaaatttctgtatgtactccatatattatatcacactgaaagtaatacgtatg

SEQ ID NO: 283452 - DNA, 259 bp, Glycine max
agcttaattgataaatgtcatactgctgatcattccttttgtgtttcatcacacgcaatttgatcaatttatactgtgtaataattttggcactggtatcgatacatcctctgtaatcgataccagagaataatctcttgacaagacttttaatttaagttcttggcaaaccttttgttcatcattagaattccttctattatatcccttctaaactctaaacatctgatatcatctgattcttaattcttgctgataa

SEQ ID NO: 283453 - DNA, 417 bp, Glycine max
  unsure (1)..(417): unsure at all n locations
agcttctacattcaatttcgagcttttcgatatattacgggactcaatcggacatccgagtaaaaagttattgtagtttgaatntgctcaaggcttcagtattccatttcgagcgtctcgatatattacgggactcaatcggacatccgagtaaaaagttattgttgtttgaatntgctcagagcttctgtattccatttcgagcatctcgatatattacgggactcaatcagacatccgagtacaaagttattgtagtttgaatttgctcaaggcttcggtattccatttcgagcgtctcgatgaattacgggactcaatcagacatccgagtcaaaagttattggtcgttgaatttgctcagagcttctacattcaatctcgagcttgtcgatatattacgggactcaatcagac

SEQ ID NO: 283454 - DNA, 305 bp, Glycine max
  unsure (1)..(305): unsure at all n locations
actcggatgtcatattgagttccgtaatatatcgaaaagctcgaaattgaatgttgaagctctaagcaaattcaaacgacaaaanacttttactcggatgtctgattgagtcccgtaatatatcgaaaagctcgaatgtgaatgtagaagctctgagcatattcaaacgacaataactntttactcggatgtctgattgagtcccgtaatatatcgagatgctcgaaatggaataccgaagctctgacaaatncaaacaataataactttttactcggatgtccgattgagtcccgtaatatatc

SEQ ID NO: 283455 - DNA, 308 bp, Glycine max
agctttaataagttattccaaaacaaaatcaaccaagtcctcaaccaatccatatctttaaaccaagatctcatttattcaacttcattctcttcttcttcttcttctttttttatttgaacgtgaacaatagcaattgaaagcatttgaaaaataaagcaacaattaggcaatatatgtatatacatcaagcatggccaacaacaacatatcatccaatgaaacataccccccttcacacttattcccaaaacaattccaaagcttccaaattccttaaaggtagggtgaaatcatggtttttcacc

SEQ ID NO: 283456 - DNA, 213 bp, Glycine max
acaggctcaatttccatagctttatgtgattatagataatctggccctatggctctttagacaactatttgtgaccgatgccgagaggagccttctataatatctactcacaggtatatacatactcccctgaatcacctctcttttgtgtagcctaaaaatgacatgatgttaactgggagacctcccatttgatttcacctatcaccttca

SEQ ID NO: 283457 - DNA, 407 bp, Glycine max
  unsure (1)..(407): unsure at all n locations
aggtggtcttgaaaccctgatacctttgacaccccaanctaaaaactacaaccacttaatacgaaatttttaggcttaacacgtataccacggacatccggactggggttgcttgtgcacaacacacccctgtacccccaatcgatatactcagcccctcctcggtaccagctgacacccctcttgccactgtctctttggcatctccggtctacaaggatacacgagccgagcctactgcttggaaaaactctgccaacgtacgaattagccacaaaccctagtacttccaccagctgcactaacctcgctacatccgagacgtctaacacatgttcgacgactactcgtcatgctctaggaagtattacttaccttgttgctacactggacgcctggtccacatc

SEQ ID NO: 283458 - DNA, 702 bp, Glycine max
  unsure (1)..(702): unsure at all n locations
cgcagctcagtaccnnctccatcgtanttgcttctctcgtgagcgtaataantaagccgagacctctcncgacgcttcacntnnnnncnncccccnnnnacgagacggagattgatngccttnggancttgacnaccntttggtannacnnanacacnangccatantaatgggcatanagatangcgaaaccagngctcgcgaaacttattctcaactattctattcttcanatacacacacgcgctccatacgaagaaagcacgagtatataatgtgcantaacgcaataccatttngtctgcgtacgtgcaaattacatattataccatcgtggcatacatactcatcacgagaatcacaacgtagcacaacactcaacactcatatcgatactatacgagcatgaaacactctggcgngatgggaacatgtgagtcacctgacatccacaacatgcactctcacacaaaatcgtgatgcacatgcaacgcaatatcttaacgatgcgtatatgtgaatatgantgtagcgtgtctcgaggtatcgaggaatcctactagcgcaacaagcgcgtactccgatagaagtgactgccctgtgtctatgcgcgaagaccgtacgtaagcatgacacatcatacgacacatatcggagtaaatcaacgatcgcagtcgacagttgtaactccacaaatagccg

SEQ ID NO: 283459 - DNA, 452 bp, Glycine max
  unsure (1)..(452): unsure at all n locations
tgcaagcctgttgaaaatgtcttgttggatgagttaaacatacccattctggtntangggttttgtgataatggntgtgatgtttatatgctgaaaattgcccatggaaaactgttagagatgaaatgtagaagtaacctanggttggaaagtgagaatgtggtgttatgagtggaaaaagaatgacgctttgagaggtggaaagcttaatctgaattctgtggtaaatgganggtaaagtgagttaatactagctttgaatgtcatttangacttgggagaaagcttggactgtgctagagagaagacaaatgatcaaagtgaacaaagaggcatttctatggcatatgggtgttgagagtanattttgatccgtgggatttangtgtaatttcatttgagcaattatattgatgtttggacttgtgtaggtgagagtttgttacaattan

SEQ ID NO: 283460 - DNA, 544 bp, Glycine max
  unsure (1)..(544): unsure at all n locations
gaggccattgacgcttgtaacttgataccatatactacgcttgaatatacaatacactttgtgcccaccatgaagtccttcttaattatcatgctatcatggaacttcttantctnttctttgtagaacttggcattctcatacgctttcaggcggatctcatctaactcactcatttgcaactttctttcctcaccagcgtgatccatagagaagttgcaggtctttactgcccaatatgctttgtgctcaatctcaactggaagatgacatgcctttccaaagacaacctgataatgagacattcccatgggtgctttgtatgcaatcctatgtgcccaaagagcatcatcgagccctgtactcaatctttcttgcttggctgcacaatcttctctaaaattctcttgatctccctcttaaaaatntatgcctgtccattggtctnggggtggtatggtgtggataccctgtgacaacctcgtacttttaagcaatgatgcattgatntgtgcaaaatgggttcttgatacgtacgatgctn

SEQ ID NO: 283461 - DNA, 301 bp, Glycine max
aatgatagatctcatccagcgcaagttgttgcaacccacatacgcacactgctatataaacatgaaagctgcacgagttttctaccaagttcgggattgaagaatattttgtgagtcttggaacttgagtgttttgtgagccaccttgatgtcaccctaacatcaagtgttggacctgagtgtgtagagctgatctctattgttcagagagcaatctctggtgtgtctttgatttatttgtatacaccggagagtgattgagagggagtgagatggcgtctcatatctaagagtggctctt

SEQ ID NO: 283462 - DNA, 306 bp, Glycine max
  unsure (1)..(306): unsure at all n locations
actcgcatgtctggttgagtcccgtattatatcgagacgctcgaaattgaatgttgaagctntgagcaaattcaaacgacaataaccttttactcggatgtctgattgagtcccgtaatatatcgagacgctcgatattgaatgttgaagctgagagcaaattcanacgacaataacttcttactcggatgtgtgattgagacccgtcatatatcgagacgctcgaaattgaatggtgaagctctgagcagattcatacgacgataactttctactctgatgtctgattgagtgccgcaatatatc

SEQ ID NO: 283463 - DNA, 455 bp, Glycine max
  unsure (1)..(455): unsure at all n locations
accgcctccgcccacatcaccccacaatcctaaatctaaggccatctgccccccacccaagcgggagtgaccgtgacactgtgaaccgcggaccggagcccgagaaccgaagcagcgcncgatcacttgttacaatctacaattgacgcaagtaatcgggacacgcaaacctgatgggctaggccaaagcatcgagactagcatggaagcctcagaatacgggactgggctagctaaacccaacacgagaggaaaacaactgctgagatgcaatccgggcaaaggccgcggagaaacaaggacgaaggccgcgcccacagggaactcgaaaacggcccgggacagagagcggtgaaaatcaagatgtgtacaggcaggaaggacctcaccccccgaccactggaacagcaaaggaacccccacacaaaaaagctcccgggtaacccataaggccg

SEQ ID NO: 283464 - DNA, 604 bp, Glycine max
  unsure (1)..(604): unsure at all n locations
cccccatctctctcaccacnttntattagtaanaatagnatattcgcctactaaaannnnannnaannnncnccgatgaagatgatccattgaaacgctacacaacatacnaagcangcatacgcaatgagttggctcgtatataagtctatcagtgtactctttatttaccancacctattcagtaactagtagagtgatcatcatggctgtgtactatctacacaagagtctcgatgcaagccctgatagtaagcngatatatcgcgactaacatattcgattgaatggttctacatatataacatctttgcgtcaacattatggtactttcggacgatntgtagatattctcatgtgtactccatctttcttagcagaacatccattaatcgaacaatgtgacccacttcagttcaagctaacagataagatagtgaacatctactgtctcataatcgaggatatcactcagcagatacatccctaacgatgcacttaccacgtaacgcatgagatacctatataggatntgctctgatgccatcccagcgcccggagttagccaccgagacttatccatattgtcgcacgccgcaactcn

SEQ ID NO: 283465 - DNA, 446 bp, Glycine max
  unsure (1)..(446): unsure at all n locations
agctngaaccaccatcatggaatcacactccaaccataatttcttccacttcttttgctcagccatttcaatgactacactaactcccatgagtttagcaaattttatatcccaacataagcaataaagtagcctagaaaatttgcatgttgatttctaaaaattccttcacaaccaggagaaccaggactttgtctttagcataaccatttttgttacattaatttgatccacccatgtataggagggtacgagttcacctaattaatggttatactttttcttggatgtncttcaatccccatagccctacacatgatgaattcatattattttatgaatcanattaatccaattaatcaatttgatttgttttctaaactatcatatatataggagaaattaaatatatcagataactttgattacagtacatcatttataac

SEQ ID NO: 283466 - DNA, 605 bp, Glycine max
  unsure (1)..(605): unsure at all n locations
gatgcccttaaaagatgtctctttttttagttttagntttagaggcgcgggagaagggcgggagcgcggttttnccatcattacgcgcacttagatactcagcttcgaggtgtctcgttctattgaagacnatgggctaannnnnnntttgtaatatatagaccacangtcaactctcnttgctgacccataaaagtcaacttccttgcacnccacgccaagttggtcaattttcaagtactgaggatgagacattggcatgcatgatgcgtattataatattcatagattntcccatcaagtgcaagnnttcatatctataagagtagagnntatttggctaacttactaattngnntnctctactgttcttaatgcaagtttgattcactgtgtaatgaaagttcaatttcatctacttattttcatgaatctatcaatgtggnactttctgtcggngtcgtgccaatangatggctaaccaaacttatgaatgtggtngttagttagtgtgngcatgtatatacaacgtctacgtgcattcttgcaatatggacgtagagcagtgtgaaacgnnttcagngatananccacgttacttttgt

SEQ ID NO: 283467 - DNA, 457 bp, Glycine max
  unsure (1)..(457): unsure at all n locations
gtgaccattganaccttgantccttgaatacacggaaccaggtgctccgagtacctaagccaccgcttgttcattctccctctttctcgaatgggtcaagcggctcatcggaccagataaacatctcgctcccggggagtgcgagctatcttcagattggctgttagcatcacaaaccatgggatattttggtgttgagcagatctcgaatgcgtgggttgctttctcttttgcccccagcggccactgggccgctcgtcttaatacctgtccgcaaatggtgacctctatcgcacaccggtgtggcgattattggttgctccccggttaaaccccaaagttttattggccccaataaattcgcgaaatattggcacacttaatcctgtgcgaatgatttcctccccacccccaataatccatcggatactaaactgcaaccggtggcccaaatacg

SEQ ID NO: 283468 - DNA, 430 bp, Glycine max
  unsure (1)..(430): unsure at all n locations
ttatttatttgataaataaaatatttaataaaatcaaatattaaatatacataatgagtaataatatatacattctactttntttgaactacctaattttagtgtgtttcttgcattaatggttgtggaggtttgaaaaaaatgaattttcataaaaaatatcattttccccatttcttataaataatgaaaaaataattaatgatttagagaggtccatcaagtctcaactctaaacacatagtacaaaatgttgttctaacaaaaagaatatcaatacaaaccggaaaatcaaccccttcnaagcactgaatttgctctacttgcactccctctacttgcttgattaaatttaaatactttctcgggaagacaaatgcaatatgaaaaggctataaatatatacatattacttcatatcttcacgtca

SEQ ID NO: 283469 - DNA, 416 bp, Glycine max
  unsure (1)..(416): unsure at all n locations
tgcagcttttactaaatgtttggcccatatttctctatacttgtaacaccactcattgagtaggtgaggaaccatgttcctctcatgagatgacgcccgagaaatgatgtttatgaccttgccttacttcactaagctggcaccactaaaacatatggttttgttcgttatacaggcgttgagaaaaatcccatcgtttcagaacctcaggattagatgtcaaatccttttcaaggaggatggaatgatgcattcctaccccgcaaggcattggataaatactccaagtaatgggcagaatgcagaaagccctaggtttatgaccttaggaattcggccatggctaagtcgaccccttatcttgtaatattaataaggttcatttttgggcttgtttaaggtccttatgaagtggn

SEQ ID NO: 283470 - DNA, 491 bp, Glycine max
  unsure (1)..(491): unsure at all n locations
cccctccctgttgtatagttgtgatcttacaattccctctncnnccccgtttatgaccatgtacgtctaccgaactgcaacaagcgcaccgtgagcttcctgaatctatctaatgctgctatctacaactttaattatgaatcattagaaggacccttacactcatcccgctaatctaaggtattgagtgttgacaagcttataagtatatgatggctaaagtcttgtactgcgcaagttcgtcaagtaattcatctatcattgtagtctaagcaccagtctagccttgttattgatacttgataatgctttgctcgtaactgtagcactccacttaagaacttccacgtgaacttactcattgtggagcaaatcttacagcaattctcgagtagatttcaactaacatctcttgctgttaaagcatgactatccacaaccacacagacttagtggcttgtctctacacgctttgaaacatctatactact

SEQ ID NO: 283471 - DNA, 363 bp, Glycine max
  unsure (1)..(363): unsure at all n locations
agcttccatcatanggtaccctagaaatatangatntttcagctattgtattttaaggcacctagactagtttttgtattaagggtagttttgtaatttcacatgcactaagtgaatatttgatgtgtgtgttgggaaataaatttaattgaattggtagaacccccaatccaattaaattttagagggggaggtgaacattntcttactacaccccattgccacatcatatagtcacactttgtgcatgtccttcatgctttacatgtctcatgacacctaagcacaattagtggagaatcttggaattgatcttggattagtgggctgaaccataactganattcactaatcataattagt

SEQ ID NO: 283472 - DNA, 363 bp, Glycine max
  unsure (1)..(363): unsure at all n locations
cctacatggaaattatataaaaggtaacagcgaataagtaatacaaagtccaaaattganaagaatataaaacaagtttacttttaacaaacctatntcatataaagcactgcagatgtcaataacagagaaacaaattaccttttatatatctcagtatcagttgtgctggtagtgcanaagacaacagctgttatattgtctttctgcttctcaagaaaccgccgcacagttcctgaataanatgaccttagaagaatatatagaacaaatggacaatacanagtgtagaaacctaataataatatattatccatcagacatcagaaaacagttaacaacatagacaatcactatgtctat

SEQ ID NO: 283473 - DNA, 360 bp, Glycine max
agcttgcctgtccgatgcagcagtaatgatggcccgagttatgttggggaacggttacgaacccagaatgggtttaggcaaagagaacggcggcataactagcctgataaatgccaaaggaaatcgtgggaagtatggtttaggctataagcccactcaggcggatatgaagagaagcatcgcgggaaggaagagcggtggtcaaagctcgcgttggagacaagaaagtgaatgaagcccgccctgccacataagtagaagctttataagagcgggtctgggagacaaaggtcaagtggtcgcaatatgcgaagatgatgttccgagtacattgggattggtacgaccatgcccttctga

SEQ ID NO: 283474 - DNA, 283 bp, Glycine max
tccttcacaaataactaccataaggcataaacctagtaaaactacacatcatatctcccaaacacccaatacccacgaaattatgtgagaaagaagtctacccaaacctgaaatttgaagtcccacaacgtagaggtgcgcttcacgactccgaaaatggcttcctttcgcgatttggagcaaaaatggtgtgcaaaggttgaagctttgacggagcttcaatggtgaggaagatgaagagaatatcaacgagagagagggggagaatagcttctgaactttt

SEQ ID NO: 283475 - DNA, 444 bp, Glycine max
  unsure (1)..(444): unsure at all n locations
agcttcttatccaatgctcatcttggtggtgaagctccttcttccatggcttattccctagtggatggcgcctcctctcacctcttctcctttgtcttccgctgcatctccatggtggaaaatcaccatttaagaacctcattgaagctcanagatccagcctccatagaagccccataagcaagcttccatcaacatctcttctggatcagttcaagtggagggtacatccacttggttgttcaaagagaacaagggagggtacatctcttatgaatctttgcttgtaaaggtttttacaacgttgaaaagaaatctcaaggaccgcaagtcgcttggggactggatctaagcacgggttgttgccgaaccagtataaaactcttgtgtntgtcttcttcttccctacactctntaatttccgctgtgcactntaattatcgc

SEQ ID NO: 283476 - DNA, 257 bp, Glycine max
tgagtgtgctcacaactctattctcaagtacacagtgtaccatgtttattataacaggacttcttggagcttctgagaaactctgaaactcttgaaaactctgaactaactactcccaccctttactactactcttgagctctagagatctaagactgactactcctattttatactactactctgatgaactactactccccctgacaactgatcaaaagctctcaacttaagccaataagtaacttctctatgca

SEQ ID NO: 283477 - DNA, 412 bp, Glycine max
  unsure (1)..(412): unsure at all n locations
agcttgtcaagccctttagcttggacaagtgttgtacgggctatttctgctaagttgtccagagtggacacactntntgttntacaggtgaagtcagacgtattgcacagaanagatgtttgtatttgacaattctgccctattntgaccattggagaacacattgaaggcatgtgtttcattnttcttttgttgcaagtgagtgcaacacaagcacgctactcttgcatatgtgtcacccgtagagtggacacatactggagacgcggtgtgcggattagtggggttgcattgtggtgcaaacttccaaggcatcatttcagctcctgccagctaccgaagagttgtgcctccacttaaattatgtgtacgtttgatnntttatcaccaccactttgaatntctactctct

SEQ ID NO: 283478 - DNA, 382 bp, Glycine max
  unsure (1)..(382): unsure at all n locations
acaatgatcacaaaattcaagtntatctagtttatcaccacctaacagaatttgtttctcaagttcatgtaatcctctntcactaacatgacctaatctcanatgccaaagttttgttttatcaatcaatgtattactagctatcaatgcatgtccaacaatggtggaaccttcaagaataaacaagccattacttttattcttggtacccttagctatgattaaagatccatttgaaatcttaagaacaccatttaaaattctagttgaatatcatggatcatcaaacantgttatggaaataagatttcttttgagttctggaatggtaccttacattttcagtagatactctctattatcaaacatctttaatctcaca

SEQ ID NO: 283479 - DNA, 341 bp, Glycine max
ttcggcgattcagctcgtcccgggatctctaagtcacctgcagcatcaagcttatcctaacgtgtaatacaacaccgtcgatgaatatttgaatcagtttgtctgatttctgaggaactggtgcaatgcaattattgttgatctggtaagtgcgcaataaaacccgtaggcttgtatactttatgcaaaattgcttgcttttgtcctacccttcggaaaccatccacattgatgtgatcttcttttcacctacaagaatgagtaataatactctaatctgcagtccgaagcactggttacaaatatttacattattcttgaatacatgtcactggtcattt

SEQ ID NO: 283480 - DNA, 101 bp, Glycine max
acaactatatacgcaattacatgtacatactgatatatgtcatctactgatactagcaatcacactcttgcctatcaatctcttcttctcctcatacacat

SEQ ID NO: 283481 - DNA, 337 bp, Glycine max
  unsure (1)..(337): unsure at all n locations
agcttgtgaagaactaaactgtgagcaagctgaacccacattntgaaattcttgacaggagatatcttcatgtaaagtgtttgggtaggaagaatttattgtatgggttgagaccatgtaatttcagtcaatctctacatgacacattattaactctttctcctaaattgaaaaatgtagttaagtgtcacgtggagattgactgaaatcacatagtcccggatcatataataatttatcccangcaagtngtcttcaaaggccaatggacacaaaccgtcttagaagaacatctggttatgtcacacaagatcaacaagactattcccatcactta

SEQ ID NO: 283482 - DNA, 60 bp, Glycine max
gatattacgtatcttaccgctcacatgatctgtatactcacattgagtcctctgagggcg

SEQ ID NO: 283483 - DNA, 209 bp, Glycine max
gaacttcctgcttttattcgttgaccacagagtggtacctggagatatgtcgcggaggtcaagagaccttggggacgtcaggtggggtgctattgcccaaaaccaagcttgaccaatcccgacccaacctgggcatagtcggtcagtgagaacctgtgatgtacctaaacaggcgagctcctggcagtcaacagataaaaggaacaaag

SEQ ID NO: 283484 - DNA, 299 bp, Glycine max
  unsure (1)..(299): unsure at all n locations
cctacacctttatttacatgacaaggcaactagttgtgcatgctgaatgtagtgtatgactagaggcaatccatctgacttacaaacctttgatcctgagatagataggacatttcatagattatntaggcatcattntataccttttgatcatcctgagcattccattactggtgaatctgtgcattctgttattggtgattttgaacatcctgattntgagcattataattttgagcattctgattctaaatattctgatgttgaacattctaagaacatggcacaacctccaccct

SEQ ID NO: 283485 - DNA, 550 bp, Glycine max
  unsure (1)..(550): unsure at all n locations
tccccgccaccacgacacacaactacgaagacacgcgtgactgtggaccgctgccaccgtcccannancagacggccaactgaaccttggaaccttaaaaccgacgannacacgaacnccggaagcggaaaggccaacgcaccaccgtttatatatcgccagcgcacccctacaggaacgacggcacaataccgaaccccgagatcgacacgtgggcgcagcagcgggcgaacgacacagaacggcgaacgcgaagggaagagcgacgcataaagaaaagcaagggctacgagagcgcgacgcgcgacgcacagcacggaagtgccacacacaccggcaggcgaagaggcacgacgcgcgcacgagcgagaggcacgaagcggcgtcgcacgccaaagaggaggcgacggcgagccggacgcgacgaggtacaggaacacgcaaaagaggacacgcgggcagggaacgacgcgcgcgcaacgtgaaacacacacagagggaagaggcacggggacgtgaacagaacacggaaaagcggacgacacgaacg

SEQ ID NO: 283486 - DNA, 780 bp, Glycine max
  unsure (1)..(780): unsure at all n locations
acacctcaccgtcactcncacagacatctgtacnntaatacatctcttangcttgtattaatnntgctgcgttttaccaanacnccnnnnnaaagaggcggcgcgatttganncctttgtangncaactngnacnnancngncacnacnnaannacnnacncnacaacacgaaccccncaacgccncngaccaccacaccaccncactttattgatttttatctatagtcangcacctnataggaagcagatgcgggagactgtgttatagcaagactgacacctggacaacatagtacgtgtaatgtgactctacacaagtgactaccctgttgtatcgtcaagtagacagtacgcgtatgacacantgcacgactatatcagagagactagcatacgtcgatgcttgtgcattatctacgtagcatacatatatgtgcagcagtggaagagncgacttgtggcaatactatactcggcgatgcgtgatcaatcgatagaatgtcgcacatgacgggcgacacggacagngacgtcctatctcgtggataatacgngtgatatgagtaccctatggactgctncttctatgataccgctctatgacgtatcgattatcactagactgcgatatgataccacatcaggcacatcgtattctattacgggtggactctgacgtacgttctcgtgcgtgagcgcaagtgtagcgtcgatgatgcgtagcctganatagananctgcgactataatcggagtcggtacatatgtacgacagcg

SEQ ID NO: 283487 - DNA, 414 bp, Glycine max
  unsure (1)..(414): unsure at all n locations
agcttgtggactataccttcgaccgaacacggtcgtgtttctgtctaagcccggattcaagcgggctgtaacaccggctccgctatcctaacttgactggaggcggttgcggtggctttatcctctatggttatctgaagttntaacatgacctccgagatggaaaccatntgatcttttaaggccgatagatcggccttcatccgttcctgcacgccctcttcattatccattattctggatcgagtgttataagggtgccttggtgttttcttatgtatgatgaaattcctaaagacataaacaatggtgagtatgccacctcaacatgagtatgcaaatggatgatcagagcactcggatccaccccaagattttagatacgtaatgagtccaaacttctcatttataaaa

SEQ ID NO: 283488 - DNA, 295 bp, Glycine max
  unsure (1)..(295): unsure at all n locations
ccctgaacctaaatgattatctctagataccttgtttagattctaggagagcatatggttcanagcatatttaccccatatttgngggagtggaactgattggcatgcaaagaataaggtaaagcatcaacacacacaacaaataagttgtatgttaaanaaaaagagcaatcaaagaatatatgtgttgttgtaataaggtcaaaagcaaatgatagtgaataactagtgagcaagctaattgtattaaaaagatcacttggataagtctagaatttgtgctctcttagaatct

SEQ ID NO: 283489 - DNA, 363 bp, Glycine max
  unsure (1)..(363): unsure at all n locations
ctttaacaagctttgaacaatatacttggccttcatttaacttgctctgggcttggcggccacgctcaacaaaatactttcgacacctactgtacgttgctttgaccaaggctattatgggaatgttgcgacaatccttcaaaaccttattgatacattctgaaaagttggttgtcatgtggccttatcgacgtccttctctatcataaaccatcgtccatttttcctttgaaatgcgatcaatccatgttgctatggctggacttagtntacgaaatttttctaaattttgatcaaaaatgtgcttgcaaggagtgtangctgcataaaattatttatcaataacaattttaagtatatatg

SEQ ID NO: 283490 - DNA, 450 bp, Glycine max
  unsure (1)..(450): unsure at all n locations
gcacctccctaatggcattactnttaaatntaacaacaaggaactatttgcaacacttatgcaaagataaggactattntttacatttcanaaggatatggactaatttgcaaaatggttacaagacagggaccaaaattcctattcactcgataattaagtcataaaagtttaaagtatagggtattttcgtaaatgactatataactatcttacacatagaattntagtttaattagttggtgactaattaaagtatctaattatatgatgtagaataattacnatacagtggagtataacaccttaanaaaaattacagctcanactgacaaaggannatttgtgttgtgtcatcngtgcatgtatacatnntaattcagtagctatatattnttattcataacanttagcggtatatatatatatatatatatatatatatatata

SEQ ID NO: 283491 - DNA, 411 bp, Glycine max
  unsure (1)..(411): unsure at all n locations
agctgtcagcttaccgcttcaaaattttagatatcaactaactgttcagcttttagatacctttccacttttcaactagttntttagctagttttatcgaatatagtcataacaaaattaatctaaatagggaagagacaaaagaatcaaagaagatatcaataaatttaaatgaagagataaggaaagaagaatagaagtcttagggggtgtntgtgttcatggaatcttgatgaaatattcctaagaatatgaagatgagaatatatattctcatatntgtttcaaggttttttacaaaataatctcgagtactattgaatattgcgaatgttataatttctttctttaccatgctttcttgcatctatattctcatgagaaaggtgtgggaaaatgatattcccatga

SEQ ID NO: 283492 - DNA, 441 bp, Glycine max
  unsure (1)..(441): unsure at all n locations
ttcggcatcaaaaggaagctcgagaagcttctgccagaagtctgaggagagagggatggactcgtcaccgacgaagcttccgacgagatgctccgccgtgtccggcgttgacaacgccgaacccattgacttgttctgattgaagaanaaaatggttnttnttttggcggagttcaagataacggcattgcgcggaatcacggtgagatgcgaaaagggtttgaggtgggttttgaaaatgaggagagttggtgcagcacagacacaagaagaggaggaagaagcaagatatggcttcaaaaccaaggcttttgtttccttcccaaacaaactacttgtttgttcaatgactntntagttntggatacaatgcagtcaaatattattatgtcaagcagaactggcaactctcatatatatatatgtatatatatatatata

SEQ ID NO: 283493 - DNA, 480 bp, Glycine max
gcacacgctgcatgccaacttttagattattgtgtacccgacacatgtgacactatgcggcgagactgcgacggtgctaatctaacttacacggccacacaacaagaagaaataccgcatcgctcagttgccaccttacaacgtcgtcacctacgtccacaatccccttattcttattcatgctaaacaccgggtactcactcaacacgctcgatgctcccacaacacgcaatcgatcgagcattcgtacctcctacactatccacacgcggaaatacagggtaatgcataatactacgcgcataactcatacccttaccgcagccttccttactcatatagcccagatacagtctgcctcggtccaatataatacaccgtaggatcgaccccaagaatttaactcgcaaggtgcatagcacctattacttaccttctgaccgacgagagcaggactagaactgtcacaagcccaagacg

SEQ ID NO: 283494 - DNA, 447 bp, Glycine max
  unsure (1)..(447): unsure at all n locations
ccacgccccccgcggacatccaaagttgtcaaaacgantaatcancacaaaccccacccactgcgccggtgaacctgatccgtgaaagcgacaaacagccaacagggaaaccgagctgacagaccaacccacttgcttatctaatcacccagaggaaaccgggcaatcaatacaaaactcaaactgacccttgagctcagagcaagacaacggactatgtgaacagataaaacccccggcgcaaccacacacaaaaatgacacccaagcacaagacaccagcggagacacccatcaaaaggcaccccccacaaaccaccgcccctccaaagtccggcaccaacaaaggcccacaggagccgacgcgtgaccaaaacacagcccgagtcaccgacctcaaaagagaggaggaagacacaaatcgaggacacaaagagcactcaaaccg

SEQ ID NO: 283495 - DNA, 127 bp, Glycine max
tgatatcatcgaaatcttcatgatcccgactcgttggtggaggatgcatgaatgactatctattaatggggctgcgaattataatggacgatgtaggattggcgaatagcgatacgctataaatatg

SEQ ID NO: 283496 - DNA, 441 bp, Glycine max
  unsure (1)..(441): unsure at all n locations
cgcatgttttnggancatgaactatgatgactacccactgtattatcttgctcgactacccccgtgcaccggagaggattaaccnannttgaggcactccacttagaaacatccggcagagagggaagagaacccactggccctgctcacctaagatcgtcccgatgactatcaaccgacatatccgcatacccggctcaccacaccgtaaaaatctgttctttgcggaaatagggaagattgggcgctgaaagaggtaagacagtcatggcttggcatacccatttcggattggggattatgttcgtgccacatcgtcatcctccaagtcanagaccgaacttgatatgtacaagggaaacatgtcgaaggggcatttngatgattgcgaagatggggcgtatctgggacaaaattgtgtcattcttcagacagttgccg

SEQ ID NO: 283497 - DNA, 447 bp, Glycine max
  unsure (1)..(447): unsure at all n locations
agcttgcataatgaattaaatgtcaatatgtcaaagcaattgaagaagcatatgtaccgcataaagagcaaaggaaagtctcatggcattgtagagtgaccaagctgatgccctatgatcaaaacacaaggcagtgaccatgcattgaaagctttccaagaaacacattaagtcngtgctcaagtaaagaatnggaaacttcttgcttatgtctgttngaaacgagaaaacaagtatatgataatatagtgattctataagttcttatataaagagaacaagtggntaagataacttataacgatgctttacttgaatatgaaccatcctacctaaataagggtgctaccaattaaggacacataaagggcctgggatgcctgttgctntccaacagaagctagtctttccattttctctgtatatctccagagaatactttatttt

SEQ ID NO: 283498 - DNA, 338 bp, Glycine max
  unsure (1)..(338): unsure at all n locations
aatctattcatgtttccttngatgagtctaatgctattcctccaagaaaggatattntagatgatattgcaaaatctttagaacaaatgcatatntatggacaagattctaaagganaagggaaaggaagcaatgaagatcctctagaagaagccaaatcanatgatgaacttccaagagaatggaaagcttcaagagatcatccnncttgacacattattggtgatatctcanaaggggtaacaactagacattctcttaaagatttatgcaataatatggcttttgtgtctatgattgaacctaanaatntaaatgacgccataatagatgatcat

SEQ ID NO: 283499 - DNA, 257 bp, Glycine max
agcttctctaccaccctcattttcttcccctttggcaacatcaaatagtcaaagttcgtgggaatcaatacagataaaataatgaagtggacaaagatcaattataagtcataaccaaccaaaatcataaataagtcataacccaaatataattcaaacagtcataattccaaaccacatagaaatctaacataaaagactcaagtccaagtactaaaagataaattaagtgcagaaaatgataacttaactaccat

SEQ ID NO: 283500 - DNA, 540 bp, Glycine max
  unsure (1)..(540): unsure at all n locations
ttgcacatgatccaatcgttangcgcctatgatactcagcttcaanaagtcaaactacaaaccatttgttaatgaaataaccaatatactgcaacaatttatcaacccccaacaaacgggtcttcataattctctattagaccagtatgcattcctataacacaagcctcaatttgcaaacacaagtagatagaagctcacattccttgcaacattgacagttcataccaagactcagaannaccacaagccaccaantaattcaatataacactaaacaataattaagaaacgagcatccaccatcttgagttgagaaacaccctattcaaccaaagacggcaaacacttacaaatgcttctacctgatattganatcgatacgtanatagtcaccatcagaactcttgtaacaattacagatgtcgnggtgcctacagacaatactacttagttcctgaaacaagggtgcaagataacattaaatgaaacttaacaaccagatcanacttcaaattttgacaaacctaatagaagata

SEQ ID NO: 283501 - DNA, 429 bp, Glycine max
  unsure (1)..(429): unsure at all n locations
tgctcccaatattnttttntggatccacaactgctcctccctaaatatataaaataaaaattgacttanatataattntagtcttttaaatttggataattattcttttagtgtttttattttcagaaaagcatttttaaaaaatgaaattaaaaaattattttttttggttaaaattatcatatttaactttntgaaatcaccataaacacaataaacaaagaggaaattaaaataattttttgaanatntaaaagactaataaaaataaatntatttttaaaaaactaaaaaaataattacttanatttagaagactaanaacatatttaattacctaaatntacacagcagtcgtcgttgtgtaaattaccataacgcattngcagtaaatgaaatatgatgatataatatgtagcgtanattact

SEQ ID NO: 283502 - DNA, 439 bp, Glycine max
  unsure (1)..(439): unsure at all n locations
ttattgtagttgctntagaacttgctcttttaggcttcaattntcttagattaataatatataaacattcttatatactattttgttggtccttattataaggtccaattaactaattatcaaaattaagaaaattggtgaatttagttgagggcattaaagacattnttgtgaaaaaaataatacaaaggacattntangttgaaccttataataaggatcaagtgacacttgtaatgtggatattataataagcattagatggagtaccatattaacacccataanttttctttcactctttttctatcatgtaatatcaattaaccatacttgatntctttctcttctctctttatgtgtcaattagtggtcaatgaatgtntntntcatttcttaactcanattgaaaatagaaatatttatttttaacaactaa

SEQ ID NO: 283503 - DNA, 431 bp, Glycine max
  unsure (1)..(431): unsure at all n locations
aagaagaatggtctcagcaaactccttatttctagaaagaaattatatcaatagaccttcaatctttaatggagagggttatcactactggaaaacccgaatgccaattcttattgaggcaatagacttgagtatttgggaagccatagaaataggtgcatatatacccaccacagtagaaagaattaccatagatggttgcacatcaagtgaaagcataaccatagagaaacctagagatagatggtctgaagacgatagaatatgagtaccatacaatctaccagcccaaaacataataacatcttgcctgagaatggatgaatatttcanggtttcaaatngtaagagtgctaaaggaatgtggacactctacantaacacatgatggactacaaatgtatagatctggataacacactacccatgag

SEQ ID NO: 283504 - DNA, 557 bp, Glycine max
  unsure (1)..(557): unsure at all n locations
gggaccatgnnncttttcntttcagggtctgacctgaatacgtgtccccnanctgaagtgacttgtacagaccccgccacncnncgancanannnganncngannaggatgtgagangagnagctacgnnnngagaagggnggggctnaggggannnngaaanggnngaangnnnngannnnnggnnntnnggggnantggnaannactggtggccatacccagntatacctactatcaataacactcatatttgaaccctggntnggagagaaagaaaaagctanatggactaatatgacccattctagtttcaaatccgctcctactaccatanaanggtcattcanagactgagccagctatctgattacaggatagacttggggagatacctggtgtcacgacacctgngaaggaggatcttangtctggccagaatgatcaacatgtgagnnatgacactcaacaaagtggtcagacagatgttgtgcatggtggtcattangatctngcttcctgctgcatgtngctttntacgacgatacctaaccacgn

SEQ ID NO: 283505 - DNA, 563 bp, Glycine max
  unsure (1)..(563): unsure at all n locations
ttgaaacctttggaancactgttgagaccctagaaangccgcaccagtctgaagatatacagtacgcgatataggcttttattttatcgtggatgtacatcnatatgtttactacgagaggcgtcggactgggattatagcgctcatcgtatacacgctcactgtatatccatagcattatacacataaaaccgtcaagctgatcgaacaacggtgtgacacataagacagatcgtattgtgctactatgtgctatcacatcgtatgaacagtatcgcgtcaacgatacaatatgtagtctcagacgctcttcatctgtagatgtgcgtacgatcaggcacaagtacactgtctttccattgcatcaatcggaacgagaataaccatattacgtttcactgtcttcgactcacaactaatcgtatatatgttgtgagccgatgtctcgtgatctctatgatcgtgattctcatcacgctaacgaacatgattaatcaccaacatctacgcaacaaacatcctctatacccacgtcctatcgaaatgagatcgcctacctgccg

SEQ ID NO: 283506 - DNA, 167 bp, Glycine max
aatggagagaataagaaggagggagaaacccatgctatgactgtcgttcctacatggccaaatttcccactagctcaacaatatcaatacttggccaatatcagtccttctcattacccaccaccctatcagccaagaacacccaatcatccataaaggccacccct

SEQ ID NO: 283507 - DNA, 456 bp, Glycine max
  unsure (1)..(456): unsure at all n locations
tttgaagatttggtctcttgcagtgaaaagatccgtgtgggtcttgaaaaaggcaaatttagtcatcctgcttggaccaatgagaaaactggggccaataaagagggtgaggatgagggagaaacccatgctgtgacttgccattctgtgcggcccagtttcccaccaacccaaccatggccttactcaacccttcttcttaaccacccgccaattatccataaaggccatcccttaatcaaccacaaaagttgtctaccgcactttcaatgacgaacaccacctttagcacaaaccaaaaaacacccacccagaaatgatatttgtagtgagaaagcctgtagaattcaccccaattccagtgtcctatgctcgacttgctccatatctacttgatattcaatggtagccataccctagccanggtcatcaacctcatttcttcgagatacgacn

SEQ ID NO: 283508 - DNA, 564 bp, Glycine max
  unsure (1)..(564): unsure at all n locations
cgcnactatttggggccccngnnnnnaacttgatgaccgnatttgtatgtanccgnnncncnggattagtaatgcanntctnancncgcnggacnanggnggcgaaacgggcgaaaggacatatcatctattcccatttcacaagtcaggcataagcacaccatccccagtngccaacctttaaattgagctcacgtactcctgcgtagctcttattcctcgtcctctcagcactgggtccccatcaacccctccaagctttcacaaaatccaaacaattcaattccatttgtcatgaaactaccttacacaatgaanaacagagtagaggcagaacctttgcacaagaaatcattcaaatccacagaagttttctaacctcatacctncananatcctcttcgttagattcgtaaccatggatcgccnntgaactttactggaggtnnctatacagaaatctannatttgacccgngtgatctgctagagaatgcctagacacgagatgactacctttccnggactagcactgacaaccattntctgctaatggcannattcg

SEQ ID NO: 283509 - DNA, 334 bp, Glycine max
agcttcaacatcagactcacttcaggtgctggaattacttcacatggacttgatggggcctatgcaagttgaaagccttagaggaaagaggtatgcctatgtttgtgtggatgattactccagatttacctgggtcaactttatcagagaaaaatcagacacctttgaagtattcaaggagttgagtctaagacttcaaagagaaaaagactgtgtcatcaagagaatcaggagtgaccatggcagagagtttgaaaacagcaggttcactgaattctgcacatctgaaggcatcactcatgagttctctgcagccattacaccacaacagaat

SEQ ID NO: 283510 - DNA, 496 bp, Glycine max
  unsure (1)..(496): unsure at all n locations
ccagagatggagtccacggaggaaatgcttaccacctcanaagactggatagcggtttctaatgactcctctgcggcttccacataaggcatagaggatgggcagctcaccaagatgtcttcttcgcctgatacgatgaccagatgcccttccactacgaatntcaactnttggtggagtgtagagggaacaacccccactgagtggatccacgggcgccccaacagacagctgtanggngggttaatatccattatntggaaggtgacttgacaggtgtgaagggctatctgtactgngagatcgatctcttccctaacctctcggcgggtgccgtcgaaggcacgaaccaccattgaactcggctttaagtgggaagcatttgatggaatttctcanagtgctcttangcatcacgttaactggaaccatatcgatgacactttgctanacatggtcataccttactgaccttgcaagcttatatgcctctccg

SEQ ID NO: 283511 - DNA, 211 bp, Glycine max
  unsure (1)..(211): unsure at all n locations
acctctgctgncggtcgggccgtcgtcatattattatgtttacacatatattcgtatttctgctactcatactgcctattattcttattcacgcgcgcaaccacgtgtataaggcacctatttctggctaatacattaccaccgcgtcctgcgcttatatgcatagtgtttgatttatcctgcttcctgctacttcaatcctaaatcaccc

SEQ ID NO: 283512 - DNA, 409 bp, Glycine max
  unsure (1)..(409): unsure at all n locations
agctgtaagacatattgctgcatcgttatggatatgtcgcatgatcatcccatctgttgacgtgggtaccttggtgatcagatagcttctcctatctctgacggaacgactggaatctgtgattggatatcatagcctattgtgagtaattagctccaactcatgagatgatccctcagatctgggacatagcagacattctgatatgacacatgtcttacatctttcgaatacacgaagatcttacattttccttgtacaagaatcttagaattatcaccanatgagacattgtcacttactgattcatcaagatccacgaacatgcttctgttctacacatatggttgcttgcaccaatgtcaaaggatcatgtgttttcttggctaccttcattacctccacatgc

SEQ ID NO: 283513 - DNA, 101 bp, Glycine max
  unsure (1)..(101): unsure at all n locations
atgaatattttctacgaatgacaaatggttcacctaagttgaagcgacctactgactggtgagcccaattgagattgtgtggatataatcnacctcaggat

SEQ ID NO: 283514 - DNA, 398 bp, Glycine max
  unsure (1)..(398): unsure at all n locations
agctntataatggactttctcttcattgctactagcatcagcaatagtaacagacttctgtgtcaatataacaagatcaagatccataacactgaggtgtaattggacttactcattccagtcagagaagttaagcccattaaaattggcacaaatgatacataagaattcagtgaattgtgaacatgtgttgcataataacattcacataagtgttttgagacatacaatacatgtcatacatatgatttattcacataatgatcaatgtatattgatgctctcctttgggtgatacagttgtagaagcacgcttcatgatgaatcaagattgattcanagaagttttgacgataacaaaggtgacgacaaaaagcttcgtgatgatctcaagaatc

SEQ ID NO: 283515 - DNA, 328 bp, Glycine max
  unsure (1)..(328): unsure at all n locations
gtgttgttcgggctgcttctgtcaagtctgccaaggtggacatgctattggttatgcatgtgaggtctaacatgtcatgtgagggaagcctgtatattaggcaactctgtccttttctaacagttggagaatgcattgaagacaaactttatgttttgtctgataatgcagctgcgtgtagtgcacacgtagtactattgcacacgtgtcactcgtggagtgggcacgtactanatacgtgttgcgtgggatatgaagttgatttgcggtctcctctctgcagtgaccaccgccacttcgaaattctatcttctttctctcgacagat

SEQ ID NO: 283516 - DNA, 522 bp, Glycine max
  unsure (1)..(522): unsure at all n locations
ccaacacccaaccacttcacatctcagaagcggcgctgttctgactaatcgtataaccgcacacaccaccaacgagcggcgtgaaccctgaanacctgcgatatcggcaaacagcgagacccgagatcactgaggcaccgcagcatgcaactgttaaaacttggaaaaaaacacaagcggtcgccggcgccggggttgagaccaccacgaagagaagacagaaccgtgatgcataacgcaacaggcggcacaacggcagtaacaagaaggcatatcgacaagccgagggctcagcgctaacttccaagaaacacctgagtgcactagaaggacgtgagctgaacaccaccaattatacacggcgtgacacgaatgacacatcgaaacgccactccgacagcggggcccaaaggaagaaccggcgaaccgctgaagagagctagacttagtccagcgcactacatccggcacagaacgcaaagaccagaaatgaggaagagatggtccacatcgacacacaan

SEQ ID NO: 283517 - DNA, 579 bp, Glycine max
  unsure (1)..(579): unsure at all n locations
acactctcctcacnncntagataaacattntgctgcgttgaatttgaatnttctgtaacaacgaancnnnnccaacctcagacgcgttgaaccttganaactgctcaacacgcgaactacacaaactcatgctttgagacagcccacagcaaccaaaagtctttccctctcatctaatacactattgcaagcatatcaatagtgaagccccaaggggaatatgaagtgaagcttatagtattctatgaccaattaaggttagagatccatgcactgtacggctccagggcatatctatagtaaggatctctgctctgaatatttatgtcgtcgtgatcctaagtcaatactctttctaacatcttcaccgtataaagacctgaccagttgacttttataacatatcatcacagtacaaaactcatatcaagactcaatgatgctagaagtcaacatacattgccttactagtatacaaaatgaacctatccaactttctaattatatcataaacctagtatcccaaacctcctcatattcccatactttctaataagcattgcaatgaatggcataacn

SEQ ID NO: 283518 - DNA, 244 bp, Glycine max
  unsure (1)..(244): unsure at all n locations
agcttactcattcagttttaggagttttatgatgatacttgtgatgtttatgtgctgaaattgttgatggaaaactgctaaggatgaatggtagagttaacctaaggttagaaagtgagaatgtagtgttatgaatggaanaagaatgaggctttgataattggaacgccaaatctggatttagtggtatttggaggttaaagggagttaatcctagtttgaaatgtcatttaagacttatgag

SEQ ID NO: 283519 - DNA, 113 bp, Glycine max
  unsure (1)..(113): unsure at all n locations
ttccattattttattcaagctctgccacatgtccctattcgattggagcaaaagggcccactttctctntttgactgtgacccatactcagtcacaaaagtgagaaaaatctg

SEQ ID NO: 283520 - DNA, 577 bp, Glycine max
  unsure (1)..(577): unsure at all n locations
cccctcacatatcgtaccctctacctttaacantctagcacctgtgaatggtganctactacactcatcccaacaggactggttgaaccttgatccccctgaacggcgaatcactcgccccgggatccctagatcgaactgcagcatgcaagcttgttatagaactgacgaaaaatcaagaacaagcgtgtgcgcacatcgctcgagtatatgatatacactccacaatgtttgaagtagaggagagcttcaaccctataacgcaacgtggcggacacaagtgggcagtaaacttgaatggtcgacattgtcaatgcagaaagtattctgcgctgtactatccatgttcacacatgattgcagctagtggttacgtgagcaagaactacaaccaatatatagcaagtgtttatacaaacgaacgcattctaacagctcactccgcacaatgcgggcctctgtgaatgaacggctattctcttctgagacgctggaccttatcctgcccaatacattcgagcgaagtcggcaaatcacaaggtaagaatgaatggatgggtcacctctggcccgaccn

SEQ ID NO: 283521 - DNA, 286 bp, Glycine max
  unsure (1)..(286): unsure at all n locations
atttcactctctctgtgcaagggatatttctcttactgcatacattatnttgcaaatcccaacggtggttatgtgtggaaacaagtttctaacctggtgttcaaattttacgaatatccaacggttaacgagtccaacatcatagttttaatgggacaagttctggtgtatgtgggaaaaatagagcactgtgcgagggacattgctctcagcacatacattattntgaaaatcccaatggtggggatgtgagaaaatgagttctgaactctgtgttcaaatttca

SEQ ID NO: 283522 - DNA, 632 bp, Glycine max
  unsure (1)..(632): unsure at all n locations
tctcaactctctctctaantntgtcccattctcgtcntcgctctcatactatatgtcacttcatcgtgcacttatgctgtttactcttcaccatcgtcgcacgacgactgatcacatttgataccacgtctgatatcggcgaataccgctcgtccccgcgattctctatagtcaaactgcatgcattgcaactttttataaaaatattagtaatttctggtacggaatcatanaattttagctcgtgataattcaaagctgatataatggtgatcctagactccatagaactaagtaaaaggggtaattctaattactatgagaattaaggggatgacattttcgtaaatgcctatacaactacgttaaacaatggaattatcttgaattagttggtgacccaatataagcgtctaattttatgatgcatgataattctaatacggtagaagtggtacacctcaaaaaaatacatctatactgaaaagaaactttttgtcatgcacctgagcatcattaaattaactctagtaggtaatgtttctatcatagaattccatgcttatatgctacattagtggaacaatattctttagctaattgacagacataggaactgctgaacaaaattt

SEQ ID NO: 283523 - DNA, 450 bp, Glycine max
  unsure (1)..(450): unsure at all n locations
ntatggttatntctttcgccttgntatttggcttttattgcttagtactttttgtatggttgtcttggatgtntacaattattgtcttggttgtgttggctctnttaactntgattggatgattagacttgttggttatttatggttgaatcattatggataattgtgctatgatttattgtgcttagtcctttctcatacgttttggctttttatgttgcaaagggggagcaacttaagggagaattatcatgaactangcatanattccatcttaaagggagtaggggtgtgacacacatntatcacggatatcattatcttgtttcagatattgcatcatcaaaaggggatattgagaacatatatgattgngtttcatgatgccagatgacgcaatcaagtangaatcagaatgcaaaagaacatgtcttngtanatctagaagag

SEQ ID NO: 283524 - DNA, 403 bp, Glycine max
  unsure (1)..(403): unsure at all n locations
agctttctaaagttgtctggttntctataccttgaaaacaaaagtgtgatattcatctttttcattcccttctcccttttccaaaagaacaaaggactaaccgcctgaattcttttgtgtcccccttctcccttgtcaaagaattcaaaacgacacagtctgagaattcttttgattcttccctttcccataaacaaaagatttcaaaggactaaccgcctgagaattcttttgtttcccccttcacaaagtctcgaaagactaaccgcctgagaactntgtcttaacacattggagggtacatcctttgtggtacaagtagagggtacatctacttgngtggtgtgactgaaacaagagaaggacatctcttgtggatcagtctagtggagggacatccact

SEQ ID NO: 283525 - DNA, 285 bp, Glycine max
  unsure (1)..(285): unsure at all n locations
atctatacattccaatccactcaattaatacaatttcttattcatttcanacacaaacattcatttcatacaaaacaaaccattgaatatcatattcagtcagttcactgttcaaacatgcttttgtacaagctacaaacactcaaacaatagaaatttanaagactagaatntanaagactaataaagcataaactaaataattgataaaataaaacttttcataatttgcagaaattntaaaaaaaaaattgtgcggaatttaaaactcctggtcatcctact

SEQ ID NO: 283526 - DNA, 433 bp, Glycine max
  unsure (1)..(433): unsure at all n locations
agcttgagcaagtgcttttctttgtcttttacagctcagcctctaccaaatggacatactcctttgagggtggaggatcatacacttcaacaaccattgcaatangagcaatntcagcttcaacatgaaaatccaattcttcaatgataggttgtacatgatgagttaaagtgaatctggagtatggcaagaacaccatataggagaatgtgtgttcaaatacagtagagaactcccttgtncatatgcaaaccatgttganaggattttcttanatgaagcatgtatggtcaaagtcttaataacaatgccccatctcacaatgaactgaatttgcaagaggcttctcatcaagttccaaactagagcaatgatcctttagtctgtagaacctattcatggcataccaatccagacttgtaagctaaatctt

SEQ ID NO: 283527 - DNA, 259 bp, Glycine max
tacatgtgtctgtcagatgcatggaccatgtcgtcgctaaagtgctcatcgacaatggttcaagtttaaatgtgatgccaaagaccaccttggagaaacttccttttaatgcgtcacgtctaaaaccaagttcgatggtagtacgagcctttgacggtagtcggcgggaggtgatgggggaaatcgacatcctcattcagataggcccccacacttgcaatgtggttttcaagtgatggacataaatcccgcctacagc

SEQ ID NO: 283528 - DNA, 268 bp, Glycine max
  unsure (1)..(268): unsure at all n locations
agcttcattgcctatcaagccaacttacaacagcaagccccaagagactcagcataaggatgcacagaccaaagttgcgtatgtaaaaaaattgtatgaccaagtgaaggtgcaaattgcaaagaagaatgaaagctatgccaagcaagcccaaaagaaaaggaaggaagtggtacttgaacccggtgatgatcttggacatttgaggacaaatgtnttccaagatggagggaatgatgagaatcatganacaggccaaatacagtct

SEQ ID NO: 283529 - DNA, 399 bp, Glycine max
  unsure (1)..(399): unsure at all n locations
ttcttggtggtgaagctccttcttccttggcttattccctagtggatggtgcctcccctatcctcttctcctttgccttccgctgcatctccatgatgaanaatcaccattgaaggacctcattgaagatcaaagatccagcctccatagaagctccacaagcaagcttccatcaagttatgaccatttgaatttctcgagatcttccgtggttcaatttcnggcgtctccatatgtcatgtgcctgaatcggacctccgtaagaaaatntatgaccatttgaacttctctagagcttccgttggttaatttcgagcttctcgatatctgatgtgcctgaatcggacatccgagtgaannagtggacaatttaatttctcagagcttcgttgtcaattt

SEQ ID NO: 283530 - DNA, 496 bp, Glycine max
  unsure (1)..(496): unsure at all n locations
tgcgaagacttgagccgtggaaacccgttgaaaccnctgagacacagatactcttactcgcctgcgggatgcttacacgtgaggtgatatgtttcacgactgatccagtgctttctctagagttgtacagctcaggctctacgatacaggcattcactcactttgtagggatggagagacacatacgtctccatgcagctcctgtcctcccgtgacctattgtagctacatacactgaaacacacatcttggatgatgtggagtcatagccgatatattgatgccggtatgcaagacccacccctgctactgtgcttcataccgctagacccctttgcttaggaaacctgtgatatgtctcttatatgcacagtgtgccaaggctcatacagagaccttaacgtgactcggatcaggagcctgatcaatgtcacataagacgtccctaacccataacttatctagaaccaaacaagtagcctgtatcatcgtaccg

SEQ ID NO: 283531 - DNA, 502 bp, Glycine max
  unsure (1)..(502): unsure at all n locations
cacaccgctcttcactctctacatcttgcggttcgctgtcaaatctaanactacnnncannnnccannaagcgagcccgttgaaccatgataatcacaccattanaccaacctccgacgcgacgacaagaatcacatgtttgccatcatctccaagagtgtttttgacaatgcactcttcatgacgtagtgatgcaaagaagaacaactagctcatacgctcacatagtcagattgttcacaacacacctgagtagaatctcaaaacacccagctacatgaagggagcatcttcatgacatgcagcgacacatagggtgaaaggatatcaaacactcatcgagacattccaagacctgagacgaacacaagttaagacggccccagtaataaaactgtgatgtacccgttccgcaggaacaacaaaatctagatatccgcgtccttatagtattggatgcacatagcagactgactggccaatcaagaacgatcgtgcgacg

SEQ ID NO: 283532 - DNA, 570 bp, Glycine max
  unsure (1)..(570): unsure at all n locations
ncgagacggcgagtctcattcatattaatctggcgngacganttgaaacaacnananntnagtaaaaacaaccagatcncncnnnnnnaagaagaggangccgtgagccccttgaactaccgtcgaancacacncggaacccggagatccgctagagacgacctgcaagcatgcangcctcaccttctggttctcctctattnatgcgcatgagaaaacacgctctatcttcgactcccactccaacaatgcctccgaacattcttaccttaaaaggaggaacgttgagttaatgcccccaaatcggctaagtctaagaacaccaacatatcctcatttgctacttacctcctcattatgacctctatcaccattcgaccaacctccatggaagcacatccgtagatcataacctcacaaagtcgataaagctgcttcgaatgcaacccactcatctagatgatcccgcacccaacaacagccaacgaatacacacctggtgaggataatcctcacccgcaatgaacccaatatggtatgttatgaaactcagcatacccgtaaaccatc

SEQ ID NO: 283533 - DNA, 407 bp, Glycine max
  unsure (1)..(407): unsure at all n locations
cccccctctttcatactatactatagcaattacnccnnttcncagagcgttggctgaacctagaaacactactgatgaccgaattgcaattcaaggctacttttcaatacatcagccataagttaaccttaatgcacagtcctcagaatcatggaaattacaactgttagtcatggctaaagataaaactacatgtaacgaacctcataatattgactgattggatggttgtcatcggcctatatatgaaggcaaatgacaccaacctaagattatatgcatacttgtacaggactcattaatctaattcaacctgaagaacaagacctataaatacaagtataccgaccagtgtccacgtgtttgatgatgctgatgcaagagtcttatatcaatgccactacacc

SEQ ID NO: 283534 - DNA, 491 bp, Glycine max
  unsure (1)..(491): unsure at all n locations
accgaaccaccacctaccgacaacagaaccaaaagaanataccnncaagggaggtgagcctgaacctaaancccgaccgaagcctaagaaccgcagcggcagccgcaaacttttgaattattacgactaccaganacgacggccgaggcgaaaagacccgccgggacaaaacccacagagaaacaccacaacgctagactagaaccggggccacagcgatagaaggatgagaaccctacagaaggaggcgaaccgtacccaagtgcaccacaaggaaaagaacagcccacaagcaaagacgacccaccggatgcgcggaccgaccaaagacacatggaagaagcgtgcacaccaagaaaatgcaatactaacggggcaccgaacagcgcgacgacgtgcaaccaaagaaacataggcacaaaccggagagaaaaaggagacagaagtcagacaaaagccaagcaacgcaacccggccgccaagtacacacc

SEQ ID NO: 283535 - DNA, 662 bp, Glycine max
  unsure (1)..(662): unsure at all n locations
gactacgctcancnttccnctctatctctgtatcaannaggtgtaccgttacgaaatnngnctcctnnncancnnnnnnnancccgacgagcggaattgatccctttgacaccgtgcgctatccatacatcaagcagntctacgatangatagcatctataactatcagcaaactggtactcgtttttttctatcttatttatantcacacttcgtcgaacgtctgatgtgtgcgctcttgactgatcatactcaacgcagctcatcctacccatactcactacaggtaatcacgtgactcgctagtctaagatataacagactatgatacttcctattcactatacaacgaacaatcgtgggactctctatctcacaatacacatcattcgccgctagtttatagaatattcataattatgatcctgatcggatagaagatccacagttctcggctcatatataatctctcctaagtacgatcgtctgaatatgacactgttgagatagatgnactcatcttctgatcgactcttacctgactatgacctctagagatcttctaagaccgcgattataagcactcgcgtccgtatactagtggtctgatatcgtttcgtcgactttctgacagcactgatcgttgttctctacaaagagcg

SEQ ID NO: 283536 - DNA, 172 bp, Glycine max
agctgctgctgctggacatgtttaagacttgtcagtgctatacataacatcatagagtattatgatattccattccatgaaccttctataagatcagagatatctttgtataccttatgtcaccggtgactattgctgatgcatgcgccttgcttgaactctttaatcttgc

SEQ ID NO: 283537 - DNA, 257 bp, Glycine max
tagctaggatattgatagcatgtactgtaatccatttatactttggaacttaagtgctctggtgatgaatatcataccacaatcgctataatattccaacacatagatctcttattgaaagaatatggatacaatttttaaaacgtgaacaataagatttggaaatatatattaccatattgacttgattaattcgttaccggcaaatataaaactgtactattgcaattataattgtcacagcgtaagacttgaat

SEQ ID NO: 283538 - DNA, 143 bp, Glycine max
  unsure (1)..(143): unsure at all n locations
cgcttgtataatgttctgacatgacacatancacggtttggattggtgcaatggtaaaacggatgctctacattattttcatgtaacaaatgcgaatatgatgatcttgaaactctatgcaaaatctggcatgcatgcaccta

SEQ ID NO: 283539 - DNA, 526 bp, Glycine max
  unsure (1)..(526): unsure at all n locations
ctccgccttcccctacatctccaaactacgtagatcgcataactgactcacnncacccaagtggggggtgtacatgaaactcaantncacaaanacacaacaggacacaacaaccctcttgcatccgaccagctttttcgctctgatgttccaactgcactgagtgcttacaataatacactatgtctcttgcatcagatcatccaaattgtcctggaatcggctggagccaaactcgtcgaagaagctacgcccaatgatatgcatgaatctgctatgtctctctctcccagtcattgctaacgagactaggatctactgcatatatacagtttttgcagcttaaatgcattcctagaatgataatgcatacgacggccagtagctcatataaccacgctggtaacaacagagattcctgtgtgtctaatataaccagaggatgtcgcccacgcatctgcagctatattcgggacactgcatgactaaataagatgtggaaccatatcatgaggtcgtgcaaacc

SEQ ID NO: 283540 - DNA, 490 bp, Glycine max
  unsure (1)..(490): unsure at all n locations
ccactcatgcactcaccaccctatgtacaagcttcgcgatcgacgatggcctatantacagagacagtgaacctgaaccttgaaccgcgaacacgggcccggaacttgaaagccgagcatgcaacttttaatattcccctgaaaagagcgggaaggcgcggaatcagaaaccacggccactccctaaacagtatatatgctaggagaaatggacggtctagagaccgcgcgtagagggagaacgatactcacccgcaaaaggagaaccaacctagagaatcgcatctcatgcaagctctgattagacacacaacaccagcacagatggcaaaaacgggcaaatcaacggaaagggaaaggaaagactacagcataggatggacgaaacaaagatagatcacgcgatcaagtgacgacacaatgcatcatcggacacggcagcttaccttaccaagaagtcagggtccactgaaataccaacacatgaagc

SEQ ID NO: 283541 - DNA, 701 bp, Glycine max
  unsure (1)..(701): unsure at all n locations
tcactccgcctctccctnctatantccaacaaatgagatacgttctnagtttcggattcganngnnnaaaannnncccccncacccgctgagcgattgnacgcattgatacccgatcgaaacatccgacaatatantatactncaagcntactngtacagntttatgatntgggacacgagctatatctaccctactgctacngngcttttactgattgtcatgcaccgataattntgctgaatcccgagatctagatgtcaccataggctatagaaaagtgaagctcatacacattatagcatcgaatgcacgtctcgtgtgtacgaacgagtngtatcgaatcagaatcataacattgtaggacgtatacacttcacatatcgcggattgcatgccactatgagagacaagcgtcagaccgactataatagtcagacattagcgatcatatgatctttaagcacacacaacatatatcagcgccagagacatcaatgagctatgtgtagactatgttatagacacttctataacattcaaactagacaattacgaatactacgacagtcgagaatgggaagacaatatgatatgacacaatactccacgccgaacaagatcgacgtaagatcatcatcgcataaatatcgacatactcccgacgtcgcatacgatagaaactacctcaactcccgatcc

SEQ ID NO: 283542 - DNA, 306 bp, Glycine max
agctttgtatgtgtgttatccaccatctttccatagaaaggttgcggttaggggcgacactaaagcccctccaaagtgctctgcatgggtataccaccaactgcttgcctcttatcggcatatccgaggaaaggctcgaagtcagctagattgtggtagggaatatcatgtgtctcccccgtgggttgagagacatgtacatgatgaagttgtcggctcttaatgagtatgggagcaaagtcaatgacatacctatttggagtgtacgccatatctggtggtgtatggttgggaggcaagccatat

SEQ ID NO: 283543 - DNA, 559 bp, Glycine max
  unsure (1)..(559): unsure at all n locations
ccacgcatcccnctnattctttanttaagtaatcgttgtcataaaacacaccntcnnccncaagagtgcgatttgaacatgaaacnctgaaangcacactaanaactcagcgtagaaccttacatacctccnaaaatagcctcagttctaagtttctctttcatgatgtatagctctggctcacatgaagctattacagaaaggataattattgcaattacgttagatgaacctgcgtggcgacctgataaaatctcattaaggntaattatagggtctctattgcatataattccgactgtacaagacaacctccaatggctaatagtttacaggtccatagaagccctcatatgaactacttgatatatcggctttaatgttatatacctagaaactagataattttaactctcatgttccctgtactcattgaatgcatagacctatatgtgacacatatctatcttattaccgataaattgtgatgatatatgcttctatgtgacgcacctatagtcttagtgatgcttaactaatatactatattgtctacccg

SEQ ID NO: 283544 - DNA, 391 bp, Glycine max
  unsure (1)..(391): unsure at all n locations
agcttgtataatggctatacatgatacatgtcaagggttggtttggttcaaagataaaaaggatgccccacactatttccatgacacaaatgcaaaaatgatgatttggaaactnttatgcaaaactggtcatgcatgcacctatgtggacactcaagtgtcaaacttttatggtcatgtgatgctaaggctcaagattcatttactccattttaaatcaacccaatgtttccaaaatatgtgcttttatcaatttgggcattcctccaagtacatctcgagcatgcgggaagattncacagcattcacccttcaggtgtagacacgtatgtttcacaaactagctatgatcagcgaatatttctattaaagaagaattgggaatcatctc

SEQ ID NO: 283545 - DNA, 258 bp, Glycine max
  unsure (1)..(258): unsure at all n locations
ccttctcgctaagccaatcttgtggcttatcgagcgtccgctaagcgcaacactcctgngctaagtgcgaggaagaatccaaaagaagatgagatgaacaggttcgctaagcacactgcttcatctcactaagtgcaccacttcagttcatcctctaagcgaganagctgcgataagccagaaatcactaatgtgcgctaagcggttcatacgtgcgctaagcgcacgagcacgaacaaggccacctatttaagcctg

SEQ ID NO: 283546 - DNA, 520 bp, Glycine max
  unsure (1)..(520): unsure at all n locations
atgagtacaancttganncccgtttggatnccancagttganttacagttngaatactaccggcgaanccgaggatcgtctacagtcttcctgcgagcatgcacgctgttatgcaacttcttattgaatgtttgtgcttcancggatgaaccatgcagcctatggcttcatgaacactaattactgagacatttctggttgccgaggtgagaggtggaggtgcacattacttgaggaagcccttcttgcttgccgaattctttgcgttacaagacaacactacaacataggtgtttgaagacacccatcatacatgcgcatttctatgggaatcgctgaaggtccttgcacattgttgagcttctacagatcgaacatctgttctacaactcacacttaactcttgctgtcctttatatgttgaaatcatgtatactgagagcatgtcaggatggaacacaatgctcttggaaacaaattcaacgtaaagggcaagagaagtgtttaacctgtctgaatc

SEQ ID NO: 283547 - DNA, 505 bp, Glycine max
  unsure (1)..(505): unsure at all n locations
gcgacatttgacccttgaacatgagtacatcgaacatcnanactcatcttctcattgatccagctatgatgaacatacagcctatcttattcatatctcnctctttttacactggcaccagacacttgatcataggcctctctaaacaatgcctaacacgatacaaaggaactattcaccactaaatacgctgagtctcacatggtggtatgcaaatcatgttacactccactcgttcatactgagaaatttaccatccatagaatgcgctgataaccctgatcatatgacttataggagcttgattggatatttaacgatctctatacacgaggaccaacatctatttgctacaagactaacttgaatgttgttgccttcaacacgcatcgtcttccaacactacgtggtcagggacaccatcttcaacacagattatttccatacgatcactagggatactgaccatttttgtagcttaatacccgcatactttaaaaacact

SEQ ID NO: 283548 - DNA, 431 bp, Glycine max
tatgttgttacctttgaagaaggtcttcccatcccacggatggtttacaagttctactttctgacctctgcgaagcatttcttccgttaagtagagcttggatccattgggtaggttctatcaagaattatcttgatattaagttcccttctgatatgcaaagttggaggataagtattgcgtttgtatgaacatctatagaaagaagcctgcctagctcagtcaactcatcaagtagataactttgtgtctgtaagggtaaccaaaaaaaatctttgtatgggccgccatagaaaaatgttcttttgccaatagacctttgaaagattgacttccgttagatagatccatgctacttctttaagacgaaatgctcaaactattaacgtcatggcatacgtgtgctatatcattccattggatatgcagtt

SEQ ID NO: 283549 - DNA, 485 bp, Glycine max
  unsure (1)..(485): unsure at all n locations
ctatggaagtnggatctttgagcttaataatggtccttcaatggtgatttaagccatggagttgtagcgaaagataaaggagaagaggtgagaggaggcgccatccactagagaataagccatggaaggagaagcttcaccaccaagagagtgccttggataagaagcttagagagggaagcttcatggaggaagataatgagagagagtggcgtggaaattgaggagaataaggagagaagttgaactttgaagtgtgtctcacaagtttctcattcatcanagttatgacangtgttacacatgtntctatttatangctaacacatgagaagcttccttaagaagcaaggaaggtagattccttgngaagctatggaagaaagcttcttgagaactagagggggctactccacccnccaatagctanctcaccccatgccaaataaatgaaatacattgggaagctccttggaagcaggaag

SEQ ID NO: 283550 - DNA, 346 bp, Glycine max
  unsure (1)..(346): unsure at all n locations
agctntaaagattttgtttgaaatgtggtgtcaattcatttatgtggtgtgctcatggtccattggtgaaaatcttttcaatatttattcttcgtatgcacaacattatataactatttatcaaaattccacaattatggttaagctatttatataacttaatattaagtagccatagtttcttctaattaattcgagcttgaattaatctagatcctaaaacactcttgtatttaaatagctcaaattaatttgaataccatgtgcaatttttggatctagattattcagctntaatacaagagtgctctaggcggtgaagactctcaatcaatttcaatacatg

SEQ ID NO: 283551 - DNA, 302 bp, Glycine max
  unsure (1)..(302): unsure at all n locations
tacacattaagtntatcctatgcaacacaagttagttacaatgaagttattattattattatatggtcaaggtattattttattatcacaaaggaatgtagagagaaaaaagacaatggaaagagtgacataagaaggttgacaaagtgagcgcatagccaanaacaaaaatgtgaaaatggtaacactccgaacgttaataacaccatcacatcaccaatgcctactctttctccctcactccttctcttctacaaattgccataaataanatctcgcggcaaatcttttctctattcatt

SEQ ID NO: 283552 - DNA, 490 bp, Glycine max
  unsure (1)..(490): unsure at all n locations
agtcgaccctgcangggcatgcaagccttactttgagaaagtatggaacggtagtctntcttcgtgaaagttacgagggtggggcctattcacacnnccctacaatatactaaagcttctaccttcatgcccagaataccatgaataataccaatgggcaaacttgcctttgagaacgcgaacgaatagtcacttctctctgngaaagcaagggaagaagaactcgctttgaaaagctaagagatggggggggagggtacnagcggtctccatttacttacggacaccattcgacacccgagttaaaagctattgccattgaactctctcaaagcttctaattcaatacgaacgtctcgtatataccggactcatccgactccaagtaaaagtaatgtggtcgattttctcatacctacattttaattctagcgttcgattattcggacacatcgacatccagtaaaatcatgtcttgattattataccc

SEQ ID NO: 283553 - DNA, 332 bp, Glycine max
aacagagatatctattctatagatacatataattataacaatttccatggctctttatactgtttcagcactgctgcttgctaccacgtactgtgttttagctatggtaaccaagttaccccatacaagtgagcaataacctattatagaccttctgtgagtgatagaccctacccagtcaacattagcgtatgccttgatggttcatactgcggtatctttgtgttacgagaagacatatgcatatgcccttccttctcaagatccgatatactacctttaggtagtcttgatagggagaatgtgtgagatgacttactaaacttacccca

SEQ ID NO: 283554 - DNA, 398 bp, Glycine max
  unsure (1)..(398): unsure at all n locations
agcttatccttatggtctgcctncggacttcacccctcgtgccaccccagaagatntaagtcaagcccctacttttgaggggcaactcccaccttatgaagactatcccgggccagacgatggggaaggagatacccatcttggccccctcctccacctcaaagatccatccccgcatgaactaccccagccgaacatagtccgccatatcccggcctcacccacgcctgtgaaagaatctgttccctttgcggagagtagggaaagattgggcgcttgaagaaaggttganggcgtcaaggcctcggaattacccattctcggattggcagattatgtctgtaccaacatcgtcatcctccanatcaaggaccagacttgataatacaagggcaaca

SEQ ID NO: 283555 - DNA, 143 bp, Glycine max
  unsure (1)..(143): unsure at all n locations
acacacccattctaaaactaagctcaccttcttgagaagcttccttgagaagctagagcttagctacacacacccatctaanaactaagctcacctccttgagaagctttcttgagaagctagagcttagctacacaccccta

SEQ ID NO: 283556 - DNA, 416 bp, Glycine max
  unsure (1)..(416): unsure at all n locations
agctntcttgttatattatgtgtttcaagaacaaaatgaanaataaacaaacaattaaacaaaaaagaataattgtgtcattcttttagagagggtgttggcagtaaagaaantttttcatgtttaagaatcttgggaatgaataaaatttgttgattgaacattaaaagtctctagataagttctctaggaatgacaaaattacacatattcttatcgattattttaattatttattatattatatattctaataaaaaataatatgatattcttattataaaaaaattaaactcgaaatggtaagattctcacttcttttatgagaaagctcttggtgaacattaattagaaaattctcccagaanagtaatttttattacatatgttcatgaattttttaattatgttcttct

SEQ ID NO: 283557 - DNA, 469 bp, Glycine max
  unsure (1)..(469): unsure at all n locations
acacatgttcaccattttttntatacaagaaccttaaaataggaaataaaaataagcatttttgtaactatttgtaaaaaaacagagaatganaaataaactaactntcttggtgtcaatgataaactctcagtttgataaactacatctgctcaccagtttttaaacaagtctttaaaaaatataaataggaaataaaataaaaatgatgccatctttgtaaatatttataaaaacagaaaatggaaacaaaaatatttttaaaaatcacatatgcccatagctactaagataaaggctcaatggttntgtatatctgctangtataagaaaaacttnttattatccgctntttctaccaagcaataagtagaaacaattagcatnctannattacatcaagtctctttacaattatgaaatattaaaaatctaatccctctggtctctctctctttctctctctatc

SEQ ID NO: 283558 - DNA, 418 bp, Glycine max
  unsure (1)..(418): unsure at all n locations
agctngaagttgactaatttatctattagagctantttttaagctntgatctgacctaatatgaaagttatttatttgacttgttatataaaataccaatatgcatgtcaacaaacccataagccgaaataggctaaccggcctaaataatccataagggctcatttactaacttatttaatattttgtaaagttacattgataatataaagacttaattataaaaatagtcttcttatttttttccaacttactaaattagtctcattatattntaattcactattagagtctttnttcaaattgattatttgtgtcctcagaacaaaatttagacgttgacgattaagaagaaacagtgaccaccatgtgtcattatctaattggttggtagaatgatgaatganaattaatgatc

SEQ ID NO: 283559 - DNA, 78 bp, Glycine max
aagtacctgtgtaatcaataggatgtaactttatttgtgacccatgaagaccttaaaaagggtaagttatcaataaac

SEQ ID NO: 283560 - DNA, 385 bp, Glycine max
  unsure (1)..(385): unsure at all n locations
catcaagctgaagttttgttgaataatctanacatcttttctgcatgtgctcgtatggtacttctttgatatagtgcgaaagtactggagctactctttaccattgaggttgtctaatgttgttggacattggtagtcatcatatgtttagtttctagacgtgtctgtaattgtaaatttaccttgttttgccaacataaattatcatctgatttctataattgcctgcttactcttctgatatatgctgagctactagtatttatatcctctatttgagttcttgagaattacatatgctcctgttcgcttagtctgaagatttcattttgtggctccataagtcatacatttgaatcncttggaacacatgtatttgttacac

SEQ ID NO: 283561 - DNA, 314 bp, Glycine max
  unsure (1)..(314): unsure at all n locations
ccccaatgccacaagatataaaaaagatagttatttccaaaatgtcaagatggngtgagatnatgattgtgatgcaatcccaccccccaagggcactggatagaagactccaagaagattgagccagagatgcaagagaaggccctatgattctcatgagccttanggtagatttcgagcccatgggctaagtacaagcccacttatctgtgtacatattagattaatggttcattatttctgggngttgtatttatggctccataatgtangtagggtaccctagaaatgtaggatnnttcacccttgtattt

SEQ ID NO: 283562 - DNA, 343 bp, Glycine max
agctttatcttatattgtcagatgcagcattgaggatcagagatattaactatggtccagatgtgctcatggaagaaattgaaaaatacaagacgtatgccgagaggttggagccctttattgctgatactgtgcttgtcatgaatgatgccatataacaaaagaagaagatttttgttgaaggacgacaagctaccatgttggacattgattttcgaacttatccctttgttacttcttctagcccatcaacaggcaggatatgcactggtctaggtattgctccaaaggtagttggtgattaatatgagtggtacgtggatatttatctatttctttttta

SEQ ID NO: 283563 - DNA, 460 bp, Glycine max
  unsure (1)..(460): unsure at all n locations
ttcctatgatttcatatctaatcaagaagtccctttccaaacaagagaatcaatagcaaacaaactgtgcctattttagaagaaaccttaatcaagtaaataaaatcaaaatgagcgttataatttcattataaagtagtcaaagaaaccatataccacgtaatgccaaagacgctaccaagtgatcttgaataattnntttcctttaaccagtgcacgatgttgaagataatgttcagaactntgagggcaaaacagttaatagccaagccaagccaagcttatatatgtntatanntgtaaacaaaatcanaacaaagctggccgataaattaaagaagtacgtcatcttaaatttgaaaccggatatattgtanagtgatcgaccaccaagctctagtntaatagtaaatgaagtactataactntacagaaaatcactntgaatctgtacaattat

SEQ ID NO: 283564 - DNA, 433 bp, Glycine max
  unsure (1)..(433): unsure at all n locations
agcttgtatgattattgtgtacccatcacatgtggtactangtggcggtcgggcgatggtgcacaacaagctttccacatccacaatgcgcgcagaaacccaccattccctgttgcccaccttcaactgagctcacgtactcccacgtagcccatatcctcgtttctctcaacaccgggtccccatcaatactctcaagcttccacaacattcaagcaaaacaacattcaaacagcataagctatcacaaccaagaaaaacagagcgaaggcagaaaactctgctcaacacatcaaccaaaatcacagcttttctcacgtaaagaccacagtaacaatttcttcgatccaattcgttaaccgttggatcgactccaaaattttactggaagtctatagtgcataagcctacattntgaccgttgggatctact

SEQ ID NO: 283565 - DNA, 500 bp, Glycine max
  unsure (1)..(500): unsure at all n locations
ttgctngctctanatctacattgatgttggtatttattgtaggaggttgtatgccatttttgttntaagggtagcatttcttggtaaaactaactttcctaatgtttgccttcgcacgatatggccccgaggaagcttgtctcaaagaggtccaggaaggacaaggcggccgaaggaactagttccgctcctgagtatgacagtcaccgctttatgagcgctgtacaccagcagcgcttcgaggccatcaaggggtggtcgtttctccgggagcgacgcgtccagctcanggacgacgagtatactgatttcctggaggaaatagggcgccggcggtggacatcactggttactcccatggccangttcgatccagaaatagtccttgagtttatgccaatgcttggcaacagagganggngtgcgnacatgagatctgngtangggttagtggatccgttgatgcgacctatcggccagctctggatatccgtagtgtn

SEQ ID NO: 283566 - DNA, 399 bp, Glycine max
  unsure (1)..(399): unsure at all n locations
gcaacgcatgaagagtttaatcaatttaagagaaatgatgtatgggatttatctcctacaccaacctctcacaagtcaatcggaaccaaatgggtgtttcgaaacaaacttgatgaatctgacatcacattaaagaataaatcaagattggttgcaaaaggatacaacctagaagaaagaatctgctatgatgaaacctatgctctagctgcaatgttagaagctatacgattactactctcattcgcttgattatgaatttcagactntgttagatggatgtaaatatgtcttctcaattatgcattgagaaaagtgttgtaatcaaccacttgattgagctatnaacatctaccatgttaaaacaacaaatgtctttatgttgaacatcacaagtct

SEQ ID NO: 283567 - DNA, 577 bp, Glycine max
  unsure (1)..(577): unsure at all n locations
caactcccccccttccttttaatgatctatatgttaactntcccnncannccgagggttgatctgaaccccatagcacctaanatctcagcttcgtagtgaatcggtgcagcactcccttagagtcttttacgatgtggatgctgagccatgttctcggaatgatcacgatcataaagctcataatcagaatgcctctaattataatgctccctatcacgatgttcaaatcacctataacagaatgcccgattctcacgttattgaatgctgcaaatgatcaataagtatataatgatgccttactaatctatgagatgttctatctattctatgatacaagggttgaagatcaatagattgcctctactcatacacttacattagcatgctcacaactagattgccttgtcatgcttaataacggtgtatgtctgaactacagcaactcctaaatgatattctaatgacttgagattctgcagcgtacccttatttgatgtgaaatagccatacacattccaccaaaatttaagtctacttgtaagctaaaatgcaggtaggatattaatgatacn

SEQ ID NO: 283568 - DNA, 288 bp, Glycine max
  unsure (1)..(288): unsure at all n locations
agcttgtgactcttggcaatntcttttaanaactagtcacttaanaagttgtgacttttgaaaaaatctttagaaacaagtcacttgaagaattgtgactcttggaaatgtatttttcgaaatcagtcactggtaatcgattaccattaaggtataatcgattacacatcaacaaatgtgactttttcatttgaattttgaaaattaaaatgtttagaagctctcgtaatcaattacaagtggtgtggtaatcgatacaagtgttgtgtaattgattacactagttta

SEQ ID NO: 283569 - DNA, 472 bp, Glycine max
  unsure (1)..(472): unsure at all n locations
tggccttgtngctatcttcatgagccttagatctcagcttgctgttagtgttctaagagagaaggtcangtccagagagttntagagattntgctatgtaagatctgcnaaaccngagcttgaagcggaagctgtctgagagcttgagatgagtntgtgaagtggtgaaaatcctagaggtgaaagagacatcctcaccacttngatntnnttgtatctttttgcatgttcttctcntttgtgtaatgaagcttcctgttatggcangctaaatcctctgtggatcttcttgtangactngatgtaatatcttctatctattaatgatgtttgtgtgtctctgactctagctttcatctagatgcattacctgacatgcgatcatgcttgtanggtatcacagtgaactgtctatctatgactgatngcaggctagtgcatatatacagatcggacatatttatgatatctg

SEQ ID NO: 283570 - DNA, 309 bp, Glycine max
  unsure (1)..(309): unsure at all n locations
agctgtccgcgaagagatctaggagggacgccatggctgataggaccagtgccgctcccgagtttgatagccaccgtttcaagagcgccgagcaccagcagcgcttcgagtccatcaaaggatggtcattccacagagagagatgcgtccagcttagggacgatgagtacacagatttttaggaggagatagctcgccgacattggacgtcgctggtcactcccatggctaagtttgaccctgatatagtcctggagttttatgctaatgctnggcccacagaaaagggggtgcgagacatgcagtcat

SEQ ID NO: 283571 - DNA, 249 bp, Glycine max
  unsure (1)..(249): unsure at all n locations
tcttcttctattgtccatgtcttcttctggcttaattcatcagtgngctatccttctgtgtgcagcatcattgtgatgttcccagcctttgatgacagctatccaggttctgctatccagtgatgtgaggaatgccaccatccttgctctccagtattcatagttggttccatctaagattggtggtctgttcactggtcctacttctttctccatgttcatcagaatatatctccctagatctactct

SEQ ID NO: 283572 - DNA, 247 bp, Glycine max
  unsure (1)..(247): unsure at all n locations
ggtgtactgttaatacatttctgaacgctncttatattatgctaagtagtgtgtggataaaacaaattaaaattcaaaggtatatataatagatggaaatttaattattttaactaatttattntatatattatttgaataaaataatttaaaatttgtttttaaaataatttgatgatgtgtaaaataaaaataacattctttaaaaaaatgggtggattaattatgtggtcaactcatcaattca

SEQ ID NO: 283573 - DNA, 204 bp, Glycine max
  unsure (1)..(204): unsure at all n locations
atgcagacagaaccaattcaaacacatatcgaattcagttaggtgcgctaacctatggttnggcgtcaaatattcagaanagacgcagaagctacttgacggagcttcgatcttacgcgcatcanaatattacgttacccgtaacaaacatacagtagagagagaacagagaagcatacctagaaatcgcagagagataacaaa

SEQ ID NO: 283574 - DNA, 331 bp, Glycine max
  unsure (1)..(331): unsure at all n locations
agcttctcattaatatgccaatcaacttcctcaagtgttacattntgaagggtatttagattctcttggaagtactctaaaattgtttttgtttccatcttgaatatgtgatggaatcttacctaattcataacctggagcatntatagttttctctaatatttctaattgcctgcataatcaaagctccaatctttcaagagctcacttcctcttgagatagagctctatcatttaagccagccttcaaagcattcagctcctttttaatattctggacttttctagcattagcttcaccatttgaaaactccaatgctttatacactgt

SEQ ID NO: 283575 - DNA, 523 bp, Glycine max
  unsure (1)..(523): unsure at all n locations
agtcnctttgccccttcgaacttgcacccatcatcaagcgaccttagatactaagcttcagaatgatctgcataactgacattttctcatagtgcctggtgcctttgctgaacgatctcaccattcttcctttcttttggggtctgcttactactatacccctggtttgctattcgacccctacccctactattatctntcattgcctaacagatacatgccanacataagcttgaactactttatttttgggaagaggctgcanatactataccaagacatgctgtcgaagtcttcgttcttatctatagtgtgaaacttatgaaactangagtggtatgtaatcatatgtatgcantagactagatgatactatcaggaatttgtatattcatttaacgatatttgagcattgtttgatgaagcttacctcatcaaaatctagatacggttgacatggagactaagacatcaacgtctacttatgctattcgatcngaagttactttgctacacaacattg

SEQ ID NO: 283576 - DNA, 403 bp, Glycine max
  unsure (1)..(403): unsure at all n locations
anatgcaattcatggggctccgaaaaatggttgaggatggagaatcgcactaagaaatcactacgcatggctcccaactcgtgggtggaggacgcatgaacgaatacgcaattcatggggctccgataaatggttgaggatggagaatcacactaagcaatcactacgcattgcttccaactccgtggtggaggacgcttaacgataacgctatcatggggctccaaaaagggttgaaatggagattacactaaccatcactacgcatggctccaactcgtgggtgatgcncatgaacgatacgcattcttgggctccgaaaatgctgaaatggaaaatgacttacaatcctacgcatggttcaactctggtggggactataaccaacccattatgggttcct

SEQ ID NO: 283577 - DNA, 267 bp, Glycine max
  unsure (1)..(267): unsure at all n locations
gagagagaganagagagagagtggcttatgatatngaacgagatatatgagagaagttgaactntgaagtgtgtctcatatgtttctcattcaacanagttgggacaagtgttacacatgtntctatntatagcctanggcactaacgttgtgaatntcattctcatttcatgtgaacctaanagggatattccaagaatatgccaaaggcattatagtatattccctttaaatgtcacaagcatggaagttgtggctctagcacat

SEQ ID NO: 283578 - DNA, 300 bp, Glycine max
  unsure (1)..(300): unsure at all n locations
agcttcgcacttgataacggagaacacatgagcagcgctaggcaatgacattcatggtgctcccgaaaaaggtggagtatggaggattgccttgagggtccgcacttangcaatcatgaaactcagctccaaactcgaaagtggaggacacgtgaacagccctaagcaataacattcatgtgactctagaaaaggatgagaatggangattgccttgagggtcctctcttangcnatcatggaacatagcttcaaactcgaaaatggaggacacacgaatgacaatgcaattcattcatg

SEQ ID NO: 283579 - DNA, 210 bp, Glycine max
  unsure (1)..(210): unsure at all n locations
tactctagtcaatcacatttctgtgaagttcttctttgttcatccctttnttgcattntgcttattcttgttcaaacaagaaactcatttcttgtgagtaaatctgatcttggcacaacaaactggtgcggtgaacgtggataattttgggctcgattcaagaaatgggctcggccaagtatgaggttgaaaaattcatagggaaaaatg

SEQ ID NO: 283580 - DNA, 431 bp, Glycine max
  unsure (1)..(431): unsure at all n locations
agcttagaaaggccgttagagataaatcaacgatggagaatgtaatgttaaaggatgagctaatgaattgtcagacgtcaaatganagtttgaaagagcaattgagcaagacaaaaaagaatatgttgataatcattgatcaatataaagaaaaggtgaacctagctgctattcataggcaggtgctgagagatgaacaggcgatggtgtcatcctatcaggttgaaagagaggcaagggaagacgtgaaagttattgcatgaagaacgcatgaagtggatggataggtttgctctcactttgaatgaaagtcaagagcttccatagctgttagccaaagccaagactgtggctgacacatactctactcccgatgaagttcatagtcttttcaattactgccaacacatggtcgaactaatgacccacat

SEQ ID NO: 283581 - DNA, 436 bp, Glycine max
  unsure (1)..(436): unsure at all n locations
tcttcttaatgaaaccgttaanaaggcactctntaacatcctttgaataagcttaatgttnntgtgagcaacaaaggctaaaatgattcttataacttcaagtctagcaacatgaacaaaggtttcagagaaatctataactttntgttgattatatcctcaagctactaacctagctntgttgcatactacttttccttgttcatccaacttgtttctgaagattcatcttgttccaatggtgctcttgttntctggcattggaacaaatgtccagacattcattttgttaaactgattcagtttttcttccattgtgattatttagtcattntctatcanagctntgtctatagttntaggttngattcanacacatgngtcttaatgatatctagtttaactccttcntctaatctcagatatatgatcttat

SEQ ID NO: 283582 - DNA, 412 bp, Glycine max
  unsure (1)..(412): unsure at all n locations
agctttgataaccacacgaatagcgaattcacattcacttagaacatctgatgaacatatagctgtaatggctccaacaaagtctctcgaaagagttgaagcattcttgtatctataagtgctggtttccaagctttcctttggtatgaaccttgccgaaaggcactgaaaataatccaatctctgtgacgcaggccataattgagcttgactcttgccaacttggcttgatcttccaacaaataccctatcatctttctgtcaacagtgatanagtaggctaaatatctgaaatgaaattctatattntgaatcagcatgttttcatctatgaattgatggaacagaaaataacctgaactggactgcatttgattcatctagatataacttttcatcaatctctaagcct

SEQ ID NO: 283583 - DNA, 291 bp, Glycine max
  unsure (1)..(291): unsure at all n locations
ctacaccatcaggactcgagaggaaattgcaacaatcttacacaagaatctcaggaaagcacaggagaggatgcagtngtatgctaacaagaatatgatagacaaagaatctgtagtgcgagatcgtgtatatctgaagttacaaccatttaaacaacaatcaatacctaacttagtgtttcacatattagccaattgacattttagctagaagaataaagaatagaggcaacatgctggttacagaagtgctaatacattgtcaacataccacaccagaagaagctacat

SEQ ID NO: 283584 - DNA, 449 bp, Glycine max
  unsure (1)..(449): unsure at all n locations
agcgatgctctagagatcctctacaggcatgctgcctgcgtccagccgcttgatatatttgatggactcatggtcactatgaatgacaaattccttgggataaaggtagtgttgccatgttttcaaagcccgtactaaggcatacaactccttatcataagttgaatagttaagggtaggaccacttaacttttcactaaaataagcagttggatggccttcttgcatcaacacagccccaatcccaacatttgaagcatcacactcaatttcaaaagaattttgaaagtntggcaacgcaagtataggggcattagttagctnttgcttaagaacattgaaagcttcttcttgtttctcttcccatttgaaaccagcatttttcttgagcacttcattgagaggtgctgccaatgtgctaaaatccttcacaaatcgtctataaaaac

SEQ ID NO: 283585 - DNA, 426 bp, Glycine max
  unsure (1)..(426): unsure at all n locations
aaagagaagttctgaaactcatcacgttgtctaaaaaggccttgaggtggatccaagtgctctgatcattcattagcatattcatgatttggtggcatgctcaccactgtttgtttctttagggaactcaccataactaanaaagcgcanaggcacccctataacacctgatccaaaagtaagatggataacgaagaggaagtgcaagaacaaatgaaggccgacatgttggccttaaaagattagatggcttctatcacggaagccatgctaaagattcanaaatcaatagaagataatgctacggcagccgtttccaatacagctagggaagcggaaccggtgctacagcccgtaataaacttgngccgagataganatgtgacgggtttcaatcggaggtatagtcctcaagcctacccttat

SEQ ID NO: 283586 - DNA, 357 bp, Glycine max
  unsure (1)..(357): unsure at all n locations
agcttgaatgtccatctccttctctntcactcttcattntcatgactaggaaggattcaagtttctagctcaacccacactattttctttgcttcattgagtcaacaaagagttaagggagtagtatttcatttcttaggacccgtactatgttgctaggaactcgaacttcatttacatgatgattntgtatgtttagtacaaatcccataactctgtaattgtggtactgtgaatactgcgaattgaatttgtgaatttggatcaatctgagncattgccctaanacctaagaagctacatgatatgctattggattgtgtacttggaaataattttaagttaagcaatatatga

SEQ ID NO: 283587 - DNA, 214 bp, Glycine max
  unsure (1)..(214): unsure at all n locations
tattgcattactttccttaattntttaaatactgctcaaggggttcccacgaactctaacagaataaaggtcattcctgagtgacccactccaccaattataaaggaaatttggggattccatgacttaacaaacttttacaaaagggttgtcccatattnttctataccttgagcacccctcattgagttggagaggaaccatgttccctcat

SEQ ID NO: 283588 - DNA, 505 bp, Glycine max
  unsure (1)..(505): unsure at all n locations
nttgaaaccttgaatccccttaacnccgtggaaaaagcgagntntcgagatattcaggctactaatgctgcatgttgttaagaatcttcatcacatatatatatgtgaatgttgagggactgaaaataccttagatatgaatgatatagcaaaaatacctcacataatatatatatgtatgtttgggtagcaagataccttggatatgcatgtatataactaanatacctcacaaatatatacacatgtttaggtagcaanatacctatatatatatatatatatatgtgtgtgtgtgtgtgtgtgtgtgtgtgagtgtgtgtgtgtgacncccacttatatatcagatatcttcttagggtctagtaaactatatatattgtatgatcgctgcttatatcttgattatcatatatccatatttggtatcatctcttctgtacgactttaactaatatattgacttcctatctcttgactcaacttcaagactcattttttctcg

SEQ ID NO: 283589 - DNA, 270 bp, Glycine max
  unsure (1)..(270): unsure at all n locations
tgtgcttggatcgttcatgatgagcangtntgaaccaatacttatagcanatntattatcacagaataacatcatagagggcacatcaacttcaaagtgaagaagtaacttgcttaaccaaacaatttcactagtaacagaagacaagacacgatattcagcttcagtggatgatttaaaatagtgggttgtntcttagaatgccaagaaagaagttggttcccanaaaacacaaaagtcagaagtggatcttttggtatcaacacaact

SEQ ID NO: 283590 - DNA, 422 bp, Glycine max
  unsure (1)..(422): unsure at all n locations
agcttatgcatggaatatgtaattatgaaattgagatgcccgaagatacaccatttcctagttaaccatgcattatgtaccatgttcaattattttgtttttaagtgaaatgggtttatgatcccaacatggttggctcgtggtgcctaacacatgaaactaagaatgtagtgtgaaatttcacgcttcccccttttttgtttntgttttgtagaggaaaacgcaaggatgagcaaacatgataacaaatggtatgcaattntgcagatcanaaagtttgttgaacgcatatgcatgatgatgccatgactcatgcaaaatgtgaggccggaatatgataacggacaaatgcaggatatgtccatttatgatgtatgaagagatgcttatgcgatgcatgatatgaatgcattntacggaca

SEQ ID NO: 283591 - DNA, 432 bp, Glycine max
  unsure (1)..(432): unsure at all n locations
tactcagcttttatccaggctcatcttggtggtgaagctctntnttccatggcttattccttaatggatggcgcctcctctcacctcttctcctttgtcttccgctgcatctccatggtgaaaaatcaccattgaaggacctcattgaagctcanagatccagcttccatagaagctccacaagcaagcttccatcaagtggtaatcagagcacaagagcttcaagtaggtgctccttaaaacctccattaatttttttctttgccttctcttccattgttgnttcttaattnttctccatgtatctcctcacatgtcttgttctaaatgttgttaacatgattctttagagtntccaccgattaaacttgctatagaagttagattngattntctatggttcanatttcttgttcttgttcttgaaccatg

SEQ ID NO: 283592 - DNA, 393 bp, Glycine max
agctttacgtgtgtccaagcgcagtatcttctgcgtttttatcacaaactgataaaccatccacaaaaattgatatttggtgtaaatttgttgcattcatataataatgctggacactttcggaatgaatgagcttatgagcatctgctaaatatgactgcagtgtgttgcatatctcaatggatgacagttctgtgctgttatataagaactgtgcagtaattattctctttaattgttactaaatttattatcttttccagctatataattatatatttatggtgatgatattattttatcattaaaacatgcattcaatcttggatcttgcatccacgttgcccaccttagttataggtagttcacttctccagcctattactaaattct

SEQ ID NO: 283593 - DNA, 172 bp, Glycine max
tcacaaaagcttgaaggcatgtaacccactatcttctcatagtagaacaccggtaatgtgtctactatcatttttatcaatctcctttccatcattggaggtgctactttgagcttcaaatccctccacctttggccgtattctttgaaggattcattctcttctttcacat

SEQ ID NO: 283594 - DNA, 293 bp, Glycine max
  unsure (1)..(293): unsure at all n locations
ttgcgccgctacgctctccgacttgtctccaggccgccctcagccggagccaagatcaaagagccagcgcgcaccgtggaggtcgcatgctttcttcggtattgcctgttcaccaccacagaccagttgatccttatggtgcagcgccggatcgccgatctgtggcgtcaggctgccgccgatgtccccgctaccgtcaattgngccgcaatgtacaaaacgctgctcggcgaactttgtgccttgagcgcgcaaagtgcggtgccagatgctgagttgcgtgcccgtcttga

SEQ ID NO: 283595 - DNA, 427 bp, Glycine max
  unsure (1)..(427): unsure at all n locations
agcttaacatacatgttagtttgtgaggtacatctgntagcttatatatctgtttgccaattttaagctgaaatctaaccgttacaactgtctgagactgtagttttaaaagttattcgatcttatgtttgagtgggatagctagatgaagtcccttgtatgaccgaagttgttttcattgtcaacgttgcaattgatgccttttctatgtttcatgcagcatctatgcttaactggagtttgatatctttgcttgatttgatggcatttcttttcattcagtacactgcttctagaaagggtgagaagcttgctcttatccttgctatgtattcttaaatacatgaattttcatgccttgtacttacacctaaagaaaccagaggaacaataaagggaattggtgatgcccatctcaaatttatta

SEQ ID NO: 283596 - DNA, 259 bp, Glycine max
  unsure (1)..(259): unsure at all n locations
ttctggacatgttgccctcattgaatactagatatcaatatgtcaaaaccattttaaatcataccatacgctgtcaacattgntctaaatcctttacagctcatgatatggngaaccacaatgtgccaccaggatactgggcaccatttaataaccagaaagagccttcaaaacatgcatcgtctaaagaagcatcaaaaggctatggtggaaaatcttctggtagagaacaggagggtgtatccatgtcaaaatgctc

SEQ ID NO: 283597 - DNA, 319 bp, Glycine max
  unsure (1)..(319): unsure at all n locations
agcttgctacacaaataacctgtgattgtgtcaatctcctgtgattgtgtgtaggaacaaggaagtangaactattagcctatgtgacatctggtaaataaccagattgagatagtttggtgtggccatgactatagttctaatagcagccatgatattaanagtccctttttgcaacctaaattcagtttagttaaaaaacattcagttcccttctccctaattttgatctcatgtttccacttttttctcaatctctcttcatatctgatttatttaatgattcactctctcatacctgtctgactgtngaatttct

SEQ ID NO: 283598 - DNA, 332 bp, Glycine max
atctagtcaagttcttagagaccatacaagtttcctaacgatatctaattatgtgggccattaagtctatcatatgctgacaatagccgagaagcccatgaatctcttcgggggcggagtaggtgtctgccatcgccttggccttggctaacaatcggcgaagttcttgactcccgttcaaggtaagagcaaactgatccatccacatggttgcctcttggtgtaaagagtcgatcacctttcctctagcctctttttccgcgtatacttgggcatattcgtcccgaatcctatgctcgtgggccgcggctagacctaactcttcttggact

SEQ ID NO: 283599 - DNA, 437 bp, Glycine max
  unsure (1)..(437): unsure at all n locations
tcatgttgctttctctatctctaaccaaaacttattcaataatttaaccttaanaatctacgtgtttctaaagaagtgctattggttcaaatttatatgttattggtctctaccaaagaagtgatccctttttttattcccaaaatgtctttcccacggaatcatgattccattgaataaaatgcgtaataaaatcgtgatttcattgcgcaattatttttgcaccccctcaacacaacaaaatcgtgatttagttgtataatgtacaatataatcatgattntgttcgatatttttttatcactctagatataacanaatcaaaaatcccgttgttttttttgcacccacttaacacaacggaatcttgattcccgtatactattnttttaananaaaataaaaatacattttaagtttttattgattgacactac

SEQ ID NO: 283600 - DNA, 536 bp, Glycine max
  unsure (1)..(536): unsure at all n locations
tgggacatgaccccttagttctgtgcactattaatactcaagctaagctccttcactgcncanggctctaatatttgaagagtatccttgtggaaccttcacccgacanagacactgannaaaacttatcttctnctttntggacanagtatgagaagctggnnggcaagtaaatttcttcccatcagaccttggatgcaactatgatcgtatccccatcttagctagatcttgacgggtatntgtcgcanatgcccttntgcgggcgtgtgaggcgaggctcacgtgtgcgctttcanaggangaaagatgcgcggagtcgccaccaacgtctatgtgtggaanacgtctganaaaccanaggataccggtcaaaatganattctaagttcgggaatngtattacgtntgaggaagggtatacacctctcacgttngctcaangggacacagctcatttttagaatngtggaatngtgtactttactttatttctnnttatatttaggtcacaaagcgggctttgtctactaccn

SEQ ID NO: 283601 - DNA, 417 bp, Glycine max
  unsure (1)..(417): unsure at all n locations
agcttatgtngcttcttgtgtcatatgacatttcactcctggtaataaccttccctgtccttccacattaacattaaatgcattntgtcctacttgtcttttccctttagcacaaaanaaaaaccttattgaccctagaactgctcccatagctattggtggtgccggtgtcggtgaatcaactccaagtgaggtttatgcatccttctccctctgtagccttcttctccacccacctcaccttctagccattccattgcttttgagccacccccctctacagtgtcgtctgacaactgctttgatgcttcctcataatccttaaaacaacatcttgcatcccatgtctatggntcttcttacaccatggttaccaccaaanagcctcctttcacactgactctttaaataaactac

SEQ ID NO: 283602 - DNA, 64 bp, Glycine max
gtgggatgacaccgactgggatgacattctcttgcggtattgcatatgtggagggtgaacgtgt

SEQ ID NO: 283603 - DNA, 393 bp, Glycine max
  unsure (1)..(393): unsure at all n locations
agcttcanacttgcatcanaggagttgagcaggtaaaaaagattcgtcttcaaactcttagaggtgactttgagcgtttgtttatggaggagtccgagtcaatttctgattatttttctcgagtattggccgtagtcaatcaacttaaaagaaatggtgaagatgttgatgaggtgaaagtcatggaaaaaatacttcgaactttaaatccaagctttgacttcattgttaccaacattgaagaaaacaaggatttatagaccatgactattgagcaactcatgggttccttacaagcatacgaagaanaacaaaagagaanaattaaacanaaggaggctacngagcaactactacaactcaacgtaaaggaagcatactatgcaaattaca

SEQ ID NO: 283604 - DNA, 366 bp, Glycine max
  unsure (1)..(366): unsure at all n locations
gcatgctagtcaacctttaccttcatctgttttacaggttacaggttgcacactttatggtggagctcatgggtcaggcttctgtattcccactgaagaaacatctcatgaagttaattacatgggaaaccagcctagacaaaattntaatgcaggtggattttctggatttcaacatggccaaccttaccagcagcagaataaatggagaactcaccctggtaatcagttcaataaagaccagggtgggccacctaacaggccacaacaacaagggcctagcttatatgagagaacaacaaagctggaagaaactcttgcttagtttatgcaggtgtcattgactaatcataagagcacagagtc

SEQ ID NO: 283605 - DNA, 402 bp, Glycine max
  unsure (1)..(402): unsure at all n locations
agctntcaatgcacaaattctaaataattatatgaagactntgatcaatttcaattatgatattaattnttttaaattatatataaaaacctagacagcaagaaaaagagaaaatacaaaatcaatatctctctaaatttctccttactttatttcatcaattcatattaattagaaaaagtactcgatttatagggttcacgctcaacacaatagcatatcaatttcacaacaattggtctggcaaacatatataattcactggaataattataagggataaatgaaaatggaaaaacaccccaaaactcattccaattgatatctctaaagatccctacacatgttctcnactaattccaattgtgaataactcatcccttacctctaaacgggatcacg

SEQ ID NO: 283606 - DNA, 211 bp, Glycine max
gtgagctaagttggaggtgggcaacaggggatggtgggtttatgcgcgcattgtggatgtggaaaacttgttgtgcaccatcgcccgactgccacctagtaccacatgtgatgggtaccccataatcctacaagcttgagatgaggaagtgttgaagggtgaaacttcctgcttttattgttgaccacagagtcggacctggagatatgtc

SEQ ID NO: 283607 - DNA, 394 bp, Glycine max
  unsure (1)..(394): unsure at all n locations
agctntgaggctatctatggaccattaacttctaataatattgcagattcccaagagggtctggaacggaggaatttgatacaagccaatgcaaaaacgattagactatcaactatctttgcaactcttgatagacgtctgataggggagaatgaacaacaagctattaagtggctacttccttcaagatcattgccttcctttattccttttcaaaatgtttctgttgaaccaaacttgaacgtctgattctaccctagtttcagaggacatcaaatcttggaatggaaaacctgcaacanagtttgaagaagaaaagtggatgttgggactcaagttcttgatcctaagatgaaaaagctcaaactaaagaagctaaatctacttaatctct

SEQ ID NO: 283608 - DNA, 277 bp, Glycine max
  unsure (1)..(277): unsure at all n locations
ctgatctttagcttaatgaggcctttatgggatttaccatggaatcacggagataaggaaagaggagagagatatcactaggaataccatggaaaggacttcgcaccaaaatgcttgataaactcgaaggtgttatggagaaanaaaagaaaagaagagggaccaaatgagagaagaggaaagtgcttgatggttataacttatttaagtcaaaggtcctcttttatgcagactctgactctgactctgactttgactttgaatttgactctgacta

SEQ ID NO: 283609 - DNA, 307 bp, Glycine max
  unsure (1)..(307): unsure at all n locations
agcttgtatgattatggtgtacccatcacatgtggtactatgtggcggtcgggcgatggagcacaacaagcttttcacatgcacaatgcgcgcataaacccaccatgccctgtagcccacctccaactgagctcacgtacttccacgtagcacatatcctcngttctcataacaccgggtccccatcaatgcgtccaagcttccacaacattccagcaaaacaacattcacacagcacaagctatcacagccaagcgaaacagagcataggcagtagaactctggccaaacaccaaccaataatcac

SEQ ID NO: 283610 - DNA, 460 bp, Glycine max
  unsure (1)..(460): unsure at all n locations
ttgggccattgatncccattcatnanncnacactatagantactcaagctntgcatgtcangtagttctngaaaaagaaaggtccaagttcttgagagttttangangatttgctgtgtgaagatctgcagagaccngagcttgaagcggaagccgttctgagagcttgagatgagttagtgagtgcgtgtgagatcccagaggtgaaggtacatcctaccacttgaatnttcaatctttcatctgtcttctcttgtgtaaggaagcttttgtatggaagctaaatcttatngatttcttgangtactgatgaaatcttctatcattaatgatgttggtgtctctggcatatcttcatttatatgcttactgacactaatgctcttgtaggcacacatgaactgctatttatactgtagcaggctatgctcatacagatcagtgcaattatgattgtgtt

SEQ ID NO: 283611 - DNA, 446 bp, Glycine max
  unsure (1)..(446): unsure at all n locations
agcttcattagatgttgcatttcagtatcagttcctctaatggaagaacgatatgcacttcttgcattataaatntgtttgattgtagtgcaacagttggcattgtgcttcttcaacgtttgcaggatgttttttggtttcaccatagactntgtcatatcaacaataattntcttttcatccttggtcaatttcccaacgtatggatgtccaactaaggacttggccaattcatgattgtgaatcccatagatcaacttcaccatccaaccttccnctccatgcattggtttcccacgaagcctgaagggacaaccacatttcctactctcagtgtctcttctaacaaattctttctttctacacttatactgaccactcctttcacaaccaattaacacaaatgaaagtcttcctctactaccagtatgtgtgtcagacctcat

SEQ ID NO: 283612 - DNA, 239 bp, Glycine max
  unsure (1)..(239): unsure at all n locations
cctcatcagcanaaccaacaactgcagaataattatgatctttcaagcaacanatacaatccaggttgaagaaatcatccaaatctgagatgggcaattcctccacaacaacagcagcctgtccctcctttccaaaatgttgttggtccaagcaagccatatgttcctcctccaatacagcagcagcaactgcagcagtcacaataaagacaacaagcaactgaggctcctcctcaatc

SEQ ID NO: 283613 - DNA, 424 bp, Glycine max
  unsure (1)..(424): unsure at all n locations
agcttatgcatggattatgtaattatgaaattgagatgcccgaagatacaccatttcctagttaaccatgcattatgtaccatgttcaattattttgtttttaagtgaaatgggtntatgatcccaacatggttggctcgtggtgcctaacacatgaaactaagaatgtagtgtgaaatttcacgcttccncctttcttgtttttgttntgtagaggaaaacgcaaggatgagcaaacatganaacaaatggtatgcacatttgcagatcanaaagtttgttgaacgcatatgcatgatgatgccatgactcatgcnaaatgtgaggccggaatatgataacggacaaatgcangatatgtccattatgatgttatgaagagatgcttatgcgatgcatgatatgaattgcatttacggacacg

SEQ ID NO: 283614 - DNA, 337 bp, Glycine max
  unsure (1)..(337): unsure at all n locations
tcttatccaggctcatcttggtggtgaagctctntattccatggcttattccttaatggatggcgcctcctctcacctcttctcctttgtcttccgctgcatctccatgtgtgaaaatcaccattgaaggacctcattgaagctcacagatccagcttccatagaagctccacaagcaagcttccatcaagtggtaatcagagcacaagaagcttaagtaggtgctccttaaacctccattaattgttgttctgtgccttctcttccattggtggtgcttacattttctccatgtatctcctcacatgtcttgttctaaatggttgtaacatgattc

SEQ ID NO: 283615 - DNA, 401 bp, Glycine max
  unsure (1)..(401): unsure at all n locations
agctttattcaaactatttaatccattaatgtcaaagaattgggtcttgaanaagcataacaagactttctctgattgcgttaaagatacaacctttgctgatgaaaatggttcagaaacattaagaaagctagcatatgggcctaaaggaaatgttattacttggcaaggatacgacattatacagtatttcttttacacaaaagcacatgacgacaaaagtacaatgcataacagcgaggtcaccctaagggctgaatcttaacactgtgcaagtgtgcatgatgacaatccttgcgtagcttcatcccttactttgtgttcattgatgacatttgngagcttaactatgtcataattattgcatgtgtcttgcaatgtatatgtgcggaccgatgatg

SEQ ID NO: 283616 - DNA, 328 bp, Glycine max
  unsure (1)..(328): unsure at all n locations
tcctctctaagcttcttatccagacactctctnggtggtgatgcttcttcttccatggcttattctctagtggatggtgtctcctcttacctcttctcctttatcttccactgcaactccatgactgaaaatcaccattgaagggccttattaaagctcanagatccagcctccctaanagcttctcaagcaagtttacatcatgagatatcatgtagaaccactccatgtagtctgctgcacactgtccaagtgcaacacatatctgacccaccaatgcaaggtattcagaaaactgaattcatctatcatcgatatactagagatg

SEQ ID NO: 283617 - DNA, 427 bp, Glycine max
tgtcttgcaagcttctactaagtctttctaaagtaatcaacttcaacatgctttgaagctgtgaagaagtcgtaagagtgatgaagctgcactatatcaaaatgagatatcaatttgaacttcatcaagggaattcatcaaagtatggactcattctcagtaaacatcagatgactattctaatgattcttcagaatgcccatgatatatgtccatcagaatgtgaacctcaaaatggtcttgtctgctattacatcatgacagctggaaagtgaacctacttgctctacaagtgtattagttgtatggagcccactacaatgattttcttggagctctaaaggcattgtcgaggcatggagacaagtgaaccttctaatctacacaactatgctgattctgatgagaattatgtttacctccacct

SEQ ID NO: 283618 - DNA, 437 bp, Glycine max
  unsure (1)..(437): unsure at all n locations
tctatacaagtngaggtttctctttacctgaatagtatagtgtacaatttgatgtctntgtgtgtagcataagccanaaggaatttgatggctccaagttcttctattggtgttaaagtttcttcatatcaattccttcttattgattatatccttgagccaccagtcttacgttgattctaactatctctcctttttcttgttcttganaacccatttggttccaattactaactaattcttaagagatggtacaagattccatactntgttctttgtgagccgactctattattcttccatagtagcaacccaagaatcttcactcaatgcttcatcaatgttctttggctcaattattgagaagagtgtcatcatncctttctctttgttcaaagaagctcttgtnttgactccagatgttatttctctaatga

SEQ ID NO: 283619 - DNA, 512 bp, Glycine max
  unsure (1)..(512): unsure at all n locations
gttgacacgtttggaaaccctttgaanccccttntacttacggcgaattcagctcgtacccgagatcctctaagccacctgccgcatgcagcttgttgtgagaaatntgtgagattaattaccccccctcttaattattgagccacttgtgccacaaaggtgagaatcccaaagtgtgttcaagtctgtaaggatttataaagatagggaaatctcaagaggttgcttgngacttgacataacacgtgaagggccgaccagataaatcgagttgcaattctctcttccctatcttattaatttattgcaatcaactttgtcttgcacatttaaagaacactattananttgattggctgcttcttcttctatatgtacaaaaagagtggangggtctgctgcaagctgaggtganggtangatcaccactggtgcagaaagctctgaaagtaccttcaaggatagcgcgggagtggcagcacctacctgtctcacctgtgtctnactttgcn

SEQ ID NO: 283620 - DNA, 279 bp, Glycine max
  unsure (1)..(279): unsure at all n locations
tacaccaaggttgatacataacatctagtgtagccaattccatgagagttcgattgttatcaaccattataccaacactaantttttcagaatcacaagcaataagaatatcgttagaaatagaataagcaatgaatntagtatgcactatactactatccaaaactacactatcatgcacaactacacttctactcttattacttatacttaacctatgaaatgtctcatctatctcaagatcatatggatgcaagtcacatgatttggacctagtca

SEQ ID NO: 283621 - DNA, 236 bp, Glycine max
  unsure (1)..(236): unsure at all n locations
agcttatccgaggatctcatggaggtagattctcaacgagagctcctatgttgtagacacacatactaatactgctggggtcaaagccacctgctccataattatcagagggagatggataacagacacggagagaatgganatggtatcttgattgatgtattattgctattacaattgctcatctatactaacttccctactaacagaatctatcttcttatgctcagggaata

SEQ ID NO: 283622 - DNA, 271 bp, Glycine max
tatcatccatgacactagaaccacagacactgaatgttacatacctaacctccccactatcttcaatgacttcaaagtcaggcatgttatctacacaaggatagtcgtcatgtacagtagcatacgatagacatccatcccttagacttacaccactctcatacatactgctcttgtcatcacatgatctcgagcaatacgaagactcgtcgatgtcataatcttgccgaggcacaacatatattttaggctcatctactctcttacttac

SEQ ID NO: 283623 - DNA, 413 bp, Glycine max
  unsure (1)..(413): unsure at all n locations
atgttgatcgagtttaaatttaatggttgtctttatttaantgggtaccaaattttatattaaaataacattaatatattttttattaattatgggtggttcattggaaaaacaaataaaatattttaaaagtttgcaaaaaaataacatccgttggcctaaaaccgatgtagaaagcacattcaacatcgattttttcaaaaaccgatattgtaaatgcactttctacatcggttttggccaaaatcgatgtcataatcacattcaacatcggttnttcaaaaaactgatgttgaatatgactttcaacattggtttttacagaatcaatgtagaaaatatttcaaaatatacatttcaacatcgattttctaaaaccgatgttattntttacaatacaacatttggttttt

SEQ ID NO: 283624 - DNA, 166 bp, Glycine max
gctgtactgacctgaaccaccataatacgttaaggtctgagatttattcacattttctgagacattggaggtaaaattcttacatccccacactcgaataagcatgaatgttcacggtaatgcttacactttgtgattgagatgccatatactctactaacatttc

SEQ ID NO: 283625 - DNA, 385 bp, Glycine max
  unsure (1)..(385): unsure at all n locations
agcttgtaacagttagatntagtataatttacgtttaatactatataatcttcttacttgactgtttgtacaagattacttttcttcccgtgatcaacatggatttcttttaggagatatatataaagttgatttatttgttaaaaaaatcctaaattcgattatgatattgatttgaaatatttttcattaaaaatgataattaatcttttttaccaataaaatttattttataccttctggttaaactatttgattaagatagatacattattaccacttatataaatcgtttttatcttaaaaatcatatatttttgtgagtaaatgtatttttaaagagtaaataataatatatgccaaaaatatataatactattctcta

SEQ ID NO: 283626 - DNA, 124 bp, Glycine max
acatgaaattgaggcactggtttgcattttctgtctatggaaggaactcatacatgatcttgcttctattaagcattaaaactctgtctttaactacaatcatgcacagtaaattttatataat

SEQ ID NO: 283627 - DNA, 412 bp, Glycine max
agctttgagctaaatcaaacgacaataactttttactcagatgtctgaatgaatcgcgtaatatatagagatcctcgtaattgataacggaggctctgagaaattactaacgacgttaactttttactcggatgttcgattgtgtctcgtaatatatcgagacgctcgatattcagaagagaagctgtgagcaatatctaacgacaattactgttcactcggatgttcgaatgaatctcgcaatatatcgagatgctcataattgataacggatgctctgggataattgtgacaagaataacaatttactcggatgtccgaatgtgtcccatattatatcgagacgctagtaattgaagatagaggctcgtagcttattcaaacgacactaacttttactctgatctcctat

SEQ ID NO: 283628 - DNA, 352 bp, Glycine max
  unsure (1)..(352): unsure at all n locations
tcttgcttgaggagcttctatggaggctagatctttgagcttcaatgaggttctttaatggtgatattacaccatggagatgcagcggaaggtcaaagagataaggagaggggatgcaccatccactatggaataagccactgaataaagagcttcaccaccaagaattgccttggataacaagcttgaagatgatgctttaatggacgaaaatactgagagaaggggtgacacgaaattgtacgaatacaagagggaaagacgcggaactttcgaagggtttcttataagactctcattcatcaaagttaccacacgtgtttaccatgcttctatntattgactaagtagc

SEQ ID NO: 283629 - DNA, 392 bp, Glycine max
  unsure (1)..(392): unsure at all n locations
agcttctacttgcttggaattttccagtctatctttcttattttttcgcctacattcttcttcaagaatagcttaagcaacatcattaaaggttagacaagtgacattattattatttgttatgttgataatgagtttatcatataaatctggtagactctaaagtagaagctctacccgtttgttttcttctatgttaaaatttgatgagggaaattgngaaaataaagtattcaggttttcatgtggtatgtcacccaagtggactcactcgttcgaagagtgcagagtttcctcttcaagaatattctagtctgaagtgacttgatctcatacaatttgtggaaagtatcccanatatccttcacgttntccattgttaagtgcaaatt

SEQ ID NO: 283630 - DNA, 394 bp, Glycine max
  unsure (1)..(394): unsure at all n locations
aatgaaagcgttgacagtgttaacatgctaaacatagaggtggcatctttgacggctactactgattcagtgacaacaatggttgcagcaaaggaggaagtaaagcagggtgttgcagatgatctgaactctacacattcaacaccctgtgaatggtttgtctatcatgatgacaagagtgctacaaggtgtatcgctattcaggtagggaaacttaattgagtacatactattgctctttgaactataattgtacttgttggttgcaccttgcaagtttgttgtaatntgcgagaatttgcaagcttaaatatgataaaatcataatcatggtggttctcaacattatctggcattgagagaatttgtgagctaaatatgataaaactgacct

SEQ ID NO: 283631 - DNA, 366 bp, Glycine max
agctctgttcaatagtgggatgaggcgtgtattttctttgtaacacactttgataaaccaagcaattctttttttttttgttatcatttagtagctagctttctgccttttatcgccagcatagctagcaacattgcaagcttttagaattcttacaagttaagcacgcctacaaaaattaattcacatactagatacttctacgagttaactattccattgcatcatttgcatgcaccttctaatgttctgagtgtcgcgatatgttaactatttcaaaactttaaatttctcgttctattattacattagaaatcttaaaatatgtataaatgaattctgtaagagtgtacaaataagctatta

SEQ ID NO: 283632 - DNA, 322 bp, Glycine max
  unsure (1)..(322): unsure at all n locations
tgtcggcctgattgngcccaccattgaagaagtccttgaccttgaaactcatcgagctcatcttcctccccacttccacgcctccgattatcagacgctctccatcttctctaatctccgtctttctttatgcaaatccagagagtttccaaacaacgcccaaggactctcgaaaggcttttttttctctctctctctcacttgcatcattataatttaatatatgctattgtggcccattaccctctctcacttcactcttcactctcattattccctacccaacaacaatgatcccagaacactactgagactcatctct

SEQ ID NO: 283633 - DNA, 494 bp, Glycine max
  unsure (1)..(494): unsure at all n locations
tgatagaggggnnnntttgaagccatgacttgtatacggcgaatacagctggtacccgggatccttagagtgatctgcagagtgcaacccaggcatgcgagctagggtgatgtngcacgtactgatgggtaccatgaggtgcacgcggcggtttgacccatgcgtggcgttgatagacagcacgggtagctgcgttcttgctttatgccacacgaagtaccgatactttttgcattcgaactcgtgaaggagacgtaatagaactgtactatgttcaatcctaacttgattctttatccagcgaacactaagatgcgcaatctggacgacatgtgacctactagctgctcatagtacaacactcgccacgtgttaacatactagtgatcatctctctctcgacatcggagagccaaatgtgctgcaagaatttcaacgtgtcgtatacttaaggtttcacctctttgtgaactatcagagatgatgcatcgaaa

SEQ ID NO: 283634 - DNA, 289 bp, Glycine max
  unsure (1)..(289): unsure at all n locations
gaatataaggctttntaattgtcatcattccaacattccctcactaatgacaatcatatgagaaaaagaataagaacgaanatttctaggcaatganaggtattcgcaagaaataganatatantttgctttcagattgtgatacgtaactcatccagataagtaacttttgtttgattaagtaacttttaagtgcagtaatttgtttttaaaacgttttgccttccaattcttggtattgcgaaannttattttcaaaatgtttgtacagtaaattacataactactc

SEQ ID NO: 283635 - DNA, 398 bp, Glycine max
agcttatataatacaacaatgaatgttgaataaggtatattccaatggaatttctaattataaattataactggatcaacctttgttattcaagtttttatgattcttatgttttcatttttttattttcacagttactttcttcattaacttctgcctttgaatttggttcagttgctgatttagctttaattgtattgttgaaaatgggttcctagctttcgattgcggagctagtttaatgtcaaggtaagttataatttcatatcttcatgccaatgattttcttttccctttcttacagtgcatactgttatctctattttactctttttaattaggattcagtcctattcttttattggatttcgatattcatatctacgtacttctaacaa

SEQ ID NO: 283636 - DNA, 401 bp, Glycine max
tctagactatctgtggtgcaagtaaacgcaaagtaaatatgtgatagatagtgattactttatgtaggatgcacattgcaatataccttctaaatggatggtaacttacagaaactaccaaaatccattgattacattttattggagtgtgtgattatctttaaaaaaaaattagagggtctgcctttatcagtacccacaatacgtatagactacaattattgtcattctccattttgcaaataagatggccgtcgtatcttgacatagagatattgatataaatatacaacatatctatatatatatttgtatctacatatatatatataaactcatatgcgatgagattatacatatttatatatatatatataatacagtcttatatatataaatat

SEQ ID NO: 283637 - DNA, 401 bp, Glycine max
cttgcaagcttgtgttccttgttaattattggtattagttgttgtttatgtgaatattagttgttaaatttcaattgaattatgttatatgatacacacatgttaaagtagttgcattactattagactctcttatacattaattggtttatatgaactgggagaatgattatataattagaaaaacaattatagataaaattgtctaagtgagatttaaatctaacatgaaagatgaaattagaaagcttgaccattgtgtcaattaatgtcattggtatattgaaatatgacttataataaatgaatatatgctaataatcgaaatatgacttatacactgtgtgtttaaagtgttgttgtttatttttgcacttctgagatattattatgatctttat

SEQ ID NO: 283638 - DNA, 292 bp, Glycine max
  unsure (1)..(292): unsure at all n locations
tatacaganatacatattntccagcaacatcttgatggcactacaacaatacaacatacatcacatggaaatattagattacagccagacacaatgcatagatgctactgtgtngngtgctntgctacattgccacatgaatttctggtacaggaactggttggaggggatcaaattcaataaagaatgtccgaatctccatccgagcaagttcaaccaccaacttcgtaagatcaacaggtcctcctctcaccaccttcagttcttcagtggagccttctactttcaatct

SEQ ID NO: 283639 - DNA, 368 bp, Glycine max
agcttggatatgatgcttcaatggaggaaaagaaagagggagagaaagagagaggtgggagcacgaaattgaatgaagacgaaagggagagaacgtgaactctgagttgtgtttcacaagactctcattcatcaaagttacaacaagtgttacacatgcttctatttatagactatgtagcttccttgagaagctctctttgagaaacttccttgagaagctcttttgagaaaacttccttgagaagttagagcttagctacatgcacccctctctatcatagctcacctacttgagaactttcttaagaaatttctaaagaactatagctaactaccatacctttctatagcttagctacccccatg

SEQ ID NO: 283640 - DNA, 553 bp, Glycine max
tcacgcgtatcgaagccggctgatatataatctcatgtgccacacctcctaagagtcgcgagagatgatccttgaagtgcaacctagtgtacgcacgcataactactcatcggagatggtagtcacgaggcttcatatatagtcctgtgatagcgttactgtgacgaatagattatgccttcgtgaaatgtttgcggggtgcatcatatccggaatcagattacacgaggacggatacgggctagcgatggcataccttcaggacgttctacattaggacaccgctatcgctcgcagatatgtgacgcgagcgaatacgtccggagcgagacattcctagacaatatcgtgagcgggtatttagattggcgcatggccttaacctacagttagcatctgtggaatgtttgtggcgtagtaaagcggtggactaggcaagggcatcaccatgaacgtggatggggacgaatacgacctacgtcaatcgtccgggtaccaagcaatatctccctttataaggccaggaactgctcttgacaaactgtaaagaagg

SEQ ID NO: 283641 - DNA, 398 bp, Glycine max
agcttgataagtatttaagatctgctggaattcgtgattcctgcgaattgtattgtttcttaaattgggaaaatccttgttggaccgtttctgggaatatctctgggattggtccaaagaagtcccaccattgcataaaccaattgggaaaatcgtaaattgtgttggtcttgaaatatatcagccatgaatgcttgaagcgggtattttggtgccaaaacaccttattccaagcatcaacgtaatcccaatatgtattacctaccggatcaaatggaactgaaaatctctttcctttgttcaagtctgaaccaaagtgtcttggttgaagaacttttagtatttggatggctgagtgtgtgtctaatgtctggtcttttgatctctgaaatgttgat

SEQ ID NO: 283642 - DNA, 397 bp, Glycine max
  unsure (1)..(397): unsure at all n locations
ttagccttaggttgttctatgntgcttatgttgatgctcctcctatctctaatagtttgagacctcagacaaagatgattcttgatggctcatcaagaggtactattatgtctaagagccctaaggaagaaattgtaatcattgactctatagaagccactgattatcagagtcaccatgatagggctctggttcaaaggaaagttataatggagccagatactcacaatgtaattctagcttagaatatactctcgactcaacatatagaagccttaacaaaacaaataggccaacttccttaataatctgagtagggtggatcacagaagacataccaagctcattaagtacaaaaagttctaagatgacccattgtttagtacctggtgattgc

SEQ ID NO: 283643 - DNA, 360 bp, Glycine max
ttgctgctgcatgcaagcttatcatatggcgtcgatgaataggtttctttgttgctctcaggatccttgatagataccgtcttatttcttttatgcactattgtgcccttatgacctaatggactctctttgacagtccaatagaccacagcatatatattttttctttgattattactattattatttaattttcacatgttctcttctaattctttcttttattttcttctcattaagctctttcatgacttcttacacccttttttcaagttatctctgctttttgataatactttttgttctttttcactttatatatgtctctctttttagatttttctctgctttcgttttaca

SEQ ID NO: 283644 - DNA, 211 bp, Glycine max
  unsure (1)..(211): unsure at all n locations
tgtagtataaagtgtatattgccncacatttgtttcaagcctgtgttatcgtacggccggccctgtatgatatgtgacngagataaaagcgattgtgtgcaccccacatccaaatgccccaaatgtccgtcccagaacaacacgttctcaataggaaattacaataattataacgacggctgatatgaaatgcgtttttgaacgatttctg

SEQ ID NO: 283645 - DNA, 337 bp, Glycine max
  unsure (1)..(337): unsure at all n locations
agcttatgcgcatatttccttacgaacgttcacttgcacaagacattctattaactaagaaaaatgcacccatatacaatcaaggcagcttcgttacctagattatttacatgtacttccaaggtgtatttgttacctacatcacacacatttcctttgctaaattcacatacatgcatactctaagcactntggctatcgaaaattgcatacgtgcatatcctgntatttctaatacctatacatacacaaactttatgataaatctngactatctacacaataaggtgctacatttcatgccctttttcaaagttttgctacctaaagccgcatg

SEQ ID NO: 283646 - DNA, 374 bp, Glycine max
tgtaaagcattgatttgatactggcttcctcatcatgtggctcatgatagtttacaattaatgatcctttgctaccctgcaatgagacacacatagatacacagacacgcacacatagagaccaacacacagacacgaactcagaacacacacacacacacacatatagatacacacactacacacacacagagtcacacacacttattgacacagacatagactcatatacactgagccacagacactcacagaaacccaacccatagacacacactctgtgtcttaacacacacatacactaatccactctcacagatgggcagacctcaccccataaagagacaaatcgttcacatacacacacaacacta

SEQ ID NO: 283647 - DNA, 425 bp, Glycine max
  unsure (1)..(425): unsure at all n locations
agcttggaatgatgcttcaatggaggaaaagaaagagggagagaaagagagaggggggagcacgaaattgaaggaataaaagagggagagaagtggaactttgaagtatgtctcacaagactctcattcatcaaagttacaataagtgttacacatgcttctatttatagactangtagcttccttgagaagctttcttaagaaaacttccttgagaagcttctttgagaaaacttccttgagaagctagagcttagctatacacacccatctaaaaactaagctcacctccttgagaagcttccttgagaagctagaccttagctacacacacccatctaaaaactaagctcaccttcttgacaaaatacatgaaaatacaaaaaaaagtccctactacaaagactactcanaatgccctgaaa

SEQ ID NO: 283648 - DNA, 372 bp, Glycine max
  unsure (1)..(372): unsure at all n locations
agactatagtctaaaactctgaaggataacaatgacactaaccaatttgccacaaatttaattaaaaagccataatggtgagtaagagtttccaattactgcagtgaatttagagacaagttttggttcattgttgaatgcatanggcatgactatagtctataactctaagaaaaccataagaactgaacaacaaactgaacaagaaaaccataagaactgaacaaacttataaaatataacatgatttataaataatcttataccttaactatgtgataaaagttcaatccttcacctgtangcattgggaaacattntntattattaattattanattcaattaaaccacatctcaaggaacgggtata

SEQ ID NO: 283649 - DNA, 424 bp, Glycine max
  unsure (1)..(424): unsure at all n locations
caagcttgactctaaagagcatcatctatcatccaaaatttgtacaagaattattgtgcttgtcgttggtttacccttcaacatgctggaacaactcgtttctttttcaacaaaataaaatgactagattgtattaatacaaggtaaacaaccttatttcacacatgcttctcaagcatatttgactgtagttgtgcatcatgttattagaatgagcatgaaaaagcatgttgtagatgaccagtagaaagtctcagcttgactattaacacgttccatgacatcagtggcaaggattattctaaaaaaagaaagaatttgaaatntcattntttattctttactttaattntaatgtaatatctctattagttaatctatttaatagaatagaagttataaaatctacgtaattcacggttaa

SEQ ID NO: 283650 - DNA, 335 bp, Glycine max
  unsure (1)..(335): unsure at all n locations
gtattaattattattgttaaccttccagtatatatatttcgatatcatcattcatgttggtgtctttcctctgcgggcatggcgattttgtcctaatttcttttagaatgcatttagattcataattttacttgacgaaagcaatttattagataatttacatctctttaatctaanatcgattgtttgaatgttcttttataaagaatctaaattgttataattctacacaattaacaatatagaattttaatttccttctaacaagtgagaaattgacattctcttcttgatcaaagagccttaaaaaatatgtgcgtaatttctttaatacc

SEQ ID NO: 283651 - DNA, 405 bp, Glycine max
  unsure (1)..(405): unsure at all n locations
agctntatcgcccatgtaagttaagatgtactaactgctgccatcgggcgactagagcaccctggtcgtgtccgtgctgctgaaggtcagtggtgaggaagtctgagatgttgatgctcgtgttcctgtaaccactctagaagttcagttagtggggtagacacttaacaccttccttggctgacacatcttgtaaagccttttttagaacaagtatttcactttgttttttttaatacttattaataaaggatntgttacaaattatgttttcactgtcattcgcttaatgtttattaactgtgtaggataaacagggatcggcgaaacctatagattatggatcctgacattgatcccctgtccctgatgacattgaccatcccacatcttttccttaagttg

SEQ ID NO: 283652 - DNA, 346 bp, Glycine max
  unsure (1)..(346): unsure at all n locations
tgatatatgccaaggtgccggtttggccagcggttcatggataaatgaatgtctgacattatttccatgacacacatgcaacaatgatgaattggaaatattatgcaaaactagtcatgcatgcaaccatgtggacactcaagcatcaagtttttatggtcatgtgacactagggctcaagatncattttccctctataagtcaacctagtgtttcccaaacatgatttttttttatcaattcatgcattcatccgagtccaatttgggcgtcggggaaattatacaacattcacccttcagtgcatacacatttttttttcaaaactggtgtatgatcagtgaat

SEQ ID NO: 283653 - DNA, 417 bp, Glycine max
  unsure (1)..(417): unsure at all n locations
agcttcacatggagctacatcagaatggtcttaaagtgtgggaattgtggcagtgctaaggtaagtcccacttgagaggagaaggtagaaagattgcttgagaagaaaagctctcttaatatctccttttcgttggactagctcatctaggtccctatatggaaggagttcaaccttgtcccccacttccatattaagcccactaaggaacctagctatgcttgttttttccacctccctaagtccagctcttaaaaggagtagttccatttgttgtctatattctttgacactcatacttctttgtctaagcctttggagcttgtccataagctccctttcatagtangagggaatgtgcctcttcctaagggcattcttaagatcatttccatactttactggangatccccatg

SEQ ID NO: 283654 - DNA, 411 bp, Glycine max
  unsure (1)..(411): unsure at all n locations
acgattgatcgngacccagtgctgagagaaacgaggatatgggctacgtgggagtacatgagctcagttggaggtgggcaacaggggatggtgggtttatgcgcgcattgtggatgtggaaaacttgttgtgcaccatcgcccgaccgccacctagtaccacatgtgatgggtaccccataatcctacaagcttgagatgaggaagtatagaagggtgaaactttctgcttttattcgttgaccacagagtggtacttggagatatgtcgcggaggtcaagagaccttggggacgtcatgtggggtgctattggccaaaaccaagctggaccaatcccgacccaaccctggcatattcagtcagtgagacctgtgatgacctaaccgtcgagctcttgcagtcacagataa

SEQ ID NO: 283655 - DNA, 381 bp, Glycine max
  unsure (1)..(381): unsure at all n locations
agctttgacttgagtcatcaagagattataaatatgtgaccatggcatgagtttcaatgaatgatctctcatctatcatctatctttcaatctatctttcaatatcttctttcatctctttcaacagatctttctaaattatttctcttcatttttctaaaagtttttttcaacactttctcttccaagaaaagttttttgttcanaaacttgtgctattcatctttttcattcacttatccctttgccaaaagaaccaaggactaatcgcctgaattcttttgtgtctctcttctcccttacaaaagattcaaaggactaaccgcctaagaattctttggattcttccctttcccttaagaaaaagattacaaatgacta

SEQ ID NO: 283656 - DNA, 481 bp, Glycine max
  unsure (1)..(481): unsure at all n locations
ctataatactcagctttatcaagagttttactctctggtaatcgattaccagtggcaagttntgttttcaaaaagctntcaactgaatttacaatgttccaatcaatttcaaaatggtgtaatcaattacaatatattggtaatcgattaccagtgtgtttgaacgttgaaattcaaattcaaatgtgaagagtcacatcctttcacanaaatgctntgtgtaatcgattacaatgatttggtaatcaattaccagtgataaattttgaataaaaatcaaaagatgtaactcttccaatggttctcaagtttttctaaaggttataactcttctaatggttttcttgaccagatatgaagagtctataanagcaagaccttgacttgcatttaagaatcattctaacaattatacaatcctttatacctttgaactctttgacatcttcttttctcttctttgaaaagtttctaaagttat

SEQ ID NO: 283657 - DNA, 335 bp, Glycine max
agctttgctttatttgtacggcctcccgtacttgaagcctagttgcaggcagtgttgctgcgcacaagaccccgagtctgaaaacagtgctcatttcatctgagtaaatggcttacatgacatattcgtctagcaattcctcaacatatacttcaatcaaaacgtgacgccactcccattcagaaagagatgagtgttggtctccataatatgcttgtttaccagttgtcagttccaataggactaccccaaagctaaacacatcaatcttttcactaactcgtgatgcttgaacatattctgcaattcaaatatgaagaatcacattgagaata

SEQ ID NO: 283658 - DNA, 258 bp, Glycine max
  unsure (1)..(258): unsure at all n locations
tctagctacaatctacaacctgctagcaatttgagaattggatctatcaggaggtttcagacaatccatttcctcctcatcgatatccctgaagcactgatctaccatntcttcgctaaccagctctagctgtgaaggttcccactagttaattaataaaataaaacacacaacatgaagggtaaaataatcatttatataacataataatctaaattntgtagaaagcagatacgatangagaactatcttttaatt

SEQ ID NO: 283659 - DNA, 98 bp, Glycine max
agcagctgttttcaatatctatcgtctcgacatactgcgggacacaatccgacaccctactcttcagcaattggcgactgaattggctcatatcttct

SEQ ID NO: 283660 - DNA, 485 bp, Glycine max
  unsure (1)..(485): unsure at all n locations
tttgagcncttgaaaactgacgncnttgntgaatctangcctgtgacananngaccncggaaanatcgggacggtaagattgagtagccgaacgaattacttactcattagagaataactgtcaacgcngatggaccattggacaccatcactaatctagacccttgtaagtgaagacatacactctggagcgactcaaaccactatggctttacactcggacggactatagagtgcgagaataataccagacgtgggaacttttgagcacacatattgagaaattatacaagaataacttttacatggtggcgcatcgagtctgctaatatggtggcgtcaaaataaatactggactcagtacaaattaaagacttattattctttgtaagcgaagaaattgtagaagacacatgtcgtataaaaatgactctattattaaacgctcttgtttgaatgagatgcatggttgtttaatcgaatta

SEQ ID NO: 283661 - DNA, 310 bp, Glycine max
  unsure (1)..(310): unsure at all n locations
agctctagattaacaacatgacatcatcacatcataaaacacaaaccttcgattaacaataaatatggtccattaccaatctaaatctaaattgaatgaaaatcaaaacctaaacaagtgcatggcaatagagagagttattaattaattgaatgagggaaaacctaaacgaggataggtcagttccgaattgaacaatcagtggaagctaagattaaaatgttactggcaatttgcaagttgcaagacgacgacgctntggaggaataataatcataaaacaaagcgagcaacagttaagtgaataaac

SEQ ID NO: 283662 - DNA, 313 bp, Glycine max
  unsure (1)..(313): unsure at all n locations
ctcacgcttcatgattcacgtatattngatacaagatntcttaccccacctaaccgttacttttcatcacacttgacccacttggagtagtgaacttatcctttttcatgaccgaatttaanaaataatgaaccacatcttaatgatcatcttttccctctctcaatctgtgggaagactttctagaagatngacataatttaaggcaagaggagctccggcatttagccaaatccaactcgtgagtgtccatgaagcttccgcgttgcattttctttttttctttataagaaacaatanaatatatatatca

SEQ ID NO: 283663 - DNA, 407 bp, Glycine max
  unsure (1)..(407): unsure at all n locations
agcttgtgatatttgttaatgctttcttactaattatggttatttgactttggtattaatttattntataataaactcaccccttgtaattntgtaccgtgtggttggtacctgtgatgatcgcgaacctttgttcgtgggagcagaatgacaacagtagagtatgagaagtgaggttcttttgtggagctgctaagccgacgtgatgacgttgggattatcttgggagagagttgtgttttttaatcaactcctccatagctggttccacgattctttttgttgacttaaagaagtaaataacaaatttaattatatgtatgaacaaatttacttttcattatgtgaatgatatgtaatgaggtattatacatatatatatatctatgtatatatatatatatata

SEQ ID NO: 283664 - DNA, 407 bp, Glycine max
  unsure (1)..(407): unsure at all n locations
ntcacaagttatctcataactcanagccttgtggcacaacacaatagctcttgcttcatgtgtttaccttcttgctgtgtctattccattgtggacaagtgcatcaagtgaagtatgtggatgcctcccgagttattcgccttctggtagccaaaggctctaatgaagtatgtngataccactgtcgtccaggaagaccttgttagaattaatgtctcatgtgagaggcatgtgactttatgtaggactaataaataaatcattaataattaacgactaaattgttattgtgtaaataggagaaacttctaaacgtaactgttacttgatggaagtagtgggtgtanaaggggttaatacccactaacttgaaacaaagtcccttctgacacaagtgtctctctatc

SEQ ID NO: 283665 - DNA, 372 bp, Glycine max
agcttttctcttgtggagacggcgacaaatatcggttgggacatggaaacaaggaaacgtaccttcaaccaacttgtgtctctgcacttatcgagtataatttccaccagatagcatgtggacacaccatgactgttgctctcactacatctggtcacattgttactatgggaagcaatgaatatggtcaactatgaaaccatctggctgatggaaaagtacctatcctagtacaagacaagttggtgggtgaatttgttgaggtaatatcatgtggatctcatcatgttgcttgcttgtcatcaagaagtgaattgtatacttgggggacaggtgccaatggaagattgggacatggagacatagaggata

SEQ ID NO: 283666 - DNA, 462 bp, Glycine max
  unsure (1)..(462): unsure at all n locations
tctattctaaataacccctattctaagtgttatatatttgttacatcacatctcatgatgattntgaatgtatctaaatatgcaatagctcaaacaaactaagtgcaaaagtgtcaaattaatgcttatacatttctcttanaaaatggtaaaaataaaaacattaatatttaaagttggacgataaattaaacttcagcagatgggttaccaaagcattatttacagtaactttaaggtcttcctgattgtggagacttacatcatggaaggctagcaaattgagccagacattcctaccactcataagagatactcgccgttctgatgtgttacctccaaaaatgacaaacactttttcgagatccttcacggcgagaaaaagaacttgtacgctgtagagatattgacctgcttggaagctgacctgatataccactaactgatgcaagatttggaaat

SEQ ID NO: 283667 - DNA, 331 bp, Glycine max
  unsure (1)..(331): unsure at all n locations
agctttacagcagaatttagtaatgacccactaacctagaattaaaataacttaatgccattaacctatggaattaaaacaaacttaatggctgagtgtaactgaaattgtggcaaccaaaagtcacccccaacagccaacaagtcagccaccatttggtctcccaaaaggctgatgcctaggttgccaattgggcccttattacaacttgaactaaagcccttntagttgattaacccaaaacatatttttggccagccaactntacaaggattgggccattatttagacaaactaaacactctaaaattgaaataaagtggtgtcattt

SEQ ID NO: 283668 - DNA, 317 bp, Glycine max
  unsure (1)..(317): unsure at all n locations
ntacagcagantttagtaatgacccactatcctagaattaatataacttaatgccattaacctagggaattaanacaaactaaatggctgagtgtaactganattgttggcaaccaaaagtcaccctcaacagccaacaagtcagccaccatttggtctcccaaaaggctgatgcctangttgccaattgggcccttattacaacttgaactanatgccctttagttgattaacccaaaacataattttggtcagccaactttacaaggattgggccattatttagactaactaaacactctataattgaaataaag

SEQ ID NO: 283669 - DNA, 359 bp, Glycine max
  unsure (1)..(359): unsure at all n locations
agcttcccaagttnttaagttcttcctcaaaactgtcctaagcaaagttcccaaagtcctattaacaacttccgtttgcccatcgatttatgggtgacaagtggttgaaaataacaatttagtgcccaacttgctccacaaagtcctccaaaaatggcttaagaacttagagtccctatcactaacaatgctccttggcaaaccatggagtctcacaatctccttgaaaaacaaatcagccacatgggaagcatcatcaacttttttacatggaataaaatgagccattntagaaaacctatcaacaaccacaaaaatggaatctctaccattgctttgttttggcagccccaaaacaa

SEQ ID NO: 283670 - DNA, 279 bp, Glycine max
  unsure (1)..(279): unsure at all n locations
tgccacccagctcgcccaggcgagcaaggatgcttcctccagaagcaacagccttctggaggaatcttctggagggcccaagtgggcctgcgtgctatntgcacccccacttttactaagtacacccgctgccttgttttggagtttctttattcgtagagttatggacactcacgaatttcttagcgatacttgttatctttccgtaatgttacagaaccttgtggnatacataaacataccctttatgacttacggaatgttacggaaactcactaa

SEQ ID NO: 283671 - DNA, 422 bp, Glycine max
agcttcatgtcttagtcatgagtgctagacttgtctgacattaatgaaggatgattaccataacaggaagggtcgacgtaattgaacatcttttgaagttttcaacaactatctttcgtataaacattacattaactacactcgcataatatatttgactgtttttatagttgttaggtccgcaaatttgattaagtttaagacatgtgtacaactaattatggcttttgtgggtcctttgttatgactatgttttgttcatgggttgggtacttcttccctttacattgaatttagtttgttcgctgatagaaaaacacattgtctatataactaattatgattgccaaattaacttaattatccatcatgtgcatgagaatatggacaaaacataaatattgcgtattgttatatgataa

SEQ ID NO: 283672 - DNA, 398 bp, Glycine max
  unsure (1)..(398): unsure at all n locations
tattgctaaatgctaatcaatcagcaattctcacagaaatcatctgttcctgacaatgttagaaaccatcagaccatggccatatataactgtgcaagcatgatagaaaacaaattataaaactattagaaatgaatgaggaagtttgacaaaataataagacaaataccttttcattgtatatacgaagcctttctttgactactgctntagtatcatctgaccgagtaatgagctttgacatacagtgtgcaggaggaagaagtggagccatgaccattccaggacgcccattctcactcttgatgctaatggaggcaatattaaaaattccttcacattgattacaaattcttctaccaagggcatttgcaagcagtgcttcttcttggagcttc

SEQ ID NO: 283673 - DNA, 238 bp, Glycine max
agctcagatttgcatgatagttattaaggttgcacattgctttgaaatcaggaaataccatatgcattattaaagcgaaatactactcataattataggaaaaatagctgcatgattgaacttacgagacttactatacgtggtttggtagtataggctctgcttataaaattactgttattttgataatctacagtaacttttaatattgagtcattggctttcgttaccgtagggg

SEQ ID NO: 283674 - DNA, 502 bp, Glycine max
  unsure (1)..(502): unsure at all n locations
ccgaacaccgtgccgcgacccttaccgggacacccccgccccccatgaccttgatcagcctgaanccagctgtgcatgcccttaccgactgacacgggatgagnacncngtctccccaccgggattgggagaacgcaacacacatttttattgacggaaaccgactgggatcatagaagcatgctagcttcgtgacttacatcaaggacgccacttatgagtttgcgacagcaatgctcttaaccaataatacatagtatgctaggaatgcgctatcaggagggataataacgcgtccgttatttggtctcattagacagaaggcggtgtacgtattcacgtaagaggaaagcctcattgtggaacaacataggtggcagaatgaaacctggaattcaagctttaggcgactagcacaaatacacacagcactcgcggatgaacatgctcggccataccacgacggagggaaataaccccaacaacgagtcggggcaacccn

SEQ ID NO: 283675 - DNA, 413 bp, Glycine max
agcttagactcagttcagcctaccatcctcagactgatggccaaactgaacggaccattcagtcgttggaggacattttaagagcatgtgtcttatagcagaagggaagctgggagggttttcttccattgaaagagttcacttataacaacagttttcattctaccattggcatggctccctatgaagctttgtatggtagaaggtgtataacacccctatgttggtagagcccggagaatgcctcaccttacgaccagaagtggtacaacataccactgagaaagttaagttaattcaggacaggatgagaactgctcagagtacgcagaccagttatcatgataagaggatgaaagatctggaattcgacgttggtgatcatgtattcttgagagtcactccatggaatg

SEQ ID NO: 283676 - DNA, 320 bp, Glycine max
  unsure (1)..(320): unsure at all n locations
tgagatgaggaagtgtagaagggtgaaacttcctgctnttattcgttgaccacagagtggtacctggagatatgtcgcgggggtcaagagaaccttgggacgtcaggtggggtgctattgcccaaaaccaagcttgaccaatcccgacccaacccgggcatagttagtcagtgagaacctgtgatgtacctaaacaggcgagctcctggcagtcaacagataaaaggaacaaagacgacaaagcaaggaggcttgtgtggtggctggccagctgtgaactttgattgatatatgggatatggcctctggtaatcgattac

SEQ ID NO: 283677 - DNA, 422 bp, Glycine max
agcttgacataaaccccaatattctttgttctacctaaccactactggctttgaacaaatctacaacatttgctggaggttttgctcactgactaaagtatgatcatctaatagacgaatgtatcatttaacacttttagtcttttctttcaatgtatacaaagtgttttgagagctttgtatctttataagaatttacagaatgctttacaagaaaaaatgaaagaaaaattcacataaatagttcgttttctgtgtttcttcaaatatatattcttcatcttcaagtatccattgtctcacaacagttgaattcttcactcagatctttatctgaagtctggagtctattggagcatctaatgattgcattaaatgcacttatctcttaatgaaatgtccatgttgataggatggtgtgt

SEQ ID NO: 283678 - DNA, 449 bp, Glycine max
  unsure (1)..(449): unsure at all n locations
gctattacgtgacactatgatactcagcttatagggagtgatgcctatgctagtgtgataactattattataagctaaatttataagggataaaaacttatcccaacttacaccttcatcaagaacacatactctaagcatgtcttcaaggttctagatgatcctctntgattgactatccatttgaggatgataagcagtgctaaaacttagcttatacccaaaagctcgctagaatgctttccaaaatctaagatacctatctaacactatagaggtaggtatgccatgaagcttaagtatctccttattgtaaatgtctgctaatttgtccaatttgtaggtctccttaattggtaagaagtgagcagacttggttagcctgtccacaaccacccatatgacctctagacccaaacgaagttttggaaaactgttacaaaatccct

SEQ ID NO: 283679 - DNA, 385 bp, Glycine max
agcttcacttaccatcacacataaaaataagatttggataaagtagcatcaattattcaatcaatatattatataaaacacaaatattaattgtacttgttagtacacgtgtgttacgctctggtaaaaggatgatccacttttttttaagtttaaaattatgataaaaaggaaggagaatatttttgattcatgccaattatattgatataatcatttatgtaaataaaaatagtaacaaaaattaaatgtgcatttatgataattaaagaaaccaagcagaaaattttaaattacatttaattatttaatttattattattatattatataaatgcttatttgaaactttgtaaatgcttttctaaaatttaaattcttaaaa

SEQ ID NO: 283680 - DNA, 323 bp, Glycine max
  unsure (1)..(323): unsure at all n locations
gattcatgggttcgagctatgcatgatgaaattattgctttagaaaggaatcatacatgggtgcttactganttacctcagaataaaaatgtgattgtgtgcaaatgggtgtacaagatcaaacataatgtgaatggctctattgaacggtataaagctcgcttggttactaanggctatacacanattgaaggctangactatttagatactgtttctctagtagccaaaattactaaagttcggcttttgttggcactcgctgctttgataagtggttatcagacagcttatgtaataatgcaaactcatttgatcttatg

SEQ ID NO: 283681 - DNA, 388 bp, Glycine max
  unsure (1)..(388): unsure at all n locations
agcttggttatgcagcanngtgtgttttgttgtgcatgtccttttgtttttgacatcatacaccgtggacatggcccatacgagtggacatggtccaacctatgttgtcagtagcagtcttcgcagttntgtcaacaataaaaagtataatgcaataaaaaattgtaaaaatactatttgaaacataacatggaatataacaagagtttaatacctatgcattgatagtataaaatagattntccactatcatccaatcataaattactgtttgaattactttaagataattattttaaatgttgacacatttaccatgttagtgcatatatagcgttctaggttgccaagaatggtggagttgactggaatgaactcatgagttctg

SEQ ID NO: 283682 - DNA, 438 bp, Glycine max
  unsure (1)..(438): unsure at all n locations
tcatgatgaatcaagatngattcatttagttctgatgataactaagatgatgacaaanagctcanaagtcaagaacatttcatgataacaaagatgatgatctcaagacatcaaagaatgagttcaagattgaatcaagtacacttcaaggttcaagaggaaatttgatttcaagaatcaagattctaggtacaagcttccaagaatcaagatcaagattcaagattcaagattcatgaatcaagagaacacttaatcaagataagtatgagaaagtcttttcaaatactaagtagcacatggatttttctcanaatctgtttccaaagagttttactctctggtatcgattccagattattgtatcattactttagcgaaatggttttaaaaactttaactgattacaatgtccattgatcaaatgttgatcaatac

SEQ ID NO: 283683 - DNA, 274 bp, Glycine max
agcttcatatttgaggtctaaggcaacattcggggtcaaatacccgtgtcataacataaagggctgaggggtatttcgggttctatagaaaagaaacatatttttgaaattccgatcacgccaatgtgaccggtgttcggtgaatgccgtaaaaacaatctcaaggttataaaaagataactcttaaaatgtctcattctctatggattttcagaggaagtgtaaaaacaccccattacagtacccaacacataaaagacactaagaggagctc

SEQ ID NO: 283684 - DNA, 209 bp, Glycine max
  unsure (1)..(209): unsure at all n locations
tagtagtgaatcacttattgtgaggacaagtagctatgacattaaatttaattgccattcttgttgcatatntctaaccatgcttttgattttgctgagctaaaaagttgaatgtgggcaccaccatacttagntgattgaagcacatgaacacaataattgttgaatgaacgggaatgcatgaagagtgtgtatgtaactttgctttg

SEQ ID NO: 283685 - DNA, 375 bp, Glycine max
  unsure (1)..(375): unsure at all n locations
agctttgatgcaacatttggagaggttaatgaaacaacgagatgatgcgctccatgagaggttggatcaaatggagaatagagatcataatgaagaagaaaggagtagaagagggaatgatggtgttcctagacaaaactgaattgatgatattaaactcaacattcctccatttaaaggaaagaatgatccagaggcctacttggagtgggagatgaatatagagcatgttntctcatgcaacaactatgatgaggaacataaggtgaaactngccgtcacggagttttccgactatgttcttgtgtggtggaacaagctacaaaatgagagagcaagatatgaagagccaatggttgatacatggatggagat

SEQ ID NO: 283686 - DNA, 428 bp, Glycine max
tggagaggatgcttcaatggaggatatgaaagagggagagtaagagagaggggggagcacgaaattgaaggaagattaagggagagaagttgaactttgagttgtgtctcacaagactctcattcattaaagttacaacaagtgttacacatgcttctattgatagactaagtagcttccttgagaagctttcttgagaaaacttccttgagaatcttctttgagaaaacttccttgagaagttagagcttagctacacacacccctctcataactaaactcacctgcttgagaagtttccttaagaagatcctaaagaagctagagcttagctacacatacctctcttatagctaagctcacctccttgagatgagaagctagagcttagctacacaccttctataatagcttagctcacccccatg

SEQ ID NO: 283687 - DNA, 394 bp, Glycine max
  unsure (1)..(394): unsure at all n locations
agcttctaatgctaaaatatacatttaatcttttatgttntctatgatattctatttgatatgttatttttttttaaaagctaagggtcaatttagggtaattgggagtttctgattttttattttcaaatgcaattttgataacaaaatgcttttagccacaattgagctaaaataatttgactcattatttttataacttttacattcattctcaaaaccaagataaatattgcgaatctagttttaaatttaaaagaatgcacactctctatatttgacatggtcctttccattgctatcattgcacaaccaccatctccatcggcaacgacactactcaccaccacaaccacaacatcatcatgactatcttcactaccaccaccgttga

SEQ ID NO: 283688 - DNA, 350 bp, Glycine max
  unsure (1)..(350): unsure at all n locations
tatagaagcaaaaatggacccgaactaccaaggtctacatataataagccaccanaccagtgaaatatataactgaatataaaaaagtgcaacantttggagaaggtaaaatggttcaagaggcatactgctagcattatgagtagcatntgcaactttatataattcttcgtgatcatcatcangttcacgtggatagtcgcatttcatatactgtgagagaacataatcaaaagccaatatacataacgaatatttacagactacatgttaacctagaaataaattataccacaataaaaataataaattaatgattgacaagtatatgangataatgaaatatacta

SEQ ID NO: 283689 - DNA, 376 bp, Glycine max
  unsure (1)..(376): unsure at all n locations
agcttagtggattatggggcacccgtcatatgtggtagtactatgtggcaatcgggcgatggcgcaaatcaactctcccactttcacaagtcaaacataaacacaccatccccagttgcccacctcttaactgagttcacacactcccacgtagcccttatccacgttcctctcagcaccgggtccccatcaacccctccaagctttcacaatatccaagcaattcaatcccaactatcatgaaactaccctgaaccgagaaaacagagtagaagcagaaaactctgcccaaaacacatatcaataccacaactttccctactcaaataccccagtaacattctctntatttcgattcagtaaccattggatcaac

SEQ ID NO: 283690 - DNA, 203 bp, Glycine max
  unsure (1)..(203): unsure at all n locations
aggctcttactccttcaattntgcatctcaaagtctctgaccaaatctatgacttgcatacctttaattctttcatttacttcgtaatcattctggaagaaactccagatntcatatgttgatctgatggccatgattctagggaagaattcttttgagaccaccacaaaccaagtagctcttgcctttgactatcgtgcttt

SEQ ID NO: 283691 - DNA, 328 bp, Glycine max
  unsure (1)..(328): unsure at all n locations
tagcttagtttatgttagtctaaacctaagagggctgtctaaattaaacctagtcgaacaagagggatctgaggatgaagcttggattgattcagtctaactagggatcgaggtttagtaatctaggctacaacatagaacacaaaagcataatttattagataaacatctttatatacatcagttggttcgttagaaagatctaatatctttacctactgctgtcaatcttacttacttgcatttgtattgttttaacctanactantttaatactgtcctanatcataattatcaatgtttctttaacaatgccttatttctgaat

SEQ ID NO: 283692 - DNA, 402 bp, Glycine max
  unsure (1)..(402): unsure at all n locations
tcttatccaaggcacattcttggtagcgaagctccttcttccatgacttattccctagaggatggcacctcctctcacctcttctcctttatcttccgctgcaactccatggtggaaaatcaccattgaaggacctcattgaagctcanagatccagcctccataaaagctccacaagcaagcttccatcaagtggtatcagagcacaagagctttaagtaggtgctccttaaacctccattaatnttntgctttaccttctcttccaattttgtttcttcatttttctccatgtatctcctcacatgtcttgtgctanatgtttttaacatgaatttttagagtttncaccgattaaacttgttatagaagctatattttgatttctatggttcaaatttc

SEQ ID NO: 283693 - DNA, 363 bp, Glycine max
agcttctatataagctgaaccattttatcaataaacacaagttgagttttattcagaaaattagagtttatctcttttatcttagtgagagtgattctcctaaattcttgagtgattcaagaacaccctggctgtatcaaaggactttcacaacctttgtgtgttgccctcgctggaaagagtgattctttccttcctatcatctccacccttgttctttcaaaccacaattccagaaaatccacctctgcccaaaattatctcgtgaccataactcccattttacacactcaaattaagtgattcttgatcctaaattgaatttcaaaacgagatctttcacctcgttttggaatcacctca

SEQ ID NO: 283694 - DNA, 303 bp, Glycine max
  unsure (1)..(303): unsure at all n locations
tataatatattgatacgctaganattaaacatcggaagctctcgaganattcacatggtcatgacttttcagacggatgtccgattatggcgaatcacatatcgagacgcttcataattgaacaacagatactctggagaaattcaaatggtcataactgctcacaccgatgtccgattcaggcgaatcacatatctagacgctcaaaattgaacagaggatgctcttcgaaaattcaaatggacataacttttaactcggatgtccgatcacgcgcatcacatatagaagctcttgaaaagg

SEQ ID NO: 283695 - DNA, 426 bp, Glycine max
  unsure (1)..(426): unsure at all n locations
agcttcatgatgaatcaagagtgattcaaagatgttttgatgataacaaagatgataacaaaagatgatgacaaaggtgatgacaaaaagctcaaaggtcaatcaaagaatgagttcaagatattcaagatagaatcaagaacacttcaagattcaagaggaaagttgatttcaagaatcaagaatcaagagaccaagatttcaagaatcaagattcaagagatcaagattcaagactcaagattcaagaatcaagagaaggcttaatcaagataagtatganaaggtttttctcanaaattgagtagcacatggattnttctcanaacatgtttaccanagagtttttactctctgngtaatcgataccagattggttgtatcgattaccagtagcanaatggatttgaaaaagtttcaaatgat

SEQ ID NO: 283696 - DNA, 416 bp, Glycine max
  unsure (1)..(416): unsure at all n locations
ctangatcannattttntctctcaactattcttcattcttcttccttttttcacttctgttcttcctttctcttgcacaaatttcacggcttgtccattggtgatgatcatggaaggctaaacacttaattaatccaaggatccactataagtaaggctgaatttgagttctggtttagtatttataatctttgtgaatgttcatcttttcttcaatcctaatttttattttcatgattatgattatgattaggattgaaaatggattaagttatggattcatttcctaattttcaaaattaatcacagattgtttggatgattntccaacttaatttgcgatctcaaacaatntaaggattgatttgattgaactatctctaatngcattgactgaactttcacactctgagcat

SEQ ID NO: 283697 - DNA, 410 bp, Glycine max
  unsure (1)..(410): unsure at all n locations
agcttggttcataaagaaaggtgagcataatgcttatgtatgttttgaatcaaatttaactgaagttccccataatacttggtggattgattatggatgtatgactcatgtttctaataagatgtagggattccttacaacctgaaccataaacccaaatgaaaagtttgtctttatggggaatagagtgaaagttccagtggaagctgttgggacttatcatttaatcctagacactggatttcatttagacttatttgatactttntatgtacctagtatttctagaaatttagtatctttgtctaaacttgatgttgctggatacctctttangtttgggaatgnngtgttcagtttgtataaacgtacttgtatgaatggatctggtacgctttatgatggttata

SEQ ID NO: 283698 - DNA, 350 bp, Glycine max
  unsure (1)..(350): unsure at all n locations
tcagcttgacaaacaatanattaggttttatggttagtaaattataaattttggctaataaagaaaatganagatgaaaactaanatacctaaatatcctcccatatcaaatccttctgagtagcagggacttccttccaagtgttgtatgtcacgtcgaccttatcatgagcgataatccccaaatatattcttaatttcttcttgtgcggactatcgtccttcccggtcgcaggatcgatgtggaccaccgatctctctgccccaggtggtctagtggccaaagatcgtagtcgtgtggctttgcgtgttcgcttcaaggtagatggaaactctgatgctactatagc

SEQ ID NO: 283699 - DNA, 380 bp, Glycine max
agcttccgatatgggctatacgaaagggaaatgggtttccagaatggtttatctagaattgtggagtaagcttccggaatatccattctgaaagtgttatttcgcagcatatttgtaatccagaacaccaattttggaagtgacattgtttgtaaacgtgttccggactaatatagttttgtctctagttgtgtagcttatgttgattgcgttgtttagtaatgtcaataagattttaaatttcaattttatggttgcaatatgtatatgttacacgtcatcaaacatataaggccaagaaaaataactaaatatttgttctaaatatgaatttatttccagcatatgtttttgtcatagatatcatctacgatgaattg

SEQ ID NO: 283700 - DNA, 390 bp, Glycine max
  unsure (1)..(390): unsure at all n locations
tatgccattaggaggcttcacccctgtgaatgctgaaaaacagctcctgtgtctgaatttgagtcaccaaagttgtaaattgctgggaaccaacattagctgaagttagaggcattcccagctgaaacttgaatgaatgtgcatgctacacagagatngaaccacacaactacataaagcagcctcctacaattcatggttgtggtagcaatcactataagtcttactaagaaaatatgtttcttcaaaggtttcctctaccactcaataaatatggatcatgaagtggcgttcttagacttccgtgaaggcacttactattcatgccaactctgaagaagagagattatatcaccgaccatttttctctcatagaagtatttcacataa

SEQ ID NO: 283701 - DNA, 411 bp, Glycine max
agcttgtatgattatggggtacccatcacatgtggtactaggtggcggtcgggcgatggtgcacaacaagttttccacatccacaaagcgcgcataaacccaccatcccctgttgcccacctccaactgagctcacgtactcccacgtagcccatatcctcttttctctcaacaccgggtccccatcaatcctcccaagctttcccaacatcaaagtaaaacgacattcaaacagcacaagctatcacagccaagcaaaacagagcaaaggcagataactctgccaaaacaccaaccaaatcacagcttttctcacttaaagactccaataacaattccttcgttccggttcattataccgtggaatcgactcgaaaatttactggaagtctttagtacataagcctacat

SEQ ID NO: 283702 - DNA, 298 bp, Glycine max
gatgcaacatccggagaggttaatgaaacaacgagatgatgcgctccatgagatgttggatcaaatggagaatagagatcatactgaagaagagaggatgagaacagggaatgatggtgttcctagacaaaaccgaattgatggtattaaactcaacattcctccatttaaaggaaagaatgatccggaggcctacttggagtgggagatgagaatacagcatgttttctcatgcaacaactatgaggaggaccagaaggtgaagcttgccgccacggagttttccgactatgctctt

SEQ ID NO: 283703 - DNA, 399 bp, Glycine max
  unsure (1)..(399): unsure at all n locations
agctntcaacaaaagtcttcacaaataatcatcacacagcagaaacctagcaagactacccataatatctcccaaaaccccatacccacgaaaatcaagagggaaagaagtccacccaaacctgaattttcgaagtcccactcgtagccacgcacttcacgaccccgaaaatgccctcctttcgcgatttggagcagaaatgagtaccaaaggttggagctntgttggggtttcaatggagaatgagggaggagaaaatggcaacgtgagagagagagagagctgtctgaataagtgtgggggctgagtgatgagagagaaaaactttttgggtttaaataaaaggatttccctctttttttttctattaatttattcaagctctgccacatgtcccta

SEQ ID NO: 283704 - DNA, 434 bp, Glycine max
  unsure (1)..(434): unsure at all n locations
tctntgagcacagatcctgactcaccatanaccttgacccagtgtgagaatgtcaatccttaccctcggaagcananaaggaagagaaggaaaatttccaatcaaaggaaaaaagagaggaaaggaaattcccaatcaaagagtgggagaaagcaaaaagaatagaaagaaaattcccaatcaaagaatgggagaaagaaaaaaaaagagaaggagaagaaggaaagaaagctcctggtcaaagatcgaaagataacagaagaaatatgcagagaggtctttggaccagacaatatctgaacaatacggaattgtcaccaaatgaacaaaagaaagaaaaggaaaccataaccttaaagtggtcttctccctttgattaccaaccacaatcatgtgcatcggtgacttgttcgcctcgcgtcaaacaaaaacag

SEQ ID NO: 283705 - DNA, 190 bp, Glycine max
  unsure (1)..(190): unsure at all n locations
agcttagtgtgagaganattgactatgcggagtgtcgcaacctacccttcagcgggagggcgacgcgagactcgcgggatgcgtgttccacgaaaggaatatgcgcggagacgtcaccaacgcttatctgatgaaacgtcggaccaaccggaaagacgcgatctacgaacttttaagtgaaatgttcggg

SEQ ID NO: 283706 - DNA, 461 bp, Glycine max
  unsure (1)..(461): unsure at all n locations
gatcttccaccatcgtcgccaccatctttgtagttcctctcttatcttaatattattagcactttgattactagccgggtctttggctataatattattacatttgaacaatttagtatttctttatttgcatggagtgtttgaataattatcaattatgttatatgactatgtgatttttctatatatctgatctattcatgtttcttgcttcatgattggtttatatttttccatgattgttgcgtgaatgcttagttgtatttgtatgtttcaaacttgttacgcactttggctttntggtgatgctcaacggggagagaaatagggattaaatcaagaactcacatgagtaatcaacttaattgtaagagaagctaaattctaaaacaatggggagaatggaaattatgtgagtgatcgactatgaaaagtgtggtgcgtggtgtgtgtgttgtgtt

SEQ ID NO: 283707 - DNA, 323 bp, Glycine max
agcttcaacaaaattcatgaaggtaacatcaccaacttcaacttacttgatcgaaggtaacgatgctgctgcacggcaacggtccatttgtacccaatccatctaaacaatccaacaagacaagaggaaagcaaacaacaatacatcagaaccaagcattgaaacaaacatataagaaaaaaaattaagagagtaatgtttgattaactgcttaacataggacaatattggagaaactcacaatttttggccaattgccttgtatggaggagctggttggagcagaaaagcgtaagcacccacatgagtcatagatgtatgaa

SEQ ID NO: 283708 - DNA, 379 bp, Glycine max
  unsure (1)..(379): unsure at all n locations
attgaataaacacttaattnttgtctgattgcatcttatgttaatcaaaactatgtctacaaccatgtttctgggtttaatttcacgacaatgtggacccttcaaatgcagaggctatagtaaaaaaattccagatggatggacgttatcttagagatgtctggtaaattctctgattattcatctgtctgggttttggcacccttgctatttggtgtgttaagttcaagattggttgaaggatatttgataccctgctatcatgcgagtttgggacaccaatgatggaaggctgaaatttctttgagaaaacaaatcgttnttgtggacatttgtgtggatntcttatatgtttctcttaatattctctcttatcatg

SEQ ID NO: 283709 - DNA, 376 bp, Glycine max
agcttatcatagcacaagaaatcagcccctgcatcattcaatttggattggctgacacatattgataaatagaaacaaagaaatccagaatcaagatattataggctgacaaaatactgttgatgtagacacatcaaaagtttaaactccataaaatccatcctgctatttcttttattacatgtagctcctttgtaaacgaaaaatgttttatatgttctccatttcctgcattgttctcaattggttttcctttgacggaacaagctgaaagcctttgtaagagcgacatgcaaaacatgtgcatagaccaagacagagtttgaataacaacgaaagtcatgagtgcattataactgttggacttgggaaaaca

SEQ ID NO: 283710 - DNA, 337 bp, Glycine max
  unsure (1)..(337): unsure at all n locations
tgtacaaaatagataganattattacttcctccgtctcatgataaatgttntctaagaagaaaaaatgagtcttaataattgttattttagttnttttaatgtaatattaacaataaagttagttntataaagttattattattattattttctttcatttatatattattttttcttgatcttaataaanaaatctaggagaaacttattatgggatgtagagagtatttttcttctatatatatngatattttgactttttttctcccactanaactntaatatttttataaattcaatattattaattatgccttcgagtcctttttataagaa

SEQ ID NO: 283711 - DNA, 303 bp, Glycine max
agctctgagccaattcatacgacaataactttttactcaaatatctgattgagtctcgtaatataacgagacgctcgaaattgaatggcgacactcttataaaattcaaacgtcaattagtatttactcggatgtctgattatgtcccgtcatatatcgagacactcgaaatcgaatgttgaatctcctatccaattcagatgacaataactctttaatccgatgtctgatttcgtcccataatatatcgagacactcgataatgaatgttgaactctgagccaattcacacgactataacgt

SEQ ID NO: 283712 - DNA, 274 bp, Glycine max
cgacctataaactcgctaacattcacttcgagcctacgattttctggctcttcacatcgaaaaagtattgcgttgatttgctagagttcacattcatttcagcgttcgattgttgggactatagatatcgagtaaaagttattgtcgtttgaattgactcagagcttcaacattcaatttcgagcgtctcgatatatgacgggactcaatcagacatccgagtaaaaagttattgtcgttcgaattggctcagatgttcaacattcaatatcga

SEQ ID NO: 283713 - DNA, 351 bp, Glycine max
  unsure (1)..(351): unsure at all n locations
agcttgtatgatatgtggagcccaccttaacaatcttcttgggagctttatgaggcttttttgaagggcatgaagaacacgtcgaagtccaacatggaaacatcttgagctagatctcttagtgagaaacctataattctgcttcaaccctctctttgagagtgacccacttcagtatttatgcttacaaatctataatattcctttgatagaagtgtgagatttaattcttgagtggaatccccttttttgaggtgaagaactatattttgtgcaataaaacacattctcttttctgtatttaatccagcaatggctagcaaagctaanatcaagtggtgttgctggtct

SEQ ID NO: 283714 - DNA, 459 bp, Glycine max
  unsure (1)..(459): unsure at all n locations
tgaggtcaagaacattgagattagtggtattgaacttgaagaagctgagagtgagataaanaaaaactattaattaatttgttgtgaacaaaatagatttataaaagagtagcttggcttcctactagtctggaatgattattcaatagcttggttttaaattgtggtctacaaccgtaattgtggccacaacattactagtacatagttgtccacaactgcatcaacccataattgtggtgtggaattcaatcacacaaaatgccacaagcatccacaacacagctacaatggaattataatagaaccacaatggaaccttgcactattctattcaactttnnttgttaaaaaaaacatattcagattgaaaccttctattataacttgtaagtgtcaatgatcaaatgtgtgtgacaatatgggatgttgggagagacccaaatctaaaatgaatga

SEQ ID NO: 283715 - DNA, 347 bp, Glycine max
  unsure (1)..(347): unsure at all n locations
agcttctatcttccattatttaaagagcagtaaccaaaagggtaatagtttggattactgagaattgaagcacaaccaaagctcaaaaatggtgtggtgtgcactaaaattcttgacattctatacaaattcttctgtccatttttgtgtatttattcatgaataactgctgtcatccgcaactttgaatgtgagagagacaagatccttttatttccaattgtcctaaatttaagattcaaccacttagaattcatgtcactgcttgattcacatataaaagataaagtcagtcaaagacatcttcatttgaatctattccaatgtngttaattaaaaatcaatta

SEQ ID NO: 283716 - DNA, 360 bp, Glycine max
cttgaaagactaccagaataacatatgctatctggaatcttccttgagaggttgttggtggagaggtccaacacagtgaggttactatgcttccctagctcctcaggaatctcacctgttaatccgttagaccatagctgaagaacctgatgcctatgcaaagatgcaacaccctttggaatcttcccagtgaacttgtttgagaaaaggtggagaatcttcagcctctggagcttaaccacacgctcggaaatctcacccgaaagagagttatcacttagatcaagagacatcatctttttgagctcgaagatagatcctggatttgaccacttatttgttttggagagaagagatctg

SEQ ID NO: 283717 - DNA, 354 bp, Glycine max
  unsure (1)..(354): unsure at all n locations
agcttgtgactcttggcaatatctttaacattagtcacttaaaaagttgtgacttttgaaaaaatcttcagaaaaaagtcacttgaagaattgcgactnttggaaaattatttttcgaaatcagtcactggtaatcgattaccattaatgtgtaatcgattacacatcaatagatgtgactcttcattttaaattttgaaaattaaaacatttagaagccttggtaatcaattacaagtattgtgtaattgattataccatgttaaaatgatttgaaaatgtttaaacacaagctgtaactcttgaaatttgaatcttaatgtttaaaacactggtnatcgattactaccttct

SEQ ID NO: 283718 - DNA, 227 bp, Glycine max
  unsure (1)..(227): unsure at all n locations
ntactcataatccttcatatgagcaagaggtgttgtgcttctcttgagcctactgctgcatcttcttcccatcattccctagcccatcaaaaaaaccttatgctcaaggtgttaggtgcagataacagaacctggatcccaaatgacagtaggtgtaagaatgagttcctacagattgttgcggagatagagccatttggcaatgacaagaatgatgaagacgatga

SEQ ID NO: 283719 - DNA, 417 bp, Glycine max
  unsure (1)..(417): unsure at all n locations
agctntgcgcacaatggcggttctgattggtcatcaagaggaaatatatttgcaaaaagtggattttattgataaaaacaacatccattcattaaaaagcttaaccatgaagcaaggaggcagagggagaaacaaaagcttcgaaagccattgttgaagaatatccaatttttggagctctagccaatccgtttcactgtatttctcttccattttcttccatttcattccaccttttatatttgtaagtctctcatganaatgagagactaaaaccacctgttattagaagctctgcaaaccaaactctctttaatgtaattactctaaactatctattaatatgatgttgatattattgctctttcgtgtactcattcacatngttgtggtctgatcatccattttcatgaacta

SEQ ID NO: 283720 - DNA, 394 bp, Glycine max
  unsure (1)..(394): unsure at all n locations
ntaactcangtagagcacaactaatcatcaacatatcacatatagcagcagcaagctcacacaaccattgaaaaactatgcacactaaaatcaaacaatgtccaaaaaatagaaaaaatcaacatgcaaatgtcaaagaaatatagtttaatagaaaagaaggaaaatgttagaaatcctgngttgcctcccagtaagcgtttctttaacttcactaacttgacgcataacaccctcacgagtcatggagttggatgatggtggtcaatctctcaatattgtgaccattgtaaaccttcatcctttgatcattcatgacctagctatgcttccggttggtagaagaggngtccatcaactcaactgctctataaagctttacatccttgatggt

SEQ ID NO: 283721 - DNA, 372 bp, Glycine max
agcttgactatgaaagcagaacctgaaatttttgtaggttatagctcaacttcaaaggcctacagaatctacctaccacagagcaacaaagtaatcgtcagcagggatgtcaaatttctggagtcagatagttgggactggaaaaatgattagaggtctgagtttcaggaagagaatgaagatgttgatgaagaacctatcagaggaaccagatcactttcagacatctaccaaaggtgtaatgttgctgtgatggagcctgagggatatgaagaagctacagctgatcaaaaatggagaaatcaatgaaagaggagcttataatgattgaaaaaaataaaacatgggagctggtggacagacctaaccaca

SEQ ID NO: 283722 - DNA, 454 bp, Glycine max
  unsure (1)..(454): unsure at all n locations
agatactcagcttttatccaggctcatcttggtggtgaagctccttcttccatggcttattccttaatggatggcgcctcctctcacctcctttcctttgtcttccgctgcatctccatggtggaaaatcaccattaaaggaccccattgaagctcatagatccagcctccatagaagctccacaagcaagcttccatcagtatcgtcttatatggacgtatcatctaagacacaaacgcacagatacagatcataatctgataatacatatatagatcaacctttatcanttngtattgttgcatctatacaaataataggatnattatttctctttaaacataatgtatntgagttacattaccatttttataaaaaacattaaaatatcatcaaaatttagataatagtattaaataattctaaaaattaaaatattttttatgcctttga

SEQ ID NO: 283723 - DNA, 329 bp, Glycine max
  unsure (1)..(329): unsure at all n locations
agcttccactactantttggccactaatcaagcatggaataaagtcataaaaatacagaaaaagaaaacttgcaggggaaccatacgatttcggggggaaaactcacacacagcaccgatgtgatacacattgcgggagaaaagtcaaatgttactgcggagagtgatgagaaaaggcaacaagagatctagagaatgaaattgggatctcaacgctgggtagaagcaatgtgtgtaatagtaaaagtaaaacgttattctgaatttcaggggcattttctcagcaaacaaaatcagaatccaaaatacagtacacatggaaagagttc

SEQ ID NO: 283724 - DNA, 415 bp, Glycine max
  unsure (1)..(415): unsure at all n locations
attacggacctaatagactcagcttgctctcnacaacttggttagctagactagtttcttggtattgaagtcaagtattgtcctgatagatctattatgatgacacatatgaaatacattatggacttgttgcacaaaacaaanataaccgaggctcagcctatctcctctcctatggttcctcctgcaaactctctaagaatggcagtgatctctttcatgatcctaccttatttcattcagttgatgggcactccagaatgccccttgacccacccagagattagctactctgtccacaaggtctgccagtttatggctcaacctttagacactcattggactgctaggaaacatattctgcactatctagagggtactgggtcttatggtcttcacttaacacctgctgctc

SEQ ID NO: 283725 - DNA, 401 bp, Glycine max
agcttggatttcatttgtttgtacatatattataggctgtgttccatttcagtatgtctgggagagggaatggatcaaattcattaaatgccaatacaagcacatccacaggtgcaacaagcagaagcaaaaatgcttcatgaaataagactgatattgggtggaaacatgggatagatgttttatggaatggtaaaaaagttaagagcaaatattgcttatagatcaacaatgggagaattttcatattcaagcatcatcttgttgggactagatgggattttgaaccagttcatgtgtcgtggcagacccgcacactgttgtctggtagaagaagagcgagacggtaagccttggtatttcgatatcaagcgatacgttgaaagcaaagagtacccact

SEQ ID NO: 283726 - DNA, 405 bp, Glycine max
cttgatattagtgtatgtcttaattggttttcctaatattttcataagttctcctctaccattcactggatatcttccatttgacctatttttctcactggagcatctctgtcttcttatcatattagaaaacctccttacacaagtttccatcgtcttgtctcctgtagttcaaccctaactttatcttgaatacaattattcctaatcttgcattgtatgttctcccatccacctctgaattctcggctatgccacactctgtttttggtctagctggcacttgactgccatagtgcaatattcattccatcgttattgctgtcatatagcacgaagagaattctaacatttgggacactctttatacactctacctgagatttaatttttcacatttgatct

SEQ ID NO: 283727 - DNA, 390 bp, Glycine max
  unsure (1)..(390): unsure at all n locations
caagcttgggtctcctcttgacattttggattccttaagagtgcaaaacgttattctagagagtgatggtaaaactattgctatgaacatttaatcggtggttgttgacaactcctagttggggagcttcattcaaagttactggatgagtttagtacaaaatccaacttttatagctgcttttattangagacaagctaatggaataactcatgatcttgctaaggcaactccattataccctagtctctacacttttgtgtgaatgtatgtatacaggttttaatgatgtcaaagaccaagattgcttcaagccttanatcaagatcgagaaactaagatcaagagttagataaagagtttatttgttaaaagaatctcacattggat

SEQ ID NO: 283728 - DNA, 375 bp, Glycine max
  unsure (1)..(375): unsure at all n locations
tgtgacactaccncattagttcttaagaaggtattggtagtcatagtcataattgagttntggtatttaccaagtacagggagatattcatgtaatatggtagttaaggatggagtttgccagaaataactagttgaaatttgtgacactatcccattagtttcttaagatattggtaatcataatcatgatagagttctggtattctcaagtacaagagatattcatcatgaggtanagcatcttttgttatttattgagttcactaagttacaagttatagacttatagtctgtcagtatgccttctgttagcttataacaagtcanaagcctagcactagctcatggactcatatganatcaaaaagttctt

SEQ ID NO: 283729 - DNA, 195 bp, Glycine max
aacttggtgaacgaggtattgggcctgtatacaacgtatgcgagcaatgtaccatctataattaagaaaagacaaagcttggaaattattattattcactacatttaacagtcttttccacaaatgttgtgtttaagggacacttccagatggactagaggtcgctgttaagacgctttcgcacacatctggaca

SEQ ID NO: 283730 - DNA, 274 bp, Glycine max
  unsure (1)..(274): unsure at all n locations
gcttggacatcatgtgatggtnttctctaatatcttcacaaaatattgtgcatatgattgaacttataagatcatctctaatgcaggtgcttcatgggttgcctaaaattaagtgaagttacttaacaaaattttactatttgagcaaatgatctggcgctgcaatgcttaagtgatatgcttatataaacaattaattgcttaacttcaatttatcgattaatgaagcatgttttaattacacaatataatgtgggtcaagttcacaacacac

SEQ ID NO: 283731 - DNA, 291 bp, Glycine max
  unsure (1)..(291): unsure at all n locations
agcttctattctctatacaagaatgaagctctgataccacttgttagacaagtggcctcagatatcttaagaagggggggttgagttaagatatcacaaactatttccncaattaaaattttatgtcactttctattcaagtgataaattcccttaacaatgaatttcttatatattgattcggatagagcaatttgaatatgattgtttaacaatcatcaataaaggagtttaatggaagagagaatgcatactcagaattatactggttcagtcacacccttgtgccta

SEQ ID NO: 283732 - DNA, 330 bp, Glycine max
tccataattccttaaatgcttcagctggagcctcctgcagtatatcctttctaagcacactataagcactcttaaccgagtaccttccactgatatcagcctcccacacccactgatcctcaatgacattctgaattctgatcccctccacctcttgaataaatgcaaccgcctgatctatctcattgtcaaatagtggtctcctccacttgaagtcccattcccatcctgttcctttgaattctaccatatcctgagataattggtcgtgctgaaccgatatattgtatagcctttgatatttctttaataaacaaatgtcttccccta

SEQ ID NO: 283733 - DNA, 381 bp, Glycine max
  unsure (1)..(381): unsure at all n locations
agcttataataacaaaattgccttaatcatttccaaatatgcatgtgaattaagacgcatcaacaagaatcaagccaaggctattgtgcaagcagtcaatggggcaaaacataccaaatgattataatgatggatggctcaaattctcacaaaggtaaaatcatcactttcaaattgagctgtcanaactatcatgacatgtagagaagaataaggattcaagtacaaaatgtcaagaacttttattttaaacaattacccatgtttgacatatcctataattcaagaaaacatcaaagtttacgtgccacaaaatgaccaaatattaactgaaatcgacaaactacacataacaattacacactaataattacaaaccac

SEQ ID NO: 283734 - DNA, 280 bp, Glycine max
  unsure (1)..(280): unsure at all n locations
tcaagccaaggccagactntcatgcatgcagaggcttcttcatagaaaatgccanactccctttgcaaatttgatttcatgcttaaataggtggccttcttcatgctcgtgtgcttagcacacgtatggaccgcttagcgcacgttagntaattttgtcttatcgcgcttctctcacttatcgaatgagctgaagcggtgcgcttgatgacctgnagcagtgcactcagcgatcctggcaactcatcttcttctggattctttctcccgcttagccactg

SEQ ID NO: 283735 - DNA, 333 bp, Glycine max
agcttgaatgtgtgtaacccaccatttttccatataagggttgtggttgggggagaaattgaggcccctccaaagtgttttgcaggggtataccaccaactgcttgccttttagtgccatatctgaggcaaggctcgaagtcagctagattgtggtggggaatttcatgtgtctcccccatggtttgagagacatgtgcatgatccgattgaggttgttggctcttaatgagtatgggaatggagctattgacattctcactgggagtgtatgccacatttggtggtgtatagttgggaggcaagccataccgctggaaggcgtgcttgtttg

SEQ ID NO: 283736 - DNA, 458 bp, Glycine max
  unsure (1)..(458): unsure at all n locations
tgtagagatttcttcattatgtttaatcgattaccaattattcataatcgatttcacaattctgttgagaccatgtcttgtgttcatgagtctctgctttaatcaattaccaggttatcataattgattgcatcgttcttgacagtgttcccaggagtgatcaagaacactttaatcgattaaatcaagaatttaatcgattacattgttcttganagctttccaggttttgggaagaatactttaatcggttaaaatgagaatctaatcgattacttctttgagataatcaattacattgaanatgtaatccattaccaagcggtataactagtttttctataaattaccaccttgtgttctcacttttaacagcgaaaatgaatgagctttcacgactcacattctaatccttggttctgaagtttcaaaggtaaagtgagttgtgatatctcttg

SEQ ID NO: 283737 - DNA, 338 bp, Glycine max
  unsure (1)..(338): unsure at all n locations
ttgaagatgatcaataacaatgcctataggttggaccctccagaagagtatggagtcagcaccacttttaacattcttgatttaattccttttgcaggtggagctgatattgaggaggaggaactaacagatttgaggttaaatcctcttcaggngaagggaatgatgcaatcctccctaagaagggaccagtcactagaaccatgatccaagaaaatgggctatagctgctgaagaaagtcctatggttctcatgaacctcacggtagatttctgtgcccatgggccaatgatgggtccaattatctttgtacatattagactacgatgtcattata

SEQ ID NO: 283738 - DNA, 315 bp, Glycine max
tgagatgatgaagtgttgaagggtgaagcttcctgcttctattggtgaccacagagtggtacctggagatatgtcgcggtggtcacgagaccttgtggacgtcacgtggggtgctattgcccaaaaccaagcttgaccaatcccgacccaacccgtgcatagtctgtcagtgagaacctgtgatgtacctaaacaggcgagcttcttgcagtcaacagataaaatgaatacaagaccacatagcacggaagcttgtggtggctggccagctagtaattttgtgtaatatgtgagatatggcctctggtaatcgat

SEQ ID NO: 283739 - DNA, 321 bp, Glycine max
agcttaatagtcttcaccttacaggtcggttttatgagattgagttaggtccttggctcatattctaagatggtttcaaagtctatcctagatacatcattgggacacttgcattgctacactccaagctagtagccctgagcatgaagaagagagttagaaagtcgtcttaattgtggtcacccttaccacgccttagttgcagcctcttagagggccaccttaattgcaacctcaatggtagtgtttagtctcacatcaactagagatatggcttaaatagagcttaataaaagttgagtagtcatcaccttacaagtc

SEQ ID NO: 283740 - DNA, 382 bp, Glycine max
  unsure (1)..(382): unsure at all n locations
actcagctttacacaggatgatcatagacattatagcagtataacacccacagattacaagttaaacttgaatagagtaattccaattaactctgagaataaatcatgatacacataagagacacacagtaggaatagagaaagtgggggatatgtaacacaggtataacacaagtagtgaaacatctntaaatcaatttcctcagcaagacatctttggcaaatagtacacaaaaataaattttggtaaaaaatattccaattaggaacaattaattactcaagtattttacaatattcacagagtggttaaaatgtaaccatttagtgatagtaccaaccacttgagtggttatttttcaaaataaataaaaccatcttt

SEQ ID NO: 283741 - DNA, 342 bp, Glycine max
  unsure (1)..(342): unsure at all n locations
agcttggaacatacaatctgaattntaggtcctcttaaggacttagtcaaaatatctgctggctgatcattagaaccaatgaactcagtgacaatctccttggacagaaacttctctcgaatgaaatgacaatcaatctctatgtgcttagtcctttcatgaaaaactgggtttgaggcaatatgaagagcagcctgattatcacaatacaacttcattggcagctcttcacaaaacctcaattcctgcagaaactgtttaatccacatgagctcacaagtaaccatagtcatagatcgatattcagcttctgcactggaccgagcgacaactgtctgtttc

SEQ ID NO: 283742 - DNA, 466 bp, Glycine max
  unsure (1)..(466): unsure at all n locations
tggttggacttccagaatgttgcgaaactntacggattacgcaacaatgtttgctttgacttccggagtgttgcgaaactntatggattatgaaacaaagctcactntgacttccggagtgttgtgaaactttatggattacgcaacanatctactttcgacttcaagagagaccacacaaagttcgcaagccgaccgccagtgtccctggacgaaattagggtatgacagttgtccctctttacttatcttttattggagataaaagggaagtaaagataagacactaatttcgttcgagccgaacctcacctgaccgaccactagcccaacccgcgaaacctatcaatcagaaagagcaaaaaggtagcaggaacattagtacaaacctcagtgtcgtggaagcagtaaaaccgggatgtcaagacgtncccgcatgctatcgaactaatcatctctgttaaca

SEQ ID NO: 283743 - DNA, 403 bp, Glycine max
  unsure (1)..(403): unsure at all n locations
agcttanatatcacaattcttgatatgcagatatatatggcacagatgagaagcaatctatcagcctctgtcttgactaattcctttntttatgattataagctgcaatcaaaactaaaatggacatagcttccttgtgctcttaagagtagcgtgtgtttggttttacgatgagaaatatcaaaattgattttgcctcttataagaaaaacatgatcttagaaaagatagatgttaacaagtctcatattgtctgcctcaattattggggagaaatttatatatttattggataatttcattntgtcttaattggttntaaactganaactaacataatataagagtttataacctatcttagttctcatcttatatattatatattagaaatataacaata

SEQ ID NO: 283744 - DNA, 192 bp, Glycine max
  unsure (1)..(192): unsure at all n locations
ctgctgctgtgcttctcggtctcttctccgacgctcttatgacagctaacatgtctttccggaaagaccgcacatgtggtcaacgaccacctgtgccctacacatcaccanattcatttcaactcattactttatatattatcatcaccatgcggcaatgatgttgaacgagatctatgattcatacagcac

SEQ ID NO: 283745 - DNA, 427 bp, Glycine max
  unsure (1)..(427): unsure at all n locations
agcttgaataacccaattgtatgtctctgtatcaggcttcatgtaatctgttatgtaacaaattaaagataatttaccttgcatagaattaataatgaagaaagagaatttaacaatttagaaaagagcatcccacctccacaacacacagaaacaaaaaagaagaaagataccataagaattgaaacataattgtgaacccagtaagagtataagaaaaagaaacgagattcccttaaaatggtaaatgaaatctttataagtaaacaaatataagcatcagaaaaagaagaaagaggaagagaaagcagatgtggagggcaaaccttctccatattccatgttctcaaatgttgcaaaagctatttcaggtattccgcaggtagcctaatgaatntgtaagaaataatattaagaaaacataatg

SEQ ID NO: 283746 - DNA, 403 bp, Glycine max
  unsure (1)..(403): unsure at all n locations
ctttacagaagttagatacaagaatatggataaataataaattcattttataaaatatttggtttaaaaaagtaagacatgatgtactttaaatgaagtaattggatattcatcatctacataataaaatagttaaatacattaattatctgatttttagtatatttttaatgaaatataataaataatctataaaatatatatacactatcatctaattataaactctctcacacacacacacacacacatatatatatatatatatatatatatatatataataaaattatttgatgtttataataattatattaaaaaatatataaacaataatctttattaattaagagtgtnaaaaaatttacacataaacattaatatcatagattcattatataaa

SEQ ID NO: 283747 - DNA, 405 bp, Glycine max
  unsure (1)..(405): unsure at all n locations
agcttctatataagctgaaccattntattaataaacacaagttgagttntattcagaaaattagagtttatctcttttatcttagtgagagtgattctcctaaattcttgagtgattcaagaacaccctggctgtatcaaaggactttcacaacctttgtgtgttgccctcgctggaaagagtgattctttccttcctttcatcttcacccttgttctttcaaaccacaattccagaaaatccacctctgcccaggattatctcgtggccataactcccattntacgcactccaattaagtgattcttgagcctaaattgactttcaaaacgagacctttcacctcgttntgcaatcacctcatttggagccatgtagcttcagttattgccatttctatatttc

SEQ ID NO: 283748 - DNA, 369 bp, Glycine max
  unsure (1)..(369): unsure at all n locations
taaaaatactgcgcaatatcggctggaaaatatcagtctaagctacttcacgaccgatgtcgcctattgagtgttctattcaatcccttaatgaaatatgcatgatgtcggtatggaaatgttcgatcggtgtcatgcggtgatgctntccttttaacctcgatcggtcatctttcctggccgacgtcgactgtcaattntttcgatcaatatcggagagaattatgttttggccgagatgggctaaatttttcgtggccgaataaatgggaacatgccagtttcggccgaaataaaatgtcggttgagcttgcacaacaatacctatccgacctacattgtacattatttcatcaacaccaacacacg

SEQ ID NO: 283749 - DNA, 414 bp, Glycine max
  unsure (1)..(414): unsure at all n locations
agctttacatgtgcgggtttaagaatcgaaggccaagtcaccgcgatatacgaggatgactccccaaggagatcggatttggtacagctatgtcctcccgatttccgactatgaaattggcgagtggaggaactcccggacgtttacgcgacaagcataatgtatccttttgtaattttaaaactctacggatgggcctaggctttagagtttccttttgttaagcattatgtcttttgtttttgaagttataatataaagatctttcttcatctgttcctgcgcctctacccattctcattcatttgcatgtttatttctttacgcttaanaatgctagatccgatgacgagtccctcgaaggtactaatacccgggacccagccgtcaatttcgagcaagaagcgggtcgga

SEQ ID NO: 283750 - DNA, 418 bp, Glycine max
  unsure (1)..(418): unsure at all n locations
tggaaggatngatggngacacggngttgagaaaaacgaggatatgggctacgtgggagtacgtgagctcagttggaggtgggcaacaggggatggtggatttatgcgcgatttgtggatgtggaaaacttgttgtgcaccatcgcccgaccgccacctagtaccacatgtgatgggtaccccataatcctacaagcttgagatgaggaagtgtagaagggtgaaacttcctgcttttattcgttgaccatagagtggtacctggagatatgtcacggnggtcaggagaccttgnggacgtcaggtggngtgctattgcccaaaaccaagcttgaccaatcccgacccaacccgggcatagtcagtcagtgagaacctgtgatgtacctaagcaggcgagctcctgacagtcaacagat

SEQ ID NO: 283751 - DNA, 355 bp, Glycine max
  unsure (1)..(355): unsure at all n locations
agctngtccacaaaaaatagggttttgaaagtttatcatttcagtttcttaccaagtaaaatggatcatttttaaggtccaacgacttaaaatgatcacctttcaagtaaaaagaatcacttgattcacgcataagaaagaactacataggtctgatttcctctttgatggagggtacgtaggagcaaaagccccgcttttgtcgacctcaaaaaataaaaagaaataaagntaaggtaacacaatttccacaattctaaaanataggctgttgtccttcaagacaaacgtaagaagtgctaataccttcctcaaccgtaaatacaactcccgaacttagaatttcatttttgat

SEQ ID NO: 283752 - DNA, 425 bp, Glycine max
tctctgaagggcatggttatttccagtttcctggaaatatctaagaatcttgccaaatggcggtccttctccttcttggaaggtaccatacgatatggtactttcgaaccttcattcacagctttttctcttttattctctctagcttgttcacttctactcctctcttcattcttattgttttcatctatttcaattttttcattttctttttctttttctaattctttttatttttcttggtcatttaattcttttttcttgaccattatttcgttttctttttcctaatttctttcacttctcatatcatctgtcttttcatcagtacctttcttttcaataactttcttcttggatctaacactatcctcatcctctgccctcacaaacctcttactctttgcatcacagaattgcattcc

SEQ ID NO: 283753 - DNA, 386 bp, Glycine max
  unsure (1)..(386): unsure at all n locations
agcttagcttaaaattaatttanaattcttacaagtattgcaaaaattatctacgaattatggattgaaatcttgtaaattaatgaatccacttttaccaaaatttattgcttcttttcttactctaaatgtttgcataaacttttataatatttacataacctttangtgatatattcaattattcattataattnttttatctagaggatntataacaacaactcatgtacctttatttaactaattgaactanatttcttgacatccattatacatttttataatataaaactaatagcagtaaaaatatattatcaactattcagtaacaattataaactgccttttnngttccctaattntgttttttttaaaaaaatctt

SEQ ID NO: 283754 - DNA, 308 bp, Glycine max
tgaagacaagactatacgaggtatctttcttgcgtatagcaatatctctaagggctaccgtgtctacaacttgcaaactaagaaactcgtcatcagccgagatgttgaagttgatgagtacgcttcttggaattgggatgaagaaaaagtggagaagaacgttcttatacccgctcaactacctcaagaagaagctgaggaagaagacccaggtgaaccaccttcacctccgccactacaactagatcaagaactatcatcaccaaagtctactccaagacgagtaagatcttgtggggacatatatg

SEQ ID NO: 283755 - DNA, 366 bp, Glycine max
  unsure (1)..(366): unsure at all n locations
agctntctaagagcacgagataagaaacccggaaactcaagctacatattctatttgatggcttaaggtattatcgacgaatacctgttaacaagattcttgataactcaggttatgtagttcctcggaatgttggtggttaatttctcttgggttcaaaaatttataattgaaagaaccatagacgggtggcacaagatggtttaatttatttcanatccgtaagcatgaagaacacttgcatagtttcgttcttaattaccangtaagtcgctgcattgcaaacttgtcanagagaaatgcagactgcatttgcaaaattanacggtgactggatcaccaatcacaattnttcttttctttttc

SEQ ID NO: 283756 - DNA, 440 bp, Glycine max
  unsure (1)..(440): unsure at all n locations
tagcaggatgaagttgaggtggaatttgttatgtatgaaactgtgcaaaaggtagatgtcatgaagttgttacaacttgtagatttgttaataatattgtagttaactacagatgatcttaatctgattgctttggaagtgtattgatgtcaacacaattggtcatcatatacacagtagaggtataatcatgctaatttactgggttacatgaagtttgtcatgttcaaaatatcacatatgcaaattaatgataccttgtagacaatagcctccgaaattgattatcatgattcaaaattaaaagttacaccattacactgtcataccatntaaccgacagaaagtatttaatacaaagtcacactatacttgaaatactccacatctgcttaagacactangtataacattgcatgaagatatatgcattcacataa

SEQ ID NO: 283757 - DNA, 338 bp, Glycine max
  unsure (1)..(338): unsure at all n locations
agcttgtccacaaaaattcattaaaaaaggatttgaaaggggccctatacccgggttcatgggaatctaaggagtggaggtgaatctatgatcatgctangtctccgacttgcttgataatagtgaaacctcatctagagctttctctctttataatatgttgtcgccggtattccataccgccacaatattattatattgagtgatgatacctctagaaaagggtcatgtgagttatgaatngttgggagtagttattagagacccctatatattgtcctatatgttcccaaataggggcatggagcgaacacgctccgtgccaattgttctcatgc

SEQ ID NO: 283758 - DNA, 349 bp, Glycine max
ccttctccaggtggtctttggcatcacatttaaacttgaaccattgtcgttgagtaccttcgcgacgacatggtccatacatctgactgacacatgtagagccttgttgtgccctctcccctcaatgggaatttcttcttccgcaaacgcgatataattattggtggttatatgattaacaatgccttcaaaaccctcaactgagatgtcgtgtgctacatgtgcttcgttgaggacttttatcaacagtgcacgatgaggctcagagtttatgagcaattcgagtaaagagattctcatcggaagtttattcagttgctcaactactttaaactcgctttgttggatg

SEQ ID NO: 283759 - DNA, 342 bp, Glycine max
agcttatgcttttacaaaaaggttcatcaagtcaagttgaaatatggaagtaaccgtcttgcaaaattggggcaaaagatgaatcgagtcatatcactgcttcgtctactgccaaacatatttaggattgttgatgtccttgttacttccagtttcaccttgacaaagatgtcatggaccatgttgaaaatctaaattgattcaaccccatatcctgcgtaaaaattcgcaatacttcaactgtacatcattcgcatacatccatgcttttcattggttgcattgctcattgcattctttcctttgaaaataaaataaaataaaataaaataaacttaatca

SEQ ID NO: 283760 - DNA, 501 bp, Glycine max
  unsure (1)..(501): unsure at all n locations
ntgagacctgcattgcggcctgctgatcgcgtccttcacactcagctactacaaaagcttggtgctaagtttctagagagtataagctctgtgacagaacaatgtggcgttcacttcgggtgaaagactatggccagcctttgctttacttcaagaagagctcaccaacgcgcctgttctatctcttacagacctttctaacacatttgagcttgaatgtgatgcctctgcagtgggagttggaactatattgttacaaggtgggcaccctattgcttatcttactcgacgaataaactgcaacccaagaggtgtggccatgctaacaagtgtctgtgtacaaggagaatatatggagggtcgctagatgggaaatcccttaatatttgctttatttggaaagggcttccttctagctacctctcggagagacacttactcttcactcttcttaccattaaggtggtcttcttctgggtgatgtctcactgatcctccctt

SEQ ID NO: 283761 - DNA, 362 bp, Glycine max
  unsure (1)..(362): unsure at all n locations
agcttgtatattaattggcatacgaattcatcttctactgaggtcgcgagtatccaaattcatctcctattgattntgagtataatcccagtacttaaatcttaataatatagtttaaaacataatattcatatttcatctctttaaagttagaagtaatatttaaaattaatagatagagcagttatgtatgtgtgtgtttggttcatgagattagtgtgttatttatccaacattntaatctcttcgatgtttctaaatcantaataattgtctcaactgcatggatgtacttaaaaacatatttgttatattataatatcaacaatattaacatatataattgagaattaaacaattta

SEQ ID NO: 283762 - DNA, 349 bp, Glycine max
  unsure (1)..(349): unsure at all n locations
tctccttccttttcctataaataggagaaggagggaagaacaaaaatgttcaaccctcctggtatctgagattcacttacaattagtgagaaaaattgtttccgtgaagaacatccaagccaaggcgcttccgtaacgcttccgtgatgtttctgtgggtgatttcgcgaagattntcaactgttattcgtcgatctttgttcggtcttcttcgttcttcggtcttcaaccggtaagttcccgaaatcaaactcttcaattcattctatgtacccttagtgtcctcattagtttcgcgtgcttttatcttcatttcacttactcttcgtacctcctttatgacgtgctt

SEQ ID NO: 283763 - DNA, 224 bp, Glycine max
agcttatatattactttacccccggacgaccagtaaacctgcctcaatataaattcaaaatcttcataagtatattgaatgtagaattaccactaaacgcgtacattaattaatgtggaattatatcaatttagagatttcaaattataatcctagatatgcagaatcccattaaatatgaactgccctacatcacctagaaacttttttatcacccatattat

SEQ ID NO: 283764 - DNA, 320 bp, Glycine max
  unsure (1)..(320): unsure at all n locations
ntggattngatacaagagggcttagcaactagagagacctatgataaggactaacaaggatggtggcagaggccgttgactttttgatatattggtggattattagtatattttgatgcattatgcacaattattgttgctttaacatattttttagtttatgttgtggatgaattaccttttttttttgcggtcacatctgtttaaacaacacgtgccttagaacaagaactatttttttattgattcttaaacaaacattaacatgaacaacttaaaaagcactaataatactaaattttgttaaaaccatcaacgta

SEQ ID NO: 283765 - DNA, 397 bp, Glycine max
  unsure (1)..(397): unsure at all n locations
agcttgtgacttgcataaactccttttcagtggatgacaatagaagctaaaagttaccaagcatacatcaaactgtttcaaaaagtccaactatcattttattcttaataaatgggagttaccagtataaaataaactatggctgcaaaattgtacttcaaaaaaatataaaatataacctgatcaaagacatcaatatagactttgtgcagagaatgagaactgcagaactgattaatctcatgatgaatcttgtcatatatccatgtcttatcataatgtacaccatagttgagcaatgtctcaaagacaaattccttatggagttgattcacaacctanaagaagaatatgcatcactgctatgaaaatattgaagatgtgaaaagaaaacact

SEQ ID NO: 283766 - DNA, 384 bp, Glycine max
  unsure (1)..(384): unsure at all n locations
gntgtgaaaagagannaaactgaaaacttgccttttccttgattngcataagaagttcatcgtaggtaccagcagtctctccatgtttctcanaaggtaagagttcataatgcaggggaaagggtaaaaccttcaagacttcaaagaacacatcanaggagaagttgagaaattttttgaattcattgacactatttgttggtgggattccaatcctcaactntgctgggggctctgttgtgttaccaggccattttggttgctctaatttagaaagcccnctctctggcatccaatttccaatgctcctctctgtttgctccacaacattgaacacctcaagaattgatggctctaggttgtctttaaccaaatggaaattac

SEQ ID NO: 283767 - DNA, 414 bp, Glycine max
  unsure (1)..(414): unsure at all n locations
agcttccttatgagttgcgattacagttgcgaatggttcagtttcagtgaagaggaaggctgaactgcgaaccgattcggccatggttgcgacgaagagatcgggttcaatcggaggttctgcgagtgcattttctgcgccgagatggaacaacaccggaggattgtctcataaagcgttgatcttcgatggaaggagaaaaatcggtgcggaatctgccgccggatctaggagcagctnttcgttggggagcggcctgtgcggaggttgctaccggagctccgacgaaatttggtgacttcttcacacattgttgtgaagtcggttgaggccttgccgacgacttcgacttcgagaacttccggtgcgagtaaggtggagacngcgaagaagccggtgagtaagccaacatta

SEQ ID NO: 283768 - DNA, 310 bp, Glycine max
  unsure (1)..(310): unsure at all n locations
tagctaaatatggatgttataacattgggaatcatagtcggtattatcatcctcttccttagaaatggttgctacttcttcatcgaaggcacttgcaactcacgctcttaacactaacactcttcaatctctctctattnttcaattccatggcattgggtagaaaaaagagtgtgcaattagcatttttgcttctcctctttttgtgtttggatctgggaatagcgcatcaacatcagggtcattctcattcccattctggtttctgtgcatccgatgcccatcatcactgtggagatgaccatctcca

SEQ ID NO: 283769 - DNA, 416 bp, Glycine max
  unsure (1)..(416): unsure at all n locations
agctntgatgcttgtgttgaatgcattaaaggtaaacagaccaaaagcaataaattaagtgcatatagggctactgacatcttggaattgatacatacggacatttgtggaccatttcatacacctttgtggaatggtcaacaatattttatatcattcatagaagattactccagatatgcatacttgtttcttatacagganaattcacaatctttggatgtgttcaaaacatttaaagttgaagttgaaaatcaactcaacaaaagaataaagtgtgtcagatctgaccgtggtggtgaatactatggcagatatgatggttcaagtgaacaacgtccggngccttntgccaggtacctagaggaatgtggaatcatcctacagtacaccatgtcggngtcacctagcatgaa

SEQ ID NO: 283770 - DNA, 339 bp, Glycine max
  unsure (1)..(339): unsure at all n locations
tctcatcatgctgcttctgaatatccctatctgttngcactgtcagcacccttggttcttccaaatcaataccaccatgttgttgcctcaatggctctacttgtacttgatcactttggacaaaacgcattatggtaaggctaatcccgtgatgttccaccattctccatccatagcacaatgcctctctatcatctggtcctccanagaacaacactgctacatgatgagatactngatttcccgctagatggttagagccacttaagcctttatccactaganattcgaccgagcaagggtgcattgctagcacatactgggtgatggatctgtatg

SEQ ID NO: 283771 - DNA, 359 bp, Glycine max
  unsure (1)..(359): unsure at all n locations
agcttccttttgaatccgagcatgcatttctcacctcatcaatcatatctagctcanaagctcagctntcaatgttaagtgcttcttcaaagtgagctcttctagttgagggttcaccaacctcaactggaatcatgacattagtaccattagtcaatccaaaaaaagtatagtaccatttattgtggattgtggagtgcaatggtatatacccctataatatacaagacaacttctcaacccaaagaccttttgctntgtccatccttttattcatctttgtcaagatgaccttgttcgttgttgctgcttgtccattggtttggggatgttcaatagaagataccaaatgtttgatg

SEQ ID NO: 283772 - DNA, 368 bp, Glycine max
  unsure (1)..(368): unsure at all n locations
tgtatttaanaatgttntanaaatacctttaattaatatttgaatttttattcctttattaatatatatgtgaggggtagagggtgtcacatttatggcttgtacttgtaccatatgccattctcggttttcttcttagaatcgcacatntattttccttttggtcttgtttctatttagttatatatggctcaagttgaagtccaatttgcaattgagaatagactttcatttttgttctgatctcacaatctgcatgcattgttaggatcccttgtattttattatccgcttaagtgtttagagtgaatcatcataaatttattctatttgtaagaaatggtttagttgattaagatcagaggatg

SEQ ID NO: 283773 - DNA, 385 bp, Glycine max
agcttcttatgcaaggaaactcttggcgttgaagctccttcttccttggcttattacctagtggatggtgcctcccttctccttttctcctttgccttccgctgcatctgcatggtgtataatcaccatagaaagaactgattgaagctcagagacccacactccatacaagctccacatacaagcttccatgatctaggaaacacttgatttgtggccaaatcctgagcttgaattaatcttgaagcaatgcttcgttgttgaaacaaccttgtattaatcttgaagcaatgcttaacatttgaatgtttgttgaagtaatcttggaaaaaccttgtttattattctttggcatcatcaaatcatgattatacattcacattct

SEQ ID NO: 283774 - DNA, 492 bp, Glycine max
  unsure (1)..(492): unsure at all n locations
ttgaccccctgnatttggagcactagtattcccggcctgccgatcacgcgctgtgtagcactggggatgctcttgagattcaacttctacctcacagtgatggaactcacattgtgcagaacctacgcaagccgttgaagtcctctggaagaatttacggacggagcttggttaactgactaaccttctgccttatcttgatcgtgaaaagtctgcctggaggctctggactctaactgaaattgatcatcgtggatggcctattgctcacttactctgttaatgaacgctgacgacgaaccgtaggtgcttgtggcaaatgtgcttttgctgcgatataggatgaaggacatataggttgcgtaggacaccacaatttggaatgacgcaaagctgttgctctttgaagactactcacgcacacttgcatattatctacctgtaatgcattgagtgtgaagatctagggtactgtgttgtagatttcctgcn

SEQ ID NO: 283775 - DNA, 395 bp, Glycine max
  unsure (1)..(395): unsure at all n locations
agctnttgctacattagcttctttgcaataaacgtgcattaaagtagtgaaggtagcaacagttggaatgatttgcatctcaagcatcaaatcaagaacccaaatagcattttcaatcttctttgaatttgcaagccctctaacaatagcgctcatagcaacattgtgggagctgataccaagtgttttcatttcatcttgcagtttcattgctccttttatgtttccaactctacacatgccattgattaaagtgatatattgtttatttgtaggaacagaaccactttccaacaagacttgcaaaacacgatgggccttatgaaaatcactagttctaatgagtccattaaaaaggcattgtatgtatctacattangaataaccataaactg

SEQ ID NO: 283776 - DNA, 371 bp, Glycine max
  unsure (1)..(371): unsure at all n locations
ntcacaaaatccagacaattcaattctatttgtcatgaaactaccttacacaatgaagaacagagtagaggcagaacctttgcacaagattcattcaaattccacagagtttttcctaacctcatacctccaaaaaatcctcttcgtttagattcgttaaccattggatcgccttgaaacttttactggaggttcctaatacagaaatctaaattttgaccgttgggatctgctagagaatgcctagaacacgagatgtactacctttcccgtgactagcactgcactaaccattttctgcataattggcaaaatttgctgcacaatttgacagcttttgctgcataatttggcagatttcgaattctagc

SEQ ID NO: 283777 - DNA, 405 bp, Glycine max
  unsure (1)..(405): unsure at all n locations
agcttgcttatgcaagtataagaatagcacctagtgttgaanacttcaatatgtcttccaaatcccacaaagtttccatgagtttatttcttcttttctattttgagtgtgaccaagtgagctcacaatggtaaggtangagcgttgcttgttttgatggaatgtatttggtaattaatgtggaataatagaagttaataatatgcatggtcatgttgccacttgcattgttgagttggcaagtttcatatgaggtccaccgctggtagaattgttgaaatttggccccaattaacactcgtggtgatacttataaattgttaccggttgaattgataggtggctcaccgttcatagattaatagaggcttctcacatgacttctgngatagccatcaagtgatg

SEQ ID NO: 283778 - DNA, 356 bp, Glycine max
  unsure (1)..(356): unsure at all n locations
gacactatagaaactaagcttnaattgtaaaccttctccgccgttacacatacaaagcttcaagagaggaagaaaattaactatctcccctctctagggtcaccattaatatggcccctcaagtgggtaaactcactcctcatacacacaaattcatcaacatcatcaccataaacacaatcgaattatgaacattaattngctataatgtcaaaggtcggataccctcatacctaaaaccaaagtgcgaattataactcaacatcatataatagaagcaatctcatcatagaagcaatctcatcatagaagcaatctcattatagaaacaagagtaaattacacatacctcccct

SEQ ID NO: 283779 - DNA, 312 bp, Glycine max
  unsure (1)..(312): unsure at all n locations
agcttcttggttggtaagaatagggagcctatcaacatcttacagtatgctgatgatactgttttttttggagaggctgtgtgggacaacattcatgctattaaggccatcttaagaggatttgaattagcttctggtttgaagattaattntgccaaaagccaatttggggttattggtgatggtgttaattgggccatggaagcagctaataacctgaactgtcngtagctggaatgtcctttcctttacttangcatacctattanggctaatccctctagccagctggtgtgggagcctatcatcact

SEQ ID NO: 283780 - DNA, 386 bp, Glycine max
  unsure (1)..(386): unsure at all n locations
ntatgaacttgganaggaacttgaactatactatagccttctcgtgctggtgtatcttgatattaggcagaggcaattctcagggaacatcaagctcactttcggataaggttcatcaagttgaatggaaatcttttagcaccctcatcttgttcttggacttaaacctcatgcagagggataagggtataccattataatgattgcatagttggtcatatagggttaattgaaagtatataatttctctatttttttcacgacagatttgtttaataattataaatggattcatagttccttcttgactntcagcttctacagtgcattcatatcaagtgataacattctcttttatgataataacatgactcctacttggaata

SEQ ID NO: 283781 - DNA, 407 bp, Glycine max
  unsure (1)..(407): unsure at all n locations
agcttcataccaaagcaactcataatctaggtatctaaaacccctcaatttagtggattntcaaggtttgagaagtgaaaatgagaatggtgtaaatttggagcanactctcacctcacacaagtctataacattaatctaaacttgctcaaactggttntacgcctaatattccactgaatcaaaatttgactcatcaacacccaatnttaccctagaaatggctcttgtttcactctggtcactcatattcctcatttgcacagtctaagctttctcttaagtcctaaaagacatttcaaactatgattaactcactttaacccccaattaccactgaatccagatttagccttccaactctcaaagccttactctttgttgcactcataacaccacattctcac

SEQ ID NO: 283782 - DNA, 373 bp, Glycine max
tctacttatgtggcaaggcgggctttcttcactttcttgtctccaacgcgagctctgaccactgttcttccttcccgcgatgcttcttttcatgtccgcctgagtgggcttatagcctaatccatacttcccacgatttccttgggttattatcaagctagttatgccgccattgtctttgcctaaacccattccgggttcataaccgttccccaacataactcggtccatcattaccggcgcatcggacagacaaggttgcccaaagagggagtccacgatgaaatgctgaccacctcataagactggacagcggtttctaacgattcttctgcggcttccacataaggcatggaggatgggcagcttacca

SEQ ID NO: 283783 - DNA, 371 bp, Glycine max
  unsure (1)..(371): unsure at all n locations
agcttcatgctgctcaattgctccaggttgctgcatggaagggcaaaggtctgtatggtggtcagcagaggagcacaaaccacaaacccttgcaacaggtacaaatttctgattcaaggccagctgggttaccaagttaaccaatgcatccagtttgccttcaagcttcttagtttcagatgatgcagatgggtttgtagctacctcatgcactcctctaatgactatggcatcatttctggcgctaaactgctaggagttggaagccatcttctctattaaatntctggcttcagcaggagtcatgtctccaagggctccatcactggtagaatctatcatacttctctccatattactgagtccttcat

SEQ ID NO: 283784 - DNA, 342 bp, Glycine max
  unsure (1)..(342): unsure at all n locations
tcttgaggaagccttntaatgaagcttcttgaggaagctacatgaagttgcctcggtaaaaacgcttcccagccttcattaaccgttggatcttctcgaaatttggtttacaacttcacaagacacttgtccatgatctgaccgttgggatcttcaagaagatgtctggagtgtgggctaagcttccgttcctggagcatttcttatttaagcatttcggccattgctttcgtgtatcttaagaanaacgtcatttcttctcctttctttcttccaaagtcatttctaacatcccaatcactgtctccatctcccacagccaccattagccaccacaaacca

SEQ ID NO: 283785 - DNA, 348 bp, Glycine max
  unsure (1)..(348): unsure at all n locations
agctttgatggtggaggatagacgaacagcgctaggcaatcaaatcatgggtctccgaataagattttatgtttgaggatagatgaatagtgctaggcaatcaattcatgggactccgaataagatttgagggtggacgataaacgaacaacgctaggcaaccaattcgtggtgctccatactcaatggtggaggacgcatgaacaaaactagggaataaattgatgggtctccgaataagatntgagggtggaggatagacgaacaactctaggcaatcaatccatggggttctagactcgatggtggagaacgcatgaacagcgctaggcaatcaagtcatgggtc

SEQ ID NO: 283786 - DNA, 371 bp, Glycine max
  unsure (1)..(371): unsure at all n locations
ntgtgtggagcttcaatggagaatgaagaagaagagaatggcaacgtgagggagagagagggctgtctgaaatttctgttttgctgagtgaggagagagaaaagctttctggtcttaaataaaaggttttcctctttttctattattttattctagctctgccacatgtccctatttgattggagaaaaaaataaagggcccactntctctttttgactgtgacccatactcagtcacaaaagtgagaaaaatntgacctttgaaacgctaaaatcctgcctcggtttgcgtgccgtttctctgattccagattctcgcgtttctctgcgtcccgccgggccagttttcgaaagcaagcaatatatatatc

SEQ ID NO: 283787 - DNA, 370 bp, Glycine max
  unsure (1)..(370): unsure at all n locations
agcttgggcgcatgcaattcaaagaggcataacaaatggattatcaagagtatcagaggtcatcacacttgtctcgtgccgatgcttagacaagatcatcgccaactcgacaaacacgtcatagcacagatcatccaaccaattgtcaaaacaaacccaactgtctccatcaagacattgattgcagagatcaaaacgttcatgaattataccctatcctacaagaagacatggttagcaaagcaaaaaacattggagatgattcatggaaactgggaagaatcatatgccaaactgccaaaacttttcggagctttgcaatcttgtgttcccgggactgtggtcgctgctcanacagaatccttgtatg

SEQ ID NO: 283788 - DNA, 418 bp, Glycine max
  unsure (1)..(418): unsure at all n locations
ctgaagaaaggttatgaaccttacgagcattcactcanattctctatgcacaaacatatccgtaaattcttgtaaagtttagaaaaaatctcacaacacattgattatcttgagagaataggctaagtgttgggattaatattgtatattcgtttgtaagacgctcatggagttagtcattgtgcaagcacaaacaacanatctttcttatttgtatagagtcaatagtgacttagtagaacaaagaatactaggttgattcaagcttgcagtatagcttgatttgtcagagcaacacatgttagagataatggcacgtggaactataaaccaagaaggatgaattgttccaaattgctttagaaccaaatgaaaattttagaagatagcttcattaatccaatgatttaagagtatt

SEQ ID NO: 283789 - DNA, 371 bp, Glycine max
agcttgaacattatctccttttgggttcgcaggttcttccatgcacggaatccagtgatcatctcgattacaatgcacccaagagaccatatatctaacgctggttcaatctgaccaacgatcgattctggcgacatgtaaaaaggtgtccctctaaacttgaccttcccatactcagcatttgcatcttctctagtcttggacaacccaaaatcagcaatcttcagttgataccttgcatgatcatcagatgaaggaaagagaaggatgttgtccggtttgagatcacaatggacgactccttttcgatgaatgcaagaaagccctttgagaagcatacgagtgtagactcttacttcactatccgatat

SEQ ID NO: 283790 - DNA, 417 bp, Glycine max
  unsure (1)..(417): unsure at all n locations
tcatcatcaatccaagaagaaagtgataaagatgattcacatganatagacgatgatgatgatcttagtctttntgtaaaaagattcaacgaatttttaagaaacaaaggaaatcaaagaaggtcaaatttcaaatcaaagaanagggcagaagattcgtcctctattccaaaatgttatgaatgcaatcaaccaggacatctgagggttgattgcccaattttcaagaaaatgatagaaagatctgaanagaaaacttctaatgataagaaagccaagaaggcctacattccttgggatgacaatgatatggactcatctgaagattagaanatgaagttgtgaactaagtctgatgcccaaggattatgaaagcaatgaanaggtaacatcttctgacaacacttatgtatttca

SEQ ID NO: 283791 - DNA, 425 bp, Glycine max
  unsure (1)..(425): unsure at all n locations
agcttgtcaaacactatttgtttctcgtgaagggacaacaaatggcaaaggagttagagctttagtagtaagaatatttgcttattagtctggagatggatcatggtacactaacatgcttttatttagtacctttctgcacataaaaagtgcccaattttgtatgctttgtcctggagtgacgaacaagattgtgcgagagactgtactaaggttgtcacagtagatctttggagtcntgaaaaactcagaagagattgaatccatatgatttcagcttcagtactcagcctcagtgctggactgngccactaaattctgtttcctgggccaccacaaaattaaattggggtcaagatatatacaagcacctaaagtggacatcttatcattcatctatatatgaagcctagttntcatcacag

SEQ ID NO: 283792 - DNA, 312 bp, Glycine max
  unsure (1)..(312): unsure at all n locations
tgtctcctatgcagtgacactatcctcagaatntataaaaatgttgtgacagatcctaatgcaaaggaacttgcgaaccccaccactccaaacacaatctccacaccattgctgataactcatactacaagaaaatatgatttgtagattctccacaccattgctgaaaactcacactacatagagtttccgaggctggaataacattcctacgagccanattctatttagagggaatgtgatcctaaagcgctntccatgcaaagccttgaatctttaaagcatcttcttcacctttcaatcctccccaca

SEQ ID NO: 283793 - DNA, 416 bp, Glycine max
  unsure (1)..(416): unsure at all n locations
agctttgtggctgaggacctatataacagcaccagggttttagtttttagagtttttggagaggagaataattntagggttttgcaattccagtttttattactgttcatgcacactgttcacgtagaataaaattcgttttctgcaattgcgtttctgcttcaatctacaatttcattttctactgattaatggaaggctaagtctccagcatttttttctcttaaggatcaagcacagctctctttgaggttttgttattactattgaattttgatcagtttctccttttcaccaattactctgtatttgttgctattaatccatgcatgcttagtgcttgattaattgtctctgcgcttaatttatgttcatgcttaatgatcagtttcgttcatgattaattggtgtatgtg

SEQ ID NO: 283794 - DNA, 456 bp, Glycine max
  unsure (1)..(456): unsure at all n locations
ngcaattaacatgaatggccttcctaatattacaggaatgtcagtatcttcacaaatatccattaccacatagtctatcgggaagataaaatgtttcactctaaccagcacatcttcaattactccatatggtctggtaatggagcggtcagcaagttgtaaagtcatcttagtgggcatgatctccaactctcccaaccttntgcacatggagagtggcattaaattaatactggctcccaggtcaataagagcctttcacacagtgacttctccaattgaacaaggaatagttacactcccagggtcttgatgcttgngtggaaggatcttttgaatcacaacactacaatttccttccactatgatattttcctggtgaatatacttatgtttccttgttaacatatccttcaagaacttggagtagagtggcatctgctgtaaagcttctcc

SEQ ID NO: 283795 - DNA, 379 bp, Glycine max
agcttcatgatgaatcaagattgattcaaagagttttgatgataacaaagatgatgacaaaaagctcaaaagtcaataacacttcatgataacaaagataatgatctcaagaatcaaagaatgagttcaagattgaatcaagtacacttcaaggatcaagaggaaagttgaattcaagaatcaagaattaagatcaagattcaagactcaagattcaagaatcaagagaagacttaatcaagatgagtattaaaaagttgtttcaaaaactgagtagcacatggaattttctcaaaaccttttaccaaagagtttttactctctggtaatcgattaccagattattgtaatcgattaccagtagcaaaatgtattaaaa

SEQ ID NO: 283796 - DNA, 435 bp, Glycine max
  unsure (1)..(435): unsure at all n locations
ntagagagctgcgcttcttcattgccttcaaatttctgtctgtatctgattcatcaccaggttttccaggagagaagactttgagaagcccttgaaccaggcttggtgcaaagtccttgtacctttgatgaagcaaagaacagatctttccaaaaagaagcaaatgatttaaggtaacatcatataaaatatagaaacagcttcaaatgtgtagaaaccagggggactgcaaagcccatacctgaactgcagcttgtatatcagaacttctaagcttggcatcacatatagcagccacagcttcactgacaaatntgcttaagttgacacttcgcaactcgtccatcagagcttcacgctgctcttcattaatctgcttcagtttcttaataacagcagtggtgcgcttaatgctagaatccaatgtcccttaaa

SEQ ID NO: 283797 - DNA, 313 bp, Glycine max
  unsure (1)..(313): unsure at all n locations
agctttntattgtcagtagatgaagatgaatctgtggccacctcatggactcctctaaggacaatagcatcatttcttgcactgaattgttgggagttggaagtcatcttctcaatcaaattcctagcctcagcaggggtcatatcaccaagagctccaccactggcagcatcaatcatactcctctctatgttgctaagtccctcatagaaatattgaagaaagagttgctcagaaatctggtggtgaggacagcttgcacacaatttcttgaatgtttcccagtacttatacaagctttctctaataagtt

SEQ ID NO: 283798 - DNA, 200 bp, Glycine max
  unsure (1)..(200): unsure at all n locations
gttcgtacagcttacggtataatctgggacctgcccatggtagaagtctccgcagaggccagtgcctccctcgcccagtgttatgatcagccgatgaggtgcttcatctttgnggacttgcagctatcaccagtggtggaagaanttgacgagatcctaggatgtcctctanggggaatgaaaccatacctcttctcagg

SEQ ID NO: 283799 - DNA, 382 bp, Glycine max
  unsure (1)..(382): unsure at all n locations
agctnttttctcttgctctgttacgtctctcttaacaaaaactctgagaactctctatntttcgccaacttcagtcttttaagggaattttntatcctaaaggcttgcttagcgccattttctcgctaagcacgagttagtggattttcgcttagcgagctagatgcgctgagcgtgagaagagacaaatgactcgctgagcaagctgatggcgcactgtgcgcatgcatgaatggaagattctcttctagattcttgcaactcgctaagcgaactgagtgcctcgcttagcanatggtactcgctaaacgcatatgcctcgcttacaagacaccaactgcttcaaccttctcttcttctcatgctttggcctatactgagt

SEQ ID NO: 283800 - DNA, 416 bp, Glycine max
  unsure (1)..(416): unsure at all n locations
tcggtaccaactaanataacaaatatcatactagaagtggtgttgaatagtgtattagataaaaatgaaattnttttcgcaagttgtttttctcanaacatatatgcaaaaaccaagttactgatagtatctccaatgattaaaaccagttttgatgggaaaaaaaacatttatgtccagtgaatgataaaacaaattttttaaaaaggtttttcaaaacaacacttatgtgaaaaagtgtgtcatgataagtttaagaaagtactaatcaaatagctaaagagataagtggaaacgattagtttatactggttcgcttaaacatagctacgtctagttctccttgacanaccagtgaagagtccactaatcgaagcttggttacaaacaagaatttgactgctgtcttgctacaa

SEQ ID NO: 283801 - DNA, 279 bp, Glycine max
  unsure (1)..(279): unsure at all n locations
agcttcggttgttcaatttcgagcgtctcgatatattatgtgcctgaatcggacatccaagtgaaaagttatgatcatttgaatatctcaagagcttccattgttgaatttcgaacgtctcgatatattatgcgcctgaatcggacatccgagtgaaaagttatgaccatttgaattgctgaagatctttcattgttcaatttcgaacgtctcgaaatattatgcgcctgaatcggacatccgaagttaaagtatgaccatntgaattgtcgacagctt

SEQ ID NO: 283802 - DNA, 400 bp, Glycine max
  unsure (1)..(400): unsure at all n locations
ntcgagaaattcanatggtcataacttttcacacggaggtctgattcaggcacataatatattgagacgctcgaaattgaacaacggaagctctcgagaaattcgaaaggtcataacttttaactcggatgtctgattcaagcgcataatatatcgacacgttcgaaattgaacaatggaagctcttgagaaattcaaatggtcataacttttcactcggaggtcccattcaggtgcatcatatatcgagatgctcgaaaatgaacaatggatgctgtcgagaaattcaaatgatcataanctttcacttcgaggtccgattcaggctcatcatatatcgagacgctcgaaattgaacaccgaagggtgtcgagaaattcaaaaggtcataacttttaac

SEQ ID NO: 283803 - DNA, 333 bp, Glycine max
  unsure (1)..(333): unsure at all n locations
agcttgacagtattacaaatctcaatatacgttgccaagtgtgagtatggatcttcatttggtaaaccatcaaacaaactgctctgtattagctgtatcaatgaaggtgggtaagttaagttttgtgcctgaacctatggccgcacaacacttgagatatattgcggcaccgaagtacttgagtaatcttccaaggtcactcattgaggttgctcttcagccatgacttcgacttcaaattcttctgtttgagattccctggatgtangtgaattagaagatgatgactcagaaaagtgatcctcttcaaggattgatngctattgtctgtcg

SEQ ID NO: 283804 - DNA, 414 bp, Glycine max
  unsure (1)..(414): unsure at all n locations
tacacaaatattcattaatccaacacacactcaacanataatcatcatttgtccatagttcctatcaatcatgctcagtatgatgcatgcacctgacctcaactctcanatggaaatgtggtaccatccctaaggaaatagcctaagggtgcccacacgacactctcacttatgaaaactaggcagtaagtgttgaggtcaccctgtcatgcacagtcaactcccccctcccnccacagtgatcagtctgagtctcaagggagttccaaaccgagtgacatgcccccaagtacaagtatttntcctcatgaaaaactacgagtacttactaacaaagtttgtactatnttcatgcaatatgaagtatgaaacatnggcaccatcaatgcactgaccgtggataattaaatattc

SEQ ID NO: 283805 - DNA, 333 bp, Glycine max
  unsure (1)..(333): unsure at all n locations
agcttgaggactataccttcgatcaaacacggtagtgtttctgtctcggcccggatttaaagcaggttgcagcaccagctccgctttcctaaccgtactggaggcggttgccgtggctttgtcctctatggttttttggagttttaacatgacctccgagatggaagccatttgatcttttaaggccgatagatcggccttcatctgttcctgcacgccctcttcattatccatttttctggatcgagntgtataggggtgccttggtgtnttcttagttatgatgaatatcctcaagaaatacaaaaggtgagtgtcataccctaatttcgt

SEQ ID NO: 283806 - DNA, 382 bp, Glycine max
  unsure (1)..(382): unsure at all n locations
ngaagtcagatagcccttaccactccttatgtatagtctgtcgccaatcatctagctgtgtgaataacctcggcattcgacagattttgctggaaaatatatgtgttcctcctccaccaagtaagtgattccaaggtgactcatatacgacatgctcgcaagatagattggccttcaaccaactctttcaatcaccacaagaataaaaatcactaccatgattgattcaaatgaagaattgtcaaattaattgcacatatacacaatatctaaacatatgaaaatgagattcctcatgatcttcacagatactacacatactgcttctagagaaacctatcctcctcctcttcgcattcatcaaccttgattcatggaaatc

SEQ ID NO: 283807 - DNA, 341 bp, Glycine max
agcttctagtctcaattttgagcgtctcgatatattacccgattcaatcggacatccgagtaaaaagttattgtcttttgaatttcctacaagcttccgttttcaatttgcaacgtctcgaatatattacaggactcaacttgacatccgtgtataaagttattgtcaattcaattttctcagaacttcggatctaaattttgagcgtttcgatatattacaggactcaatcggacatccgagtgaaaagttattgacacttgaatttgatacgagcttccagtttcaatttggagcatctctcgataaattacgacactctgtcaggcatccgagtaaaa

SEQ ID NO: 283808 - DNA, 439 bp, Glycine max
  unsure (1)..(439): unsure at all n locations
tctagccaaatggacttaccttgaattaattcctttgatattccttttgagccttgtttccctttccttgttttgaagctcactacaagccttaagtgaaaaaccatgatattaccatatccttaaggaattttggagctttggaattgttttgggaataagtgtgaggggtttttgtttcattggacaacttgttttgttggctatgcttcatgatgtantttgggccatacttgatgtacattgtatattggttaaatgttggacatgctgaatgaaatgttgtttctcanaggctaaagagtctaanaaaaaaaaagagaaaaagaaaaagcataaagttgagtgaataagatcttaaatggcacaagaatgatgaaactctggggntctactctcatgttaaattnntaatcttactttcttttaatttttttta

SEQ ID NO: 283809 - DNA, 322 bp, Glycine max
  unsure (1)..(322): unsure at all n locations
agctntgatttcctttgttccggaaacctttcttttctcatgtgcacccaaacccaatctccgggttcgaagacaaccttctttctccctttgttggcttgtttagcatagcttttatttttcctctcaattttatctttgactctctcatgaagcgtcttcacatagtccgcctttgcttgaccttctttatgcttaaaaatagaaacattaggcataggcaaaagatcaagaggagttagtgggttataaccataaacaacttcanaaggagaacaattagtggtgctatgaacagctctattgtaagccaattcaacat

SEQ ID NO: 283810 - DNA, 337 bp, Glycine max
  unsure (1)..(337): unsure at all n locations
tgcttgtggagcttctatggaggctggatctttgagcttcaatgaggtccttcaatggtgatttttcaccatggagatgcagcggaaggcaaaggagacgaggagaggggaggcaccatccactanggaataagccaaggaagaaagagcttcaccaccaagaattgccttggataagaagcttgaagaggatgctctaatggaggataagaaagagagaangtgggagcacgaaattgaaggaataaaagagggagagaagtggaactttgaagtgtatctcataagactttcattcatcanagttacaacaagtgttacacatgcttctatttat

SEQ ID NO: 283811 - DNA, 358 bp, Glycine max
  unsure (1)..(358): unsure at all n locations
agcttgttcacaaaaaatagggttntgaaagtttatcatttcagtttcttaccaagtaaaatggatcatttttaaggtccaacgacttaaaatgatcacctttcaagtaaaaagaatcacttgattcacgcataagatagaactacataggtctgatttcctctttgatggagggtacgtaagagcaaaagccccgcttttgtcgacctcaaaaaataaaaagaaataaagttaaggtaacacaatttccacaattctaaaaaataggctgttgtccttcaagacaaacgtaagaggtgctaataccttcctcaaccgtatatacaactcgcgaacttagaaatttcatttttgatcg

SEQ ID NO: 283812 - DNA, 415 bp, Glycine max
  unsure (1)..(415): unsure at all n locations
tctctgaaaggcatggttatttccagtttcctgganatatctaagaatcttgccaaatggcggtccttctccttcttggaaggtaccataggatatggtactttcgaaccttcattcacagctgtttctcttttattctctctagcttgttcacttctactcctctcttcattcttatttttttcatctttttcaattgtttcattttctttttctttatctaattctttctattnttcttggtcatttaattcttttttcttgaccattatttgntgtatcttttcctaatttctttcacttctcatatcatctttcttttcatcagtaccctttcttttcaatagactttcttcttggatctaacactattctcatcctcttgctccacaaacctcttactncttgtcatcac

SEQ ID NO: 283813 - DNA, 406 bp, Glycine max
  unsure (1)..(406): unsure at all n locations
gatgtgcactatattgcactcagctcgcccgggtctttaatcactgaagttcagctttcacttcggcaaaaccttcacttaacccttcacaaagacatcttttccccaggaatcacttaaactcgctcctgtgacttgctctccaccgtttaatctaccgaaagcatttgggaagaccctccatgagagcctccgagtcgccccattttatgcgattggactgtggctcttgattgcacaattacgtggaccttaaagattataatctcttcctcgtgtcaccccacgcacttgccttatggggaccccggcatcatcaaatgtgtgcctcaacttagtcaaactatcatgtggtgctacatcaggaacaacaatttaaccattcctgcatttgagatcacgtaan

SEQ ID NO: 283814 - DNA, 81 bp, Glycine max
ttggcccctgccggtcttagcaccgagctgagcttgaatgattatcaacgtagcgttgatttttacaactccccattttag

SEQ ID NO: 283815 - DNA, 341 bp, Glycine max
gagaaatgcccaagagaaacgtccgattgatttttttgttttattttactaaaagatatttttttattattatattattattttacctcttttttggtttccaacgtggttacggcatgaccgaaccgtcggatttcattttaacagaaattaacggatattacaattcaaatgatcggtggaaatttattttattttttgattaggcgagaaaatgacttaagtaaatgactaaagcacgtcaaaaggggatacggaaagtaaatgaaatgaaaatacaagtacgtgagacaagcggggaccaccaaggtacatagaatgaattgaaaaagctcgatttc

SEQ ID NO: 283816 - DNA, 272 bp, Glycine max
accctctttaatctgtatcatgagatcaaaatcgcatttttacaaatatatacttaatgtctttgctgataaggggctgttcataacccaacttctctcgaacactgatctcctttattttaacgcccgccacaaacatgaaaaactgttatgaaactaaccatcatttccagaaaaaactatatctattcatttagttatacacacaaggttaagaactggtctaaggggaggttactgaaaaaacgtaaattttctttccctactaatga

SEQ ID NO: 283817 - DNA, 307 bp, Glycine max
agatgaaccactggttgattatatagcatatgatgaaggacattatagtcctttcatgtaagttgctgggtgtcctaaacaatttccaaaaattgatgtatataaactaggaggtccaataaagatttcattttttaaattgtaataaattttaaaaaatttcacattgatcaaaacctctgttgcttttttttttaccagttggcacgaagttcattcgaaagcggtgactaatttctcgttaatgattcgtgaatatatgatggttagattaaaaaatatttatctaaccgtaataataaaattg

SEQ ID NO: 283818 - DNA, 463 bp, Glycine max
  unsure (1)..(463): unsure at all n locations
anaacgagaagtaatgcgaagactaatgggcccgactatctatatcctatctcggaagtggaactactagcccaccgcctacgaaggatgtggaggcctaactggcaactaacacatcgtgactgggtgactgacaccaagacaaacacatatggcagaacaaaacacccccgtcatggaccacctggctaatgaccaccgagactgaccaaaaagtcaaacccactcgcactcgaagtgagaacgcacccaccactgcagataaagccaaatcgacaaaggcacatatggaccaaaacacgctcgtcgaaccgcaaaggaagcaatcccagctccacgcaacaaaagagggtcgggacacaacatgaaacggggaacctgactagttacaccaccagaaaaaaaataaatggaaaccggaacaccgaacctcgagcggccaacaacccaaagggaaaaaacg

SEQ ID NO: 283819 - DNA, 318 bp, Glycine max
  unsure (1)..(318): unsure at all n locations
cacaaacaacacataagccgtaaaccagtttcatgacaatttaaaaacaacaaaaatatacttaaaaaaaataaaaaagccaaaagaaaggtggcagatgttcaatcaatggcgttaaatgatcccccctgctgatttcaacaaacagcagtcaagtcaactctgataagaaaagtggaacagagatttaagagaaagagaccatactaccaccaaataaaaaattggaactttttttttcatgtaacatctcttcatatatttttctaattggtatactttantttactgtgcaattttttttttatcaaaatccct

SEQ ID NO: 283820 - DNA, 587 bp, Glycine max
  unsure (1)..(587): unsure at all n locations
cgcacacacacaaagtcacgtcgtccagccaccccacacccgcgacaccaaacgcaaaatagaacntacaanagtannnntntnnntntggagcacataaggaacncagccngncccgngaactctaaagcgacatgcagcagccagctaaacagacagcgtgtggaaggaacaaggccagtattatggtgtaaccaacacaagccgcacaaccaagggagaaaggagacacccccactcattaccgaggcaaacccaatagcagatcaaccagatccggtacaagcgacagagctaaagaagcacggcaaaagccaacgaaaaaggagccaacggaaacccccaaaacaaatgcacaggcgaacggggccgcactaatcaatacacgatcatagaacagcaagataaaccaaaggaccggacgaacatcggcgaaagcacccccaaactaacaaagaaccaacacaaacaaaacccacccacgaaccaaaggcggatagagagaaacaaaacatctaccgaaggagagaaagaacaacatcgagcccacaggcaatcaggggaagaaacaggccaacacaaaaacc

SEQ ID NO: 283821 - DNA, 427 bp, Glycine max
ctgtagaatctagaattgtctatttgctatgcagatcgatagtattgcatttattagtgggaatttgattcttttgaccataaaaatcttccacagtaagtaaaatatgcacggatcatgtgcaagatcattttcaatacaaataggaaattggagaggtggaattggtctatatagctatagcattcaatccagtgatcaaagtcactttcaaaatgtatgtcagattctaattctaaagtttctgatttacagttggaatgccacctatgaaagtctaatggggaccaacagccctttcacctgccaattcctcttggagtaagtcctgcattcattggattgtcacctctcatatacacaaggttcgcatctatatctctctttaattattgtcataaagccccactcatttaattgctatcaa

SEQ ID NO: 283822 - DNA, 262 bp, Glycine max
  unsure (1)..(262): unsure at all n locations
ataaaatatacgctctatttttttttacgctcgagagatagtgagtgtgactacanacctagaatacaggactcttcttgagctgcatgtgcccattgatatgtgacttttctaatggccctactcatctcttatctgattctttttttcactctatagctgatttttctgacctattcgtttttacagcaactcagctctcaaatttaacttaccacaggggttatattggtggttaatgactatatattcatctttttgc

SEQ ID NO: 283823 - DNA, 331 bp, Glycine max
  unsure (1)..(331): unsure at all n locations
acttggaccccatttctaccaactacaaaccctaagaaaactatattatctacacaaaaggtacacttctctatatttgcatagagggtgtttttcctaactactgaaagaactagcttgagatgtcctaaatgatcatctaagctcctactgtatactaaaatatcatcaaaataaacaactaccaatctacctatgaaatcccttaagacattatgcataagcctcataaaagtgcttggtgcattagtgagcccanaaagcatcactagccattcatacaaaccaaacttggtcttgaaagcggatntccactcatcaccctttttca

SEQ ID NO: 283824 - DNA, 223 bp, Glycine max
gcaccactgccggatcttacctggctcactgtacgttgcaacgacactttttttgccatcaaaatagctaccgcaactaatccgtaaatccatgttcgaaaagcaagagggacacttcccaagacctggagtcgtgtctcttacgataactcccttgacagcaggtgcaaccctccccaaatttggttcgttgacttatactaggcctataaatgtgaacttt

SEQ ID NO: 283825 - DNA, 491 bp, Glycine max
  unsure (1)..(491): unsure at all n locations
gccacctgaacctnatgagacctgcatacggccatgataccacttgtctaattacattgtgttgtatttatggaggaggttgtatgtcattcttgttttaataatatagtcccactggtaaaactaactttccaaatgtttgccttcacatgaaatggccccgatgaagcttgccttaaagatgtccaagaaagacaacgcagccgaaagaactacttccgctccggagtatgatagtcaccgctttagagtgctgtaccccagcaccgcttcaaggccatcaatggatggacgattctacgggagcgactcgttcagcttatggaccacgaatatactgatttccaggatgatataaggcgccagctgtgggcatcacttgatactcccatggccaagtttgatccaataaatatcccttgagttctataccaatgctttggccaccagaggaccggcgtgcgtgacatgagactcttggatacgggccg

SEQ ID NO: 283826 - DNA, 491 bp, Glycine max
  unsure (1)..(491): unsure at all n locations
atgcacactatcatgtagngcgaccttcagctcgtactccgggatcctctnagtcacctgcggctgcagcttgtgcacaagaaaatgggacaccattctttattctcttctctaaccaagcccatacataatggcttatgggaactcccttcaccgaatggatgactgagaatttggacttccttgagaaaagcttgctccatgaaatccaactgcgacaaccaagcctcaaagaaatgctagttataccgtataganggtgaagacttatttcaagacgcctttcaacacccttattgaattcctatctaaaacgatctgaatatgtgtatcagatatgctataggatatgtgaatgactcacggtggcgtcctaacacccaatgctcaggtggaactattgccgatatagaaaaattgtcaaatggaaaagtgtgagaatgcctatttcgcacgcttcacttgcctccgaaattctctcatattccccg

SEQ ID NO: 283827 - DNA, 481 bp, Glycine max
  unsure (1)..(481): unsure at all n locations
caaacttgtccaagaagaagctctgatacttatttttatatctataggctcagatatcttaacaaagggcggcgtggattaagatactcgaacttctcccctaataaaacaacaatcaaaattcgacccaactaatgaaattcctttaactgccaacgtatcgcaaatcatatattcanattggaaacaactctgtatattgcaaactacagccactcattcaactacacgagaattaaagtgaacaaatacaggacacaccgctatcattctggatcggagcacaccttgtgcctacgtccagtcccctagccactccgcttggaaagtaccacaaccatggaactgctttctcacaggtgtaaacacccaaacgacaacccattctttctgtgtttccaatatgcattaacacgagatgactcacactctactatctgcttcaagagaatgagaacataataacagacataactctccg

SEQ ID NO: 283828 - DNA, 522 bp, Glycine max
  unsure (1)..(522): unsure at all n locations
cttgtgcacactatgtaggcgacttcagctcgtacccgngatcctctgagtcacctgcggcatgcaagctatcatganaagatcatctacccctatgattgttgttatcgctctaacncatttcgaaatgattagtgataaaaagttgccaacttngctcctgtctaatagatccctttacattgggaattggaggtcctcatgggcaagggtcaaagactaataagatgaagcaagcattgcatagcctaattctaaagatcaaagaaataagaagacccaatgtgaacctaacggttgcaacccanttgggtcactttcctactaatcgatgaagatgctttgatgccaacttgaagaatcacttctggaagcccatttataaaaaacaaccttcatgggttagtcgacaattttggtgactactaaattgggtgatcaatataactagtcaattcctgcacctatttgaatttctacattcttttgctgaattctgggaattgattttctaccacccat

SEQ ID NO: 283829 - DNA, 412 bp, Glycine max
  unsure (1)..(412): unsure at all n locations
gcctggtgtagaacttgagttaaagagctattattggtagngtattatactnctaacttatagaagttagtgaaacttagtggtttgtcaataactgaacatagtctcggtggttgagacgaactagtataaatttcttgtgtcctattttctccttttttatttaaactgacttacagttagaatttgacctttactttagaaaaattatgtttggtttacaaagatctgaacctatcgtctgatctatcccacaaaaatctgatatttgtttcttaagttctacttcatcaaatgatgtttttgttgtatttcaagaagattttaagtttagtaaaaatcacaattcacctcattcttgtgatatatatatatatatatatatatatatatatatatatatatctctata

SEQ ID NO: 283830 - DNA, 134 bp, Glycine max
  unsure (1)..(134): unsure at all n locations
cactcactcgtaccggatcttaagtcactgcggctgcagcttcatcacattgatgaacgtgattgtatgcttgtcagtgngagacaacgtaaatttctgcgcttctctatctctgactggcatacgtctgctga

SEQ ID NO: 283831 - DNA, 335 bp, Glycine max
  unsure (1)..(335): unsure at all n locations
ccatgctagcataagtgagacaaaagctggtgcaaatcataactctgatatctcatgggtcgaatggatgaatgcatgaaggaatgcatataacacagatgcaatctaggaatgcaggagtccagcgaattcgtccccttcttagacacaacgtctaagggtagcaaagtgccgcacgtacgttntaagaaagcacaccgaccctccgttggtttgttacacaatggatcaagacagaacccatatgcgatgcctatgcaaaagacacaatgcgagaatgtacacaatatgacaatattcacttgacatacacaaaaaggtatatgatacttatg

SEQ ID NO: 283832 - DNA, 379 bp, Glycine max
  unsure (1)..(379): unsure at all n locations
atttatattgccttattgcaaaatanattatcataaatatcatattgggccctaaaaaaagctatagcccttaactaagtntgattcgcctcttattaagggtaaagnctatctattnttatnccttttgtctcatgtatgaataacaatgattttatattatatttacataaagttggtttctcattggccataacccgataactattaatgccaaatatactttttgaactttatatgaataagtaataactataattaactaacttcaaagatgtatcaattgggactagtgccatgaatcaagaatcctttaactggttgcaggtgaggctttaaccaaccaaatgcggaggctaacaacaatgagtgaatgttg

SEQ ID NO: 283833 - DNA, 444 bp, Glycine max
  unsure (1)..(444): unsure at all n locations
atgctattcgcactcagctcgaccngatctttagtcactggggagcaccttacctattcgccttaccagcttagaattgggaatccattccattcctggtgtccggactctcagcccttatgatagccgcgatgatccattacttgtttccctaagctctctggnctttcttaacgcccgaatccatgccttgcgaactctttgaataccttcgcgtgggcactaaacccgtgcataaaggcgtgagctttcgttaatggcgctctctatggggtaccaactgtctatggcaggatgggatatattatacaccctttgtccatcanggacatttgacatcctccatgagatagatttgatcttcttctctacgaggaccattacaaccccccatgcaccagagtggtcaatcgcttcttttcaccacacagacctgtacgtaac

SEQ ID NO: 283834 - DNA, 359 bp, Glycine max
  unsure (1)..(359): unsure at all n locations
acttctgcttattgtgaccacattggtacctggagatatgtcgcggtggtcaggagaccttggggacgttaggtggggtgctattgcccaaaaccaagcttgaccaatcccgacccaacccgggcatagtcggtcagtgagaacctgtgatgtacctaagcagacgagctcctggcagtcnacagataaaaggaacaaagaccacaaagcaaggaggcttgtggtggctggccagctgtgaaacttgattgatatgtgagatatggtctctggtaatcgattaccaagggtgggtaatcgattacaaggcttaanaatgaagacaggagactaagatggtctcttgtaatcgattacca

SEQ ID NO: 283835 - DNA, 207 bp, Glycine max
tggtcgtcattgtcaatgcggaaggattctgcgcttcactatccatgttcacacattattgcagcttgtggttacgtgaacatgaactactaccaatatatagatgttgttatacaacgacacatttaaaacttactcgcaaatgggggctcttggaatgaagtgctatttcttcttctgatgacgcatggacacttattcctgacc

SEQ ID NO: 283836 - DNA, 389 bp, Glycine max
  unsure (1)..(389): unsure at all n locations
tagttgatcaagaccgaatgaaatatgtgggccatcatcgatgagttctataaanagctagacctagtagcaactcatgagcaaaagctagaggacaagtacaccaaggtctcagtcttgcaagcaaaaagggaagcaagggaaagggtgatcgattcattgcacagagaagcaatgatgtggatggacagattcgcatttactttgaatgggagtcaagatcttccctgactgctagccaaggccaaagcattggtagatgtgtactcggcccccgaggaaatccacgggctcctcaattattgcgaacacatgatttgattaatggcctacataattangagtcactaaggcaattgtattgtgctttgactttggctagatacacc

SEQ ID NO: 283837 - DNA, 442 bp, Glycine max
  unsure (1)..(442): unsure at all n locations
tgtccattttgcactcactcgtaccggatcttagcactgagctcagcctttcaggatctgggagaaccctcttcttgttatccctaggaagggccccctctccctctccttgccttcctgctctcatgtgaaacacattgaggactcttgagctcaagatcaccctcatagaactctacaaccagcttccttaagtggtatcagaacacaagagcctcagtaagtgctccttaaacctncaattattttttgctttaccctctcttccattggtgttcttcattttttctcatgatctcctacatgtcttgtctaaatgttgttacatgattcttagagtgtcaccgataacctgctataaactagatngaattttattggtcaaattcttgtcttgtcttcaacatgatntggttaggtaagttccttaggatttgctggg

SEQ ID NO: 283838 - DNA, 432 bp, Glycine max
  unsure (1)..(432): unsure at all n locations
catatgtgataattgactattntgacacacaaagaactcctaaagtgtccagatgcaatctaatcgattaccacatgtggtaatcgattatctcaaaccacaaagtcttccttctgctaaaactagcttatgtaatttattactaaaactgggaatcgaataatccgatgattcttgccacatttcaagttgaagtgagttatgttgcttgttctaacactttgtaattgattactaaactttgtaattcgatacattgtgttgaactcattgcttctaagaaactttgagaccaattcattaatctaccttggttgctttctactaagcatgaatataagagaactaattacccatcatgcctagtctanaaacatccaatataaatgccacatcttttaaatcttttttggcattgtaaaatgattaaaa

SEQ ID NO: 283839 - DNA, 357 bp, Glycine max
  unsure (1)..(357): unsure at all n locations
ttccattgcaccactcgccggatcttacactgagctcagctttcatagtgctggggccaaggctttttttgcatggcctatccggagaattctcagacacatctaggctccctgaatgacagacaggtatccattttgcctctccaatagaaacttaaaattatttttgacttagggttcttgggacaacatccgactcttaaatccttaagacttactgcagacttaactggcccaatgatagctatctgaaactttgacacctctcngatttgatgacaacttctaatgaatagtgcacattcctaagtcctcacagtgagtgactgtctatatgaatatagtgatgctaataaa

SEQ ID NO: 283840 - DNA, 417 bp, Glycine max
cgcttgaacccttcttagacgcatcgtataacactcagctttacagctgaatcattccccatttgacaccaggtgtgagccagttctagggtcctaaaagacagcctcacatgatcaaaatgaaagatgacttatcccacaaagtccaaacaactggcgatctgcttgattatagaaactgacttagtaccaaaaaaatattttccctggctttcttgatcaaatgcttgacgctggcagaagctcattctattttcgaggctttatgtattacaattctatgctttgaggacagaaaaaacatgtcactgcctttgcactttgctattgaagaagccttggctatcatgcccttgaccttcgcggtatgctacatttcatgattttaagactgctaatggttatggtgattctgtg

SEQ ID NO: 283841 - DNA, 410 bp, Glycine max
  unsure (1)..(410): unsure at all n locations
ctatccatatgcactcactcgaccgggatcttaagcacctgcggctgcagcttggcaatcaacacataacttagcgattttattntccgtatatatcaaactcgaattagaacagagctgtagaaaatcaatgacgatacttttcacgatgtccatggatccgtatatatgcgtgctcgtattgaaacaaatctttgacaatttaacaacatactatgactgatgtgtgatgggccgatatcctcaagctcaattcaaacaaagcttttcaaattcacgacatactttttcggtggtcatggtccttatatttagagcctcaatgaactaaccttacaattcacgacaaacttttatcgttgtccatggccccacattcgatcgctcgattaaaccgaccttgtacaaat

SEQ ID NO: 283842 - DNA, 404 bp, Glycine max
  unsure (1)..(404): unsure at all n locations
tgcattcggaatagcgaaagccccactccatcattaggattattacctgacatctcaaacaaacaaatcaaacgtaactagacaattatagttgctgtttgaatacctcacccactcaagtgtatcacacaattatggcttttctctaatgaaacactcttgccttttaccactctaattccccttgagttcttaggcaattcaagagattatggccacaacaaagaacaattcaccaatatgtgtaaggtaaggctagacaaggaaaaggttaaccaagaaaaaggctaacaattgttttaggcacaaatgaaggaaataaaattcagaatttatgaattcaagtaacaatccttcatgcaaccaatatattaccttaaagagtntttttttttaagttcttc

SEQ ID NO: 283843 - DNA, 120 bp, Glycine max
  unsure (1)..(120): unsure at all n locations
agcactcagccgaccgggatccttaagcaccgcggctgcagcttgtcggtacgacgtcatgtgaaagagtgatttattttgacatgccattgnncaaaatcacctctggccgagacacat

SEQ ID NO: 283844 - DNA, 485 bp, Glycine max
  unsure (1)..(485): unsure at all n locations
cgcccgcgtgacccccgattgatgcctttgcanaccncgaccttaganactcagcctgcgatctagcaaatattagatcagtggtnaaatgatagtatatttccagcacttatggtcggaattggtggtctttttaattagaacacattttatgcatattttgccatgccatttaacttttaactggagaatatagaaaatgcagtttccggcagaccataaaatttctatanaagtaacatgcatctaataatntctagcacaatatgaaagagtcaccacttaaaacccaaaccgagggtcaagaatactaaaatacagcatttaccttcattcaatagacagatgaaagtgcagatccattagagagagcattggagaaaatattctttttttaaaaaaaaaaaatttagactacacaacttaaagaaatagggcagctaagatacctcagacatgaagcttgctcagtttaatgaactccg

SEQ ID NO: 283845 - DNA, 452 bp, Glycine max
  unsure (1)..(452): unsure at all n locations
cttgagggtggatgatagacgaacagcgctaggcattttatcatgtgtctnncgaatagatttanggtntgaggatagatgaatattgctanngcatcattcatgtgactccgataagatttgaggtgacgataacgaacaacgctaggcaaccaattcgtggggcttcattactcatgggtgaggacgcattgaccaaactatgggaataaattgatgggtctccgactaagatttgagggttgangatagacgaacaactttatgccatcaattcatngtgttctagactccatggtggagacgcatgtacagcgcttagcaatcaattcttgggtcttccgaatatgattcgacggtggaggatataccaacaccgctaagcattcattctgtgggctccaacctgatggtggagattcttgaactgccttngcatcatttctgggtcg

SEQ ID NO: 283846 - DNA, 470 bp, Glycine max
  unsure (1)..(470): unsure at all n locations
gtagacccccttggtttgatcacgctagctantaccngacacttagaatactcagctttggtggagctcatggagatgacatttacagaatggtttcctgaggagagagaggctgtctaaattcttgtttctgatgagagaaaaatagctttctgtcctaaataaaagggtttcctcttttctattatttaatctactctgcccatgtcctattgattgaaaaaaaatataggcccactttctttttttgactgtgacccatcctcagtcacaaaagtgagaaaaatttacctttgaaacgctaaatcctgcctcggttgcgtgccgatctctgattccagttctcgcgttctctgcgtcgccggagccatttttcgaaagccagcatatatatatcaaacnctcagaataaaacccgagcgtggttcaaggtttggttcgttaattttaagtccacgcaaaccatgatt

SEQ ID NO: 283847 - DNA, 424 bp, Glycine max
  unsure (1)..(424): unsure at all n locations
ngcccaaagaaaggagccaccgaagaaatgcntatcacctcaaaagactggacaacnggntgcaaacgacagcggcgccgctcccacaaaaagcatanaggatcggcacgccactataagactccccgccgagacaaaaccagatgccccccacaccaaaacaaccttcggaggagcggaaagaacaacaccaccggggacccccggccccaacaacagcggaaggaggggaaaacccacatccgaaaagaccgacagtggaaggccactgacgggagaacaacacaccctaaccaccggcgggagccgcgaagggccaaccaccaatgaccatggtctaagcgagaggcctcgaagggaactacaccaaaggcggcgagcgccccggtcaaccggaaccaaacccgaaacacactgcgcaccc

SEQ ID NO: 283848 - DNA, 397 bp, Glycine max
tcaccctgactgtgaccctgatcggccctaaaccactgttcagccatctgggggtaaccctcttctgctaatcctaaggatgggctcccttttctatcttgcttcgtgctcataaactcacaacaagcttcatcaagtggatatacccaaagctctatacggctcttaactactaagcttgcttaccttacagtctggctaatgtgtacagatcttaaggccccaatacctgttaaactgatttgatgttatgacaaattttgtcttgccttgaacatgaattgtgtgagtatccgttcctctcagttacgtcttgttattgtttgcggctgaacctacacaataaaatcttacacaattataaagaataagaaaacttcatggattcctttgctcg

SEQ ID NO: 283849 - DNA, 318 bp, Glycine max
  unsure (1)..(318): unsure at all n locations
tgagtgagctaacttacatttatttgcgtagcgctcactggccagctttccagctggaaaacttgtcttgcagctgcattaatgaatcggccaacgccaacccctctgtngtcgctcgggctttctaccaattatcatgtttaacagcgtatcgatcgagattttggcctttcttccgcttattatccattattccaggcttgcaactcagctgttaacgtgcccatanctgtcttaaataattacgcccccctccgccctttccagaactgggggaatattaacattctgcaacatggaacccctcaacggttatcg

SEQ ID NO: 283850 - DNA, 126 bp, Glycine max
  unsure (1)..(126): unsure at all n locations
ccacagattctgccttcttctattttcagagtggggatgcctctaacagcacctctgtcaatgattntcttcatgcctcttaagtgcagatgtccaaatctttgatgccatattctgacttcatct

SEQ ID NO: 283851 - DNA, 402 bp, Glycine max
  unsure (1)..(402): unsure at all n locations
cttgcgaaatgatttctatacaaaagtttttttataaagcgactaacagatataaagggtgttatacccttatttcgtctggggactatcatttgttaatcttttgattcttgttagtcgacttacagtgttgaacgccagttacggtgtgaaacagaaaatcattcagtgttttgatcaaaaatgcaaaaaataccaacaaagggaaaaatggtcttttccttggtttccttgaccctagctcgctcangctagcctctagcttgcctgtgccaccgaataacttcatggtgaaaaaaccaactcgccagggcgagctcattgcttcagcactaagtnttagcttgcctgngcaagctgcaactgctccaaagtgaccctttgcttataaataggcgttct

SEQ ID NO: 283852 - DNA, 175 bp, Glycine max
acatacttattgtgacaatctcagttgagttatgaaactgccctgagattatgtgatatgacctgaacgttaggtcagctttctatggatggattattggcattgcgatgcatgatataatagctatgagggaggaattgtgttcatgtattgatattacggctttgctctcctg

SEQ ID NO: 283853 - DNA, 276 bp, Glycine max
  unsure (1)..(276): unsure at all n locations
ccactgggggttgtgttggtcatctcaacatggaactttcctttctgtatgtagaagaatgtcccttttcactctatttatatatctaaaccgtatatggctataattgagaacagcttttcttcatctcagccaatttcatcactgtggagctcttgtagtgagatgtatntgtcctggtaataaaactcttccgcactctttaagttttctttgtcaaaaatcaaattntaccaattatgtcaagctcgtaacttatttgtgctctctgtctat

SEQ ID NO: 283854 - DNA, 505 bp, Glycine max
  unsure (1)..(505): unsure at all n locations
aatatgtcgatccacctctaagggcacttcagctcgtacccgggatcctctgagtcacctgcagcatgcanngctanagtatgcccgagtcattcatccctatgagaatgttgtgaatattggcgatcagaattgccattccttggattataggggttgaccaagctcatgcctttacaanaaggttcatcaagtccagttgaaatatgggaagttaccatctttgaaaattgggggcaaagatgaatcgagtcacatcactgcttcgtctactgcccaacatattaaagattggtgatgtcctcgttacttcccgttcacccttgacaaaaatgcattgaccatgctgtaaatctaattgattaacccctatcctgcgaaaaattccaatacttcactgacatattcgatacatcctgttttcatggttgatggtcattgattcctccttgaaaataaataaataaataaaatgacttaatattgtttaataaaaaaaaacccg

SEQ ID NO: 283855 - DNA, 402 bp, Glycine max
  unsure (1)..(402): unsure at all n locations
ttctttaatgcatctcatctaanaccgagttcgatggttgtacgagctttcgatggtagtcngcgggaggtgatatgggaaattgacatccncattcaaataggcccccacacttgcaatgtgagtttccaagtgatggacataaatcccgcctacagatggtggtcccctcgatgcttcaccagaaactgaaattcgcagttggtggactcttgttgatagtgtcnggtgaagaagatatgttggtaagctgccccttctcgacaccatatgtagaggcagcggaggaatcattggaaacaactttccaatctttcgaggtggtaagttgtgcctccgtggaaacaagcccattgctaccttgtttctctaatgcagccctgatggtggcgcgggtaatgc

SEQ ID NO: 283856 - DNA, 476 bp, Glycine max
  unsure (1)..(476): unsure at all n locations
atgctcattagaactcactcgtctcggatctattacgcacttgngcgtgcagcctgccaaggttaggaatctggataagcctacagtttcttcttatatgactctcagngaagccaagatactttaaaagatactcacgttgagcctggagatggttttcaaagaatacttagggggagcctatagaggctttgagactagtagttataagagcctatgggaagcttcagaaaatnacaataacatacttggtgcttgtgtaatggaatctacagtgtgggctatatatactcagggtggggtaaccatataattatgtgagtatttattctttttaccatttctgattgttcgtttctattttcgttacgaaacatattttccatactattatttgatatagttctagaagttttcttaatgattttcaagatataaacacgtttctttttcaaaaagaaaacctaacttccttt

SEQ ID NO: 283857 - DNA, 438 bp, Glycine max
  unsure (1)..(438): unsure at all n locations
tgatagaaataatactacatctttttctaatgttttacaaggtagtaatatcatacaaaataactttagaccttacactgaaattgattctcatatgttaaatgaaatgtttctaccaatacggaaaattcatgatgtcaaacttcttttttgatattcattgtgtcctacatcgtgatttgcacattactgaaaattgcaaaaggaatcggttgactataaaagaatgagtatgtttcaaaatacaaagtagattaaatgaagaacaaactttgcttagatcacaacggttatttcaacaatntctagtagatggttacattatgattgagtcagagagggtgtcttttataagatacaaccaatctanactacgagtggacaaatatgctaattnggaaaattcagaatctaacaatgaaaaccatggttctgata

SEQ ID NO: 283858 - DNA, 243 bp, Glycine max
  unsure (1)..(243): unsure at all n locations
atatatatggctaatttagaatttctataacataatgttactttttatgagtttagaaagcttctaaatccatattattatgaagtntttttgttaaatctgactcttaaatntaaaatttattatgagcattatttctatttaagagatgatttaatataatttcgtattacttgaggacttattaatattatatatattcgataatcaaagtttattatatttatacttcctggatctggt

SEQ ID NO: 283859 - DNA, 376 bp, Glycine max
tacccttgtgtgtggcacatgatgtgtgacagtgatgattttatactttgtatttgtgagaataactagttcggaggttgatcattttcatggagacctcatggattggccagcttggatatgaaaatgcaatccttcttgtgttgttcttcgctacttttatttatattggtgaatgacttaaattttacgtagtttatctttacaaagttgtttatgcttatatgtaggttttgaggaaatttgagttattatggtgtagtgtgtgtgtgtctatatatatatatcatgtcctgttttaatttggagttgggcattttagcctttgggacttcgaaaatgcaaaagttataagtattctataatcaattaattg

SEQ ID NO: 283860 - DNA, 388 bp, Glycine max
  unsure (1)..(388): unsure at all n locations
attgccatatggcactcactcgtccgggtcttnagcaccgcgctccgctaattgaattcatgaggaaaaggattttagtgcttgaaattgaggagaatgagagagttactttgagtgtgctacaagactctttctcaaggtggacaagggtccatggtcttttttcccgggcctacattccctgatctagaggattccagaattccaatcattttactattcagaattgcccagctctacctattaaatatgccaggctctacatattcttaatcccaaaataaaaggtacctgtcatggaaagattccccagaatttcagatttccaaggctttctatcctggaactgagggggactcccccctccatcctagccccagcaaatcac

SEQ ID NO: 283861 - DNA, 354 bp, Glycine max
gcgcataaacccaccatcccctagttgccacctacaactaagctcaagtactaccacgtagcccatatactcgtgtctctcaacaacgggtccccatcaatcctcccaaagcttccaacatccaagttattcaacattcacacaacacaaactatcacagcccataaaacagggcaaaggcagaaaactctgcccaaaacaccaaccaaaatcacagcttttctcacttaagaccccagtaacaattcttcgtccaattcgtaaccggggatcgactcaaaatttactggaagctctagtcttaacctaattggaccgtgggactactacaacgtcagactattctgactactc

SEQ ID NO: 283862 - DNA, 364 bp, Glycine max
  unsure (1)..(364): unsure at all n locations
ttcgccttggcactcagctcgaccgnatcttgagcaccgagctcagctgttgattgtgtccttaacggacttgtatgtaaatgctaactcattcagttcaacttactgactgcttggtctatttatgtcatccctctgaagatatctgccctatctatcaaatgttgctgcgcaaatcagagacagtctcaaagtaagtctcactatcaatatatgtcagtctttaagtcagtgactgaacagctgagtactgagattgatcagagactttccatagtcacatgcgtgtgattatgacattatttaagatattattctatggagaaaatatggctattccgttggtggaactgcatgccttgac

SEQ ID NO: 283863 - DNA, 377 bp, Glycine max
  unsure (1)..(377): unsure at all n locations
nggtaacaagggccgcacaaataanattttacacttgggaattaaattcaataattcaatccaaaaaaatccattatccaatggcttgggcggggataccaactaccaagtccttagaatccagaagaagaaaaaactccttaaaaagatttatcggtggaaatgggaatattatattttttttttcagtggagaccgggatccccactttctttttggtttgggggccactggtggaggcttctttttatttttcaagactattttttagggcatattgttaagtgcttataatccatcgataccaggaataatgatttataatttttaacaaggtggtaaagagttaaattntaactttttgagggatgaaataa

SEQ ID NO: 283864 - DNA, 195 bp, Glycine max
  unsure (1)..(195): unsure at all n locations
cttgaccactgcccggtcttagcactgcgtgcactagattgtatctttacttgatttgagatatttgttgactgtacattcactttatagtgatgatcatatgtatatgtaaatgattgttgctaaattaggtacctaatcattgaatcacacataacctattaaaaataggcagccattgttgatctnaatcaa

SEQ ID NO: 283865 - DNA, 433 bp, Glycine max
  unsure (1)..(433): unsure at all n locations
tatgaatcttcaaaactctacaaagaaagagtcaagacctattatgataaaaagttgttgaagaaagacttcaaaccgggacaacaggtgctactttttaattcaagatttaaattatttcctaataagctgaaatccaaaatggtctggaccctttgtcatcaacaaagttcgatcttatggtgcaatagagctatatgacccacaatctcaggaccctgatagagcatgggtagtaaatggccagtggttgaaactgtaacatggtgaagaagttaacaggcacacaacaccttacattttatcaaccattgaggtaaaagcatcaagctaatgacgttaaagaagcgcttcttgggaggcaacacagttctaatntcttttattctgttntaatacattccataatgtggaacttacttcataatcatta

SEQ ID NO: 283866 - DNA, 459 bp, Glycine max
  unsure (1)..(459): unsure at all n locations
tgtgctctctcatgtaagcgactncagctcgtacncgggatcctctgagtcacctgaggatgcacttgcataaagcattgtaagataaggttgctctgtctgccttgaggacaacccctcacagtaggcatcataatcgaatatgccatattggagtgtcactggngaagaattcaagatgatgcatttgtagttgttctaaataagttagggttaaatcttttttcttaatacctaatagaatcttagtacattagttaaaaattaaaaaagaatattttattgtgatgtaataattttcttataattaaaatctacaaaaaatattatgttgattattaataaaaaattacttataaatatttttttaaaaaatctcaaatcaatatttgactcatcatccacccttagtnggataattcttttttttcctaaattcaccaacaattgttaattttt

SEQ ID NO: 283867 - DNA, 312 bp, Glycine max
  unsure (1)..(312): unsure at all n locations
agatatttaaacaattaaaaaataagtctccctttaatggatttctggatttatagctgtgtgtgtggtttaagattgtccaaaaatgataatttataaagtttttgaagttctagctagacactcaattaaaaaatttacacgattaaaaactcgattaaaaattaataatntaaaaacttatttatagaaagttaaccttaattgaatagtccatcctcgaaccaaactgatattgggtagaattgatcaactcgatgaattgatatataaatatatatttcatcgagaaaattctaccaaaacaatttt

SEQ ID NO: 283868 - DNA, 115 bp, Glycine max
  unsure (1)..(115): unsure at all n locations
acttatcacctcaacagatggcaactgaagacccatcgtcttatagacctatgagagctggtatangacaaaggttttgggatagttttaccttagtggattaccccacatactt

SEQ ID NO: 283869 - DNA, 557 bp, Glycine max
  unsure (1)..(557): unsure at all n locations
cagctcataactgtagtggtatcacgtcttgtattacatctacgctgatctgctgcacnccncacaggagcaccaccatttgaacccgtgttggacccgcttgtataacgcgacacgtttgaaactctagcctggccgccctggatctacttcatcaattgttgtttttgctttttaaagcagacaccagccccattgagaaagataatggtgattggagatggcactttcaagagaagaatgaatcaaaaaaaactcaccaccattaggaaccctggataagaaccttgacgtaagagaagatgaatggagggagaaggaaaaacggcgcatgaaatttagtgcctcttaaaaagttgaactttgaaggttaattctcaaatgatcaaaggttgaaaaatgcacacacatatcctctatttatagcctaagtgcacacaaaattggagggaaattgatctctattcaatttactaaaatcgaattgaattgggagccaaattcactatatgatagtgatctaactatgtcaccccctatccaaacaagtcagttcg

SEQ ID NO: 283870 - DNA, 367 bp, Glycine max
  unsure (1)..(367): unsure at all n locations
ttcccttgagcaccactcgccggatcttagcaccgagctcagctcaaataggtcaggcacattcggtttattctgtcaacataaggctagggattcggttataaaaaaactatttgaaatccatccccatggacgngtcgtgatgctaaaacatctaagtataaaaatactctaaatgctattcttatgtttcaaagagtgtatacccccatacgtcccacacttaaacctaaagactcaactcttagaaagctaaagtaagtacctatgaacttaatggagtcgagattttcatgaactcagagatctagattactctataaggtctctgtgggggcacggacacgtgctacgggcacggttggtg

SEQ ID NO: 283871 - DNA, 300 bp, Glycine max
  unsure (1)..(300): unsure at all n locations
taatagtgaatcacttattgggaggacatgttgctatgacattaaattnaatagccattcttggtgcatatttctaaccatgcttttgattttggtgagctaaaaaggtgaatgtgggcaccaccatacttagttgattgaagcacatgaacaaaaaaattgttgaatggaagggaatgcaagaagagtgtgtatgtaacttgtctttgtgtatacttaatctttagtctgaattttcttttgttttgagtccttactttttttaagtagctttaactggtttagtagttttaattagtc

SEQ ID NO: 283872 - DNA, 487 bp, Glycine max
  unsure (1)..(487): unsure at all n locations
gtgatcctacataagcgacttcagctcgtacccgngatcctctgagtcacctgcggcatgcagctgtgctgtntatcanaacaactaagtgcgttctactattatatgtgaatcaataaccagcatagattcaaaggtactatgttggcttctaaatagcgccttcnttaaccgtgcttggtggttggaacgccacaaagtaacaangccgcatcccgccatattgatnnttcctccccggggaaacatgagtggaaggagatcttcatcaaggaatcatnccaactcttgatataggctttgagggatcaactgggctttaattccatccctctactgggatcaccacgctagtcccgtcacctgagtactggcttgaagaatcgccgctgacggcagggcacccttatactcaccatatgttggtgtgcaaacccacccgctgtaaggttcattgatgcaaaaaacaatatgtccagcctgctaa

SEQ ID NO: 283873 - DNA, 302 bp, Glycine max
  unsure (1)..(302): unsure at all n locations
taaagctagtgtctttgttatattntttatggatcttggcttaagagagtaagactctttctaccttatgaattagaattaaaaacactttttattgatttattttaacattataacatgaatgagatatatatgacacattaatgcctgaagagagagaagaatacgtgaaatctattcctgcaacaacttctaccatttgggtgacatccttatcagtgtggtttcttggttttaaaatgacataaaagcatatactttgttggtttatcacttgatctatttgttacttcacaaaatca

SEQ ID NO: 283874 - DNA, 156 bp, Glycine max
tgcagctaatactactgcctccccactaattatgtacataaagtttttatgaaatctattctatcactaaaactgcttgacacatgagacttaaagaagatcgtatccctttgacttatgtgaccttaagtttagtttagtcttaaaaaataaaaa

SEQ ID NO: 283875 - DNA, 374 bp, Glycine max
  unsure (1)..(374): unsure at all n locations
tgatcatgtcatcaattcgaagatggttattcagcttcttttcaaactgngaaaaaaataaaacttatagctcagacagctgtataagaaagaagctatatcttgaagtcaacaactgttgatatttaactaaatacatacctgaataatttttactttgctcattgcaggctcaatgactccggcctccaagttgtttctgattatcccttgcgaaaggtccaaacccatactggggaaaaaagagaaaaataataacaatatttagcgagatggaaaagaatgccaaagcttatcaagcatcatttcatatgtattctccattggtacttttctctaatattcattaacatattcacatgttggaatgatac

SEQ ID NO: 283876 - DNA, 176 bp, Glycine max
  unsure (1)..(176): unsure at all n locations
tatgttctcaagactggactaatacatttgctgcccaagtntcatggtctngcaagtgaagatcctcataatagtgaaatatatctaacttcaaagcttataaatatanttacatgtagcgaatatatataacacatcacaacacaattacatgttatacccaatatatatatata

SEQ ID NO: 283877 - DNA, 421 bp, Glycine max
  unsure (1)..(421): unsure at all n locations
tataagctntgagtgggaaatgatagtgagactcaacttggataccaaccttgtgctacaacaattgtagcaagacctagtatccataatgagagaaaattgtttggttaaaaccttgcatcttgtatgaaagatgttctctctttaggtttgggttaagtcacaagattaacttgttggatcgaatggcctcagaacaattaagaagggggggttaaattaattattcttaaacctttactaattaaaaattactcttttaaggcttttactaaattgttaagagaatgaggactagaagagaaacttaacagaaagtaaaagcagaaatttaatgcacaacggaaagtaaaagagtatggaaaaatgaaacaaacacacaagagtttttatactggttcagcaacaacccgtgcctaca

SEQ ID NO: 283878 - DNA, 152 bp, Glycine max
cactcactcgtccggatccttagcactgagctgcgcttgaagtattcaatgattttaataacttagagaagaaagaatatgcttcttagaacaaaagtctggctcttgattacatgtacaaaaacttagctgcttactgtgtatatatctgt

SEQ ID NO: 283879 - DNA, 420 bp, Glycine max
  unsure (1)..(420): unsure at all n locations
tattatcatacaaaaacttttaacagttacaacttttaatatttgattttaaaatcttcaaaatagtttggcacagatagaataatcataatcagttaggatgctccatcacaattaanaaagaagacttaatggatggagcaacgtgaataacaacaaattataaattcaaagatgtgtttttttgtttcattaaattagttacaatagtacacttaaaaaaaaagttacaatagtgactaaataccgccaaatttaaggatcaaaatgttagcttactcattttcttgataaaaatcgttgacttttaaattgaataaaatattaaattaatggaagaatntgttaaatntgtttgaatttggattatctttacaatagtgattaatataaaatcaagattttataacaatgttttac

SEQ ID NO: 283880 - DNA, 222 bp, Glycine max
cctacgcatctaacgctatgccatgggattcgttaccacttttatccaatggctgacgcctacggatgcctcctaaaaatgccttatctttcaatctctccgctccagatatgctagcgtgtgtacccaatcctacatggcaatactttcactcctatactgtttgaaatgtataacccaatgagctagatatactatgtccaagatcacctcaatacctat

SEQ ID NO: 283881 - DNA, 324 bp, Glycine max
  unsure (1)..(324): unsure at all n locations
tgtattacatcggtttttttataaccgacttagattcaaagatgttgaatcacgctnttgtagtagtgtcaacatgagctcgtcgttccttatccttcaatgtgacttgtatagcaaggatagtcataagcgtaggtctggtaatctgaacatgggaaccatccttagaagatgtagggggaggattgtttgtgaaatgaggtgcgatttggacagttggggtttggtttttttcttggccattgttagggttaggagtttttgggtctttgataagaaaagaggttattttacaaagagatttatgggagagaggagagagaa

SEQ ID NO: 283882 - DNA, 167 bp, Glycine max
ctcgtttgttaacttttatacccctgtgactgctaccatttacttagtcattctcgttacttaaaataaataatttcacgacgttgattgattatcataacttcgtaaataattcgaccgtcgcggccgaccacgtggaaatcaaagagtaaaaaaaaattaatatc

SEQ ID NO: 283883 - DNA, 452 bp, Glycine max
  unsure (1)..(452): unsure at all n locations
tcttacatagtccgctnttgctggacctttatgcttaaaaatagaaacattatgcatagacaaaagatcaagatgagttagtaggttaaaaccataaacaacttcaaaaggagaacaattagtagtgctatgaacaactctattgtaagcaaactcaacatgtggtaaacaagcttcccaagtctttaagttcttcctcaaaactgtcctaagcaaagttcccaatgtcctattaacaacttctgtttgcctatcagtttgtgggtgacaagtggttgaaaataacaatttagtgcccaacttgccccacaaagtcctgcaaaaatggcttaagaacttagagtccctatcactaacaatgctccttggcaaaccatggagtctcacaatctccntgaaaaacaaatcagccacatgggaagcatcatcaactnttntacatggaataaaat

SEQ ID NO: 283884 - DNA, 451 bp, Glycine max
  unsure (1)..(451): unsure at all n locations
ngccttgttnggccgcatatgagcaagggttcgcgaagaacaatggtatgtcntcttaccggctaatcanggccttttggcttaacagacggcaaanaagaatggttataccggatacccactccggtatctccgcccgtcacgtgtctcaaatgtcagtatgacagatcttgtgagcgccaaagatgacgttaatcttcgcgtggtcacgggttngtcggccgcgattgacgaaagggcagaagaccatgtcagcctcgcatgctatcaaggctttcgtctacagacaggcaaaaagattgttataccgatacccactcggtattctcgccgtcaccgtgctcaattgtatattgacaacttgtggcgccgagatacgtaatctcccgtgtaacgggctgtcggcgcaatgctaaggccacanacattcagtcttcctgctttagcgttt

SEQ ID NO: 283885 - DNA, 367 bp, Glycine max
tggcagcattacaaatctcaatatacgttgccaagtgtgaatatggatcttcatttggtaaaccatgaaacaaattgctctggtttaactatatcaataaaagggggtaagttaaattttgtgcttgaacctctaaccgggtaacacttgaaaaatattgcagcaccgaaatacttgaataatcttccaaaggcactcatcgagggtgctcttcaatcattactttggcttcaaattctgcttgttgaaaatccctggatataggtgaattaaaagatgatgacacagaaaaatgaacgtcttcaaggattgatgcaacttgtttgtcgtgcaaaagctttctttttctctctgtggtggttcttct

SEQ ID NO: 283886 - DNA, 252 bp, Glycine max
  unsure (1)..(252): unsure at all n locations
ttgcacccctcgccggtcttagcactcgctccactattactatcctgcatcaccctattctatctatttgcctatgaggtanaactagacctaactctcatcttctctaattcgggagatacaagaagtaggggtgtcttcaaaatgagttggttctcttgattntctatgccaaaaatgaagtttgtgtgttaaacataaattggcttaaattcctaaatgagtttttaccaagtttgataaacaatttaa

SEQ ID NO: 283887 - DNA, 382 bp, Glycine max
  unsure (1)..(382): unsure at all n locations
aacatttggaaagtttgtntaccaagaaatgctactcttanaaccaaaatggcgtacaacctcctccaataaacacaaacatcaatgtaaatttaaaacaaactcatgcacatacttccttacgaacattcactcgcacaagatattcttctaactaaaaaaaatggccccatgcacaatcaaagcaccttcgttacctagaatatttatatggactttccaggggtatttgctacctacatcacatgcacttccttggctaaatttacatacatgcatactcaaagcatcttggctaccaaaaattgcacacgtgcacattcttgtatttctaatacctatgcatatacaaacttcgngataatcttggctatctacacaa

SEQ ID NO: 283888 - DNA, 495 bp, Glycine max
  unsure (1)..(495): unsure at all n locations
gatcctattcgcactcactcgtaccngatcttaagtcactgcggctgcagcttgctcaagaggtcacgaagacaggccgncgattgactanntcccgcccngagtacgacagtcaccgctttatgaacgtngtacaccagcagcgcttcgaagccatcaagggatggtcgtttcttcgggagcgacgcgtccaactcatggacgacgagtatactgattttcatgaggaaatanggcgcccgctgttggcaccaactggtacttccatggcccagtntgatccagaaatagtccttgagttgtacgcccatgctnggccaacagaagaaagcgtgcctgacatgatattcttgggttagggtcagtggatccccttcgatgccgacgctttcaccagcttctgggatttccatggtttgaagaaggccagaatgcaatttggccaaggatgaccggtcgatgggttcataagaggcatccccacttgtttttact

SEQ ID NO: 283889 - DNA, 355 bp, Glycine max
  unsure (1)..(355): unsure at all n locations
ttataagcgcnggtctgggagacaagggtcagtgttcgcgatatgcgaagatgatgttccgagtattttggatttggtacgaccatgcccttctgatttctaactgggaaattggcgagtggaggaacgccccggcatttacgcgtcgagcctaatggtaacctttacggttttaaaagctctatagttgggcctacgctttaaaagttttccttttgttaaggctttgtgtcttttgtttttgaatctataatacaaggatctttcttcatctgttcctggtctctacccattctcattcatttgcatgtntacttctttttctgaaacggcagatccgatgacgagtcccccg

SEQ ID NO: 283890 - DNA, 240 bp, Glycine max
  unsure (1)..(240): unsure at all n locations
acagcagaatttagtaatgacccactaacctataattaaataacttaatgccattaacctanggaattaaaacacacttaatggctgagtgtaactgatattgtggcaaccaaaagtcacccccaacagccaacaagtcagccaccatttgggtctccaaaaagctgatgcctatgttgccaattgagcccttattacaacttgaactaaagcccttttagtgataacccaaacatattt

SEQ ID NO: 283891 - DNA, 226 bp, Glycine max
aaataacttaaagccattaacctaaggaattaaaacaaactaaatggcctgatgtcactgaaattggtggcaaccaaaagttacccccaacagccaacaagtcagccaccatttggtcttccaaaaagctgatgcctaagttgccaattgtgcccttattaccacttgaactaaagcccttttaagtgattaacccaaaacatatttttggtcagccaactttaca

SEQ ID NO: 283892 - DNA, 413 bp, Glycine max
  unsure (1)..(413): unsure at all n locations
aatggagaatngcactangcaatcactacgcatatctcctatactcgaggtggangacacatgaacgaaaaacacattcatggggcttccaacaaaggngtngataatggagaattacactaagccatcactacgcatagcttccaacttcgaggtggaggacacatgaacgaatacgcaattcatggtgcttcgaaagattgaaatggagaattcacttcgcatcactacccttgctccaacgcaaggtggagaccataacgaaacccattctgggctcaaaagattagaatgaaaatgtctancaatcctctcatatctcaactcgatgtggagaacataacaatacccaattatgtgttcgaaaaatccaatgagaatttcttacaatccttcctactccaactgaaggg

SEQ ID NO: 283893 - DNA, 259 bp, Glycine max
  unsure (1)..(259): unsure at all n locations
tgaatagttcgttcaatctgaccatctgtntgaggatgataagctgaactaagcttcagctttgttcccaaagcttcatgtagacttgtccaaaatcgcgaagtgaaccttggatccctgtcagatacaatactagaaggaatttcatgcaaccttactactttcttgatatacaactccacgtagctttccattctatacctcatattcactgcgataaaatgagcagatttggtgagtcgatctactatgacccaca

SEQ ID NO: 283894 - DNA, 376 bp, Glycine max
  unsure (1)..(376): unsure at all n locations
ttgcacctatatggcactcactcgaccggatccttagcactgagctgcgctgctaaaatagaagacaacgtcattgaacattcctccaattgaacctcgttagacctgcacacacgctttagctcaagatggcattctcggaagaccatncacttaggacacagttctgcctcaagagaatattcccggcgtggctcgtgttacccatgccattcaccaactatctcatttatccagctgccaagaggggcaaatcacttgtgaggcatgatctttatcggtgcctaacagttctggattccttatgctgagaggccagantgcagttggccaaaaggatcggccatgggttgttaggagcatccccattgtggtt

SEQ ID NO: 283895 - DNA, 398 bp, Glycine max
  unsure (1)..(398): unsure at all n locations
tctcccccaattttctattaataggggtttatgtgaagtgaaaaagggttcagccccttaggcccttctctctctttcgaatttgcttggaaaaattgtntccgtgaagaaaattcaagccgaggcgcttccgaaacgtttctgtaacgtntccgtgaggaatttcgcgaaggttttgaccggtcttcgacgttcttcattcgttcttcacccgtcttcgatcttcaacgggtaagtacctcgaaccaagcttttcgattcattctatgtacccgtggtggtccacattgtgtttcgagtattntattctcgtttcatttactttntatacncccctttgacgtgcttaaccattttatttaagtcatttcttgcttaacctaaaataaaataaattt

SEQ ID NO: 283896 - DNA, 90 bp, Glycine max
aatacttgtcaccacttgaacttaaatatccctatagactcatataagtccaatcatatataatgtcttaatttagatatttctattaac

SEQ ID NO: 283897 - DNA, 403 bp, Glycine max
  unsure (1)..(403): unsure at all n locations
cacatgaagttgtgacagtgatgatcttaaactttgtatttgtgagagtattctttttggaggttgatcatttccatggagacatcatggatgggcaagcttggatatgaaaatgcaatccttcttgtgttgctcttcggtacttttatttatattgttgattgacttacatcttacgtaggttatctttacaaagttgtttatgcttatatgtaggttttgaggaaatntgagttattatggtgtagtgtgtgtgtgcctatatatatatatcatgtcatgttttaaatatggagtcgtgccatttagcctttgggacttccaatgcaaaaagttataagtattctaatatcaaataattgaagagtttaaatgaattaaatgaatgtcttcacttaattag

SEQ ID NO: 283898 - DNA, 357 bp, Glycine max
  unsure (1)..(357): unsure at all n locations
agcttgtcactgttatacaacacactanaaaactagccttgtatttattataggatatttttaangatagaaactaagaagaggattcttggtactataaaaattaaataagtaatttaacttaataaaattaaataacgtgtaggtaaacttgattcaatgtaattatttatctagatgcaatatcattctttaactacataaaatattggattttaatcaattattagattagttattaactttgtttggatttttaacttattttatgacttctaaaattatttttaattgaatagaataaattaacattaagtagcatcttattatttgataaaacaccgttttattcatttc

SEQ ID NO: 283899 - DNA, 426 bp, Glycine max
atcctatccttgcggagtggccagaaagtattattatgtcatcattcctatcgagtatttactgattcgttaatttaattttatgtatattgaaagtgtgcttgagttgcgaaagaccatctattattccttaaatcagttttacattggtaattcggattgtatgtgtgttttggttgccctgagcctatatggaatttgtaatcatgattttgaagatttgaagttagataagaaatcgtgaattgatttttctttgcttctatcttggattattagatgattatcggctcttctgtggggatcttggtaacgaggtgaatgatgatgttctctcaaagcattttcaccgtttcctttctttaacttggcacgagtaagtggattcctcatctatctcgagttctcattatgtttagttatgat

SEQ ID NO: 283900 - DNA, 412 bp, Glycine max
  unsure (1)..(412): unsure at all n locations
angattgatggggacccggtgttgagagaaactangatatgggctacgtgggagtacgtgagctcagatggaggtgggcaacaggggatggtgggtttattgcgcgccttgtggatgtgaaaaacntgttgtgcaccatcgcccgaccgccacctagtaccacatgtgatgggtaccccatantcctacaagcttgagatgaagaagtgttaagggtgaaacttcttgctttattgtgaccacgagtgtacctgagatatgtccngttgtcacgaaacttgggacgtcaagtgggtgttttgcccaaacancttgaccatccgaccaccccgcctattcggtcatagaactttatttcctaccggaagctctggcgcactattaaggaaccaaacccaagcaggtgttttgg

SEQ ID NO: 283901 - DNA, 411 bp, Glycine max
  unsure (1)..(411): unsure at all n locations
taacatcagaccacttccagggtgctagaactacttcacatggactngatggggcctatgcaagttgaaagccttggaggaaaaaggtatgcctatgttgttgtggatgatntctccagatttacctgcgtcaactttatcagagaaaaatcagacacctttgaagtattcaaggagttgagtctaagacttcaaagagaaaaagactgtgtcatcaagagaatcaggagtgaccatggcagagagtntgaaaacagcaggttcactgaattctgcacatctgaaggcatcactcatgagttctctgcagccattacaccacaacaaaatggtatagttgaaaggaaaaacaggactttgcaagaagctgctaaggtcatgctccatgccanagaacttccctataatctc

SEQ ID NO: 283902 - DNA, 103 bp, Glycine max
actcgccggatccttagcactgagctgcactgatgtcccattatggtatttgagaatttgaataatctgtttatgtatgtgctctaatcttcttggattagat

SEQ ID NO: 283903 - DNA, 415 bp, Glycine max
  unsure (1)..(415): unsure at all n locations
ttgtggatttggtcttcgccagtgaaaggatcgatgtgggtctgataagaggcaaatntgatcatcctactaggacgactgagannactggggcaaatgaagagggtgagaaagagggagaaacccatgttgtgactgccattcctatacggccaagtttcccaccaaacccaacaatgtcattactcagtcaataacaaacctcctccttacccaccacccagttatccacaaaggccatccctaaatcaaccacaaagtctgtctaccgcacttccaatgacgaacaccacctttagcacaaaccaaaaacaccaaccaagaaagtgaatttgcagcgagaaagcctgtagaattcaccccaattccagtgtcctatgctgacttgctcccatatctactngataattcaatg

SEQ ID NO: 283904 - DNA, 138 bp, Glycine max
tgcatcactcgccggatcttacacgagctcgctttatttttaagacaggcatgagatcttctgttccttgagagctatgtcttcttcaggaagattttaatgatttcagattctagagatcactatctggaatgactc

SEQ ID NO: 283905 - DNA, 336 bp, Glycine max
  unsure (1)..(336): unsure at all n locations
nggcttagcgcgaggataagaccgcttagtgagggttgcaaatccggaaagctataactctcactaagccaggctctggctggcttagctaaaatgatgcatattaagtacagaggagcatgcgctaagctgataaggactcacttagcgctcacattgccgcaaggaattcaacttagcttccatgactggcgcttagcttcatggacctcagttttggtcgtacggaatttagcttggtgacaataggtcatgcttagccaaagataagctatcacttatcgatcaggctaaagcttagctgaattcagatcgaattgaagttggcttagctca

SEQ ID NO: 283906 - DNA, 321 bp, Glycine max
gggcacattgggccagctgccggtcttgagcacggaggtggacttcaggggttctagaaggcttagatttctttctatatgagcatgtgacactggtggacttgaggatggaagctatgagatcctcaagtcactcttcctcttatcttaattggctccctcttttcttctctggctcttcagctttcagtattggggagtctctctgttatctggagggcgcttacctttctgctcgtgttctgggaaacctaggtttgactagacaccctagcccagactctcatcctgtacatgtctccaacttctacaagggaattt

SEQ ID NO: 283907 - DNA, 384 bp, Glycine max
  unsure (1)..(384): unsure at all n locations
tatagacactcaagctnggagaggatgcttcaatggagganaagaaagagagaaggtgtgagcacgaaattgaaggaataaaagagggaaagaagtggaactttgaagtgtatctcataagactttcattcatcaaagttacaacaagtgttacacatgcttctatttatagactaggtagcttccttgagaagctttcttaagaaaacttccttgagaagcttctttgagaaagcttccttgagaagctagaagttagctacacacacccatctaanaactaagctcacctccttgagaagcttccttgagaagctagaacttacttcacacccttatatagctagctcaccctctgacaaaaacatgaaattacaaaaaatc

SEQ ID NO: 283908 - DNA, 401 bp, Glycine max
  unsure (1)..(401): unsure at all n locations
gttctccactccagtacatctcctaaccatagaatattcattaataatcttactctcccnnnnnnnngattagccttgaccagctgccggacttaagcacgcgctcacctaaaaatgtatagtgcatttttcttcttatattgccatgaatattgcataccatacttgcatttccatagaaagaaatatcaattatttacatttgtatcaatactaatataccaacaaatgcctttaatttatcgaatgttctccaaaataaactttaacaaacctttgtgggcggaaataacagacttcgcgctaagcacaccactacatgtaactttatgctcgatctgcctctgatctcaacctagcccaattgcaaaacatcttttattttttcaaaaaaacctatt

SEQ ID NO: 283909 - DNA, 381 bp, Glycine max
tgaatgaatagatcctcttttctatcaagcattttatcgctatgcaatgggtcccttttagtccaattaatcaatattctgtggcagcattttgttccccacacggatattcctcttttagttactgatgcagaatttccaaaatgtacaaagcgaaaagatgaatttactttcgcataacaaaaaatccggaaaaaaaaaaaaactgtgtggacagattcatatatgcacaataaaaacgacacgtgtagataaaaacattataaatcccaaaatcacaaatcaaaatcataatcaaagccacaatcatttgggtgcacgccactgctcgttaacgggtatttattaaatgacaattatgaagaaactaaaaatataatt

SEQ ID NO: 283910 - DNA, 601 bp, Glycine max
  unsure (1)..(601): unsure at all n locations
aacaatgaaaccacacgaacagcacaacatacacctaaccacacctacggcgaacacagaagtccgccactaacctnnnnnnnnnnncgcgcaccatatgagacancnnccgnnccgggaccaaaagcaaccgcagccccacctaatcctgcaacaagaaacaaccgggtccaagacattatgccacacaacgcgatcccggacagcggtcacaaaaggcacacacatgagaacagccgtggcccactcaccaacacctcgcgaaccaagacatcaactaccgaaacaatataacccaagaatacgaatcccaagacaagcaaacaagtcggcgcaacccccggaaaagcagcccaaacggaacccaagtcacacgctaaccggacctcccctcaaagtggcccactataagatataaataaaaccaacgcatcccgagcaaaaggaccacacccaaacatcgcaggggactacggccgcaagcacaaaagatgcataccgggaacataaaaacaacaactcacacccctcaaaacaaacacaaacaagaggatgaaacacccagcccgggagagaacacaacccaataccgccaaacgcg

SEQ ID NO: 283911 - DNA, 251 bp, Glycine max
tagctataaacaatacttacttagcttatcaggtattaattattttcataaactagaaaatgcattagtccggacacctaattattggatattcaccataattaagaaatggtggttttaaaattttaaaggtttataatcaagcaatattggtaactaaataaaaatatcacacacggtcattggaacatcagggtatgcgcgaaaatataacatacctgaatatcttgtgcttagataacatttattaa

SEQ ID NO: 283912 - DNA, 437 bp, Glycine max
  unsure (1)..(437): unsure at all n locations
tcaaactcaaggcaacacttcctcggtccaatgtctataaacttaagttcacccttggtgagcactttctngttctaagttccatcttcaaaggaactcgangtacacaanggtctgtccctgaccatcttctttattcctaagttttatctgtctaggaatacgagtatttatataacccaanggctggccttggtacagattccttcanaaaccacaggtcaccctttggtcctacttcctgtaaaacccaagcattccctaagtccaattacttccagcgaccatgacgaacaccatcaaacgtctaagtccacaacacaactccaccaaactatttggaaagccttcaacaagtggagtctacttcttctcaaacctcaaaaaaaacttccaagtaaacgaacatcccaaatagtgcaaacctcatcaatccg

SEQ ID NO: 283913 - DNA, 455 bp, Glycine max
  unsure (1)..(455): unsure at all n locations
tcaagctggcactatgtatntgaatataagaatgttagtcctgtattgtattatnttcacttctccatcttatagatattgccttaatataaaaaactaaaaagacaggagaaatcactttctctcttctagcttttacattttttatagaaagaaaatgtaagaaataatgattaggagtaacatttgaattntgagttcctccaaatgccataaggaaaatgaaaacatgaactttcgtggttgcgtgtatagaagactatatcacttattgctaatgctagctgtatgtaccatgagtcgaatntctattccaagcttcatcctcctttgacagtataatataaaatcaaagggtgcacagtgcattaaatcattangtggttcattcaataatattacgatgtacgacttgtaattttcctaccgtcaagacgggtctttctcttcttaaa

SEQ ID NO: 283914 - DNA, 566 bp, Glycine max
  unsure (1)..(566): unsure at all n locations
accccatcaaacacatgaccgcaccttaccgcccccacgaacgcaaccaactcacacaaaaacacnnnnnnnaggcaccttgagcaccaccgaccggacccaagcaccgcagctgcagctgcaccactcgccaaccagcaggtgcttcttcataacaacagccacggaggatcctctgggggccaagtggcaaaggtccatcacaccccatttaacaagcaccgccgcctttaggagaaatatttcgcacagaacagcaactaacaaaaatcgaaaacaaacaccgctaactatccggaaaggcaaccgcaccccttgaggagaacagtatacatacctcacctgtgacactaccggaaaggaatggaaccccacctaataggaccaaccacgccctccaatacaatnccacgcggaggcaccggaaaccccacgagaaagagcaccaatcacattcctctaggtatccagcgcccacccggaaatcaacaacacgcccaataatggtcgcaacacccacaaagagcatacagaagacgcagcactcaacaaaggcacagaccaaa

SEQ ID NO: 283915 - DNA, 349 bp, Glycine max
tcagcaccactcttaacatttctgatctaactccttttgcaagtggagctgatattgaggaggaggaactaacacatttgagggtcaatcctcttcaacgggaaggggatgatgcaatcctccctaggaagggaccaatcactagaaccatgagcaagaggctccaagaagattgggctacagctgctgaagaatgccatatggttctcatgaaccttaaggtagatttttgaacccatggaccaatgatgggtacaattatctttgtacatattagactacgaattcattatactcggtccttgtatatatggctccatattgcaagtatggtgccctaaaatatatg

SEQ ID NO: 283916 - DNA, 392 bp, Glycine max
  unsure (1)..(392): unsure at all n locations
gttgtcatatatggacactcactcgtaccgagatctctnctcacctgagcatcagctgagtgaaacggaaaacaccttctctctgtgtgacaaagtgtcctgaattgtcgggtagaacctggactcagtggggtatgccaaaccaccttgacatccaccacccggctatctcatgaaactggactactaacagcgagctctgcagtcaccattaaaaacataacctcatacatgtgcttggtgtggctgcactttgatttgagggtttggaattggctctgtatcattccatggtggtatcttttctagctaaattgaacaggagtaggggccctgaatcatacaagggtgatcatccaagctaaatgaacttacttaatgctctgattacg

SEQ ID NO: 283917 - DNA, 444 bp, Glycine max
  unsure (1)..(444): unsure at all n locations
gcttctacagcaagttcccaatgatctattgcatgantattcaacaataacacaaattgaaactgggttgcctcccagggagtgcttctttaacatcattaagcttgacgcttntaccttattgggcgaatcaatgaacagtgtcttgtgtcctgataaactccttnccatgatacaattttaacctttggccatttcaacccatgttctttccagattctgagattgtgggtcatatagctctattgcaccataagatcgaactttcttgataacaaaaggtctagaacatgtggatttcagcttaccagaaaacaacttccatcttgaattaaacagtagtacttcttggtcccatttgaattctctcttcacaacttcttatcgtgatacgtcttcacctattctttgataagtcatgaagattcatatgctggtaatcac

SEQ ID NO: 283918 - DNA, 579 bp, Glycine max
  unsure (1)..(579): unsure at all n locations
acactcaactccgcacatcacacaacntactcttntataatacatactatactactcacaatcggtaattaatagtaagaaatatacncaaannnnnnnnaaaaattacacatataaggagcancactcgncccgggaacacaaagcgactgcggcatcnagctnggcaaagcaacngagaaaagcagacgggtttattacttccgatgtcggtattgcgcttctagtcgaggccaatatatttcgacgacgacatcaaccaaaccataaagaacttgagggtcatgaccaaggcaacttaacaaccccacacgctaaaacaaggggaaatagaaagctgcactatgatgaagacgccaacaggaaaagataaaggccacaggcaaagcactacagaacaactattgtagtgaaagccccaaccactggaaagccacgaaacaaagcaatagtataaatcaacttaatggcatattaggccaacctgcttgaaccccacgtntacttatcttaaggtcaacgcacctaaaagaataggctttgtagtcaataacagatctctagcatatcaacaaaacc

SEQ ID NO: 283919 - DNA, 519 bp, Glycine max
  unsure (1)..(519): unsure at all n locations
gcatgggaggacgcattgagacctttgatgatgactatagcagcaccgcgcacaanagacgacgccagcatctagatttctcctgagcccgacacccatattctaaggattannctgaccatncgcaggagcggtcagcggtcaaattccaaccttgagggtctctatacaccatgcgccggcatccgacttacagctgagatgatatgaccatttcgagaggcgatagagatcggtttccaacgccgacagattcgatacaccatacaccgtcacacgacagacaagtgataagctatggacatttgagaaagacgagagcgtccacatttcaatcgtcagcgaatataattaccatggacccgaatccgacgtacgagtgaaaagtcatgagatttcgatactctagagcttccaatgttcactggctagcgtataaatatctcacgagtctggaatccgacagttcaagtgataacctatgaacacttgcatacttcacagcttccgatgtatacg

SEQ ID NO: 283920 - DNA, 540 bp, Glycine max
  unsure (1)..(540): unsure at all n locations
acaacgcacccaataagtctgtatgtacaactcgctctactataacttctagtagatatacatcataaactcatatcaatcatcaatacnnnnnntnnnttattgacatattagcgacttcactcgaccgggacctctaaagtcactgcaagatgcagcttttcctgagcttcaactntagccctacggtgtttctatgttgctcatgtgctctcctatctcaataacagccatctatgggcatacttctttgatgtttacaatcctttttgaatgcttgcacttaaacttgtagagtaaatcaatgtgacttgactgttgctgaaactcaccctaacattcctaagcgaaatgggcccccaaactgatgaccatttaagcctgctcagtaaatgtctgaaacaatggaaatacctttatttccactgtgtcccttttctaaaacaaacctgaagattaaaattttttaacatcaccacaaccctcatattcataacacttggttattgatatttaaaagattcctccccaaaaaaaaga

SEQ ID NO: 283921 - DNA, 414 bp, Glycine max
  unsure (1)..(414): unsure at all n locations
gttagccttcatcagcaagtaccaagaagaatantatctagccatggcccacgagcacaaagtggcgagtgaatatgctcgagtgtacgcggaaaatgaggctagaggaagggtgattaactcgttacatcgagaggcaatgatgtggatggatcgatttgcccttactttgaacgtgagtcaagaacttccccgattgctggccaaggccaaagcaatggcagacgcctactctgcccccaaggagatccacggactcctcaactattgtaagcatatgatagactaaatgggctatataattaacaaccgctagggagtttggattgtcactcagatcttgactagatataactttctgaataacatgagtttatgccgcttgtntacttccaaatcattgcgaatcaaatc

SEQ ID NO: 283922 - DNA, 101 bp, Glycine max
  unsure (1)..(101): unsure at all n locations
gtgtcttangactaacaatggcttggaattctattctacnaaacccaatgaattctgtaagggtgaagacattgcangacaacgtactgtacgttatactc

SEQ ID NO: 283923 - DNA, 450 bp, Glycine max
  unsure (1)..(450): unsure at all n locations
tctttganagaaaatggaggagaaagtattttaatagcatgtggacgtggaagaggacgtggtcgtggccaatgaagaggaggaagaggagatcgtgataattttgacaataatgaatggaggagccatcaatccactanaagttgtggaagaggaagagaaagaggtagaaacaattatgataaagcatatgaaaggaggtatgataaatctaatgttgaatgttttaattgtcataaatatggccattactcttgggagtgtagaacaaatgttgaagagaaggtcaatcttgttgatgataaagaagataaagaagttgaagagccagcactactactatcnacttataatggtgagaaggaagacaaatgcttatggtatcttgacaatggagcaagcaatcacatgtgtggatgcaaagagaaatntgtggaacttgatgagaat

SEQ ID NO: 283924 - DNA, 486 bp, Glycine max
gtgatgctctgatcactatcttccggcacctcagctcggactcgggatcctcagagtcacctgctgcatgcagcttgtcggaaaatgcaagagaaaatatctatgtgcatacttgattctaatggtaagctcttgctgcctcggaatatatatatatatatatatatacctatatatatatatctatatatctatatatacatatatattatcgcgacatcacatgtattggtccgggttatggagaaaatacaacgccaaccagataagaattcctcctcttcttcaatttttttcataaaagcttttgcaatgtcctttagagacaaaaggttgtcaacctccctagtcgctaaaaaaaaaaaaatctttatttttctgcacgaaactctacaaaaataacgcttgcctaaaaagtcgaatacatttctcaaagggagagtaatcttcttctccttgtaaaattactttcttccacaaacagcc

SEQ ID NO: 283925 - DNA, 208 bp, Glycine max
tggaaagtgtgggctgctgaatgccccaaagcagcatggtctcctccgcagcagatttctctcaaccaaccatggaccgaaccttaccatcgtaaggacccaacttcaccattggtgccactcgttgttgttggccatggagtcctcgctctctctgtctctcggattcaattgagtttataattagggtttaataatcaatttcctt

SEQ ID NO: 283926 - DNA, 230 bp, Glycine max
acctaaaccacaaatagaaatagtcgtagctaatgaccctctgccaagttaacatctataaaaataagacttggcctatgctgtgagcacacaataacttttttcttcaaaagtcttatggctgctatcggaagcgactggcaaaaatttattacaccaagtaagtacttatctggccataaaccccttgagacagtcacaaaaataatgatgacggaaaaaaaactaca

SEQ ID NO: 283927 - DNA, 429 bp, Glycine max
  unsure (1)..(429): unsure at all n locations
ttattgatnntagttttgccggcganaggatcanagtgggtcttagaagagacaaatttgattatcctgctttgatgaatagaaagccttgggaaaatggagagaatgagaaagatggaggaacccatgctgtgactgccgtttctacatggccaaatttcccaccagctcaacaatatcaaatactcagctaatatcaacccttctcattacccaccaccctatcaaccaagaacactcaatcatccgcaaaggccacccctaaatcagccacaaagcctgcctgccgcacatccgataccaaacaccaccctgaacacaaatcanaacactaaccagggaaggaattttccagaaaagaagcttgtagaattcaccccaattccaatgtcgtatgctaacttactcccatatctactcaataatgca

SEQ ID NO: 283928 - DNA, 229 bp, Glycine max
ctgaataagatcatttacaaatatgtcttctacttaagtgctacttataatactacttaggaaatcatatcatatattttatcaagatatacacacctgtcctattatatgacaattctgctcctactttataataactatacgtaaaattatacttagacatataacgcttgtcctatttgtttttaaaactaaaacccataccaatttgtccaagtaaaaatgtcaa

SEQ ID NO: 283929 - DNA, 401 bp, Glycine max
  unsure (1)..(401): unsure at all n locations
tctacaactggcaaactaagaaactcgtcatcagccgagatgttgaagttgatgagtacgcttcttggaattgggatgaagaaaaagtggagaagaacgttcttatacccgctcaactaccctcagaagaagctgaggaagaagacccaggtgaaccaccttcaccttcaccacaacaacaagatcaagaactatcatcaccaaagtctactccaagacgagtaagatctttggtggacatatatgaaacctgtaacttggccatacttgaacctggaagctttgaagaagcgtcaaagaatgaagtatgggtctagggcaatggagaagagatacagatgatcganggaaacaacacatgggangtagtaaatcgtccccatgaanaagatatcattggg

SEQ ID NO: 283930 - DNA, 317 bp, Glycine max
ctgccggtcttagcactgcggctactttggaacctgctggcttaattttttaaccaactgctggaatttactcgtttttaccgtgattctgaattgattgtgtaacgttagtccaccttcccgtggattggaatatattgtgagggaaaggattctaaatatcagtgagttaattctctcgctttgcgttgaattttcgacatcgagatattgagattaagaatgtaaatgtctattattgatgtgataagatgacattaaagaattgattgattcctttctgcttttagcttatttattaaaatattctatgaatg

SEQ ID NO: 283931 - DNA, 459 bp, Glycine max
  unsure (1)..(459): unsure at all n locations
gtatgaatcatttcaattatctctgctaaacgtcgatgttttacangaagttccctggaattatccatttcaaaatgaagttttcaacttttttattggcatatagaattttctggtcaagcaaagaacttgtgcccatgcctgtgcctgtgtttatatgcacacacacacctgtgtgtgtgtgtgcgcgcgcgcgcgtgcatgcgcgcnagagagagagagagagagagagaattctgtgcttacttcaagccaagtaactctgcagtcgcccttgacaccaagaacaccagagctggtctcatcctcttcccaccagcactaaaaatctgctcagctgcagacatcaaaacaggattntctgctccaacaatctatcaaagaatcttcatcagatacattaaaagttaggcaacanaaatctagtcatcaccgtttgcaaagcanaagaatctaaaa

SEQ ID NO: 283932 - DNA, 69 bp, Glycine max
ctaatcttctttcttgttcatcatcaagtaattttttttgtgcttttctttttttgagccttttttttt

SEQ ID NO: 283933 - DNA, 232 bp, Glycine max
atgaaactcaaggggattctggtgaaaatgatggagatcagatcgctccttttgctaggcagctcacgaacacaccagctaaaaagcttattaggaagcacaccaagaagttgcagtctaaagcacaaaaagggttgctctaaagtcacttccatgttattggtttttgactacttaattcattatgatttgtgaataaattttaattatttggataagattaaaaaattag

SEQ ID NO: 283934 - DNA, 460 bp, Glycine max
  unsure (1)..(460): unsure at all n locations
tgtgcacatattgcgactcactcggtcccgggatctcttagtcacctggaggctgcagcctgtgcttcatattctgggaaggtggccttatggtctctatgactggacctatacatttgctggccaaggttcattgtcctgcaagtgagatcctcttatagtgaatatttttacttcaagcttttaattattacatgtnccgatataattacacatccaacaccattacatgttatacccaatatatatatatattttatattagccagaactatatgaatatcttcactcttgcaaacggttaccattaatatctcgatgataatgtttacattattactggccctgaagaaacctctacgatcattatttgcggggaatccgtaccatttaatgccattataacgttaactttttttgccctgaaggaccttattttaattattacgctgaatcgttc

SEQ ID NO: 283935 - DNA, 325 bp, Glycine max
  unsure (1)..(325): unsure at all n locations
agtgggaaatgatagtgagactcaacttgtataccaacctttgtgctacaacaatggtagccagacctagtattcataatgagagaaaattttntggttaaaaccttgcatcttgtatgaaagatggtctctctttaagtttgggttaaggcacaagatttacttgttggatcgagtggcctcagaacaattaagaaggggggggtaaattaattattcttaaacctttactaattaaaaattactcttttaaggcttttactaaattggtaagagaatgaggactanaagagaaacttaacagaaagtaaaagcagaaattaaa

SEQ ID NO: 283936 - DNA, 273 bp, Glycine max
  unsure (1)..(273): unsure at all n locations
ttgaaggccatttctctctttgcaacgtactngctgttaatctgtctctatctcataaacccactcttccctaccaatctcctatcactcttcttccttaattttcactcatctaattactatttctgacgacaccctatcctatctcactattcttggtattcttctcttcctcttctcctctcgagccctctttcctcctaattgcagtgcgaccaattgtaaagctacttggatagtcaaccttcactcaactcgaccctaaaaaaaaaa

SEQ ID NO: 283937 - DNA, 306 bp, Glycine max
gaaagctaacaccatccattagacctacctctggtggtccacaaatcactaattataccagaaccaaccgacattctggttcaaacagatcataaaggccaaaagaccaaccaagacatgcaatggccaaaaacagcagaggcagtatcatactatcatcaattacactcgaagaaattcacagaagacccacatattcagatccaaactttacacgactaagaaagagatcaacctttgcaacccaaccatgtcaagatctaaccaataccaactcaaattataaaaaaataaaaaaaaccaaga

SEQ ID NO: 283938 - DNA, 421 bp, Glycine max
  unsure (1)..(421): unsure at all n locations
tgacnccttgcattgctctggttatttnntaatatatatatatatatatatatacggatatatatatatatatatatatatatatatatatatatatatatacataantttatatttatttattcataaataaaaaccatagtctttaatattttattctatcgtgaaatatattcatatatttatgagagaaggcgataatcatatttttattcgaggtattttatcttaaagagtgaggatatcacatgtttcttggaacgttttactcgctccagcaataatggggtgcaccatctctggaaaaataatcttctctaaaaaactatccctcttaatgatttctggggggacccaccttcatattcaactggaaaaaatttcatttttatgacccaggtcttttaactataagccgtcg

SEQ ID NO: 283939 - DNA, 299 bp, Glycine max
tacatagttttttggttgtgcatgaatgggctcaaaacaaatcattttcaaagaaggtgcattttttaatcgacctcatttgtttgagggtgaacattcttctttttggaaaaaaaaaatgaattttttttaaacaaattatcccagtgcatggaatgccactattaaaggtcctttcattcctataaacaaataaatggtgaattagtacctaaagaatgggatgaaatgaatgatgactagaaaataaaagtgccaaatgatcaaaaagctaaaaacatttaaacttctggtttatc

SEQ ID NO: 283940 - DNA, 341 bp, Glycine max
tgtccttttggcactcactcgtccgggatcttaagcactgagctgcactgtgattgcttacgagaagacttgtggttaaaaagcaatcgactctgcttgtaatgcaaaaaaaactaggaatgaaagggaaagtggaaccatgcggatgcatcttcaccagttcccccccacatgtatactacataacacctctctaccccgcctttgacaagcttctaatacccagatgtcccattcatgcacatactaccatcaaacctccagaagatttgccaaaaaactggatacccatccggcctttactgtctgccccatagatgggccaacctgttgtctattct

SEQ ID NO: 283941 - DNA, 316 bp, Glycine max
  unsure (1)..(316): unsure at all n locations
gacttttccatatacacctgaacaatatggtacacctgaaagaaagcatagacattggacaaaaactggtctcactcttgtggcttcagcttctctttcttgaaatttttggggagagtcattcaacactgcagctactataatcaattatcttccttcacctgcccttaacaatatgagtccttttgaaaaattgtttcataaanaaccagattataaagtcttgagagtgtttggatgtgtntgtatcctctattacgaccttattaataacacaaacttgactttcggcacacatgtgcctattcattggtat

SEQ ID NO: 283942 - DNA, 203 bp, Glycine max
cttttgcatcactcgccggatcttatcacgcgctcactacatccaccaccggctatcttttaaacgtatggctaaagcactctgcgtcacaatatagacaagacccaacaggagctgttggggttgcactggaacttatgtatatggatatgcttgtatcatacaagtggtatcatacaggctaaggaacttacttaatgctt

SEQ ID NO: 283943 - DNA, 405 bp, Glycine max
  unsure (1)..(405): unsure at all n locations
atggcttattccctaatggatggcgcctcctttcacctcttctcctttggcttccgctgcatctccatggtgaaaaatctccattaaaggacctcatttgaactcaaagatccagccttcatagaagccccacaagcaagcttccatcacattcctacacgggcaaatttcccatcagcccaacaatgtcattactcaaccaataacagtccctctcacccaatcatccataaaagccatccccaaattaaccacaaggcatgcctgcttaccaaatgcacaatgcccaaacaccacctatagcgcaaaccaaaaaggaattttgtagcanaaaacttgtatgattcaccccanattccggtgtcatatgctaacttgctcccatatctacttgataatgcaatg

SEQ ID NO: 283944 - DNA, 750 bp, Glycine max
  unsure (1)..(750): unsure at all n locations
acgcacaccactgccaccacgaaccnaccacctaacgtgacactcncacagctacacgcaccacgacgacgaacgacaccatataacannnnnnnnnnnnggtgtgaccgatctagcaacgcnaacnnnnannngnngatacatgcacaccacaagctgcatgcacgccgcgaagcatggtagagcnacgcagactccatatatgcttgtgctttctacacacccgcgaacaacccacacccggcggcgcgcgcgcgcgaacgcantacaacaggacccccacgccancacagacaangcaccccacactacacacaacaagagaggngcgacgaccacgacacacacgcacactcgtcgactcacgatgcacaccgcacgacaacactatctatatcgcgcacaccaacacatatcactactactgtggcacagaccgggngaaccacacactcctatgcctcggcacacacaacactacgccggacctccgcgcgcacccacacgcagtaatgcacgccgccaacgaacccgataggcaacgacgccgaatcaccgaaccgctgcttacacgctcggatcacccgcgcgcgagacacacacctancacgagagacaagcccggctaacccacacaaaacataccgacgaggcgtgaacagaccgcggcagacgacttactgcacactccactctagctacccacaatgcagcaacggggcccacaccgagcacgcccacacggagccg

SEQ ID NO: 283945 - DNA, 426 bp, Glycine max
  unsure (1)..(426): unsure at all n locations
accattaattgtgccctgctgtgaaaatattttctctttgtgtgtcgtccagtggctgcatctgactttccaagaaccttcttaccattagcatgtcaccttgcatggcttnnctctcaagctcttttttcacgtcttcttcttcactaatttcagaataactggtgactttccatggggaccggacgaagttgcttctttcttcctggagctgtnggtccattctagtngaaattggtggatgaattcctttgtgctgcaactttcctcttcacctgctgttcacccggactgtctatgcagcangcatccaattcacgtcttntgtattcaacatatctctatggaggattagacattaaaaaagagccttgtgcctcacttctttcttgtggtctactaagcctcccattattgagactctcc

SEQ ID NO: 283946 - DNA, 389 bp, Glycine max
  unsure (1)..(389): unsure at all n locations
tgacatgaggaagtgttgaagggtgaaacttcctgcttntattgttgaccacagagtggtacctggagatatgtcgcgggggtcaggagaccttggggacatcatgtggggtgctattgcccaaaaccaagcttgaccaatcccgacccaacccgggcatagtcggtcagtgagaacctgtgatgtacctaagcaggcgagctcctggcagtcaacagataaaaggaacaaagaccacaaagcaaggaggcttgtggtggctggccagctgtgaaacttgattgatatgtgagatgtgggctctggtaatcgattaccaagggtgggtaatcgattacagagcttaaaaatgaagacaggaggctgagatggtctctgtaatcgattac

SEQ ID NO: 283947 - DNA, 105 bp, Glycine max
  unsure (1)..(105): unsure at all n locations
cgagtaattactctatattagtggtagttagttagttactttcatttgtacaaacagaatatagtacttattgtgcaagcttcctcntttctctctttttctctc

SEQ ID NO: 283948 - DNA, 421 bp, Glycine max
  unsure (1)..(421): unsure at all n locations
tcttccctttcccatgaccggcattgtcaaagatcctacacatgttggtcaggtgtacaaagttatggataccatgacaattcaccatcatcttcacttctagttggaggccattgataaacttcacacatttagacctctccctagcttccccctgataatgaggaaaataccttaccaggttctcaaacctagctgcatactctgccaccgacatgctcccctctttcgactctaagaactccatctctttcctatntttcacgtcttctggaaaatacttctctagaaaagtgtgtctgaaagtccccgatgggacaatagcaccacctgctccctccaaacgtggacgagtgttctcccaccagtactctgcctcatctgccagcatgtgattagaaaacaacacctttttctagtc

SEQ ID NO: 283949 - DNA, 413 bp, Glycine max
  unsure (1)..(413): unsure at all n locations
nngttcacgaagccatcgtcaatatgctcattttggtatttcttactgggttattatgcatggaattcatctcttagaagaatatgaattcagagaagcttgatttcttctagtgtaccggcccttggtctctggtacctaagtttgctacgaatagcacaggtgaagccacatattgccngagaacattgngaaaagttcctcggccaacatacatatttaaatttattcctatataaaataagactcatacgtnttattttcttcctatttcttaaacttttctcactttttttttttattttaccctcagatcaattaaatgataatacctgctgactcactctgaggagttaaactatgatttatccgacccaccactaccagtccaggttcacaaacctttcttgtgg

SEQ ID NO: 283950 - DNA, 412 bp, Glycine max
  unsure (1)..(412): unsure at all n locations
taatcttcatgatataccaagaacaagacatactggaatattggtganaaataaaatcataatctaaaagccttatggaactaacctctgaagcaggactaaaatgtgtcccagtacttgggaaacaatctctacatctgatttatcaacttggctgcctatgactgtatacatgaaaaaagtgattgaaaggtttagcaaatgtatttattctattaatcaatacacagcatanagcaaaataaatntgtttataatttaaccaaacatagaaggtacaattagaatagtggatcaaatggaggacagcctgataatattgttcaccacaagaaatttcattgcaagattattggaatcaaataaatcaactcatagttntaactataacagctaacaaggtcaaaatact

SEQ ID NO: 283951 - DNA, 421 bp, Glycine max
  unsure (1)..(421): unsure at all n locations
gtgcactttgcactcactcgaccgggatcttagagcactgcagcttcagccttacaatggatggttttggcatggaaaatcttatttcttatatataacctattagaataatgatgatacaatgttttgacactatatatttgtntgcattttaattttgttccactaatggaagttgatgtccttcacattaatgtcaccattgaagagcccatgttgctctatgtcgtgctcatttgacttttctaattatgtgatcttgatgccttcaagaattatatatatttttatgtaaaagtggtttttggatcctttgaccattatgactttactctaatgtgtcatattagctaataactaaccatgactgtggatatgagcgtttatgtttttttagcactatctttgtaattatcaaata

SEQ ID NO: 283952 - DNA, 427 bp, Glycine max
  unsure (1)..(427): unsure at all n locations
tattcaaaatacagggcatcctagccttatataagcagatgtttaaacagaananaaaataacagaataaactttcatatggattntagtcacagcccaacaattcaccaccttgaactaacattcatataagacacaaactgcaccctccaagcatacacgaactcaaccctaacaatcaacattgagcaagcttaagcagtgatcaaacttgctctttggaactggctttgtgaacatatcagcaagattgtgcagagtgttgatcttatgaactttgattcttctttctgaccgaatgaagtgatatctaacatctatatgcttggttctatcatgataaacctgatccttggccaagcatatagcactaaggctatcacagtagatgttagcatattcttgattaattccgagatcatttatt

SEQ ID NO: 283953 - DNA, 273 bp, Glycine max
actggtttaagtgggccagattctaagagggggggggtgatagatatcgaacttttccctattaaatcattactttattagttgattcctatgcatctttaatttaatcaatgggcacttgattgatttagatataatagggataggaagaatgactcgttatcggtcgccacctggctcgtcgccacaccgtgaagtcctctgaatcttcagttaaccagcccctctggtgaatttcaagaatcgcctatcttagaggagaaagacactttg

SEQ ID NO: 283954 - DNA, 397 bp, Glycine max
  unsure (1)..(397): unsure at all n locations
ntgatttcctttgttccggaaacctttcttttctcatgtgcttccaaacccaatctccgggttcgaagacaaccttctttctccctttgttggcttggttagcatagcttttatttttcctctcaatttgatctttgactctctcatgaagcttcttcacatagtccgcctttgcttgaccttctttatgcttaaaaacagaaacattaggcataggcaaaagatcaagaggagttagtgggttaaaaccataaacaacttcaaaaggagaacaattagtggtgctatgaacagctctattgtaagcaaattcaacatggggtaaacaagcttcccaagtttttaagttcttcctcaaaactgtcctaagcaaagttcccaaagtcctattaacaac

SEQ ID NO: 283955 - DNA, 469 bp, Glycine max
  unsure (1)..(469): unsure at all n locations
gtctacttgaactcactcgtctcggtcttnagcaccgagctgcactgtgctccgccactatcatcacaaagttgtttgacctatgggcggggcacatgatctacagcttggtgcatggacaagactatgaacatccatgcagcttgggtgatgaagttgaccatatattcatggatctaccgtncaagcaatctacaactttcaaaagatgccacttcaccgagataatggcgacccgtgatgttgttatttgttattcatacaggttctggtcccacttctctcaactatgcacaacctcccaccaccgtactcgtgatacagtggacacatgattggccatccatagaatcttttgttaatgctacggcctnagaantagcaattcttgcttctttcacaaacaatcccacttaatcttatactactgttgccttttgcaacattcacacttcaatgttttgttggg

SEQ ID NO: 283956 - DNA, 415 bp, Glycine max
  unsure (1)..(415): unsure at all n locations
tgactgcgcttagaatatccaaagaaaattccttcatctgtttttcatcaaattttcctaagtcttcttttccattgtttattacaaaacatttgctaccaaaaacatgaagatgtgaaatgtttggttttcaaccattgaacaatttatatggggttttctttaaaatgggtcttattaaagccctattcatgatatagcatgcagtattaacggcttcagctcaaaaatattttggaagaggggtatcatttaataaggttctagcaatttcttccaaagacctatnttttctttcaataactccattttgttgaagggttctatgtgcagaanagttatgttcaatgccatgcttttcacaagataaatcatattctttattttcaaactcacccccatgatcactcctaat

SEQ ID NO: 283957 - DNA, 475 bp, Glycine max
  unsure (1)..(475): unsure at all n locations
gtcgcctttgaactcactcgtacccgatctctgactcacctgcnnggcatgcagcttctnnggtaatggtaccaataccaataccaattttccattntaaataggatatctggtaatattaaatattggatattagtattattggtattacccatgttcatagactattggttttcattgagaatggtcaatctggttccttggggaatttgtgaattatttcttttgtgataattgacacttggctgggcttaatttttgactatggactacaccctgtggttagtgatagtaagacttgaggaacatttgagaatcagaatcttagttttttttaatgattgttgtgtaggtcattgctattgatgtagacctgacttcctataaataagttttttttttttaatattgtgtngctatatataataatattattattacttataggttctgcgactgtgactgtacatctaat

SEQ ID NO: 283958 - DNA, 458 bp, Glycine max
ctgtccgatgcagcagtaatgatggcccgagttatgtttgggaaccgttaccaacccggaatgggtttaggcaaatactaccgcggcataactagcctgattaatgcccaaggaaatcgtgggaaatattggttaggctataaacccactcacgccgatataaagaaaaaccttccgggaaaaaaaaaccgtggtcaaaactcgccggtgagacaagaaagtgaaggaagcccgccctggcacataagtagaagcttgataagcgcgggtctgggagacgaagggtcagtggtcgcgatatacgaagatgatgttccgagtacatttgatttggtacgaccattgccctctgatttccagcttggaaatttgcgagtggaggaacgccccggcatttactcaacgagcataatgtaacctttacggtttaaaagctctatagttgacctaagcttaag

SEQ ID NO: 283959 - DNA, 196 bp, Glycine max
atagacttcaatgccccaaactatgtgtatgtaatgtcaacaatttaaattgctctttatactcctcacacttcacgcaattcaccaactttcagacactactggaaatatataacatgaggtacttaaacttgtgaccagccaagacaatgtacactagaatatctggtaagcttgctacctatatacccaccta

SEQ ID NO: 283960 - DNA, 330 bp, Glycine max
aaaacgacttatgtggggatctctctgaaaccatttcagaaaattaaatacattcttactcatttcttatgtgagcacataaatgaattatgaagttttatttatttttgttacctattaacaaaattgtccacttgatatagcttcagcaagaccgcttctatttttttagttttttaaatagtgccttttgtgagaaagtggaaaatgatcttgtttttatcccaatgaagcgtgggtatagcaataaatatagctgctctaagtactctatggagagagtgtggctgtcatacaacaacaacgccttatcattttctatatttcttt

SEQ ID NO: 283961 - DNA, 421 bp, Glycine max
  unsure (1)..(421): unsure at all n locations
agccanatagacttacctngactnanntnnctttgatagcccttttgagccctggtntncctttccttngttttgaagctcactacangccttaagtganaaccatgatatcaccatatccttaanggaatttggagctttggaattgttttggaataagttgtggggtttntgttcattggatacatgntttgtggccatgcttcatgaatatttnancnctacttgatgacatccatattggtaaatgttgacatgctaatatgaatgtgttctcaanggtacagagtacananaaaattattataaaaaaaatcgaaaagaaaaaanacagtaaagtgagtgataagatctaatgacaataatgatagactcttgtctatcttatgttaaaaatacctacttctttatatctaagctc

SEQ ID NO: 283962 - DNA, 393 bp, Glycine max
  unsure (1)..(393): unsure at all n locations
agatgatgacaaaagagctcataagtcaagaacacttcatgataacaaagatgatgatctcaagaatcaaagaatgagttcaagattgaatcaagaacacttcaaggttcaaaaggaaatttgatttcaagaatcaagaatcaagtttcaagattcaagttccaagaatcaagatcaagattcaagaatcaagagaagactcaatcaagataagtattaacaagtgttttcaaaaactgagcagcacatgaatttttctcaaaaccttttaccaaagagtntttactctctagtaatcgattaccagattattggaatcaattaccagtagcaaaatggttttcaaaaatgacctttacgacggtgaaatcgtaaaaccatactcggatgact

SEQ ID NO: 283963 - DNA, 439 bp, Glycine max
  unsure (1)..(439): unsure at all n locations
agctaaaagcaagtatctcagtattttgatggctctactatgcgcaccctaacgaattggtgggacacccaacaatttcgtatttttccatttgcctttcgtatgagatgaatcgacacgaatcatcttgatccatatgagatgatctatataagtctaattcaaggttntttttggtgtttctaataattgggacgaattaatttaaaattaatgggcccaacaaaaatcacacctactttcaagttattagcccaacgctctacccactgagctaatgagtcattacattataacaataaatatggtggtatacataacaacttaaattctaatgttatttatgggcatgtaatttaaataataatttttggcaataattttgtataactcatcaattattaatctggttatgtttaaaaataaaaaaattactatt

SEQ ID NO: 283964 - DNA, 503 bp, Glycine max
  unsure (1)..(503): unsure at all n locations
cccccattgacnccatttgatagactcgctagctattacgcgaccattgaatacctagctntagcctgatcgttaagcgatagctcaagtcatggctaagcgtgatctattggcaacaagcacaatttcttaccaccattattgaagtctacgacgcttagctccaggctggcagcttaaccagattcattacaggcatgtgagcgctaagtgagtgcctcttaactaagcacatgctgctctgtactaaaatgccttattctaactaaactggccagagccaggcttagtgagaagtgcaacattttctaatctgcagaccttgctaagcggactcaccctcgcgctatactgagtttctgtcaataaaaaatgatgttgaatttgaaacgtcagctaatcgcgcggattcgctaagcacaggtcttgagaaacaaacgtacttctgcttagcagacatttcgctagtgcaagtgtcaaaatcgcttggtaagtgaacttcg

SEQ ID NO: 283965 - DNA, 497 bp, Glycine max
  unsure (1)..(497): unsure at all n locations
tgatgctcatatttangcngactcagctcgtacncgggatactctaagtcacnctgaggcatgcangctngcttctacagtagagacactcatgtatctgcttctgtccatggngggtggcccgccgcttgtgaactaaatgctgtatataccacttcacacccaatggccaacccaattaactttgcccaaagtgggcagtggtgcggcccgccgtnctaattgtgcgtcaaccttgcgcctgctaagaagtgaatacttcttcatgaaaagctcggtgatcagccgtcggattaccttgcttggggtgacaagaactcttatacttgcagaggcccttgatantgccggaaccccaggccctgtggactttctgggctataggagcctatatgcccattcttcaacaataaatggctagcattcactagcacgtgaagttattctttagatggatcaccaatgccttagcacggaggcggattgagtgccacaag

SEQ ID NO: 283966 - DNA, 366 bp, Glycine max
ttctggttgttcctggtgccgagatgatggtacagcgggtgaaccaagggctgaagtttcttttggtgaggtagccatggaaaagcagagcgtttggaatggtttatccaatttctgagaactgttgggggatgctgaaaacgagattatcacgaatatataaatttgaatgaggaatgtaaagggccgtgtgaaacaacggtcgaatttgctttggttcagtagtgaacgtgctattaatgttatgtgattcgtttgggcacgttcagatatcagtagttgctacaatttctctagcagaacaatgcccaacttgccccttcagttttcaaactggtttgcatccaatgcctttgtgaaaatatc

SEQ ID NO: 283967 - DNA, 314 bp, Glycine max
tcaacccttatattttacggcacctatactaagttttgtattgaggctagtttgtaatttacatgcattaagtgaatatttgatgtgttgctggaaataatttattgattgggaacccatcattatttaagggaggacttgtggtccccatgcaatattataccttggctgctatgctaatgcctacaactagccacctatgagaatcttgacttgatcttgattatgtgctaacatttttaaattaagtattataatattgaattttggtcaaaattggctttcaatttatttcaaattcagtgaaatttaat

SEQ ID NO: 283968 - DNA, 420 bp, Glycine max
  unsure (1)..(420): unsure at all n locations
ctctcttggtggtgaagcttcttcttccatggcttattctctagtggatggtgtcttctctcacctcttctcctttatcttctgctataattccatgggtgaaaatcaccattgaagaacctcattgaaactcaaagatccaacctccatagaagcttcttaagcaagcttccatcagtaggcttatttggctagtggctaaaagaaaaaagggctaaatcatctcaataaatgcatgtgccacaaggaatgacaagaaaagcaaggaataacctagagtaatctagcacgagggtgaaatcacacattatagaacatgaatggtataatgcnatccatcctacaaatccccaaaaactcacaaggaagttattcatcacacatgatccaccctcacaatttcaagcttatttatcactt

SEQ ID NO: 283969 - DNA, 418 bp, Glycine max
  unsure (1)..(418): unsure at all n locations
ntgcattgcangcttgtctgnnncgcgattgacanangggtgcattattactatgttagtctctacnggctatcaggctctttgtcttacagacagcaaaaaagaatggttattaccggatacccactcnggtattctccgcccgtcagcgtgtctccaatgtcagtatgacagatcttggagcgcaaaatgacgtaattcccgtggcacagcttgtcggcgcgatgacaaaagcgccaagagatgcagtcttccatgcttcagcatttgtctacagacgcaaaangaatgttttcggataccctcggtttctccccctcacgtgctaaatgcatataccatctgtgacgcgaaatacctaatctcacttgacggcttgcggcccatgacaaggcccaaaacaatgcttttcatgttt

SEQ ID NO: 283970 - DNA, 407 bp, Glycine max
  unsure (1)..(407): unsure at all n locations
tggcagtattacaaatctcaatatacgtagccaagtgtgagtatggatcnttcattggtaaaccatgaaacaaattgctctgtattagctatatcaataaaggtgggtaagttaagttttgtgcttgaacctctagccgtgtaacacttgagaaatattgcagcaccgaagtacttgagtaatcttccaaggtcactcatcgaggttgctcttcagtcatgacattggcttcaaattctgctgtttgagattccctggatatatgtgaattagaagatgatgacacacaaaagtgagcgtcttcaaagattgatgcaactagtttgtcgtgcacaaactatctttttctctctgtgttggttcttctaaaagtggcttcaatttctaaatccaatgaaaccaattca

SEQ ID NO: 283971 - DNA, 132 bp, Glycine max
tcagctcgaccgggtccttagcaccgagctgcgctttcaccgtatgggatgagatcacctgtgggacacaatggggaccgaacaactacgtctttttaacaaacctttgaacggctacaaactgggcggaaa

SEQ ID NO: 283972 - DNA, 101 bp, Glycine max
gccacccatcaaatgtgagtttgtcacacaaccattcccggagggtgagggatgatgtgtcttcatgcaccggaagcgaaagcttgagacacaaatcaaca

SEQ ID NO: 283973 - DNA, 428 bp, Glycine max
attgtcgatcacattggcactcactcgaccgggatcctaagcacctgggctgcaactttatctacgcaatgaagtgtgtcaattattgagataaatttactctaagctataacatcagggaaacataactttcttaagaccacaatgactacacctattgatccttaatggatcacaaaacactcctaagtatttcctattctggtatgtgcacataaccattaaacaatactccatatctaattctaaatccatcttgatctcttattcacttgtgcagcttctgttattaagttatgagataaataatgataaaaaattgaaagactctctaaaaacactcactatgaataataagagtaattggtaaaaaacaaatatttgtgattgttaaaaaacttattaccccaaaatcaataattagtaaa

SEQ ID NO: 283974 - DNA, 409 bp, Glycine max
  unsure (1)..(409): unsure at all n locations
ctttaccaacaacttcaccatanaaaatgcataagaacacattctcttccttttcaattggaattttctttgtttgcttcttccccataaaccacatttaaccaggttatacaataataacatcgatttgaagatacctactctccaaattacaccctaaacctgatatgaaacgttagtatcaaaagactagtagtaactcctactgtatggatatcacatcccaaaactgatcctgcttttggaaaataatatgcatgattaacaaatagtaattccctcatatacattcaaagggatattatactatggaaaaatattgatttagtatcctgcttttggataataatattcttatacatccaacccttcatctgaattatcacttatcagccatcttagttcagtt

SEQ ID NO: 283975 - DNA, 497 bp, Glycine max
  unsure (1)..(497): unsure at all n locations
ttgcatataagcactcactcgtaccgggatctcaagtcactgcagcttcaacctgcgagaaccatattgatcaatgatggattatctcttggtaaaattgacgatgatacatgtgttcagcttatatactatcaactgttgatgcccatcttactaacaaacaatacaattaaactggtactggttctcactcgcattacagagaacaagctgtgcataactaaattgatatgctgagaatatcctccagagatataattatgtgtcaatcattgatcttttgggggggtgtgttgctgaacacaacaatcactctggcctcacngacacatatcatttcttgcaggcagagataaaattcatcacaggcaacgggtctaaatgaattgcaagcattccaccacatgaacatgattttcacacttatattgtgagacagatgctactttttgcctataaaaacatcccatttggtatcaaaacttattacgactatn

SEQ ID NO: 283976 - DNA, 358 bp, Glycine max
atgatggtgaactatcttcttcatacatttctgaaaatttacatctgtccttttccggcgttattgcctgagaattaagaaaataattaccactctcaataatttgatcagctaactttaatttaaaaaaatctaactgcgtgtttcttgttttttaaaatcttgaaatcaagaattaaaaataataatcatccactcatccttttttaaaaatgaaacagacaaaaaattgactggagaaagtgttatatatctaaatccgctgacgaaatttgactaaaaattaaacagacctgatcaacgtcaattaacggctggccacctttcttctttcttcacatgattagattagagagag

SEQ ID NO: 283977 - DNA, 395 bp, Glycine max
  unsure (1)..(395): unsure at all n locations
ttgcttttgactccctgccggtcttaatcactgagctgcagcttgcccatttctacacggttttggcataattatacgaaaagcccctttcattcaggggtcgttcttaattttcacctcctccaggggtttgtactaattaaccatttctgggtaattacatactgcttcttaagctttggggccccaaattggcatgggcatttggctttttatactttcctacccacttatgataatctgctattcacataagggctctttatgcttttttcagttttgttctaaaccgatcaaatcaactatttccttgtgctaaatggttcaataaacgatttttttgatatgttcttactacatgcactttatattatttttggaacatttgcacaaan

SEQ ID NO: 283978 - DNA, 443 bp, Glycine max
  unsure (1)..(443): unsure at all n locations
tctacttatgtggcagggcgggcttccttcactntcttgtcttcaacgcgagctctgaccactgttctcccttcccgcgatggctcttttcatgtccgcctgagtgggcttatagcctaaaccatacttcccacgatttccttgggtttttatcaagctagttatgccgccattgtctttgcctaaacccatcccgggttcataaccgttccccaacataactcgggccatcattaccgccgcatcggacagacaaggttgcccaaagagggagtccacggaggaaatgctgaccacctcaaaagactggaaagcggtttctaacgattcttctgcggcttccacataaggcatggaggatgggcagcttaccaagatatcttcctcgcctgacacgatgaccaagtgcccctccactacgaatttcagctnttggtggagtg

SEQ ID NO: 283979 - DNA, 518 bp, Glycine max
  unsure (1)..(518): unsure at all n locations
ttgctcatatggcgactcagctcgtaccgngatccttnagtcacctgcggcttgaagcttccaatgtttcagccttggaatatatttattgaaatatcatatanggatagatataaggagtgtcttatggacctaccatggcttggaattctattctatcaaacccaatgaattcttgtaaggtgaagacattgcaagacacctactgtccttatactctgccgcagaatagagttgttgaaagaatgaaccaaaacttggtattcaattcanggtcgaataannatttctanggtgaagtggtaacacatgttatctcgtgaatcggtcatcgtccactggcatagatttcaagatacctattgaaggattgtctaaccaaccttgtgaatactcatagctgaagtgtttgagtgtccaccataatatcatgtatgagaaagtaagctggaaccctaaagccaaaaaagtgtcttattgcctattgaaaggagtcaaagattataatctggtgccct

SEQ ID NO: 283980 - DNA, 445 bp, Glycine max
  unsure (1)..(445): unsure at all n locations
tctttgacatataatggacgagaaagtagtcaaaaagcatgttgacgtggaagatgacgtggtcgtggccaaggaagattatgaagaggagatcgtgataattntgacaataatgaatggaggagccatcaatccactagaagttgtggaagaggaagagaaagaggtagaaacaattatgaaaaagcatatgaaaggaggtatgataaatctaatgttgaatgttttaattgtcataaatatggccattactcttgggagtgtagaacaaatgttgaagagaatgtcaatcttgttgatgataaagaagataaagaagttgaagagccagcactactactatcacttaataatggtgagaaagaagacaaatgcttatggtatcttgactatggagcaagcaatcacatgtgtggatgcaaagagaaatttgtggaacttgatg

SEQ ID NO: 283981 - DNA, 87 bp, Glycine max
ttcaccacttcgctatctgttggggagttgtgcttggtaggctaagacgttgagagactgctctaagcagtgtgtaattagtctgga

SEQ ID NO: 283982 - DNA, 210 bp, Glycine max
ttgttcttttataaaatgagaagttctgaactcatcatgttatctaagaaaaccttggggaggatccaagtgctccgatcatccatttgcatactcatggtttgggggcatactcacccgtggttatttctttaggaatttcattcataactaaaaaaacaccaaggcacccctataacactccatccaaaaaaatggataatgaaaaag

SEQ ID NO: 283983 - DNA, 195 bp, Glycine max
tggcactcactcgtccgggatccttaagtcactgcggatgcgctgaaagattaaatctgtggattctgatcctgcaatgtatgttcttaatggaaatcttgtgaccgttctggatatcttgggatggccaagaagtccacatgcaaaaccatggaaattgaatggtggctgaattatacctgatgctgacgtttt

SEQ ID NO: 283984 - DNA, 364 bp, Glycine max
  unsure (1)..(364): unsure at all n locations
ntagccttaagttgttctatgttgcttatgttgttgctccccctatctctaatagtttgagacctcagacaaagatgattcttgatggctcagcaagaggtactattatgtctaagagccctaaggaagaaattgtaatcattgactctatagaagccactgattatcagagtcaccatgatagggctctggttcaaaggaaagttataatggagccagatactcagaatgtaattctagcttagaataaactcttgactcaacaaatagaagccttaacaaaacaaataggccaacttccttaataatttgagtagggtggatcacagaanacataccaagctcatcaagtacaaaaagttct

SEQ ID NO: 283985 - DNA, 499 bp, Glycine max
  unsure (1)..(499): unsure at all n locations
atatgcacacctcagacactactncagctcgtacccgggatccctaagtcacctgtgcatcagctcacacatgtcttctcattgcttcttccctatctttttgatgcaatttgaatggactccaactcttcctgcgtttagatgtctcgcanaagagaccagatgccagagcctgctcaagccacaagtcaaatgcctcttcttcttctccatcatttcagcatcaaaatcccacgggaatctacttcagttgcaacgttggcttttctccaagccaaccatgtttacatggaaactcggtcgatgggtatatggcctgcagccattccctgcagaaataaaaaagctgtcggttcataatggagtaaaaatgatgcttcttatcataattctctattttacacagaaataccactacctacataagagacaaaaatggacccactgaatttattgccagataacaaaattcctatatttccctctgataaaggtaaat

SEQ ID NO: 283986 - DNA, 289 bp, Glycine max
  unsure (1)..(289): unsure at all n locations
acttcttgtgcaccatggccaacttttcaatctttattctctttttattctacttttctgatttaacttttctttatctcttcttcctactctttagaatagaagtgtggcattgtatctgatctccatctcttcgccaaactagcatcgcaatcaacattggaatcagggatggaggatcttggcgactttctctgtgaccaccaaatctttgtgtnttaagtctccaacgccgtgtgggaggaataagtggttgaaaaaacggagaggatagtggagaagaccctca

SEQ ID NO: 283987 - DNA, 63 bp, Glycine max
tacctggtaggagtgtgatagagtatgagctcttgatgataatttcagaaaggtgatgtactg

SEQ ID NO: 283988 - DNA, 328 bp, Glycine max
gaatgtcaatccttaccctctgttatctgaaaagaatagaagggaaatttccaatctataaaaaataaacagagaaggaaaattcccaatgaaagagaataaagaatagaaaggaaattcccaatcaaagagtgggagaaagcaaaatgaaaagaaagaaaattcccaacctaagaatgggaaaagtaataaaaaaagaagacactcccggcaaagaaactataagaaatgtgcaaaaggtcttttgaccagacaatatctgaacaatacacaatttgtcccacatgaacacaaaaggaatgagatgaaaccacgacctaaaatggtc

SEQ ID NO: 283989 - DNA, 364 bp, Glycine max
tgcctttgcaccactgtccggtcttagcacgcgtgacttcttcaaccatgatctttgttcgaaccatattttgcgcccaagcctattacaaacccatatcaccagcaacattccgtatattactgctgtccaaatgtgctgatacttgaggtacaccttcctacccacccagatacactacgcaatttagtggaatatatgaactcaatggagcgttcagcggcttgaaaaaccactcaaatgcacattgccacattttttagtgttaaggtgacccttatttgctattccacaggctctactttgtgatcaaatttcaaatttgaaaaacttgtcttcatgccaacagaacttttaacttctt

SEQ ID NO: 283990 - DNA, 313 bp, Glycine max
  unsure (1)..(313): unsure at all n locations
tatctnggattcgaagaggaatatgatctcaaatgtgtcctcagagttaccaaggatgtcattgccttcactagaagcgtatctttgcatccataaacttgccttctctcagagccttttacttctccaaggacgaaaaattgctacatgatacattgttgttgaaatccataattcgtttatctatttgatgagattttcttgctgcctaattgtgtgtgtgtagttaattaattattgaattcatgcaatttaattggtctagtttaggaatactatgtctaatatgctctagcctttctggcatgtcatt

SEQ ID NO: 283991 - DNA, 481 bp, Glycine max
  unsure (1)..(481): unsure at all n locations
ntgactaaaccaatggcatggacactggaaaagaatttactctattntcaaaattgtactaacttgtntctctgtctcanggaattatgccaaggaccaacggtacaggtggcttctgtttctttattttattcaccaaaataacttgagtagtttgaatgacaccagccaccgaaacttgacctttgagaacacatcttgtcacaccactaggattcgcctactcagcattcaaaagatcttcattacgtgcctgtcattcattatatccagttcctccattcattgtgtctaatctttcccgacgacaatagtctccattcacttccggcatatatttggcaattggatatttgcaaggttcaaaggagttgctngccaccgattcattgtgcaacccgcttactatatgtaaaaagcacttccaaagtccaaaccaggtcaatcttccttatggaattaaccttttttattgtcctcg

SEQ ID NO: 283992 - DNA, 393 bp, Glycine max
  unsure (1)..(393): unsure at all n locations
tcatattccagcaaagcataatcactgtgaacgatnaaattttgctttcaaataattcaagtaattacatattcgagattcacactcaactatagattttaatagaacaaccttacatatattaatacacatgtttgggcgtaaaagtgactattattattattttaaatatataaatcaaactaaccatgcattgatntgaatgaatcccaaagttttgtatgagtgcaaacaaagccttaattgaaatgcttgattttgaagggtatatttgagtgtcaacgtcaaataaatntataacacnattgaccttttttcaagggttaattatctnnttttatccttatagttgcaacaactttctttttgattcatacaagctaaaacatctta

SEQ ID NO: 283993 - DNA, 454 bp, Glycine max
  unsure (1)..(454): unsure at all n locations
ttcttgacccctttggcactcactcgaccgggtcctaagcactgagctgcagctttatcaggcattctgggataactcttcttctggttatccctagtggatggtngcctcccctctctcttcttctttgcctttcgctgcatctccatgggtgtaaaatcaccaattgaggacctcattgaagctcanagatccaacctcatagaagctctacangcaagcttccatcangtggtaatcagagcaccaagagcttcaagtaggtgctcctttanacctcccataatnntttgctttaccttctctcccattgtgttcttatttttttctcatgatctctccatgcttgtctaatgttgtacatgatctttaagttccccgttaacttgttaaactaatttattttatggtaaattcttgtctgtcttacctgattggtgattaggtcttggag

SEQ ID NO: 283994 - DNA, 426 bp, Glycine max
  unsure (1)..(426): unsure at all n locations
tatgtggttctggaattattgatcatcatatgtgataattgactatnttgacacacaaagaactcctaaagtttccagatgcaatctaatcgattaccaaatgtggtaatcgattatctcaagccacaaagtcttccttctgctaaaactagcttatgtaatttattactaaaactggtaatcgattaatccgatgattcttgccaaatttcaagtagaagtgagttatgttgcttgttctaacactttgtaattgattactaaactntgtaatcgattacattgtgttgaactcattgcttctaagaaactttgagaccaattcattaatctaccttgtttgctttctactaagcatgaatataagagactaaatcacccatcatgcctagtctaaaaacatccaatantaatgccacatctttt

SEQ ID NO: 283995 - DNA, 293 bp, Glycine max
  unsure (1)..(293): unsure at all n locations
actcgccggtcttagcacgagctcagctattaagtgcttctagttaaatgacttaaaattcaagtctcaagtacatataaagggcttaatanataaaatctacgactactatagctatctataacatatcattctcacaactctttgctggtatatataatcctgctttgattgattcaaactgttcgcctcaatcaccaacgcggagtaattggagacaagccgtagatatagataacctggatggcatactggggacaaccttatgggtcttcgttattatcttacattta

SEQ ID NO: 283996 - DNA, 441 bp, Glycine max
  unsure (1)..(441): unsure at all n locations
tggattntatgatagggattttgccgagatattgatgatagaaaaagtacctcccgatttggatttnttatgggtgatcgngttttacatggagttctaagaagcaagggcttgtgacactttctacctgtgaagcccaatatgtagctgcaacttcttgcaccatgtcatgccatttggctaaaaagatcgttgganggaacttcaattgtgcaaaagganagcacaaagatcttatggtgataatagatctggacaagagcctggcaagaattccggtgttccatgaacgaagtaagcttttagatacacggatcatttctttgaaagtctattccaagaaagaagttaattgcacatgtaaaacttaaatcaagtgccgatatttcacccacccctcacatttgagattttcaaaatagcaaccaaacttgtggggcg

SEQ ID NO: 283997 - DNA, 410 bp, Glycine max
  unsure (1)..(410): unsure at all n locations
tgtttaagagtggttaacacaccctacaactcacttgtnattacataagaggaacccatgtttcgcatgaatcccacaagatgctcacacaccacccaattggaccgatccatccgaattggccttcacccaattattctcatgcaatcctaatctcttagacactcccaccttcatcaatagtggaaccaaattgcgaagaacttacaacaccaacaacccacctcatagcctgctcaaccacacttgcaacatcaaattgcaccatcttaaacacaacaccattgaactccatatataggtaagcataacttggaataaattacaccaagaaatattgtcttgcacccatctgtatccatagtattaggctcaatcactactataaaatatgcttggtacatcgacta

SEQ ID NO: 283998 - DNA, 302 bp, Glycine max
agcttcttatcctatgctcatcttggtggtgaagctccttcttccatggcttattcccgagtggatggcacctcctctcacctcttctcctttgtcttccgctgcatctccatgttggaaaatcaccattaaaggacctcattgaagctcaagatccagcctccatagaagccccacaagcaagcttccatcaagtggtatcggagcacaagagcttcaagtaggtgctccttaaacctccattaatttttttttgctttaccttctcttccattgttgtttcttcaattttatccatgtat

SEQ ID NO: 283999 - DNA, 212 bp, Glycine max
agctcgccgtcttatcgagctcagctttttttgtcgagcaaggttgctttctacaaaagcaacagccttatgtacgaatcttctggatggcccaagtgggcctgatagctatttgcaccccattgttacaaaatgcaccacctttgtctattttatgtgttactttttccataacgtgactaaactgttcgaatctcttaacgatactaatt

SEQ ID NO: 284000 - DNA, 294 bp, Glycine max
agaagagagtaaaaaaaaaaaaaggagttttttttaataaaaagaaaagaggggaggaggaaaggaaaaaaaaaaaaaaaaaggaaaaagaaaaagaagaagaagagagagataaagagaaaggaggaaagaagaaataagatggaggagaggaaaaagagagaaaaagagaaaaggaggaagaaaaagaataaaggaatgggaaaaaaagaatagagagggaagaagatgaaaaagagggaaaaaaaaaaagggagagtaagaagagaaagaaaaaaagaaaagaggaaggag

SEQ ID NO: 284001 - DNA, 206 bp, Glycine max
ataaaaaaaaataaaaatttaaaaagaaaaaataaaaaaaatataaaaaaaaaaaataataaaaaaaaaaaaataataataaaaataaaaaaaatataaaaattaaaaaaaaaaaaataaagaagaattaaaaataaataaaaaaataaaataaataaaaaaaaatatataaaaaaaaaaaaaaaaaaataataaaagtaaaaaaa

SEQ ID NO: 284002 - DNA, 283 bp, Glycine max
aaaacagggaggaaaaaaaagaagagaagaaaaatttattaaaaaaaaaaaaaagggggggaaaaaaaaaaaaaaaagaagaaaaaaaatagaaaaaaaaggaaaaagaaaaggaaaagaaaaagagaaaaaaaaggagaaaaaaagaaagagaggaagaaaaaaaagaaggagaaaagagaaaaaaaaagaatagaaaaagaaaaagaaaaaaaaaaaaaaaaaaaaagataaggaaaagaggaggagaaataaaagaaagaaaagaaagaaagaaaaaaaa

SEQ ID NO: 284003 - DNA, 473 bp, Glycine max
  unsure (1)..(473): unsure at all n locations
acgataaataaaagatacaaaacaaagaaagaagagaaaaagaagagaaataatttanaattntnttgagacattgagancaaannttatngaaaagcannaaagggagggnntgaagagaaaaagggagaaaagaaaaaatttttatatataaagaagaaaaaagaaagggggggggggaaaagaataaacagagaaataaagaaaatgaaaagaaaaagaaggaagaaaaaaaagaagatgaaaggaggaaaaggaagagagagaaaagatgagaaaaaaaggaaaagaagaggaaaaagaaggagaaataaaaaaaaaagaaagagaaaaagattaaagaaaaaggagaaagagaaaagaaaagaagaaaaagatagaaaaaaagaaaaaagaaaaaaagagagagagaacagaaaagtaaaaaaaaaaaagaaaaaagaaaaagaaaaggaacaaaagaagaaaaaaaa

SEQ ID NO: 284004 - DNA, 247 bp, Glycine max
agcctaccctatttggcacttcttggacttccattgttcctaactcaatcactgttaaaggcctgctgattgagtacaaagtgactcgcaactattaggtgagtaattaatcactcctttgcatgtcatattttaatatcatagaatatcttatattgaatttcatgttcaatccacgaagattcgagtaccatgttctcatttatgaaatctgcaggatgcacccatctgaacatggaaaggaata

SEQ ID NO: 284005 - DNA, 270 bp, Glycine max
agccttgagctttttcaaacgacaatgaatttttactcggatgtgcgattgagtcacgtaatatatcgagaagctcgaaatggaataccactactctgagcatattcaaacgacaataacgttttactcggatgtctgattgagtcccataatttatcggaacgctctaaatataatacccaagctttgagcatattcatacgacaataactcttttactcggaagtcggattgagtccccttatatatccagacgctctatattgaatg

SEQ ID NO: 284006 - DNA, 525 bp, Glycine max
  unsure (1)..(525): unsure at all n locations
agtatacctcggatacagacactaagcttgtaagctatgtctagctnacccgatttgctcaccctttgaagttgatggtatggctgtggagtctcacttgtgtctgtatagatacanaacaaaaggcctatagctgatttctctgagagattgggaggagccagatngaactatcgcacctatgaacaagagttctatgccattgtgagagctcttgatcattggaatcattatatgcgttctaatcactttatatagcattcagatcatgagtcatttgaagtatatcaatgggcagcagaagttgagtccaaagcattgctacatgggtcgaatctcttccatcttttaattactcttctaaatacaacggatgttagagtaatgtggtggctgatgcactctctanggaggtatgcttcaatatacattctttacactccgttagctcggtttcgagactttgaaggattataataaacacaatgtcggtattggtgaaatacctctaattgtgagaaggat

SEQ ID NO: 284007 - DNA, 294 bp, Glycine max
  unsure (1)..(294): unsure at all n locations
agcttgcctctattatgtccacgaaggattatgcggtcgaaggaactatttccgctcctgagtatgacagttaccgctttaggagcgctatacaccagcagcgcttcgaggccatcaaaggatggtcatttctccgggagcgacgcgtccaactcanggacgacgagtatatggatntccaggaggagataagtcgccggcggtgggcatcactatttacccccatggccaagttcgatccagaaatagtcctcgaattttatgccaatgctttggcaacagaggacggcgtgc

SEQ ID NO: 284008 - DNA, 82 bp, Glycine max
  unsure (1)..(82): unsure at all n locations
acctnctcctccatggtngatacttcatggtctccatgatctcctacatgtctggcctaatgtttaacatgatcttataatt

SEQ ID NO: 284009 - DNA, 245 bp, Glycine max
  unsure (1)..(245): unsure at all n locations
naagctnttnggttctgtattgcctaaaaaatntgcaatgtagggcggctatgtgtcttcgtgcgagctcaaccgaagttgtatttcagccgacgcccgcatattgtctgccatgaaaacattatcccaccttggcaaaaaataacatgattcaccggtatgacagaaataatgctggccttagtcggtcatgatagatgaccgatcgatgtctaaaatagaagcatgaccggattacgccgatc

SEQ ID NO: 284010 - DNA, 269 bp, Glycine max
  unsure (1)..(269): unsure at all n locations
agcttctcagctatcttgcttcctcactagcagntgctagtgctatcatctcacattccatagtggactgagctaagatagtctttttctttgacttccaagagacagccccaccagctatgctaaatatatagccgctgggtgctttggaatcatctgaaagagtgttctaatctgcatcgctgtatccttcaagtacagcgggaaaccctttataatgtaatccaaaggctatggttctattaaagtgcctcattaccctttcaata

SEQ ID NO: 284011 - DNA, 276 bp, Glycine max
  unsure (1)..(276): unsure at all n locations
agctntcttatttttctggttntccaaaccttganaacaaaacttgtgttattcatctttntcattcccttctccctttgccaaaaagaattcgccaaggactaaccacctgaattctntttatgtctctcttctcccttttccaaaagaacgaaagactaactgcttgaattcttttgtgtctcccttctcccttgtcaaagaattcaaaacgacacaatctaagaattcttttgtttcccccttcacaaagtttcgaaggactaactgtctgag

SEQ ID NO: 284012 - DNA, 233 bp, Glycine max
  unsure (1)..(233): unsure at all n locations
catcaaaggtaattgaaaacttgggaagaatggttacctcatgttgaattatcttataatanggtagccaacactaccacttctttttcctactttgagcttgtttatggttntgatcctctatcttctcttgatttaactcctttacctaatgattcttctattttgagtaaagatgggatttctagagccactcttgttaaggatcttcatgaatgggtgagaaatcaaat

SEQ ID NO: 284013 - DNA, 195 bp, Glycine max
  unsure (1)..(195): unsure at all n locations
tttgttgcaagcattnggtctatctaaagagtggagtcttcatgctgcaaatcgatggtttctgagtggaaaattctacattggttaagcatgtaattctgcagcatttgcgaagcacattcaaattaattgaagtcatgtacgagcactgtagctcttacaaaaataagcactgcctcgtatttaatgcacaaa

SEQ ID NO: 284014 - DNA, 354 bp, Glycine max
  unsure (1)..(354): unsure at all n locations
cggtactttgtgtagtcttccttacgtagttcccgaggagcatttgactcgtatgggaacttgctggaggtgtngccatgggtcctatccattattaanataagaatcaggaaacacatagtaattacaacaacatgtaagtatcanattgtanataagtagaattgtaaaatgtaaaatagttaattttttgagttaaacattatttgagtatataccaccgttaaatagtcgtatactcccataaacactcatcatgaatcgtacgaattgcatgtacatcattgtcttcattttcagcatctatggaaggcatctgtggggaaaaagtgggcatgtcattaacatcaagtg

SEQ ID NO: 284015 - DNA, 267 bp, Glycine max
  unsure (1)..(267): unsure at all n locations
gcccgttggcgtgcgttccaaacgagccctcatggacttcctcgatcatgtgatttgcctccctggcatccacacaccgcatgagtgtcatgtcctgatttctcttatacagtatgcttccactcatgaagaaaccggctgccaaccttctcaatgtcctcttatcattgtcggcaatctcgggcgggtattctntgcttacgacatatcgcttgatgtcgaaataccaatgctctccgtctcgttcctcttctacttggcaacaac

SEQ ID NO: 284016 - DNA, 200 bp, Glycine max
gtaaactgagaaagagagataaggaagagaaatccaattttgcttaagacttgaattgaattaatttcaatatcaagtgaaaatgcccactgacttattatacctagtgcccaaattgatgaattgatttatcaattactgattgaatgattatgaccatttgaccaattactatttattgtaattacttgtccccctat

SEQ ID NO: 284017 - DNA, 268 bp, Glycine max
tcactctgtttccactcataacaccatattcttactgtctaaccctaagttaaccctacccttcatctctaacagttttccataagcaatttcagcacataaacatcacaagcatcatcatataaaaccctaaaacagaatgggttagcttgactcacaccaaacatggcaagttcaacatgctttcaacaaattccttcatagataactatcatgaagcagaaacctagctaaactacccatcatatctccctataaccaataccca

SEQ ID NO: 284018 - DNA, 531 bp, Glycine max
  unsure (1)..(531): unsure at all n locations
agtgctgcagntcctnctanntgccaaaacanantantnaagctttataagagcaaaaacccccttantcatnntncaagatatgccatgtgtaatatnggacgcatcaacaangaatctcttctctttgtctattgngcangcaatcaanggggcangacacaccagatgattataatgatggatggctcaaattctcaccacgtaaaataatcactttcaaattgagcttttcaaactatcatgacatgtatagaagaatccacgatttcaacgcacaaaatgtcaagagcttctattttcaaacaattacccatttcttgaacatatcctataattcaaagaaaaacatgcgaaggcgaacttgctcacaaaattgacccacatatttaactaaactccgacaagctaacaacattacatatttacagaactttaaaacctgcaaaaccaagaacactccccccatactaaacacccattgcctcatgtttccattgaataattacaaccttactcatcatgagaacg

SEQ ID NO: 284019 - DNA, 245 bp, Glycine max
taatgccactctagctgcatgtatggaacgtatgcaacaatctatggcggttgagctgcgatatatagtgtgggctctattcttacacgatagatgcatataatcaaatatatcatcgaatcaaaaaggggcatagcaagagaagtgaggttgcaacttatcattgtgatgcctagatcacatacttagtctagttgcatatgaaaattctactgagcagtaccgatgtagtgcaatcgtgcttg

SEQ ID NO: 284020 - DNA, 302 bp, Glycine max
agcttaagatgatgaagaagaaggtaaatgtttgcgggaatagtgacttgtacagatgagtcactatttagttttatatgaaagggtgaagggcattttggccctttcacccgagttgctgggtgtctcaacaaaaatattgggtgccccacacaactctcgtggttcggatggtttcatactggccaagcttaaaatatgagctaataacttttttgtgcctcatgacttactaattttgttccattatttttgcactatctgaattattaagaagtcaaatgagtttttcttctatatat

SEQ ID NO: 284021 - DNA, 184 bp, Glycine max
  unsure (1)..(184): unsure at all n locations
agcttgtagaatagtggacagacctgagatattatgcagtgatgggccttgatagcaaaatnttgcgttcgtgtgtgataagcatacgacgatcgcatggagtgagtgaattgcaatgcctagatcacttgctttgttgagcttgcggatagtagaagagataaaacatgagtgatggacatga

SEQ ID NO: 284022 - DNA, 297 bp, Glycine max
  unsure (1)..(297): unsure at all n locations
agcttccatcatgtggtattagagcacaagagcttcaagtagtgctaaatgttgtttcttcattaatgataaaattaatgaagaatntaagtagcacaagaactccttaaacctccattaattttcagctntaccttcccttccattgttgtttcttcatttttctccatgtatctcctcacatgtctagtgctaaatgtttttaacatgatcttttagaatttccactgattaaacttgctatagaagctagattttattttttatgggtcanatttcttgttcttgaaccataaa

SEQ ID NO: 284023 - DNA, 503 bp, Glycine max
  unsure (1)..(503): unsure at all n locations
natgtagctgtcgtagttactgcaactcnaagcttgctaagatgattcctaacgagccagagcttaacttcacacatctctttatacctaacctcacncctgatatgagaataagaggctagnctcacacccctataatagctaagctcacccctatgccaaaaaacatgaaaatacaaaaaaaagtccttacttacaagactacccaaaaaacccttgaatacaagggctaaaccctatactactagaatgggccaaatacaaggtccatatgaaagaaaacctattctaatatttacaagataacaggctcatacttacccatgggctcaaatctaccctanggctatgagaaccctggggcctccntggatctctgcacaatctacttggagcttctatcaatgaccttgnggggtggatngcatactatgtnggtnataattatttaataatgaatttgacaaaaaatacatgttgtatgatttgagacatggtagact

SEQ ID NO: 284024 - DNA, 285 bp, Glycine max
  unsure (1)..(285): unsure at all n locations
agctttgcagatttggtcttcgctgggtaaaggatcanagtgggtttgaaaagaggcaaatttaatcatctgcttagacgaattaganaactggggcaaatgaagaaggtgagaatgaatgagaaacccatgctgcgactgtcgttcctaaatagaaaatcccttaccagctcaacanacatcattactcagccaatatcgaaccttctcattcctcaccacccaattatccataaaggccatccctaaatcaaccacaaagcctgtctaccacacaaccaatgc

SEQ ID NO: 284025 - DNA, 277 bp, Glycine max
  unsure (1)..(277): unsure at all n locations
tttatgcaagctgcatgttatgtaatgatcatgagaatngtcatgttaggtgcttttgctatgctgttaaaacttgccctggttctgttggtcgagccaatgggaaaattgtggttaattggatttcttgatggtttggactatggtctggttggctttaacgagtttgatgcttccttcaattaattttatagtacacctgttattttctcctgtctatctatttgcacatggagtgtngaatgaagtctggatgattgcagaatagcaatataat

SEQ ID NO: 284026 - DNA, 285 bp, Glycine max
  unsure (1)..(285): unsure at all n locations
agcttgtgaattgatagaccatnttgagtgacattttacatgagtgtttgtgtcaatttcacgtatttttcttggcataattcacgtttagatctagtttcatgtgcataaagtataaatgtttgatcaagtgaaagagtcggaatcaacacaaatctatanagaaactgatgactctacactataccatggccatagtattgtaccacaatcatggtgaccacaatgcccataataagatcaccactaccctaaagatcaatgcctaccagttgatcacaatcg

SEQ ID NO: 284027 - DNA, 147 bp, Glycine max
tgtatgcaagctttgacattatctatgcatacgcgggaatttgtgtctaagctctcaccaacaacgctatgacagattttatgttctgggtggaatcatgaagtgatctacagacgccttcatgaactatataggactggctgactc

SEQ ID NO: 284028 - DNA, 245 bp, Glycine max
tttagcttctccttcattttcctataaataagggaaggatggaagaacaataatgttcaatcctgctggtatctgagattcacttaaaaatactcataaaaattatcttcgtgaagaaaatccaagccgaagcgtttccgtaacgcttccgtgacattaccgtgggtgattctgcgaagatctacaaccgtacttcgtcgttcgtcgttcgcctctcgtcgttcgacgatcgttcttcgtcgttc

SEQ ID NO: 284029 - DNA, 297 bp, Glycine max
tatctaagctagcgcaccttgtggatttttagaatattgcaatattttgtatactgaattttacaagattgaatatgtatattcgcattatccgcaagtttaaacttcctaactgtatcaaagatacgagtaagattcgacctgattcataattggctggtaaatggtcgccaagcatagcatgcaacgcaactccttagacaattctaatagggatccatatgtatgttcaattttcatctatacttgcctacctgcggtgtcattacaatgctatctgtcaataactagaatttc

SEQ ID NO: 284030 - DNA, 247 bp, Glycine max
  unsure (1)..(247): unsure at all n locations
tgcttcacttatggtaaggaggatntntccacttcttgaaccttaacctttttgtctagcacaatttatgtataaaacaagtataaggtcttttgtaggattaaagttactttggatatgtnggatcaagtggcctctgaataattataaaagagggttgaattaattattactgaacctttactaattaaaaatgtacccttcttatgcttttactataatgttaaaaagtaaataacataaatgg

SEQ ID NO: 284031 - DNA, 498 bp, Glycine max
  unsure (1)..(498): unsure at all n locations
tgtgctgtacgttnttacgngaccctanatactcagctgatgactgatcaattgattcnnagaatttgtgatacaaagatatgacaaaaactcatttttcttatcttcttttgtttacaaagatgatgatctcgcgaatcaaagaatgagttcaagattgaatcaagaacacttcaacgttcaaaacgcaaattgatgtcagaatccagaattaagtttcatgattcaagttccatgaatcaagatcaagatccacgaatctagactcaagagaagactcactcgagatatgtattaaaaagttgtctcaaaaactgagtccaccataatttgtctcaaaacctttttccaagagttttactctctggtatcacttacagatttttgcatcgataccattgcaccatgtttcaacaagcttcacctgatttacaatgtccatcgatttcaaatttgtatcgatccatggattgcttccgttcactgggttgaagtgcg

SEQ ID NO: 284032 - DNA, 314 bp, Glycine max
gtcacctgatgcatgcaagctagcaggccgtgtgctatccatcatctatacattccttcacttcttgaagatcaatggcaccagattggagattgacgaacggtgattggagacgtcgctttatagagatgagtctagaacatgctcaccactctttgaagccgaggatcagagctcgacggtgcgagatgatgattgcaacgagacggatagagagggctcactgagatatatgcctctgctaatgactcatcttgcaagtgtaatttctcctatgatcaatgttgcaaaaatgcatacacaacgcctctatt

SEQ ID NO: 284033 - DNA, 452 bp, Glycine max
  unsure (1)..(452): unsure at all n locations
attccttgacacaatctagctatgtctctagaggtttgtggatcgactacattntcttccccaacctaaccatggattggtttctttacttcacacattaaatttattaatttggcctttagtgattaaccaaccatatttgaaaagataatacttgtaatagaaatattatttatgtgtataatatagcatattatttgtatttaaaaaaaaaccatagtatttgttacttatcaaaatattttatatatcatatccttattaatcttaagaagttatattctcaccttataaaatagaagtatattaatattaattggattatacattntatcccacnttntaattgcatattctatcttatttttaaaaactgtgatgtactccatcattatcattatagtcaaaatagggtaaattaaaaatataataaagtcagtaacatcaattgt

SEQ ID NO: 284034 - DNA, 292 bp, Glycine max
tagctgaatgaatgttcacaccacatactttatatgccaccagctgtattattagcaggctgcaccgcccaagaaacctctacatcctcccataacgcctgacacatagctttatctatcatttctttctttgtttcttgaatacacagcatatccacagtctccatctttctgaatcttctaatggctgaccatttcaaccccctccctaagcccctgacattgctggaaactatatgcattgattcctttgtctgtctcccctccttatcgctccttctttgtccctttc

SEQ ID NO: 284035 - DNA, 192 bp, Glycine max
  unsure (1)..(192): unsure at all n locations
cactctatgacacatggcattactctgataccgtatattatnagcggaaccagcactacgtaagagtcgaaaccaaacaacccatggtcaacatgtggtcgccccaatggtcctttatatggaacacatagcgtagtcctacactctagccttagctatggtcttctaaccttgccctcatattgtctcata

SEQ ID NO: 284036 - DNA, 194 bp, Glycine max
agcttatgctctgcatacgaacttatgattttgtgatgccctgggaagcacacctgccgtaggatccatgcatgatgcaccatgctgcaatattaccgattgagagatgcgagtacttgtatttataacaaatgtggttatgagctccgcaatgagtgggtgaagtagattacggctctcatccaataccgtga

SEQ ID NO: 284037 - DNA, 297 bp, Glycine max
  unsure (1)..(297): unsure at all n locations
agcttcaggttgttcattgactctagaatgctgcanagaaggacagagatctgtatggtgatctgcagaagaacatagaccacagattcttgcaacaggtgcagacttcttattcatggcaagctaagttactaggttgaccaaggcatcaagttttccctcaagctttttattttcagtagatgaagatgaattcgtggccatctcatggactcctctaaggaaaatagcattatttcttgcattgaattgttgggagttggaagccatcttctcaatcaagttcctagcctcaac

SEQ ID NO: 284038 - DNA, 246 bp, Glycine max
cttagatgaacctaatgcagtattcaacttacacattttggctgatcttgtatttaacataaattataatattatatattccttctttatggtataaatgcttgttcacaacgtggcagtgtgtggtctacaacatgacagtattgtaacctgcctggcatattatagatgctaataatacatcatgcagaaattttaattactataatttatcgtacacaatattgatgaatacgtacttattta

SEQ ID NO: 284039 - DNA, 132 bp, Glycine max
atctctttttcaatcactacagaatgatgaaatttagagtagaatttggagatctacctcgtaattcaattgaccttgtgtacattgagaaccagattaaacttgatgttacactctggtcctctgctacag

SEQ ID NO: 284040 - DNA, 261 bp, Glycine max
  unsure (1)..(261): unsure at all n locations
agcttctcatttgtacggngactcttcactggtgatccaccagctgatatgagaatgggaaactanagaccccaagctgataccctaccaagcctatatcaaggaatagtgctggttctttgatgagatctccttccatcatgttccccgagaggaaaatcatattgcaaatgcgcttgccactttggcatccatgtttcagctaacaccgcacagggacctaccatacattgagttctggtgtcgtggcagacccgcaca

SEQ ID NO: 284041 - DNA, 282 bp, Glycine max
  unsure (1)..(282): unsure at all n locations
agcttatcatattctattgcactgttgttttttagacaatgattgatttattcatgagtctgtgttttaattgattaccatgtgatatattcgattacttctatttctataagtatttcagaagtgatcaagaacactttaatggactacattgaggatctaatcgattacattgtgcttgagaggtntccagtttttgggatgaacactttaatcgattgataagataatataattaactacttcattgaaataatcgattacattgtatatttaatcgat

SEQ ID NO: 284042 - DNA, 246 bp, Glycine max
  unsure (1)..(246): unsure at all n locations
agcttgtatactgccatggaagtcccacaaggaggaacaatgctgaagagcttgttgaatgaaatggtggtgtgaacgagaccggacagatgaagaacangcatatgaagcgggccctgcaaggttgtgggccgcaactgtatgggtaccaaaagcggaagtggtggcggagggggcgatggaggcatcatggctggcggatgtggcacgatcgtgggtgcggtgagcgtgggtgatggagttgac

SEQ ID NO: 284043 - DNA, 279 bp, Glycine max
  unsure (1)..(279): unsure at all n locations
agcttgtatagttctctaatttatggtcattntgaattaaatttggtaaataaatcttgttttattgttaacactgtctctataacatttccattgaatttaatgatgaaatctgtgcattttcaagtgaaaaagaggctaagttntgaattgcaaaaaacaacaattgggctaagcttagtagttgggctaagcgcatatccaccatgaaaagcgctgctacagcgtgcttagcactaaagagaatctggcagagcatcaacatcaaagccgcgcact

SEQ ID NO: 284044 - DNA, 344 bp, Glycine max
  unsure (1)..(344): unsure at all n locations
gtcttgtgaatagcatcgagtatcatgttaggatctagggtttgaggaatggtatttcttgccttagtccaagtgggtgcaagaccccctaccatggtggatgctagcctttctgggcaccccaagtgcctgagaatgctcatagaatgatatttgagtagttttccccttggttacaaattaatgatatcccatatgatgattagggtcactcctctaccctgcccctaaatacacccgtactagagatatgttgctatgagagatgttaagggtaatggaaaatccaataacgcctgagacgttangtgaatgccaagaacctttgacaacaccaagaggag

SEQ ID NO: 284045 - DNA, 273 bp, Glycine max
  unsure (1)..(273): unsure at all n locations
agcttatcatctatcaaactggagaaagagttcttggggtcaagacatgagaagcaatcaagtataatgctacttccttcactaaagcggtgatccatctccacacatattttatcaatagcaacataaaaaatctctgcacggtaatgatgaagattagtgatagtcctcccttctgctcttgaacgaccccgaactggtatttcgtcatccatatntggtaccagaatacttttagcaacacanaatccttggacatcggcaaaaaaatta

SEQ ID NO: 284046 - DNA, 265 bp, Glycine max
  unsure (1)..(265): unsure at all n locations
agctntcataagtgaaatcaggtgcaaccatctccctaagagtcctctcatgaggtggaggttgagccatgttctcagtatgaaagttagtagtggaatgttcaaaatcagaatattcagaatcaccctcaacggaatgcatagaatgaccaggatgcacactatgcctcactaatctatgataggttctatctatntcaagatcaaagggttgtaaatcacctggatttcccttagtcatgcactatatgcaacaaataatgtg

SEQ ID NO: 284047 - DNA, 124 bp, Glycine max
  unsure (1)..(124): unsure at all n locations
gctatggggaagtaccttgtcatttgaggatccttaatttacgaatctccattcagttgtctagtgataaatttggagctgctccagcacttaaagtatttggttcctactctttnttctaatc

SEQ ID NO: 284048 - DNA, 272 bp, Glycine max
agcttgcctcattgatgtccaggaaggacaaggcggccgaatgatctagttccgctccggagtacgacagtcaccgctttaggagcgctgtacaccagcagcgcttcgaagccatcaagggatggtcgtttctccgggagcgacgcgtccagctcatggacgacgagtatactgattttcaggaggaaatatggcgccggcggtgggcaccactggttactcctatggccaagtttgatccagaaatagtccctgagttttatgcctatgct

SEQ ID NO: 284049 - DNA, 147 bp, Glycine max
gaggaaagaaaaagagaaaagaagaaatttattttataaaaaaaaaaaaaaaaggggggggaagaggaaaaaaaagaaatgaaggaaaaagaaaagaaaaaaaaagatgaaaaatatggaagatatgaaagagaacgaggaagaaga

SEQ ID NO: 284050 - DNA, 460 bp, Glycine max
  unsure (1)..(460): unsure at all n locations
gaaaaaagatcaaaaataaaaaaagaaaagaagaagaaaaaaataaaacaaactatttttttggcacactagagcanccttttttttgaaaccangggggagttattaaatgaggaaaatagaagaaaaaaatattttttttaatgaagaaaagaaanaggggggggagaggaaaaaagaatataaaaaaagtaaataaagaaaaaaattgaaatagaaagaaaaaaaagaagaagaaagtaagaagaaaggaaaaaaagagaaaaagaaggagaaagaaaagagaaaataaaagataaggaagagaaaaagaagagatagaaagaaggaggagaaagaaagaaagaaaaggagaaagagaagagaatgagagaggaatatgtaaaagagagagagaaaaagagaaaaagaaggagagaaaagaagaaaaggaaaagggaggaaaaaaagaaataaagaa

SEQ ID NO: 284051 - DNA, 251 bp, Glycine max
tgtaactcaataatggaatggtgggacacatcacaaatgatagtaccactttgttaccatattacaattagagttttatgttcaatacgaaacgaatagagacgaaaattctacgaatttgattttgactcgacatgatgtgatttgctaaaatgtgtggatatgatatattaaatcaatagcatcaacccgttttaaggaagaatatctgaaatattagaagacattaacactaataatatcgaagatat

SEQ ID NO: 284052 - DNA, 288 bp, Glycine max
agctacaacattttaccacttccagggtgctggaactacttctcatggacttgatggggcctatgcgagttgattgccttggacgaaagatgtatgcctatgttgctgtggatgatatcaacagatttacctgagtctactttatcatagaataatcatacacctttgaagtactcgatgagttgagtctgagacttcacagagaataacactgtgtcatctatagaatcaggattgaccatagctgatattctgaaaacagcatggtttctgaattctgcgcatctg

SEQ ID NO: 284053 - DNA, 285 bp, Glycine max
  unsure (1)..(285): unsure at all n locations
agctntgattgtgtctagaagaaatcacatgtntgtcatcatcggacatggggagaatgtgaatgtatgtatacatgattttgatgatgtcaaacaagaatctaacactgctgcttcaaatgataagcatttgcttcaagaataattcaagattgcttcaacaaacatagccctgttttaagattcactatagaccaagccttgccttaaaacaaagtgctttcaagacatgcaatgctctggtaatctattaccagatgacagggttgataaatagctgttgaa

SEQ ID NO: 284054 - DNA, 183 bp, Glycine max
gaaacctccggacagaacagagacaggcgaacaacggccagacaaccccggaccaaacgagaaacaaacccacaaccaaacaagcccggaacagtacacaaaagaccagacacgcaaggagccagccagcaaacgaaccaaacgcagagaacaaaccgacagacagaaaaacaacagaacaac

SEQ ID NO: 284055 - DNA, 241 bp, Glycine max
  unsure (1)..(241): unsure at all n locations
agctnttaccatttatttntactctctgtattattgattaccagtttactgtaatcgattaccagtatcaaacattgttttcaaaagctttcaaactgaatttacaatgttccaattaatttcaaaatggtgtaatcgattacaagaattatgtaatcgattaccattgtgtcgcaacgtgcccttntatgggcgagcgatagcgaagctcactggtgcgctttccaaaggaggaaagatg

SEQ ID NO: 284056 - DNA, 269 bp, Glycine max
  unsure (1)..(269): unsure at all n locations
agcttgaagttttatataatgaacctttatctaagatggtaacagatacaggtgcaattaatgatgatgtgaatagacaaacganagtatagttgactcttttgaaccttataataaggtgcttcttgaattatactttcatgtataggtaaaagacaacagttgtgcacttgacacagacaagtcaatacaatatgtgaaatttctaacatgtgcaattgtgatactaataatgttgtgttgatattctatcacatgtagcaattact

SEQ ID NO: 284057 - DNA, 132 bp, Glycine max
agcttcttatctctatgcatacttggtggggaagctccttcgtccttggcttattccctactggatagtgcctcccctctcctcttcttctttttcttccgctgcatctccatggtgtaaaatcaccattga

SEQ ID NO: 284058 - DNA, 281 bp, Glycine max
  unsure (1)..(281): unsure at all n locations
tcatgcaagcttaaatttatattgcnaatcctaatcatgcttaacctagatcacccactcttaagcctgaaatccaacaatcacatattcttggtagacacttttacttaatcacaattcacccttggctaaatcgtaaacatttgtagaacttcaaaattattgagttaaacctcaaaatggattcttaatcaaactcatttcaaattagacatcatataccatacataccaatcaatttacaccccaaaacagtattttcaagcatcaaccacctaaat

SEQ ID NO: 284059 - DNA, 292 bp, Glycine max
  unsure (1)..(292): unsure at all n locations
tttcatgcnaagcttttgggtagagttgagttggtgcttgatgagtgcaaatgcctctctttattgtaacctcaagtatgtggtaataacttcctgttatatttaatcatccctccctaagaagaaatattatacataagattacttgcgtaagaggtttgtctggtctttggactaatatctctgaattttggtaacttatatgcagagacatgctccctttatatcctcacctatgtctggtcagttcaaacttattacattgngtatattattgtctctatgtctctat

SEQ ID NO: 284060 - DNA, 342 bp, Glycine max
  unsure (1)..(342): unsure at all n locations
gtattgatgtttcacagtctcctatcttacttaacacggttgttagtgttgcccacatgtccaaatcaggaaagctcagctntgcttcacggagtccattcataattccatttatgtacatgatctccataaccatgggtaatgctggattatcatcggttataactccaatcaagtacttaagggtttttgaggcacgtaaggctgcacttttggttgtaaaaatattcagagaanggacagtattgtgagctgcataaagtgcatccatcattccttgatacaatattgtctccattagtttttgtagcttagcattgtagccttgttcttcatcctcac

SEQ ID NO: 284061 - DNA, 275 bp, Glycine max
  unsure (1)..(275): unsure at all n locations
tctagctnttgattggaacgagagaatcagatactcacccgtcgggagaattgaacacccacctttgtacttttatatatcgctgaattgtgtcttatattattcgcaaggaatatacagctctgtaatacctgataatctatatgcttctcatacacgatatcaattaatttgcttctcataaaggatatcataacctacactgctcgtgagcgtaatgaaaaagactatgtgcatgagatcacatactcgctgcagctggatcatccatcatt

SEQ ID NO: 284062 - DNA, 273 bp, Glycine max
  unsure (1)..(273): unsure at all n locations
agctngaatgatgtatagatccttgattcttcaatggccaccacaatgtgatcaaactttgatatcaatgttctaagcaccttttcaatcaccaattgttccttaatttgttctccacaacacttcatctggttggtgagtgtgagaatcttggtgagatactcaactactgattcagtctcctccattgcaagaagctcatactatcttctcaatgtctgaagtntcaccttctttatcttttctgcaacttcatgactctttacaagaatg

SEQ ID NO: 284063 - DNA, 171 bp, Glycine max
  unsure (1)..(171): unsure at all n locations
gaacaacaacattctaagtattggatcaacataacataaatttgagttttcataanaacaatattctaataaatgcttttatttaagtaatgaacttctaaacatgagaaaatgtggattgacattatgttcacattatcatatcaaacatttaatcatgaatgtagtgac

SEQ ID NO: 284064 - DNA, 318 bp, Glycine max
gggatccttaagtcacctgatgcatgcaagcttactggatgtgaacaacttatcattgtcagaaatgtgtccgcattgattggtaaatctgtatgcgcaattgctgagtaatgttaagatccaggtacattcagcataccttgtattatatggaatagtaagctggacgatgccatgctatatttatgagcttctattagtgctatgcctcagactatatataatactctatctctaggtcccttgcagtcgactgatgtggtaattcatctagcttatagaagtgttgactatcctgttggtctcatagaagatgtc

SEQ ID NO: 284065 - DNA, 234 bp, Glycine max
tgaccatttccattggaggcttgagctattttgtttttccctagaccctggacttttggcgtcttattagatattcactgaatcccgagaagaaaagaagggagcctctaggataactgaaaaactccacaatgcctgataactgtacctgactctatttcccctttgggggctctgatgctatttcaggcatgacctttcactcatctaaattctttccaagtccttttttct

SEQ ID NO: 284066 - DNA, 298 bp, Glycine max
  unsure (1)..(298): unsure at all n locations
agccttgggtgatcttgtacaataacaagacatgttagattgtgacttagcactntaatcctcttagcatagtgcttcagcaattntggtacccaaacttttatgttcaggtttgatcccatatttttcaaaaaaaaaataatggttgaatatatgttattaaaatcaatntatatatcacttatctggagtatgataaattnttcaaggcttaattttatctttttgtctcattcattatttattttatttaatnttatcctcctaataataaaatctttaatttgattgcttaatt

SEQ ID NO: 284067 - DNA, 294 bp, Glycine max
  unsure (1)..(294): unsure at all n locations
agcttatgactttataacaagaganatgttatggaagactgtggactataaaagtgtgcacatggttcatatacagactacacaagacatactagtgcgagaactccaagtggtgaaactaaggacttcctattaggatagggttacatcaaggctcaactctaagtccttgtttaatctaatcttggacgttcttatcaatgacacacaaaagataattcctaattgcatgctctttgctgcatttttttcttttttatcagcaaaaatagacaattatattaataaagtacc

SEQ ID NO: 284068 - DNA, 285 bp, Glycine max
  unsure (1)..(285): unsure at all n locations
agcttgagatgtttgatggngacccggtgttgagagaaacgaggatatgggctacgtgggagtacgtgagctcagttggaggtgggcaacangggatggtgggtntatgcgcgcattgtggatgtggaaaacttgttgtgcaccatcgcccgaccgccacctagtaccacatgtgatgggtaccccataatcctacaagcttgagatgaggaagtgttgaagggtgaaacttcctgcttntattgttgaccacagagtggtacctggagatatgtcgcgggggtc

SEQ ID NO: 284069 - DNA, 295 bp, Glycine max
  unsure (1)..(295): unsure at all n locations
ttattattcttatcatgttcacattaaattcaacatgattntttgcttaaatcctatgcttgtgcgcatgaatgccgacaaatatttattgcttgaatgagaagcatttagtgtgggaaaagtactgtcaataaaagtgaaatttaatttgtcaatcaaggtccaattggaccacacctctgtcattgtgaatatggcaaagaaatgaagcttccagtgtccgttataaaaacaggttaatgttgtttcgttttcgttgtcttcgttagaggcataaattaatgttagagtgtgt

SEQ ID NO: 284070 - DNA, 292 bp, Glycine max
  unsure (1)..(292): unsure at all n locations
ttttttcacttcatacatctttttcttctgaaaatatatttgaaaattntaacaacattaatttaagtattcatattaatatagtattggttaaaaaattaaataaacattgatttgaatgcaatttacaaattattagatatattatcaatccttaaaccaaataaaatataaattaaactacattatactatgatatatnncaataattctattaatattgatcactattgctaacaatngatttactgctatatatttgatattgataccatataatactaattaccta

SEQ ID NO: 284071 - DNA, 213 bp, Glycine max
tataattacaaaatgagaacaacatgtattttctcattttacagaaaacagattgttatgtatagatagttatcattgatgtataagtactaatcacctaaatttagaaataattttattctggatctttctctgtcgcattcttctttttcttcaacaacactatcatcaacatgagacctcagaactacaaagttgtcaccattgcacact

SEQ ID NO: 284072 - DNA, 280 bp, Glycine max
  unsure (1)..(280): unsure at all n locations
agcttatgacgttatgaactcaatatgcattgttattntntatcaatattcttttcattctctaatccccatacttgacatcagacgaaaaattgtgcatcctccaaaatatgtccatatgaaagaacacaacacaactaaacatgaagatactcacgagagtccatcttgaatcgaatggtgagtataatggttgcactatatgtcagtatatggtggagatataccaatgagaggaagagagatgccaatgctatacctaatgttctcatgaatgaaa

SEQ ID NO: 284073 - DNA, 237 bp, Glycine max
gaatcaaaagaattctcacactgcgtcgttctgaattctttgacaagggagaatggagacacacaataatgcatacggttgtcccttgttcttttggaaagagagatgagagacacccaatgattcttgcggttagtccttggcgaattcttttggcaaatggagaatagaatgacaagataaatagctcatgttttcaacggttagataaccagaaaacttcagaaagcttttggt

SEQ ID NO: 284074 - DNA, 215 bp, Glycine max
agcttcatatctcttgactgcctagtgggcgaagcatcattagactcgacttagtgcccattgaatggagcactccctatacctgtcctctgtagctacctgtgcatctccatgattagaagtcacccttgaacgaccggatggagtagtaacaatacgaccgtatatagacttcacgagcatcttccattaaatactaccatttgaaatccatc

SEQ ID NO: 284075 - DNA, 270 bp, Glycine max
  unsure (1)..(270): unsure at all n locations
agcttgaatgaccatttgatagccatgttggacatgccaaagggtgccataagtaggtagttttgcttttgaatttttagacagaaatggataaagtagagggacaaatagtccattttgaaaaaacttattgtcaacctctttcagatatgaatatacctgattcagaagggaagaacttgcatcaatatctcaatttcaattgaaacatgggtttgattcacactccatgttctgagaaatatntaccatccaaanaaaggagagata

SEQ ID NO: 284076 - DNA, 126 bp, Glycine max
actcccccttggttttgcaatgattccttatatgagacatttgaagatctcatatttttcatatgtaaccaattgcctcataaagaataaataatttttcttactaatttatcttttatctttctc

SEQ ID NO: 284077 - DNA, 247 bp, Glycine max
  unsure (1)..(247): unsure at all n locations
tctgcttggttcgaggtacttacccgttgaagatcgaagaacgatgaagaacgaatgaagaacgtcgaagaacgattgacacctctgcgaaattcttcacggaaaacgttacggaaacgtttcggaagcgcctcggcttagattntcttcacggaaacaatctttccaagcaaattcgaaagagagagaagtgcctaaggggctgaaccctntccttcttcacttcctcccctatttatagcaaaat

SEQ ID NO: 284078 - DNA, 269 bp, Glycine max
  unsure (1)..(269): unsure at all n locations
agctntgaatgcactattcaatggagttgacaagaacatcttcagactgatcaacacttgcacagtggccaaagatgcatgggagatcctgaaaatcactcatgaaggaacctccaaagtgaagatgtccagattgcaactcttggctacaaaattcgaaaatctgaagatgaatgaggaagagtgtattcatgacttccacatgaacattcttgaaattgccaatgcttgcactgncttgggagagagggatacagatgataagctgg

SEQ ID NO: 284079 - DNA, 297 bp, Glycine max
  unsure (1)..(297): unsure at all n locations
agctatcttaagttttctggttttccaaactcttgaaaacaaaacttgtgttattcatctttttcattcccttctccctttgccaaaaagaattcgccaaggactaaccacctgaattctttctatgtctctcttctcccttttccaaaagaacgaaggactaactgcttgaattcttttgtgtctcccttctcccttcgcaaagaattcaaaacgacacagtctaagaattcttttgtttcccccttcacacagtttcgaaggactaactgtctgagaactntgtcttaacacatt

SEQ ID NO: 284080 - DNA, 296 bp, Glycine max
  unsure (1)..(296): unsure at all n locations
agctggaagcataatgtaatcaggttcttatcatcaaaataagcagctttaaggcacacatcatctaagagctaatatcaaattgaagctagttataacccctaagtttagaaaagtgcacgtatgagctttaattaagcatcatagataaagtaaattaaaacttcatggagaaaaatgggaaagaggtgaggtgaaatntataacgaaccatcctataacaaattttccaaccattattatggaacaaaaagaanatgagactttcaaaacaatattatatccttagacaaaat

SEQ ID NO: 284081 - DNA, 290 bp, Glycine max
agcttaagaatttacactctggagcttcatgatataatgaatgttgtcaagcttttaatttctccaacttctagtgttacacctctaaacccctctgttttaactgttgtggggagtggtatatgaaccgtacggtttggtttgattgttgtgaaaatcatgcaaagaggaaaatgaaactggctgtctaaatggccattgatgtcatattctaaaatgcattctgaattctgattctaaagcttcattgtgtactattcacaatgcatatactatgcctgctgtgcatt

SEQ ID NO: 284082 - DNA, 251 bp, Glycine max
  unsure (1)..(251): unsure at all n locations
aaggttaccttgccagagtgnatgttgttttgatgtatgcaaactgaaaatgtgaccggcttcagacttcctgaagttgatttaaagctctattattattgccttgtcatcttgctctgtcacacatttcattactgcgagagatcttatgagtactgcctaaacaattgatataaatataaatatcctttctgcatttttaaggtagtggaacaacagtttgtattttttctactgtgggtcatttaaat

SEQ ID NO: 284083 - DNA, 300 bp, Glycine max
  unsure (1)..(300): unsure at all n locations
agcttctaaactttatacaagaatgaagctctgataccacttgttagacaagtggcctcagatatcttaagaagggggggttgaattaagatattccaaattacttccccaattaaaaatctatttcactttctactcaagttataaatntccttaacaatgaacttcttaaatattaattcaaataaaaacaatttgaatataaatataaagcaataataaacaaaggagtttaagggaagagaaagtgcaaactcagaattatacctggttcggccaaacccttgtgcctacgtcaag

SEQ ID NO: 284084 - DNA, 260 bp, Glycine max
  unsure (1)..(260): unsure at all n locations
naagcttggttcctagatcttcctatctantttttctttgttaaatattgtgagccaaagatattttccttgtgtgtggaaaatctgcttactaatgtaattatgagttagcaggaatgttgtgccatagtttatacttcattgttcttttttttttttttttttttaaattattaagataatagtcaacaagcatgttatgggctcagattcacgaaaatgtcctccatccttgcacacanttggtgtagacactatga

SEQ ID NO: 284085 - DNA, 272 bp, Glycine max
  unsure (1)..(272): unsure at all n locations
agctntacatgtatatactcatcagagtagtctncactctccacataaaagaaagtaagtttagttacaattcttttccccacatcttttcctgaaactttgtatatttttcgtgtatgtttagttactaagagggaaggatcaagacctgaagctccatctgtgaaaagtattaaaatctggagacttcagtggttttcagcacaatgtctcacagacacattggatagaaaggacangttcaaattttcttggctcatacaatgctaaat

SEQ ID NO: 284086 - DNA, 282 bp, Glycine max
  unsure (1)..(282): unsure at all n locations
agcttatctagttntaatgttaagcctatcgaanattgtctggacctgcatacttgacattcttgatattgtcttatgcacgaggagtgtgttaagaataaagatctcccacattgcctgtgaattcagacaaaatactccttatcttgggtttaaataacatccacaaccacaattgtggctacaataccaatgtattntgactcatcacaatgcaaccgcaaccgtaattgtgatcgcatcatctgcatctttcccgaatatataggttgtttaactcac

SEQ ID NO: 284087 - DNA, 285 bp, Glycine max
  unsure (1)..(285): unsure at all n locations
agctttcaacttatgtcttcacaaataatcatcacacagcagaaaactaacaaatctacccatcatatctcccaaaaccccatacccacganaatcaaaggagaaagaagtccacccatacctgatatttcgaagtcccactcgtagccacgcacttcacgactccaaaaatgccctcctttcgcgatttggagcagaaatgagcaccacaggttggagctctgttggggtttcaatggagaatggatgagaagggaaaaagcacgtcatgaagatggagagctg

SEQ ID NO: 284088 - DNA, 266 bp, Glycine max
  unsure (1)..(266): unsure at all n locations
agcttatccgatcaaagttcttgttctgcttcctttgcattgccttgtgagaatctgcagcattctaacattgctntcacttctatgcctgtctataggtggagtcggcatatcaaacatgatcttgaagattcaaaggaatgaatacatgggatttngataattttgcaggaatgatacatagagcttttcaagtatctttttatttgcacacattntctgtttgttgtttgccaccaccaaaccacctgagaggggatgatatg

SEQ ID NO: 284089 - DNA, 76 bp, Glycine max
ttaattatttcacctacacatcaatattactaatcatgtaaatacaaactccctacacaaactatctggtcctata

SEQ ID NO: 284090 - DNA, 234 bp, Glycine max
gcatgtttctcttaatggctaagatgatgaatcggaagggtgggtcgtcatcatcatccttagtcttcgatatagtgaagtgaaaatgtgagatacccagtattacgttcacatcgcatagtgtgaaccatccatggagaatgtttgggagatgcccactctacaacataagcaaatgttgattctctgttattttttatggtttattctcttatgttgtttggttatttggtg

SEQ ID NO: 284091 - DNA, 254 bp, Glycine max
  unsure (1)..(254): unsure at all n locations
agcttatcatattccctttcaaccaagttgaattctcaaaatgagtcttgtttatcaaaatagagagtaccctgaagtaaagtcggtctcactatacaaaatcattgccaagagtctaaaactttacaaacttatagaacataagatttagaanaagaacaatgaatattcacaacagcttcagatggttttaccacggcaagcgggtccttaaagaactagccttggtcattacttgaataatgaaagacaac

SEQ ID NO: 284092 - DNA, 220 bp, Glycine max
tctttgatggggaatcatttgatagtgattggtacttttttattcagaaccacctatagtcagcaggattgggaaggattgatagttggtcatctttgacttattttcgtgttggtttaacatcttttgttatgacgaatttttaaacatgctagataggtgtttatttgggtagggttgttctttatgctctatctaagacccatgttgggcctagttc

SEQ ID NO: 284093 - DNA, 368 bp, Glycine max
agcttgaaaaccaaaaaagcacaatcaactgccacaacaaaatgaaaccccacattaccattcttattgatacttttatatggttagccaagtggacaaaatgacccaataatttgataagaaccttcgaacaatgtcaccgcactgattaagaacttactaagaagagcaacaaactaaggtagagctcataccttgttaactggaagcgtagaaagctttgagctttgagcaccctcgactattccaagagcagtgtagggttttttcgacccacacagttccaacagcagtgtagggttttcttcgacttttcttcgataggaggttctgtgggttctatccagcgagttttgatagtatcgaaa

SEQ ID NO: 284094 - DNA, 406 bp, Glycine max
tatttgatgcatcatgactcttgactgcacagttccacattactcaccaagaccacacagattattggcatccacattaatgtggttgacggtgcatgtgagtgaacaatgtgcagttgcacacatcatagacaaatcttcattgcatcatgactcttgaccgcactataaagcatggttgtggtttaataaagcatcatattattaaagaaaatttaaaataacaattgaaaagcatggaacaatgacaaatacatgataaagactaacaaattattaaaatcaatacaacaaagttgttaaattattcattataatttcagggaattctccagcttctgctctatctccacccaacttaggtcattaacataagaaggtgatgatgaattatgaatatcaattt

SEQ ID NO: 284095 - DNA, 354 bp, Glycine max
tgcttgaagacaagactatacgaggtatcttccttgggtatagcaatatctccaagggctaccgtgtctacaacttgcaaactaagaaactcgtcatcagtcgagatgttgaagtttatgagtatgcttcttggaattgggatgaagaaaaagtggagaagaatgttcttatacctgctcaactacctcaagaagaagctgaggaagaagacccaggtgaaccaccttcacctccaccacaacaacaagatcaagaactatcatcaccagagtctactccaagacgagtaagatctttggtggacatatatgaaacctgtaacttggccatacttgaacttggaagctttgaag

SEQ ID NO: 284096 - DNA, 406 bp, Glycine max
tcatctactatatccctttttttacataaatatcttgcaaataaaatggaatatgaatttatcaaagacctcaacacagatcatgatgattggtttctaaaagtgtgtattgttcgattgtggaatatttataacaagaaagatgagcaacacccaatgttattggaaatgatgttgctagatgaaaatgtaactaataacgaatgtcgaattgctcaaaaacaaataaaattaggaaattttgtagcacatgattaacctcagtcgaactcaaaaatatgattcaatatggttcctacgttcattcacttataaacacaaagggggaattttatcgaatagtttgtgagcgattacaaaggaatgcgaaaacacaaaaacaaaattcaagaaacaaaacaaaata

SEQ ID NO: 284097 - DNA, 351 bp, Glycine max
agctatggttttcggaaatctacactccctgttgtcttttggggaccagtttctcatgaacaggggcttgaccaggaatcatttgtatgggttggatatggaattcaggttgttcctggtttgatggtgctttggtggatgatggagatgatggtacagagggtgaaccaggagctgaagtttcttttggtgaagtagccatggagaagcacagcttttggagtggtttcgtgaatatctgagaagtgttgaggaatgctgatgataaccagattgccactaaaatatgagtttgaatgatgaatgtagatggacgtgtgaagcaacggtcgaatttgtgtttgcccagta

SEQ ID NO: 284098 - DNA, 409 bp, Glycine max
ctcagcttcacaagcaagcttccatcactttctctccctctccctccactcatcttctcctaccttcaagctcttacccatggcttcctatgttggtgagctttttcttgactcatcttttccttgaagtggcgtctccaatcatctttcttccatctccattctgctaccgttaaacttcaagaagcaagggactccattgatgaagatgatccaaggcctatatgctccacattgagttacattacgaaaaatacttgtttgaaaatgtaaacaattacaaaacatattatatatatttatatattttaaattacacacacacacacatattcaagttttacttaaactaaaaaatacttaaataatgtatgtggttactagaatatatttacaaactaactaattc

SEQ ID NO: 284099 - DNA, 357 bp, Glycine max
agctttaaagtgactcacatacttcttaatcgtttgattatgaagactttttcttacaagtgaattgtgtctcttgagttgcagaagaacacctccttagtcttgtaaggttttttgtggaaaagattaatcaaattgtaaatctctttactcatttttctatgtatggctttacacgtcttttggttatgcatgaatcacttagggcatgctagaatatggttttctagtttgggctaagagtaaggttttcttaagcttgtattcacatatgaccctagtgttgggtgatgtagctccctttggagcttgtatgccttggatcttcttcatcgatggagtcctttgcttcttgaa

SEQ ID NO: 284100 - DNA, 399 bp, Glycine max
tgaagtgaaaattacaacaaatgtgcttaaattggaattggagggtccaaattgaagttcttttatggagaagataaaaaaaattgcaaagaaaaaatcagctttagccaaacagcttttggcataaactgaatttatacaaaagtgcaaaactgcaaagctgcaatatctctttaagcccaaaattttgacttaaataaaccctcgcttaagttgagatttttaggattgtataaatagatattcacgctaatttttaaggacacatgttcctcactttttaaaaacatctcctttattaaagttcttctccaactctcttcttccattgatcttccacctttcttgcttttggatgctactcatggagatgggtagctaagtccttcgttgttggga

SEQ ID NO: 284101 - DNA, 367 bp, Glycine max
  unsure (1)..(367): unsure at all n locations
agtcttgtagaacgcctggacatgatatatgtcagggtgttggtttggccagcggttcagggataaaggaatgtcccacattatttccatgacatgcgtgcaacaatgatgattcaaaaattttatgcaaaactagtcatgcatgcacctatgtggacactcaagcatcaagttttgtggtcatgtgatactaatgcttaagattaatttttcctatttaagtcaacccagtgtttccaaaacatgctcttttataaattcatgcattcatccgagtccattttgggtgttcgggaaaatnttcacagcattcacccttcaagtgtatacacattttgtcaacaaaacccttttgtgttttgatcgg

SEQ ID NO: 284102 - DNA, 400 bp, Glycine max
tcaagtgctaatataaagtatatatgttggcatttgataaatactattaccgatagtgatggccaaagaattaccactacatcccacaatactatttttattatcataaaacatgcatgctagatgtcgtaacctaccctacaaccggacgatgaaaggaaataagacaaaagcacgttcatctcctatggagaaaacgagtgagagtcgccaccaacgtttatttgaggaaaatgttagaaaaatcaaaaagaggtctacgaatttgaaaagaagggttcaagagttgtttaatcgagtgtgcaataaaaataacgtgactacaaaattaattatttttcccaagaacggtgaatttcttttcttttaatatattatttttatttatttaatatttttt

SEQ ID NO: 284103 - DNA, 342 bp, Glycine max
gtatctatcgcttgaacatagaactgccacatctcccatcataatgatgcataatctataaccaaatactcttactaagggggtcattcataagcatctactatggcacttctagaatgcgactgattataatattctctagaacagcatcgtatctggcttctgatcctgatctgttactggtaacgttgatatcttcagcataccaacaacgtgtactataccatcaaaaagtatgggtttttagacctggctgcttctgcattacatgcaggtgtagaaataaattcatatgaaccagcgccctaccggaagctatcagttttccaatacctctgatat

SEQ ID NO: 284104 - DNA, 366 bp, Glycine max
gttgatgcgcctttcgatccccaccaaagtctatcccacatacgttgaagatcgtcctttagagttgtcggaagcacgtatatactcatggtgtaatgaaggaattgatcgagcacaagatgtaatgagaacttccttaccagctgtgggaagatacttccccaatctgtgatatgatgcatttccaaattcgatcctctacataattggaaattgctttctttgctctgcacatgataaatgagaggcccaagtattttccagaccctatgattgtatagacaccggaacataacatgattgagtgcctcaaagattgctgagtattgttgctacacaatatatatgacgtgtctaaggtgatca

SEQ ID NO: 284105 - DNA, 318 bp, Glycine max
atcttcatgctctcaaatatgacaaactatttgtctgcccttctctaaaattgctgatattgatgcacctgctcacgagatattatagtgtaatgctgcactggccacttcgcgggattggggtagtattatcatacctctatgtaactttcttcaacatcacctaaaatgacttgaagaagctccattgactgtggactttctggtgaaggatcaaaaatgaaacattaccgaatgtataaatgataactccgttccatgttatacttcataccaaaatcagttaccctattactaaatatactctggattctcttt

SEQ ID NO: 284106 - DNA, 260 bp, Glycine max
caacacagaacatgaaaacggcgggggcgaaacgagaaccgctcgatcgcgcaacatttacgacaagaaagaggagcaacccccaacgttattgcacatgatgtggaccgacgaaaacgtcgcaaacaaacaaggtctgatcgcacacagccaaatgaaagcaggaaatttggccgcgcatgattagcctcaggaggactccacaataggagacacaatggttggaacccccattcacacatacacacaaaaggggaatc

SEQ ID NO: 284107 - DNA, 101 bp, Glycine max
taaactaaactctgtaccccaggtgtcaaggaactgatttggactatgtagacagtaacctcgtaaacattaagcatctgtgtctcccacaatggctcaaa

SEQ ID NO: 284108 - DNA, 364 bp, Glycine max
ttagatgttaggtgatgcaatcctactttgcaaggtcattggatagaaaactccaagttgattgggccttagattcaagatagagcccttaggtacttataaccttatggtaaatttctggcccatggtctaagtatgaacccacttatgtttgcaaatattatataaaagcttcattattcttgggccttgtatttacggctccctaatgtatgtacggtaccctaaatatataagattcttcagcccttgtgtttaagggcacctaaactagtttttgtattaggggtatgttagtaattccacatgcactaagtggatatttgatgtgtgtggaatgaaattaaattaattgagttggttc

SEQ ID NO: 284109 - DNA, 314 bp, Glycine max
atctttcagcaaattcaaacgacaataacttttttactcagatgtttgattgagtcccgtgatatatcgagacgatcaacattgaattttgaggttccgagctatttcaaacgataataactttttactcagacgtttgattgagtcccgtaatatatctagacgctcgagattcaattctgaacctcatagcaaattgaaacgagaataagtttttacttggatgtctgatggactcccgtaatatatcgagacgctgtaaattgaatgttgaagctccgaccaattcaaacgacaatactttttactcggag

SEQ ID NO: 284110 - DNA, 384 bp, Glycine max
tcaacattcaatttcgagggtctcgatatattactgtactcaatcggacatccgagaaaaaagttattgtcatttgtatttgctcagagcatcaacattcaatttcgagcgtgtcgatatattacgggactcaatcggacatccgagtaaaaagttattgtcgtttgaatttgctcagagcttccgtattcaatttcaagcgtctcgatatattacaggactcaatcagacatccgagtaaaaagttattgtcgtttgaatttgctcagagctttgggattcaatttcgagcgtgtcaatatattacaggactcaatcagacattcgagtaaaaagttattgtcgtttgaacttgctcagagcttccgcattcaatttcgagcg

SEQ ID NO: 284111 - DNA, 316 bp, Glycine max
agctttcgtaagtgaaatcaggtgcagccatttcccttagagtcctctcacgaagtggaggttgtgccatgttctcaaaatgtgcaaaatcagaatgctcaaaatcagaatgctcaaaattataatgctcaagatcaggatgttcaaaatcaccaataacagaatgcacagattcaccagttatggaatgctcagaatgatcaaaaggtataaaatgatgcctaactaatctatgaaatgtcctatctatctcaagatcaaaagggttgtagtcagatggattgcctttagtcatacactacattcagcatgcaca

SEQ ID NO: 284112 - DNA, 405 bp, Glycine max
gaccttagaatctcagctcacatcagacccttccgggtgctggaactacttcacatggacttgatggggcctatgcaagttgaaagccttggaggaaagaggtatgcctatgtgggtgtggatgatttctccagatttacctgggtcaactttatcagagagaaatcagacacctttgcaactgtcaagcacttccacatctttggaagtccatgttacattttggcagatagagagcaaaggagaaagatggatcccaagagtgatgcaggaatattcctgggatactctacaaacagcagagcatatagagtattcaattccagaaccagaacagtgatggaatccatcaatgtggttgttgatgatctgtctccagcaagaaagaaggatgtcgaagaagat

SEQ ID NO: 284113 - DNA, 126 bp, Glycine max
ttcttgggcagatgatagcagtcacccgtcttatgcataacagccctattgcatcgttgatcctttaataggttggggttattacttgccttctatatacaaaaacaagccgacatggcaacatat

SEQ ID NO: 284114 - DNA, 281 bp, Glycine max
  unsure (1)..(281): unsure at all n locations
tgtcaccccatcaaagacttagtcttgtatgcatattctagtattatcagtatgcactaatcaacatttgaaaatggctgcgngtatcccacggtccgtattgaatcccacaacacactaatagtgactggttatcaattgaaatgagtgtttagctataaatacaacatatatcttttccagcgagctgatgtttttgtttacacgtgacgaagtcggtgttcaagtactaatgaccagtacttttataggagactatacagttgtcgtcataattataa

SEQ ID NO: 284115 - DNA, 479 bp, Glycine max
  unsure (1)..(479): unsure at all n locations
ntagaggccttnatagaactgtggcgctttgattgcattcgactcaccatangcgcgaatnacacccctccgtgcccgcgtgactccttttttagtctactctgcatgcatgcatatcttaagctatccgagatctgacgtctatagacagttgttctgatgcgtcaatcgtttataccgactcactgattatacgacattcatgactaactcgttacatcgatggcgtagctaaagccaatagtgtgcggataagatgcgaacctaatatntcagtatgctgatcattagcattggtgcacttcctaaccaagtgagaaactcttttagaccatctagcattttgttattttcatgctgatcacaataaaagcgctgcttgatgcaagcattctaacattaaaaattttagcatgacggattgtgtcatatatataacacccttctgaacctttctacctacttaataatggggttcg

SEQ ID NO: 284116 - DNA, 515 bp, Glycine max
  unsure (1)..(515): unsure at all n locations
ccctaccatcncactctagctacatgattaggttatcgaaaatccgacaaaacggtcattgtccctaaccgccacaacgaaactganccttgaaactgatacctcgctatcaggaccttacaatctcagctagatctccatcaacttttgacttgtgaactttgaaccaaaaactctggacatactgctgggatcgcttccgtggcataagattcccatcaggtattaagaaaatcgtgaagaaatgaatctacaaaataatctcccatctatgtctatacacagttaatgaaatttgcgtatgagaaacaggacattatttcgttcaatatataaaatggataccagcacgcatcgcgcgaacacattgtagcacactatctgtccccaaatattcaggatctagatattagcgataaaattccataaaaagaacgcttcataagcttaatgcataataatgattaactgagtctaataataaaaccgtaacacatccagatagtctctaaacg

SEQ ID NO: 284117 - DNA, 423 bp, Glycine max
  unsure (1)..(423): unsure at all n locations
cttgatcctttgancctgaggcattgaaanccatgcgangccgctcacggacgccctcccgggtacccgaggaatttgtanggggcacgctttgcaagctttgtcggggagaacaatctcgcacatatctacgtgttgagacacctctcgatcgataaaggctacatgacacgcgcgtttctctctctctcccatagccgtacggtcgacaattccagcatttttgacactgtaggtatattccattgtcagctatagcggcggctgctcatacaggtttaaggacggacggctaccagcgtacctacctccatacaagtggatacatggtgtgaataacatactagaggggacactgccggcgaaaccccgcctaactccggctctacctcaatggcctcatactacgccctgagcattacg

SEQ ID NO: 284118 - DNA, 365 bp, Glycine max
tttcttttcatttgagattcaacattttaaatttatattggtggtggattgcagtatgactatcaggtgacacagtaatattaattaatagataaaggatgcaaatttaagtattaatgagatactaacctttatttacataaataataacaagtaatatgaaacttttgaaaaactaaaagattaaaatataaattttaaaaatattaataattaaaataaattgttttatacatataggtttaaaatgaaaactttagaaaacataaaaaaattaaaatgaggattttaaaaacataaaagatctaaaaaaactttgaaaacttaatacatctaaattaaaacaacactaactatgatggatc

SEQ ID NO: 284119 - DNA, 404 bp, Glycine max
tatccttgatggaaataaattatttatcatagttgtggatttcttgtggattccgaagccttatctgttggtaaggctgctgttggaaacttattaggtggaatcggctacttctatggccagtcaaagattgctctttcaagaatccttaatgtaagttactttattttgttttttatagtccttattgaagtgtatgccaccccttaatagtgcataacttgacatgtgattatcataaatgtgaaaactttgtttcttgtgtttgattttctgttgataaagaggagattttagagacgagaaaaagaaatacgagaacagaggattgctaaccaacaaagaggattctagccaaattaaaaatttcttcagttgcatccataaatgaattaatgcttact

SEQ ID NO: 284120 - DNA, 54 bp, Glycine max
  unsure (1)..(54): unsure at all n locations
tcatccgcttattatcacttattcangcgttaacaccatgcgtttatgtcacct

SEQ ID NO: 284121 - DNA, 135 bp, Glycine max
  unsure (1)..(135): unsure at all n locations
gtgcggtatttcacaccgcatatggtgcactctcagtacaatctgctctgatgccgcatagttaagccagccccgacacccgccaacacccgctgacgcgaaccccttgcggncgcatcaaatataactacgtan

SEQ ID NO: 284122 - DNA, 361 bp, Glycine max
agcttgttgcttatgttgaaaagcacgaccacggaaactggcattcagtgcctgccaaagcgggtaataaaacttttttgtattcctttttactcaatctatgaattgaggttttaaattgcggttgcaaatacattttagatttgtgatgatccttgatattgtgggacattgtagacaaatgcagtcgatcgataaggttgcaattgtagttgcaatgtgaatgcagatattcctaattttgtttgttacatacatttatatctaggtcttcaaagatgtggaaagagttgcatgctgaggtggatcaattacctcaagccagatataaaaagaggaaactttatcatggatgaagacc

SEQ ID NO: 284123 - DNA, 401 bp, Glycine max
tgggtgatgggcggccgaatcaccttgctaggtgtgacggggactccgaacgactggcagagtcctgtgatcaaggcgggaaatcccagggccctgttggacttatccgggtccagagggtgcctggtaggcgccatacctgcaaatatatagatggcatcagtgattagctgagccacgtgaatgctcatccgtgtcaggatggcgtacaccagctgacacttcggcagggggaggtcagaattatgatcgctgggcaggatgttgctaagcagcaaagtcatccatatctgagtcagggtggtcatgttggtgcgcatgatccgcacccgtcttccggcagcagtccgggcaaaatcttgccccggtatacatagcaactgggtgatggcctcctcatc

SEQ ID NO: 284124 - DNA, 349 bp, Glycine max
atcttgttgcttatgttgaaaagcactaccacggaaactggcattcagtgcctgacaaagcgggtaataaaacttttttgtattcctttttactcaatctatgaattgaggttttaaattgcggttgcaaatacattctagatttgtgatgatccttgatattgtgggacattgtacacaaatgcagtcgatcgataaagtagcaattgtagctgcaatgtgaatgcacatattcctaattgtgcttgccacatacatttatatctagggctgtaaagatgtggaaagagttgcatgctgaggtggatcaattacctcaagccagatatataaagacgaaacttcatca

SEQ ID NO: 284125 - DNA, 400 bp, Glycine max
tgggtgatgggcggccgaatcaccttgctaggtgttacggggttgccgatcgactggcagagtcctgtgatcaaggcgggaaatcccagggccctgttggacttatccgggtccagagggtgcctggtaggcgccatacctgcaaatatatagatggcatcagtgattagctgagccacgtgaatgctcatccgtgtcaggatggcgtacaccagctgacacttcggcagggggaggtcagaattatgatcgctgggcaggatgttgctaagcagcaaagtcatccatatctgagtcagggtggtcatgttggtgcgcatgatccgcacccgtctcccggcagcagtccgggcaaaatcttgccccggtatacatagcaactgggtgatggcctcctcat

SEQ ID NO: 284126 - DNA, 316 bp, Glycine max
  unsure (1)..(316): unsure at all n locations
agcttgtaggattatggggtacccatcacatgtggtactaagtggcggtcgggcgatggtgcacaacaagttttccacatccacaaatcgcgcataaacccaccatcccctgttgcccacctccaactgagctcacgtactcccacgtagcccatatcctcgtttctctcaacaccgggtccccatcaatcctcccaagcttncccaacatccaagtaaaacaacattccaacagcacaaactatcacagccaagataacagagcataggcagataactctgccaaaacaccaaccaaaatcacagcttttctcac

SEQ ID NO: 284127 - DNA, 400 bp, Glycine max
tgcttgtggagcttctatggaggctgtatctttgtgtcttaatgaggtcctttaatggtgattttccaccatggagatgcagcggaagacaaaggagaagaggtaagaggcggcgccatccactagggaataagccatggaagaagaagcttcaccaccaagatgagccttggataagaagcttggagaggatgcttcaatggaggaaaagaaagaaggagagaaagagagaggggggagcatgaaattgaaggaagaaaaagggagagaagttgaactttgagttgtgtctcacaagactttcattcatcaaagttacaaaaagtgttacacatgcttctatttatagactaggtagcttccttgagaagctttctttaaaaaacttccttgagaagct

SEQ ID NO: 284128 - DNA, 352 bp, Glycine max
cttcaacttctgaccacttccagggtgctggaactacttcacatggatttgatggggcctatgctagttgaaagccttggaggaaagaggtatgcctatgttgttgtggatgatttctccagatttacctgggtaaactttatcagagagaaatcagaaacctttgaagtattcaaagagttgagtctaagacttcaaagagagaaagactgtgtcatcaagagaatcaagagtgaccatggcatagaatttgaaaacagcaggttcactgaattctgcacatctgaaggcatcactcatgagttctctgcagccattacaccacaacagaatgggatagttgagaggaaaa

SEQ ID NO: 284129 - DNA, 398 bp, Glycine max
taaacattcaatttcgaggctctcgatatattactttacttaatcaagcatcccaaaaaaaagttattgtcgtttgaatttgctcacagattcaacattcaatttcgagcgtctcgatatattacgggactcaatcaaacatccgagtaaaaagttattgtcgtttgaattggctccgagcttcaacattcaatttcgagcgtctcgatatgttacgagactcaatcagacatccgagtaaaaagctattgtcgtttgaatttgctcagagattcaacattgaatttcgagggtctcgatatcttacgggactcaatcagacatccgagtgaatagttattgtcgtttgaattggctcagagcttcaacattcaatttcgagggtctcgatatattac

SEQ ID NO: 284130 - DNA, 155 bp, Glycine max
cgttatgacgttctcacttcctctggccataagaatcggatgctggataagcgcctgcaccggtgcattatgactgggctgactttcctgatatgagcgatgcgctcactgccctgtattcctgtccggaatcctgcgggcctgctgcgaagtga

SEQ ID NO: 284131 - DNA, 336 bp, Glycine max
tgtctgttttatgccttgacttccttatgtcgttgtgcctacctcagggctgtatcatacgctgaagaacctaccaacgtgcaccaagccaggaaacatcaaagcttgagggaagcagtgacctgctaaataaaggccttagagtcaggtcatcctcgctacgttgtccccactcacccatgagctcgtctaaggggttgatactgggtctattcaagcaagcggtcctctgactgtagagtcttctattacagaagcctgactcgatgcctagaggctctttgggtagagagaatcaactacgggggaactttctctcttgtaataaaatgacca

SEQ ID NO: 284132 - DNA, 238 bp, Glycine max
tagcttatccttatggcctgactccggacttcacgccccgtgccaccccggaagaatataagccaagcccctactttcgaggggcaactcccaccttatgaagactatgccgggcgagacgatggggaaagagaatcccatcttggccccctgctgcacctgaaagatccgtcctcgcatgaactaccccaaccgaacatatgccgtataccccggcctaaccacacccgtaaaagaa

SEQ ID NO: 284133 - DNA, 389 bp, Glycine max
  unsure (1)..(389): unsure at all n locations
tctagattagtgtaccagatgaccgcggctccagccaagctatcttggaagaagtgcatcaacaacttttcatccctagaatgcacccccatcttgtgacaatacattttgagatggttcttaggacaagtcatccctttgtacctgtcgaaatcaggtaccttgaattttggggggatgacaacgtccggtactgagcaaagatcctccatgtccgcgaatggatagtcgccaaagccttcaacagctctcaatctctcttcgatgagatcgagtttccttttttcttctgctgccaggggtggcccttctacggacaagaatattggttgtgctgggaggtttcgaggttctcccgtgaggttgggctgangtaatgtgttgggtgt

SEQ ID NO: 284134 - DNA, 352 bp, Glycine max
  unsure (1)..(352): unsure at all n locations
ctttatgcaagtcaattttcaggaggtatctcggagaggatcttttccgggcatatttgcgcaaaatctcttgaactaggaagatgttgtccatcatctttctgttcttaatgaaaccagtttgagtttctccaataatagtctcaagcactagggctatgcgattgaccaaaattttagacacaatcttgtataacaaattacagcaagatatgggtctaaaatggttaacctgngaggcctgatcatgcttatgaataagcgcaataatagcatggttgagctgctttagaatttttctagttgtatagaattcattaaccgctgcaaatatatcatcaccaatgatatt

SEQ ID NO: 284135 - DNA, 391 bp, Glycine max
tcaggttgctcattgattccaattgctgcaaatttgacagagatctgtatggtgatttgcagaagaacatagaccacagactcttgcaataggtgtagatttatgattcatggcaagctgagttactaggttgaccaaggcatcaagttttccttcaagctttttattttcagtagatgaagatgaattcgtggccacctcatggactcctctaagaacaataacatcatttcttgcactaaattgttgggagttggaagccatcttctcaatcaaattcctagcttcagcaagggtcatatcaccaagagctccaccactggtagcatcaatcatactcctctctatgttactaagtgcctcatagaaatattgaagaaggagttgctca

SEQ ID NO: 284136 - DNA, 143 bp, Glycine max
tttctccttacgcatctgtgcggtatttcacaccgcatatggtgcactctcagtacaatctgctctgatgccgcatagttaagccagccccgacacccgccaacacccgctgacgcgaaccccttgcggtcggctatatatct

SEQ ID NO: 284137 - DNA, 480 bp, Glycine max
cccccacaactattagaacttttaattgcatctgcaaatcaattcaaaagcgctactgaacttaaactggccatgagccttgaccacctaggccaattttactccggccccgggttctctttagacacctgcagcttgcatctctggaaacaatgtaccctggggctgaggataacatcttctttttgagatccatctaaatgcttgcaagactcagtgaattactatcttccagtagccgcaatggaagacaacattccggtatcaaactctgtgtcacttgcagaaactgtgcccatcatggcccgggaagaacatgatgaatctctagcatgcacttaacatgtatctttagggtaagctccccgaataccacctgcattcccttggttaatttgaaacgtcccttgctttattgctgggaaattttactgaaagaaaaatcaagttttaggaatacttgctttaaatatttttggt

SEQ ID NO: 284138 - DNA, 387 bp, Glycine max
tcctgtaagcttcacagtcaagcagtcaagcttttttataaattctcatttaataaatgtttatcgaataaggcaagtttggataaacttctcaacaattacttataggagaagaaaataaaatgaattgaacttcacttctttcataagttaaaatcaacttgtgcacttcgacttctataaaagttctctcatccgacttctccaaaaagctgagatgcattatgtttattattttcttctcttacatgctacaagggcttattaagaagtttatctaaactgacccaaaggatttaattaagttatttccttctcgaccttcttcttgcggtgctagaatttcaattctggaagctctgtttgatttgaaatagcataaggatg

SEQ ID NO: 284139 - DNA, 368 bp, Glycine max
  unsure (1)..(368): unsure at all n locations
agcttcatgatgaatcaagattgattcaaagagtttcgatgataacaaagatgatgacaaaaagctcaaaagtcaagaacacttcatgttaacaaagatgatgacttcaagaatcaaagaatgaattcaagattgaatcaaaaacacttcaaggatcaaaaggaaatttgatttcaagaatcaagaatcaagtttcaagattcaagttccaagaatcaagatcaagattcaagactcaagattcaagaatcaagagaagattcaatcaagataagtattaaaaagttttttcaaaatctgtgtagcacattaatttttctcanaaaccttttaccaaagagtntntactctctggtaatcgattacca

SEQ ID NO: 284140 - DNA, 406 bp, Glycine max
tgtaagagataccaaacataattggaatgtgctacctcattgccattctttagttcaccttaaaaaaatattagatagtgcataatgacatttgttaaataacaagtcaaatgtacaccaatgcaacttgaaaaaatttaaataataattatacacaaaaaagcattgtctaggtacgtaccattccgaagcattttttttcttcaaatcttttaattggattaatatattttgccttttatgtattaattgaagattagctgagctgaagactaaaatctatatattacgaaatagcaaaacataaaaggtgaaaatattgataattaattttgtcaactatcatatatcaatcatgcatgctatgatccatggattcatcactaaaccagccttgtccaagttg

SEQ ID NO: 284141 - DNA, 367 bp, Glycine max
agcttctcggctcatgctgggaacgcctctagttcaacacccgtgcagcctaaagcacccacccagagggaagctccccaagttccaactccaaacacgactcgaccggccggtaattccaacacgacaaggaacttccctccgaggccattgccggaattcaccccgctcccaatgacgtacgaagatcttctaccatccctcatcgccaatcatttggccgtggtaactcccggaagggtcctcgaaccccctttcccgaagtggtatgaccctaatgcaacttgcaagtaccatgggggtgtcccggggcattccgtcgaaaaatgcttggcccttaaataaaaggtccaacatttaatggatg

SEQ ID NO: 284142 - DNA, 431 bp, Glycine max
agcttgcgagttcaattacgagtgcctgtatattgatgcgcctgaatcggacatacgagggaaaagttatgaccatttgaatttctcgagagcttcctatgtttaatttggagcgtctcgatatattatacgcctgaatcgaacctcagcgttgaaagttatgaccatttgaatttctttagagcatccgatgttcattttcgagcgtctctatatgtgatgaaccttaatcggacctccgtgtgaaaagttatgaccatttgaatttctagagagcttacgttgttcaatttcgagcgtctcgacatattatgcgcccgaatcggacatccctgggaaacgctatgactatttgaatttctcgagagcttccgttgtgcaatttcgagcgtttgaacatattgtgcgcccgattcggacatccaggggaa

SEQ ID NO: 284143 - DNA, 362 bp, Glycine max
  unsure (1)..(362): unsure at all n locations
agctttcaacaaatgtcttcacaaataatcatcacacagcagaaaactaacaaaactacccatcatatctcccaaaaccccatacccacgaaaatcaaaggggaaagaagtccacccaaacctgaaatttcgaagtcccactcgtagccatgcacttcacgaccccgaaaatgccctcctttcgcgatttggggcaaaaatgatggccaaaggttgaagctttgcttggagcttcaatggaaaatgaagaagaagaaaatggcaacgtgagggagagagagagctgtctgaaaagctntctggtcttaaataaaagggttatctctttttctaattatttatttaagcaatgccacatgtct

SEQ ID NO: 284144 - DNA, 396 bp, Glycine max
tccatcaagaaataggagaaaataatggcacatcacacgctgaatgaattaattcaaaaagaagaaacatatagtaagattaatgtacttgttgcgataaagacttgaccagatgtgtcggccaagcaaggaaggtctaaattgcctaccccacttaggaaacctcatgagtgggtacaggaactgaagcatctgcatctataacctcctccacacttacctttacttggccaggcaacaaaggagtgttatgaacaatagtggatccctcataaactctccccagggcaaccaggcgggcaggatctacttcgatgtacaagccgcacctatctgagtcacctatctcaggatcgtttcctgagggatcaacacaactcccctttgtgcttactc

SEQ ID NO: 284145 - DNA, 155 bp, Glycine max
tatcttgtggagtatacatatttttcaaacatgggctatgttggaatgtgaccactttgagttccctggaagcggcactatgctatctgagggcggaaagcttatgttcatgctctaaaacaacttcttccagtgcctttgtaatctggggacgt

SEQ ID NO: 284146 - DNA, 400 bp, Glycine max
tcctagctttgaacaatcttaattaatgttagtgactttaaatggaccttgcaagtttgctgtcctatattttttgattgacgaatgtagaaagtagaatgtaataatgctgattccgtcctcacgtacgttttctctcttgcgtattgactattgatgatatatatgacagaatgacacaaattaaaatggcttcatggaacgtacgatgccaactaaaaagttgtgaatcagttcactatgcagaaggcatatcttcctcggccctcggaacaaaagtattagactattaccatattttatttttgcaattcctttatgtgttatgtatttttcattgcttaattaatttatcgtcaagtgtgtgtatatatagagttggcttgtgaggccatccaca

SEQ ID NO: 284147 - DNA, 366 bp, Glycine max
  unsure (1)..(366): unsure at all n locations
agcttgttcttttagtaattataattaatactacctccatccctaaatacaagactcttctttgagatttgtttgaactgtaagcttgcattaattatctttatactaaaatacccttaattactttacaataactgcattctcattcttataaggattggagaagactaacacacattaattaggcagaattgtatttgatacggtgatatgaaatatataagatgcaatactggtaagatacatatttagaaatgtataaaaattcataaaatataataaatagttagttgcaattctaaaaatgcaaattcaaaacatacttctgagacanttctaacaagaaaaagtttatcataaattact

SEQ ID NO: 284148 - DNA, 402 bp, Glycine max
tcacgtcatcacctccgccgttcggaaatggcgcctttacctgttaggatacccatttgtaatcttcacatatcacaagagtataagggacctcatgccgcaagtgattcagactccaaaatagcaaacatatttatctaagttgtttggctatgattatacgatcaaatacaagtctggcacctctaacatcgttgccgacgctgtatccagaattacggccatagaatccattcagttatttgcgttatgcatgccacacttcatattcatggaccaactttgccaatcattctttaccaatcctgattatgtttaattgcgacaacaaatccaacaaaccccagaagcccatcatggtttcacaatccatcaagaactcattttcgataagggcaaagt

SEQ ID NO: 284149 - DNA, 348 bp, Glycine max
  unsure (1)..(348): unsure at all n locations
atcttctcgagaaattcgaatggttataacttttcacacaaatgtccgattcggggacataactcatctagacgctcgaaattgaacaacgcaagctctcgagaaattccaatggtcataacatttcgcacaaatgtccaattctgggacataatatatcaagacgctcgaaaatgtattacggaagctcttgggaaattcaaatggccataatttttcacatggatgtccgatttgggaaaataatatatcgagatgctcntaattgaacaacgaaagctatcgagaaatccgaatggtccgaacttttcgcacggatgtccgattcggggacataactcatctaga

SEQ ID NO: 284150 - DNA, 574 bp, Glycine max
  unsure (1)..(574): unsure at all n locations
ccgccaccacncactccnactcttntcantactanattaatgtccaggaactcgagttaagcaatgtacatctcancncancccaagnacgccagcaaaattgaaccctttgattcgctgagacaccatgngacactgtagcatgctcgagctacacagacatagatacgagaacgtggctcctcttcacttgcatcattcatttagatacacacttgaccaataatattaggagaattgcataatagcacaatggctagatagacacgtgcaaatggacgccacctgcaactagccacaactgccataatatttatacacattaaagcttccaataggcacatgccattgctaaccattgggcccttacaacaacttgaactagaccaacatatgccgccttatatgaataaaccgaagaatatctgatggtgaacactctatactatgattggcccattatttacacatactaggcgctcttatagttagacaatgtggtgccatataatatctatatcatgcgtgccatgatccatggacaaccctgtaattctctcctggacacttgggc

SEQ ID NO: 284151 - DNA, 312 bp, Glycine max
agctttgctatgtataacaatctcacctctatactgggaggaaccagtggtctcttccctttcaactctctagttaagaagtccagtttcttttcttcatcccattcactgtacgtgcccatatccaaataccttgtaattacatcaatggtttcagcatgtctgcttgattcctgtcacactgctagtttcaggccacaactgattatccaaacaataatgaacaaaaaactttgaaacatacctgacgcaagtcaagcttcattaacaccatgccaaaagtagcaactcttcgatcagatcagctagtcg

SEQ ID NO: 284152 - DNA, 397 bp, Glycine max
cggacgaatccgaacctaagttgctgatgtgtatccactaaaaaccagacactatcctactttgtctttccctttctctctctctctctctctctctctctctaatccaacgatcctagcctctcttacttctcgatctctacccttcgtcgtctctatttctactcggaacccttcttgcccttgcccttcctcctctcacctccatgacaacctcgatgacaagttgttcgccttcccctctttctttctccctccaaatctaggactccgacaatgacttcctcctcatcaagtcggaccttccacctcctctattggctcaaccctgacactgtgcaccactgtctcttcctccgatggatgcctctacatcgacaaccaggtttgcgagggt

SEQ ID NO: 284153 - DNA, 296 bp, Glycine max
ttctttaaaaacaaatcctttcttttacttatcattctcctcatgttgaatcaatctcatcaattccatctcatgtacctgtaactgtccaaacaaagtacaaagagacatgttagatagaactcgtgattcacttatggctgttaccctgggttgtgatttcctgcttaaacatctcacaactttattgataagatcttcattcggaaatatttgctctaaagatgcatgatgattaattatgtgtgtgaaccttttttgcatgtactggatgctattgtcataacatgcccttt

SEQ ID NO: 284154 - DNA, 380 bp, Glycine max
tctaaggaggtgagcttagttattataggggtgtgtgtagctaagctttagcttcttaaggaagttttctcaagaaagcttttcaaggaagctacctagtccataaatagaagcatgtgtaacacttgttgtaactttgatgaatgaaagtcttatgagacacacttcaaagttccacttctctccctcttttattccttcaatttcgtgctccccccttctctctttcttttcctccattaaagcatcctttagtgaaagtgaagaagcaaaaggggaagaatctagtgaagaaatctacccccaagaagaaggacaacctttaatggttaagggggagtgtaaggaggtaagtgtctcctccaagagactagctaaga

SEQ ID NO: 284155 - DNA, 227 bp, Glycine max
acaacattcaagcaaaacaacattcaaacagcacaagctattacagccaagccaaacaaggcaaaggcagaaaactctgcccaaaacaccaaccaaatcacagcttttctcacttaaagaccccagtaacaatttcttcgatccaattcgttaaccggtggatcgacttcaaaattttactggaagtctatagtacataagcctacattgtgaaccgttggatctac

SEQ ID NO: 284156 - DNA, 394 bp, Glycine max
ttctgcaagacatacaaaaaaatatgggatctagctatgatagaagtctctattgaggccattgtagcccttacccagtattacgatcaaccgttaaggtgcttcaagtttggggactttcagctagtaccaaccgtggaagagtttgaagagatcttgggatgcccgctaggaggaagaaagccataccttttttctaggttctatccctcctggcgagaatagccaaggtagtcaaaatctcggcacaagaattggaccgagtaaagcaaaatagaaatggggtggtcagaataccgaggaagcacttggaggagaaagcgaaggctttagcggatcaaggtaaatgggctttgttcattgacatcttggagctattggtatttcaagttgt

SEQ ID NO: 284157 - DNA, 416 bp, Glycine max
agtcgatcctgcagggcatggcatgctgttatctcactcattacgtcacagtctgaggacctgggcggtatacaatagtcataaccagatactctgtagcgagcgtagcgttttactcttactattcgtcgaacaattatgcagcgcctcggtagcatcccagtgctacagcctgatggcacacagaatgagtggcgtgtaaacaccatgagatcagcactgagcgacagacgatgcaatcgactaccgcacaatcaatgtattgctaatctgtttcgcctgcatcatgcctacgcagaaactctatgtgaccgcccccgcgaagaaacccgcatctgaaattcctaattaaatgtgctgagtgaatgattcggataactattcgcgcacttatgttcagaatagttcagaatatt

SEQ ID NO: 284158 - DNA, 392 bp, Glycine max
ggatgcctcctggcgctcgaacaaggttgcctgtttgctgatataaaatataacctatagcgatccattgcataaggcactcatggaaagtattgaacgtggtgactgcgttgatggtgtccctctaccatttgaagctgttgaagtcgatcatcgtgaacctggaactaatgggacccataacgctcatcacgatcatacctcatgtgatgtgctcgcactagactacgatgtggcgacctttgacagtattgaatgaatatcagtgaaacagtatgctagacaatgctacgcgcgtaatcggttcacattgttttgatgcataatgtcaaaatcctacgctactactgtactaaccgagcttacgaataacaatcattttaaagaactaa

SEQ ID NO: 284159 - DNA, 324 bp, Glycine max
atctttgcagatttggtcttcgccagtgaaaggatcaatgtgggtccgaatagaggcaaatttgatcatcctactacgacgactgagaaaactggggcaaataaagagggtgaggatgatggagaaacccatgctgtgactgccattcctgtactgtcaaattttccaccaacccaacaatatctttactcagccaataacaaaccacctccttacccaccacccagttatccacaaatgccatccctaaatctaccacaaagtctgtctaccgcactttcaatgacgaacaccacctttaccacaaaccaaaaacaccaccca

SEQ ID NO: 284160 - DNA, 391 bp, Glycine max
  unsure (1)..(391): unsure at all n locations
ntctagcttttcattggtgtattatgatctccttttggtgctctaaattatgggagtatgctcaaatatatagggcaattttggtttgttttcttgcttgattaggttgaattaagggtgtgtatgggatggccctaggcctataatgcatttttgaacaatgggacatgccacattgtccccgttctcttgctattgacgcctaaacgcgcgcccaccaagtgttcggtgaaatgcctcaatggcattagcgcgtgacttttgtaaggaaacaacccatggggcattttggtttgtacacattttctttttttggaatatgtattcattcctgaaaaaggctagagtaatngccccgcatatatcctaggcctaggaactaaaattttat

SEQ ID NO: 284161 - DNA, 154 bp, Glycine max
atctttatggtgaatcaaacgtgattcaaacgagtgttgatgataaacatgatgatgaccatagcgatgacaaaatgctcaaagatcaatcaactaacagctattgtgaatcaagaacaattcaggagttcaagattagaatcaagaagaattc

SEQ ID NO: 284162 - DNA, 384 bp, Glycine max
tgttggtcttctcataaagatctaccccttggttgtaattctaggccggttaacttctctgctccttgttgaattggttcttcggatgattcctccaacttaagccttgtatgaaattcctcccttggttgaatcccgacggtcctccttggttgtatccttcgaatccgaggcgattctgagctcccatgtagtttacttccctggaagaatcttcttgtgctatgcattgccctggctcgtgtgctcctccacagatgtggcatccccctatttgcatggctgaagaataagagggacttaccgcttatagttgttgtagaagcttactgagtgtctccgttatggactctatctgtcgtgctaatagcttgctttgggcca

SEQ ID NO: 284163 - DNA, 361 bp, Glycine max
agcttgtggatgctgatataataatttcctctgacctaatattacatagaaggaaaaaaatagagatggatattcaatatatagatagaagaaaagaaaacacaatcattttctactttctagtttttctaccaagctagtaaaatggaattgtttcaatccacatctttcatagaaacaaactaaatttgtcactcagtcaatagtaaagaggatacaaagtataatttaattgatgacattgtcatactgttagtccttcaaatgtattattattgttgatcacgcaaacttgttcatcaagtggttccccaacacctcgactatcatcatggagaatacgccttgagtagtaaacatt

SEQ ID NO: 284164 - DNA, 406 bp, Glycine max
ttgtgggtgtaaccggcaccccatagaactggcagtgacccgtgatcaaggccagaaatcccagtgctctattggacttctccgggtccactagatatctgggaggtgcgatccttgcaaattggtaaatggcatacaagattagctgggccacattaatactaaattgagtcaagatggcataaaccagctggaactttgggaagatcaaaattatgatcactggggagaatgttgctgagcagcagtgtcatccagctggctgttcgcaaccgacaagtgtaccggatcgcacaagtagtataaaatggtaagaaccgagtatcaaactctcggggaacttgtgttatctggcaagctatttcgataaataggcgtctagtatgaaaatatgattgtggttatg

SEQ ID NO: 284165 - DNA, 360 bp, Glycine max
agctttgcactgtcatggatcttctcatggcaatatcgttacagcaagactgaaaagacaaaccaatatccatcactacaaagacacgcatttgtaaaatggtggacacaatttgactcatccaaagcggatccagaacaagtgaaactctggttccaatcccatccagaattcctcaaagcagctaatccagaaacttctgtgtttttgaaccaaaagtctcatctggcagcatttttagcaggatcgaaatcaaaggaggtcttagctaaaaatctaaaggaagttctgcaaatgttacagcaggaagaagaaggttcatcctcaaagaaggaagaaacaagttctgctgaagaagaa

SEQ ID NO: 284166 - DNA, 401 bp, Glycine max
tgtaatactctatggaagtgaagactaacagtttcaccagagtgtttaaagaaaatggacatcatatggtttatgacattatccctactatgtaaagaaactttgctacttgttcttaattgttgctcgtcgtgtatgtcgaactccacttcaatctcttaatatggtgcatagatttgagaattgttgaggacccatatgaattacatcacaacatcgatcattgtcgcaaatgtatttcattatttcatctctaactctctccccgtgttctcttattctagaaggtatttgtgttcttctttgattgtttttcaatgcacaaattaaccatatcatgaacattacttgcatgatcaccatttgaactagaaaaaatatttgaatttaatatcttcact

SEQ ID NO: 284167 - DNA, 364 bp, Glycine max
agcttcggaagaaagtgatgaggtacaagccctaaaggcagagcttgaaagagcctgggtagtcgaagagaagttcaagtccatagccatcaaagtctgaaaagagtatgatgaactaagggatgtcaatatggccactgatgaagccttggaatgagaaaccaagaaggcccgaaaggaagaacatgaccaaagcaaagttttgaggggctttatagggcagcaatagtgagctcaagctccgaagaggtgaaaggaatcatcacgggtcaaaggcatgatcttgaaggacgagctaaaggcttgccttatgtcgaaaagaaaattgtcccaacagttaagcgagactgaaaggaatatgtgg

SEQ ID NO: 284168 - DNA, 389 bp, Glycine max
ttaaaagattggctaagattttgttaacacataatcacttagactatgaaggagagctggagttgctgcacatgatgtccaacgttatatcaaggaatgagatcgggctgcacaatgctcaacgctagatgaactgtcacatgaagtattgaagctgcacgatccacgatgtctaatacaatgtcctgacatgctgcccgataatactggacttgctgctcaatgcaagatataagtcaagtgctgaactgaagttgcatgatccacgacgtctgatacaatgtcctgacatactgcccgaaaatactggagtcgctgttcaatgcatgattacagtcgagtgcaaaattgatgctgcatgatccacgatgtcagacaccatgtcctga

SEQ ID NO: 284169 - DNA, 359 bp, Glycine max
agcttctttcatgaatattttgaatattaccacatgcatacgagaatagcagttagacaatattacattattccttgttgtgaatatgtttgacccaaatggttgtgatgacaatgctacatggctatgtgtgtatgtgtattccattaacgactgatgttttgctatatctaaatgcaagcgctgatattgtgatattaatgttaatgatgtgtggacggttacacttagaacaatgttatgtgatcaatcccagataggaagagtgtaaatgtgaggattattatatcaagaaatgtgagttaacaagatgaagtattgacaagggtagtaaaatgagaacaagatccttagataat

SEQ ID NO: 284170 - DNA, 398 bp, Glycine max
ttatggggggacactgaagtcagttgggaagcacatccctcattgaatacagcaggtggtatcttatgcatttagagtgagaaatcttttgtgctagagaggaaggtcattgggaatggatttatactgctgataggaatgtggcttcaagaggccgtgcgagttcacattgtcaacatttactcgccctgcgatattcagaataaaagattgttgtgggatagttttaagcagctgaaaagccccacatctgggggtctttggtgcatagtaggtgatttcaatagcattaggcagccaacagagagaatgggtgtatgccacagagctgtggaagacggtacctctagggagttcaatgattggattgcggagttggaggtagaggaagcaccatg

SEQ ID NO: 284171 - DNA, 364 bp, Glycine max
agcttggatgaactcttaacttatcggcctacttttatgcaacccatttcagaatagcttgcatgtttttgaaaatcttaccacaactatgctcctccagaaagattttaatttgaaatcttttttgtaactttggttcaagcacaataactaactctcctaagggtgttcatagcgcttattatttttaatatattatcataatgtaaaatctattgactaaacttatataattattatgctatattatttttcattaaaatttgtttaacatatttttgttgaaaattattaattttttacttttatttggaattattaaaaaaaataatataatcaaccttttttgtaacataatagtaaa

SEQ ID NO: 284172 - DNA, 394 bp, Glycine max
tagcaaattagaatatttatacctttctggaaacttcctagtgggccagttgccatcatcattgtttgggctaactaagcttagtgatttagattgttccgacaataaattagttggcccaatgccagacaaaattagtggactttaatttctaatttaatttatctggatttgtctggtaactccctgcacgaaacaatccccatttatctggatttgtctgggaactccctgcacgaaacaattccccaatggtgcttttctttgtcatcgttgttacgcttatctctttacggaaatcagcttacaggaccaattggtgaattctcttctttttccttgtattattgtgatctctcttataacaagctacaaggtaatatcccaactcaat

SEQ ID NO: 284173 - DNA, 314 bp, Glycine max
atctttctgcctgcttgtacctgcaatttgatttagatgaatatccagacaatgatgcatctatataggccacatgtcaatatccattacctgcacataattccgctcacatatgttgttaatatgaacaggaatcgatgcatctgttcctattccattcttctccatcagggatatcagctcactttcagtaaggaaatctggaggactggtgctcccctgcagaatttgtggtgttagctatgtgtaatacacacagaactccaatgggaaatgaatttcaaccttatttcttctccccagaaatggttata

SEQ ID NO: 284174 - DNA, 397 bp, Glycine max
  unsure (1)..(397): unsure at all n locations
tgtgcaatgtctgaaattgcgagtatttangaatatgaaaataagcagaattaagaatcgatgtataacgtcacggggttgaatgaataaactgaattaatattataaaatttggttttgtacttttattgtctacataaaattacaacaccaaatttttagaggatgcgatgtaaagaagtttttgaattttgatggacgatgtaaagaagtttgttttattaagttgttgaaactcaaatgtttgcattgtaaaaattgtcaaaactcattgttattaaacttttacttaaattacttggtaaacgaaaatgtataaatggttaattgtttccttaataacgaaattctatttgttaaatttaatagtatatttattgaaggaaattgtattact

SEQ ID NO: 284175 - DNA, 255 bp, Glycine max
tatcttatatatgaaatattgctcatgtgttaataggggtatgtgtattaatattcaactatcttctagtaaataaataacgatcatatttgggtgtggccttcctaactaatatttgtatcattttgatattgcaaattttctgtatttgatcaggaaagagattcgtgtatgcatatattaagtgaaggtacgatatctaagacaaaattggcaagaaatcaactaattagtgcatggctttatttggcgact

SEQ ID NO: 284176 - DNA, 375 bp, Glycine max
tatcttattatctgagattggatattatgtataagtataaattatattctaattattaaagtcatatatgtattagctaattgaagatgaccttgagaggctgaaactgtgcagagactagttcagcatctacccacttaattcccaacttcggaggagttgaaaatggggaagttgaaattgctcgcagagtggagggactatttcgctcaagcatggttctgctacattttctttttcatgcttataaattataatcatataccttctttttatttaagaatgattgtggggggtgtgatgtattgtatatacgataacacgcgttcaagtctctaaggaatatgagaaacatttagccgaatatttaatatg

SEQ ID NO: 284177 - DNA, 347 bp, Glycine max
agcttctatagaaggttcgttcctaatttctctacaattgcatcacctctcaatgagctagtgaagaagaatgtggcatttacctagggtgaaaaacaagagcaagcctttgctttgctaaaaaagaaggctctctaaggcacctgttctagctcttcctaacttttctaaaacttttgagctagaatgtgatgcctctggagtgggagttggagctgttttgttacaaggtgggcaccctattgcttattttagtgaaaaacttcatggtgccacccttaactaccctacctatgataaagagctttatgccttaataagagcactccgaacttgggaacattacc

SEQ ID NO: 284178 - DNA, 394 bp, Glycine max
  unsure (1)..(394): unsure at all n locations
tgtagaatggctagacatgatacatgtcagggtttggtttggttcaaggataaaagggatgccccatattatttccatgacacaaatgcaaaaatgatgatttggaaactttatgcaaaactggtcatgcatgcatctatgcggacactcaaatgtcaaatttttatggtcatgtgatgctagggctcangattcatttcctctattttaatcaacccaatgtttccaaaatatgttcttttatcaatttgtgcattcatccgagtccatttcgggcgtccggggaaatttcacagcattcacccttcaggtgtagacacattttccaaaaattgattatgatcaatgaattttttcaaagaaaggttggaaatcgtctcttttcaaaagcatg

SEQ ID NO: 284179 - DNA, 346 bp, Glycine max
agcttgtagaatggctagacatgatacatgtcagggtttggtttggttcaaggataaaagggatgccccacattatttccatgacacaaatgcaaagatgatgatttggaaattttatgcaaaactggtcatgcatgcacctatgtggacgctcaagtgtcaaatttttatggtcatgtgatgctaaggctcaagattcatttcctctattttaaatcaacccaatgtttccaaaatatgctcttttatcaatttatgcatttatcctagttcatttcgtgcgttcggggaaactttcacagcattcacccttcaggtgtagacacgttttttcttcaaaaatcgg

SEQ ID NO: 284180 - DNA, 390 bp, Glycine max
tggattgattcagtctaactagggatcgaggtttagtaatttaggctacaacatagaacacaaaagcatgattgattagagaaacatctttatatacatcagctggtttgttagaaaaactcaatacctttacctattgctatcaatcttacttgcatttttactgtttttagcctatacttagtttaattatgttctaaataatcaattatcaatgtttctttcaacaatgctttatttatgaatttaaccctgtctaatactagttccctgagtttgatactcagattcaatcgttttaattttaaatacttgacgatccggtgcgctttccggcaaatcggatttcccttgaacatatttgtataaagaaaaagtggaccaaaaagt

SEQ ID NO: 284181 - DNA, 355 bp, Glycine max
  unsure (1)..(355): unsure at all n locations
agcttaatataaaatatatgtttttttcttatgagaaacttattaaatccatattggcggatctatttcctcctttggagactgaaaattcttataaatattaccgtttactataatgacataataagaaaaaacgtctcacaatgttataaaacacaaaagataaaaaaagacaaccctttgaaaaagaagagaacaaattaaaaaaaaaaaaaagagagagctacattacaataataacacacttacaataaatgcttataacactntgtataatttgtttttctttatcacataacttgtcttatttaatactctggttacagagaaacatccttggcagagacagaaagga

SEQ ID NO: 284182 - DNA, 391 bp, Glycine max
tggaggacagctttgtttgaagcaagtaacttccctggccaccatattaccactcgctccgggtatgtaccaacaattcctttcatattttttacttgttttttttttcttgttgagtttctaaaacgtttcgatccattgctatagaatgatttcttatttttatttaaaattgacttaaatatgtttttgagatttattattcttaatctgatctccaagataaaatttatatgtttttagtccctcaaattttaaacatgttatttctagtggttcaataataaaaaaatataaaaaaaagtcaagtttaaaccataaaaaaaagtcaaaaagaaacttaaaaagtattttacaaatttaagacctcaaacttgagaaattaaaaata

SEQ ID NO: 284183 - DNA, 259 bp, Glycine max
atcttgtccagacactacattgattgaacagtataatacaattcgaagaagaaaatatgaaaaagcttagatacagctccttggtttttgatgttgttttccaatcagaattggagtttcactctagaagtccacataatatagatgtgcattaaaggattctgtagattattgaaatgaaactccaattctaactgataacagcaccaattgcacctaaagaactgtatgcaatgtttgtccaaaaaatataccttga

SEQ ID NO: 284184 - DNA, 389 bp, Glycine max
ttcatgacttgcaatctttctatagaatggtgacttatacgaaaatgccacaaatctatagggatgacattacattttggatgggtaatggcggagcatatggatcttgaatgtgatggtttcaaggtaagctgataaagcccatgactcacttcaactgtaccaatcttcgctttggtgttgatatcctgcaaaacacaagtattagaggagaagattaactcgtagctgtttgtggaaatgagtttggatatggatatgagattaaagctaaaagaaggtatgtatagaacatctttcaatgtaattgaagaggtgagatggacggttcccgagtgggtggcatgaacttcgtgtccatttggtaacttaactagaatgggtttaat

SEQ ID NO: 284185 - DNA, 323 bp, Glycine max
tgcttctttcatgaatattttgaatattaccacatgcatacgagaatagcagttagacaatattacattattccttgttgtgaatatgtttgacccaaatggttgtgatgacaatgctacatggctatgtgtgtatgtgtattccattaacgactgatgttttgctatatctaaatgcaagcgctgatattgtgaaattaatgttaatgatgtgtggacgggtacacttagaacaatgttatgtgatcaattccagataggaagagtgtaaatgtgaggattattatattaagaaatgtgagttaacaagatgaagttttgac

SEQ ID NO: 284186 - DNA, 384 bp, Glycine max
  unsure (1)..(384): unsure at all n locations
ntatggggggacactgaagtcagttgggaagcacaaccctcattgaatacagcaggtggtatcttatgcatttagagtgagaaatcttttgtgctagagaggaaggtcattgggaatggatttatactgctgataggaatgtggcttcaagaggccgtgcgagttcacattgtcaacatttactcgccctgcgatattcagaataaaagattgttgtgggatagttttaagcagctgaaaagccccacatctgggggtctttggtgcatagtaggtgatttcaatagcattaggcagccaacagagagaatgggtgtatgccacagagctgtggaagacggtacctctagggagttcaatgattggattgcggagttggaggta

SEQ ID NO: 284187 - DNA, 215 bp, Glycine max
  unsure (1)..(215): unsure at all n locations
agcttcaaggtcaatggacaccagctgaaaccattccccacaaatccctccttagtggatgtagtggtggaggagacctccttaattcaccctacgtctcttccgccatgacttanggagttttctttcttctctctccttctttacttttattgatcttatgattgtgctacattgaggacaatgtgttgtttaagtgtgaggggggggggggg

SEQ ID NO: 284188 - DNA, 400 bp, Glycine max
tctgtaatcgattaccagaagcaaaaatgactttgaaaagctttcaaaaagtttgaattttaattttaaaagatgtaatcgattaccactattgtgtaatcgattaccagtgacagaaggttttgaaattcaaactgaaaagacatgactcctcaaaaattaattgtgtaatagattaccacagatctgtaatcgattagcagtgagaaaatttcaaaaataactctgaaaagtcacatctcttcataagtttttgaaaagccaccaaaggcctataaatatgtgacttgtgttcgaaattctggagagttttttagaacctcattgtcttattctctcataagaaaaccttgggccacacactttcaaaacaattaaggattcatataagttcttcaag

SEQ ID NO: 284189 - DNA, 317 bp, Glycine max
  unsure (1)..(317): unsure at all n locations
tgtcttggttcgaggtacttacccgttgaagatcgaagaacgatgaagaacgaatgaagaacgtcgaagaacggttgaaatctttgcgaaattcctcacggaaaacgttacggaaacgtttcggaagcgcctcggcttanattttcttcacggaaacaatttttccaagcatattcgaaagagagagaagtgcctaaggggctgaaccccttccttcttgccttcctcccctatttatagcataataggggaggtggttgccgcccagctcgcccaggcgagctcagctcgcccaggcgagcagggttgcttcctcc

SEQ ID NO: 284190 - DNA, 400 bp, Glycine max
tgtaatcgattacacacatacagtaatcgattactttagcacattttcaaaaaatattctcaacagtcacatctttttatgtggttcttgaatggctatcaaaggcctatatatatatgtgacttgagacacgaatttaagaagagtttttggagaacaaaaaggtcttatcctattaaaaagcaaatcgtgttatcctcttacaaattccttggccaaattacttgtgattcaataaggaattatttgagtgctcaaattgttcagtctatctctttcaagagagatttcttcttttcttcttcttcattctgaaaagggattaagagaccgagggtctcctgttgtgaaagaattctaaacacaaaggaagggttgtccttgtgtgtttagaacttgt

SEQ ID NO: 284191 - DNA, 351 bp, Glycine max
agcttatcacattagggatagtttaaagtttaaaccaccaaaacatattgcattttataaatattaaaactaactctcaactcatattttagttgttaaaatagtcatataacacattaatatttttactaaaaataacatatctataaattaacgaacctgtgaagcttggtaagtttttctaaaaccgtacaaccaaagctactaaacccgaaagaaacattgcaaaaaaaataaataaataaaccctgacattttactaaataaactaggacaggtcataccttaactagaataagtcataaacatttaatgaacgatctaataacttatccctagcttttttttttt

SEQ ID NO: 284192 - DNA, 401 bp, Glycine max
tttaaactttgaggaatcatgaattcgaacagactctaaatatttttccagttttgctttttcttggatattttcctggcaatacagtacaacaaaacataaagcaacaagcaatttccatccttgtagagacatgtctttgttaagtggtggaatcaatttgacacaacaaaagcagaactagacaaggttaaaatctagtttaaagctcatccagagttccttaaagcaactgatctaaagacttcattgtttcttaatcagaaatccaagctagcggctttcctagaaagatccaagtcaaaggaacatttgaccaagaacttaaaagaagttcttcaactacttcaactacacatagaaaatacaaatacctgaacacatcctatgtgtaggtattc

SEQ ID NO: 284193 - DNA, 363 bp, Glycine max
agcttgagagggttatggaccgaacgatagaatgtcttatccaaaataaactgtatgtagatagctgaagtcttctttttggctcagaacgatcaattgctgtgataagtcccttaactcctgcctgacaaagatcttgaaacctccggccacttgcaaaatcttgaaaatatttgctaatcacgaacaacacaagccggagattgtgctgcaaccgacatcacaatggtttcttaatctcagtataactaatactcattccaaagaatatcaacaaacactgcaacaattaaaccattcatatccaaagagacaaagagagagaagaaatatgaacggagatgtcatatatcactgatcttc

SEQ ID NO: 284194 - DNA, 398 bp, Glycine max
tatcagaaggggaatggtaaaataccacctcaagctgatattattaaggtggcaaagtgtttcttttgcaagaagaagggacacatgaaaaagaattgccccgggttccagaaatggcttgagaagaaaggtaaatcaatctcattagtatgttatgaatctaatatggttagtgttaatattaacacctggtggattgattctggatctactattcatattgcaaattctttacagggtatgcaaaacctaaggaaaccagtgggaagtgagcaaagcattttatcaggcaataagctaggctcacatgtggaggccattggaacttgcattttgactttaagtagtggctttatttcaaaattagaaaggactttttatgtaccaagtttttcccg

SEQ ID NO: 284195 - DNA, 368 bp, Glycine max
agctttgagaagtagtctattgcttttctctcatagccattcatggcaagtgatattataatgaagttccaacatgataatcctgttgttgtgggtgatgcccgaaacacttgaataccctttacgatagctccacacttgcagtacatgtcaataattattgtgagaacaacgacattcaactcaaaattcccctttttacataatcatgaacccactccccatgttgaagtgcacctaagtgagcataaacacttaacaaactcatcactgtaaattcactaagctgaacccttcgtctctgcatcttgcggaaaagctccaatgcctccataagccgtttattccttacatatccactaatcata

SEQ ID NO: 284196 - DNA, 403 bp, Glycine max
tatagaatatataataaaagaacaatgacaattgtttagtctattcatgtttcctttgatgagtctaatgccattcttccaaggaaggattttttagatgatatttcagattccttagaagatacacatattcatggaaatgactctaaagaaaaagatgaaggaagcaatgaagattctcaagataatggagttagaacaaataatgaacttccaagagaatggaaagcctcaagagatcatcccctcgacaacattattgctgatatatcaaaaggggtaacaactagacattctcttaaagatttatgcaataatatggcttttgtatctatgattgaacctaaaaatataaaagatgccataatagatgataactggatcattgccatgcaagaagaac

SEQ ID NO: 284197 - DNA, 347 bp, Glycine max
tattttctcccctattttgctataaatagggggagaagtgttgaagataagggttcagcctcttaggcacttctctctctctcgaaattgcttaagaaaattgtttccgtgaagaaaatccaagccgaggcgctttcgtaacgtttccgtaacgtttccgtgagtaattacgcgaagattctcgaccgttcttcaagattcatcgttcgttcttcgttctcttcagtcttcaacgggtaagtacttcacaccaagcttttcaaatcattctatgtatccgtgggggtccacattttgtttcatgtatatctattctcgttttcatttactttttatacctccctttg

SEQ ID NO: 284198 - DNA, 246 bp, Glycine max
atctagctttattgtacagttttgatcatgacataagttttgctttccataagtcgccataacaatgactgatactagttctagattagtcgaacaaactatcacaaacttatgtcatgatttatgattttgttggcgatcatgcacgtctcgagttgactactttgctctttgtaatgagaaatatttcgtataacctatcaacctcattttagtccagtcacactattaaaccattgcttttgg

SEQ ID NO: 284199 - DNA, 390 bp, Glycine max
tcagatgagtctattaatgaatcccctattcgattttatttatagaaaaatgaaatcgttcataggccttaaattaatagtttaagctttgcgggagagtttgacgttgaaatggtgtcatagtctagtgttaagttttgttggactctcttcttaggtggagtaaagattcaaatgagaaggttcattttgtctcacttatttaagtggagagaggtcaaattaaggtgagaaggacttaattatttgtgagggaaaaacaatggtcaaacattgtgagagaaaagataggacaaatcattttgatttttgcacacccaccggagaacatttttcacattataataacaaattcgttcaccgttggatcagactgatttttggacagta

SEQ ID NO: 284200 - DNA, 449 bp, Glycine max
  unsure (1)..(449): unsure at all n locations
tggctataagctttgagcctgatnactgaggcctggaacaccaggctatatatctagcacccgggatcctcttagttgtttgtaagctgctttcttccataaagggtttcatatcctagtacttagtacatgtgctccttgaaccttcctgtaattctatgcttttcacagtatatacatgtatatgtcctagactctcttctcgccgttttatttgcgcatgtctagggaatacatgtggataacgtagagtctttgatagtattccgcgcgattcaactcagcactacgatgccttcatcagaattatttatgagttaactgttattgtattactgttcatgcttgagtttgattagctaaaggtcccgtagctttatcttatcttttacctagacttagattctcactccacgaagtcctgtcgtcagtctttctgcgaatacgcc

SEQ ID NO: 284201 - DNA, 373 bp, Glycine max
tcgagccagaaacctgtcacaccattttcctcgttttgggtgagaacgtcaatccttaccctctgaagcaatatacagagagacggaatatttcctatccattgaccacagagacgatttgacatcctcaatctcatagagggagatcgcatctcgaaatgatagaatattcccaatcactgagtgggacgcaagaataactcacatatgagaatcgcatgaaataactctcctgatcaacgatctaatgaatacagaagaaatgtgcataaaggtcttttgaccatactatatttgaacaatacataatggtcatcaattgaacaaaagaaagaaaacgaaaccatgacctattgaggacttatccctttga

SEQ ID NO: 284202 - DNA, 491 bp, Glycine max
  unsure (1)..(491): unsure at all n locations
ccctctcgcctcnccacgggctgggtatcnattatactcgcttattagacacacctcaggtacaaagaactgaggcaatacaattgatgcattgaaaccttcgacgcttaagcgtatataacgcgatctctggagcctcttgaaagcccgttttctgccaactaacgccaggaacgagtaaacctacaattagagaacatcatgccactatatatggcatataacaccgagacgatggctgagggataacggagagcgcaggaaacgaaaatgtaccgcaatagccaccaaaaaactcaccatcccctctacaaaaaagaagatgcccccgccccgagagggcccctttaggtcgcgatcacgcctgacagtagcctgcaaaccaatacaccataaccatccttaggaacgaccaattcaagcacgcgccttcacaaacgcaagcaagacgtgcagtaagaaaaacaaatagctatctcgtcccaacaccc

SEQ ID NO: 284203 - DNA, 544 bp, Glycine max
  unsure (1)..(544): unsure at all n locations
ccgctgccaccanctctggtcatacttngaaaatgtaagatgcacgtagacggtacattgtgactgcacactaancacacagacagcnacgcaccttgaccccttgatccgtggnaacntcagagacctatagacaactcaagcgtcccaaggaaccaagccaaacaacattaaaacatttgaggactgtcacagcgcaaacaaacacagagcaaaggcagaacacgtcgccaaaacaccgaccaatatcacagctgttctcacaaaaagaccccacagaacaaatcgcgcgagacaaaacatgaacacgacagatcgactcgaaaatacttctggaagtcgacactacataagcctacgatgtgaccgttgggaacgactatcaaacgaccagaactcactatgagaaacaccaacggagacctaccgcacgcgagcatttttggcgacaagcgagagccctgccacgcaccactcgacagcaaaatacacgctgaatgcaaataaatgacgtgacacttgccctcaaccaaaaacgcataaa

SEQ ID NO: 284204 - DNA, 291 bp, Glycine max
ttcttttatgctcatacagttgcatgtttggagtaggtctatgacataccattttaatgagacatctactatgaaggctcctttaattgattgcttactgttctatatccctcacactcttcggtattatatgcactcatgattccaatcccagacactttctaaaccacaaccatttattctactcaactgaccacaacaccatattataaatgtcgaattctaactaaaacatgccatatattaatgtcctagatactcataagctactatgaagaagttcttgctatg

SEQ ID NO: 284205 - DNA, 376 bp, Glycine max
ttagtcttgatgttgttcatgttgctccccctatttttaacaatcttcccctttttggctttgatgatgccaaactcgaatataacattgaatgcatttagagggtctgagtcttgagattagagacttgcttttcttaatcaatcttgaaaattattaacacttaagaaaggatcaattcatatcatcatcatcatcatatatcttactatataattttactgatgctaatgcaatataatgtagtgcagtactagttcatctcccaaatgcttatataatacaatgcacgcaaatattcaatacatatgcagcagttcatatatatctcccttttatgcacatatgcagttcatctcccctttttggcgttaac

SEQ ID NO: 284206 - DNA, 317 bp, Glycine max
agcttatgtctggtcaaatacagatttgagcatacataatactcccaacaactgatgcatacgaaattacttccatttgtttccgttccagatcatttctaggacattgagcgagactaaatttttctcctttctgaattggaatgggaaatgatgagcacttttccatcctatataactctagtactttattgaaatatgcttcttgagacaagcctaacaatccttgtgatctattttggaatattctatttgtatcacatacgttgcctcacccatttccttcattcaaagttactaaaaagaaccttttagtc

SEQ ID NO: 284207 - DNA, 387 bp, Glycine max
tttagttctgcttacttattttttaattgggtcatatggttgtactgtgtgtttgtgtgaacatcaattggttctgcttacttgttttaggtcttggtatcaatttgttgtgtgataatggctaattccatttaaggagttagagttatccacctcgctgatgtttgatggaacctgtcaacatgatgtggcctgccctgactaactcgtatgtctgacgagccaacatcagcgtgggaagggttggcccattagcctgccatacatatattttttttaaagaaaatctaaatactaataggtgtctacggtttgggttgtcactttggatcttcttatagtatagaacaacataggcatttgctattatttttatattattttata

SEQ ID NO: 284208 - DNA, 342 bp, Glycine max
  unsure (1)..(342): unsure at all n locations
agcttaacgctcgggaggattttgtctcacaaaactgataacgttaattgcattatatatatatatatatatagggaatctacattgtgggtaatgggggccattggaaagtaaaatttacttgaatatatcgaataaatatttttttcctctataaaaaaataaatcttgccccaaccggatagctttttcataaggtaaatataaataaatgtaaaagataaaagagaatacattgatattaatttatccttttaaattgtactatttttattatcaattttaataaaacttatataattgtttgtttgagaaaatattagactatgntttacttaaaaa

SEQ ID NO: 284209 - DNA, 386 bp, Glycine max
tattaggccttttcttattatacctcttgtgaattcactttctcaatacacttatttctctctccacttatccaccaaatcactgatcaataactatttcatttttgaaagattcaattatttatttaaatgtgtgaaataattaatgtggataacagtataattgacaaaaaataattaatgtaaccttaaactttaaaaatgatagataactaaaaaatgatttttttttcaaaaaacccgacaattagaaaaaccaagggagtataactgaaagagatttttttttgctaattgtgagagtttttccatgaaacacacgtcaaaaaaaaatactgagaataagaaagaataaggtgtgttttgtatctaacttaaaatttata

SEQ ID NO: 284210 - DNA, 366 bp, Glycine max
agcttattgtttatggattgccaaattccacatcatttgacattattcttaaacaaactagtttattagaacaaaaaataaagaaaaaatgtatgggctggttttatctatttatagaagattttgagtgaaattataagattttaaagtttatgaaatcaatagtattctggttgatgccaatagaaaccaggtaaaaatcaaatcctttttatctcaacaattataaagtccttgcttcaaatgaaggaaagcattgctctgcctattgttaatttttgttttactgtattgtaatgtttttttctgcttgcatgtgaaatacattcaagttttatgtttttgggttcttatttttacattcaa

SEQ ID NO: 284211 - DNA, 403 bp, Glycine max
tccatagtcgatagttggttgagtaagttacttgaatttagattcactagctggtcgagtaagttacttggattcaatagagaatatgatagatttaaataaggacataaagaatctttatcgtttaaccgaaaaataagataaaggacatatttttctcagattatattatatttgaagggaaattaagatcccaacatctaatttcacctctataaaataggttaatcaaggtttaggtattttaatctgattccaacctacatatatttgcttacctctacattgttaacttgagcgtcgaagtgccattgtaggtacacctcaccactgttcgtgaaggagctcaccactaataaaaaatacactttcaacatcggttatttacggcattctacatcgg

SEQ ID NO: 284212 - DNA, 363 bp, Glycine max
agcttcatacaacttgttgtaattgattacaatgaggctataatcgattaaaatagaaagtttttgcctttgaagaaaattctctaactaagaaacttttcttcacacaaaccatgataatgcatgatgtaatacaaatatcaaatgtactaagatgtaacaaccaagataacaaccaatacaaatgccactcaatggagttggggatgtaaaaaccaaaacttcttcaagctttagcccttaggttgttcagaagctagctagttagttaagttgaacatcctttagattgctagctggttgaaatcaagcttaacgaggtggatatagataaataataggaggaaaaaagttgtataatat

SEQ ID NO: 284213 - DNA, 405 bp, Glycine max
tcatgatgaatcaagattgattcaaagaagttttgtcgataacttaggtgatgacaaaaagcttcgtgatgatctcaagaatcaaagaatgagttcaagatgttcaagattgaatcaagaacatttcaaggttcaagaggaaaattgatttcaagaatcaagattcaaggttcaagcttccaagaatcaagatcaagattcaagactcaagattcaagaatcaagaaaagacttaatcaagataaatatgaaaaagttttttcaaaaactgagtagcacatggatttttctcaaaacctgtttaccaaagagtttttactctctggtaatcgattaccagattattgtaatcgattaccaatagcaaaatggatttgaaaaatttttcaactgaatttacaatgt

SEQ ID NO: 284214 - DNA, 362 bp, Glycine max
atcttcggtctccacctagcattttcctcaaaaattttctcatttttttacctcctccttgaccattgtaggctcctcaacccaagtctcctccacaagcaagccctttatcaagttgttccttctttttcaattgatgatggaatgaaaaaatttagtgttgcaatgaccctcctttagccatctatctcttgacttttggcataaaagagattcattataattagcaactctccaaaaatcttattgtaattttagtcacttctttaaatcatcttcactaagaccatggctctcatcaataatacctagctcatttagatctatctcaatatgcttcaacttggtatttatcgaacaaa

SEQ ID NO: 284215 - DNA, 397 bp, Glycine max
tcattcaagacttttaccagcaaagctcgatgatgctcagagctcatgagcagttccaaaagagagactctagctggggttttgttgagttactcaataactttgaactcactttgttgaataatgcggaggaactcgctggcctcctagagcgatacctctttcttgtcacaaccctctcttccctcagaaagacctttcatcggaacatcctcacccgaagtggggatcactttgacatttggtccttccgtcatccttgccttccccttagcatttgagggctacgtcggtaggtcagggggtgcaaatacgcgaccactgtgggttatgccgctcagccccgtgatattggttactttggccgacatcgagctgatgtcggtagctccttcct

SEQ ID NO: 284216 - DNA, 363 bp, Glycine max
agcttttgaagagaaagatgaagaagacccaactgtaacataacggctagtttgacctattgggtttatatattgaaaaaggacaatgacaaaagatgagagagaaggtatgagacaaccaacacaatgcaaaaacaaagttcatatcctctccatcctccatgatcttcctatgtgcaaaaaaaaaaaaacaaatcgtgtaaattatagtcaaagctacaatgaagatccaatccattagtgtttcttagttgtaaaatcctctcaaacactttctccttgtatgtaatctgtatgtatgccaaattaatcaagtgaattaagtttgaatgtgaaagaagtgatagaaaaacccatgaaatg

SEQ ID NO: 284217 - DNA, 400 bp, Glycine max
tcattggataatcttttgtagcatgccaattaggataagggaattgttaagggcatctaacatttttgttgaggcacctaataatttttggaaatgtcgaaaatacccttatggtattttctgttataaatagtaggaggagtttttcatttccgcaaaatcttcatcacttagtgtaagttgcttctgataagatcggtttcgaagcgtatttggtcttcgactgtgtacgtgcgttgctgaagagtatacggtaaattttggttggttttcgttgctggagaagaagaggtacacgaaatacatatagattgtcaatccatatgggttatacgaatcagcaatccatatgactcataaggatcagcaatccatatgactcatacggattgtcaatctg

SEQ ID NO: 284218 - DNA, 363 bp, Glycine max
agcttatgctgcaaacatttataatagacctcctcagcagcaaaaccaacaatagcagaagaattatgacctttcaagcaatagatacaatccaggttggaggaatcatccaaatctaagatggacaagtcctccacaacaacaacagcctgtccctccttttcagaatgctactggtccaagcaagccatatgttcctcctccaatacagcaacattcacaacaaaaataaataaccccccctaattcgttactattttattactatctgttatgaacgtttggttgaccattgctcgttaggagatgacctatgatcacttcctagatactgcatttttaatgtttatttgatttgggtgc

SEQ ID NO: 284219 - DNA, 402 bp, Glycine max
  unsure (1)..(402): unsure at all n locations
tgtaggaatatggggtacccatcatatgtggtactaggtggcgttcgggcgatggtgcaaatcaactctcccacatccacaaatcaaacatgaacccaccatccccagttgcccaccttcaactgagctcacgtatccccatgtagcctttatcctcgttcctctcagcatcgggtccccatcaacccctccaagcttccacaatatccaagcaattcaatatccaaacatcatgaactatcctaaactaagaaaacagggcagaggcaaaaaactctgcccaaaacacattccaataccacaactttccctactcaaataccccagtaacattctcttcgttccgattcgttaaccgttggatcgactcgaaagttntactggaggtccctagtaaataag

SEQ ID NO: 284220 - DNA, 350 bp, Glycine max
atcttcttttggaccttgaacaggcaactaactcctctttcaaaaccatgctatgtgctcgcgaatggtccctctcttcccttcgcagcttgagttcattgttgctaccccacagagctccacgaaatttattccggccatactcttccttgcgagccctcttggtctcttgttcaagggctcttgcagtagttgcattctcttcccgtaacccggcacactccttccgaatgtgtgtagcgtccaacttgaacttctccttggcaagtttcgcctttcctaactcgcttttgagagcttggacttcttcgtcctcttccggtgcttcaaaactatcttcgctgacgact

SEQ ID NO: 284221 - DNA, 395 bp, Glycine max
ttcctacaagtcctaattggcattttatactatgatcaactcactttagactccaatttacactaaccccaaatttagcttctctaaccctcaaaatctcacacttttctacctacaacattgtcattctcacatttaaccctaagttaactttccccatcatctctaccagctttctatcaacaatttcagcacacaaacatcacaaagcatcatcataaaaccctaaaacagaatgggtaaatttggctcacatcaaacatgtcaagtttagcatgctttcaacaaattccttcacaaataactaccataaggcattaacctagcagaactacccatcatatccccccaaaacccaatacccacgaaattcatgtgagaagaagtccacccaa

SEQ ID NO: 284222 - DNA, 283 bp, Glycine max
agcttgcgatcatgggataccctccatatacagatgggtaacctgatcgccttaacaacacaacggcctgtactagagatgtaacgagggaactgaaacaatacacactacgtgtgggcccacatgtgtgaaacttatcccgatcgtgtactctccatgagacttttctgtacctttcataaattaccctgtcatgcgttcgttaatcatcaccagtacactatccctgttataactgtgtccagcttggaagccatctttacctaccttaaacctgacgtcg

SEQ ID NO: 284223 - DNA, 196 bp, Glycine max
tcgcggtgcagcggccaaaggctatgtttgtagcttttgactaatgtctaccgggtaacttgattttttctataatccgatgctgtcgtgtaaaaactcgagagaagattgagccaatggctgatcaagaggaaattatcctttaacacctcaaggcacatgctcgacactgacctttgcatatatccacatgctg

SEQ ID NO: 284224 - DNA, 344 bp, Glycine max
  unsure (1)..(344): unsure at all n locations
ttcttatatagaccatcaccaacattntaacatttggctctagaatatatatgatttcttggcttggagatgaacaggaaagttagaatatataatataactcagaagtaattaccttactttgctggaggtcatgggttcaaatccaaaaacagcctctttgcatatgcaaaggtatgactgagaacaatatacctccctccataccttcgcatagcaaggagcctactggcaatggcatatgaaagttntaattaacattacaggcaaagaatactctcctgtgtgctttcatgattttatatttagatcgactataaacattcgtaagtttaaaaatcaat

SEQ ID NO: 284225 - DNA, 388 bp, Glycine max
tgaagtgagaaagtgtggaagagtttttcttccttcttttattcgttgaccacaaagtggtacctggagatatgtcgcgggggtcaggagaccttggggacatcaggtggggtgctatttcccaaaaccaagcttgaccaatcccgacccaacccggtcatagtcagtcagtgaaaacctgtgatgtacctaaacaggcgagctcctggcagtcaaacgataaaagaacaaagaccacaaagcaaggaggcttgtgtggtggctggccagctatggatcttgagtgatatttggaatatggcctctggtaatcgattaccaagggtgtgtaattgattacaaggcttaaaaatgaagacaagaagttaagatggcctatggtaatcga

SEQ ID NO: 284226 - DNA, 162 bp, Glycine max
atcttgtcctgaaggcccctttcatagttcgaaggaatgcccctcttccataggggcttcttaagatcattgcaatactctactacacgattggtagtctgggacaacgactaacttttgtgttaaaacatggataattgtatcaaactcttgcaatttatg

SEQ ID NO: 284227 - DNA, 392 bp, Glycine max
tcaaatatgttcaaaagcgtaaaacttccatcttcttccttcttctattcccttaaatcctcccacaatacccccaagctcctcctccaccaccactgactaccagtgatcgccacaagctgctttagcttgccatcggatcactgcacggaggagaatagcttgatcggagaggaatcttaaaaactcaactcgaggataccgtagagaatgaagcctacaatccttccttcatggtttctgccagggaatcatgattctaagccttctccttgttagatagagtctatctttgcatctcttgtgacttgggaaccatcattggatgtttctatacttcctttgagaaaccctcgaaaatgagacattgtaaaagttatctattcataaca

SEQ ID NO: 284228 - DNA, 436 bp, Glycine max
  unsure (1)..(436): unsure at all n locations
gtggatcataaananctgaggccttgannncctgggcacataagctagacccggggcccgggatctcttatagcacgcgtttcatgacaactgggctgattatggggaactctgtcagcagtgagtactaacgtggccagaatagcgaattgacgccacaacaatggtgctacaccattcatatatgcacgcgataaaccgcccattccctgatgccaactccaactgagcttactggactccacgtagacgctattgtctaggataaaatgaacgtgactccatctatgttttaaggttacttaagattcagagggacctctgtcttattaagaccagctcttcaaaactagctttataaatgcatgtgggaaactcttgtagacaacaaaaaaatacaggttttttctttaagacaccggagaaatccttatcg

SEQ ID NO: 284229 - DNA, 392 bp, Glycine max
cttagaccgtcgtcgtagccatcgtgcccctcactattcttcaacccataccagtccacccactcccacctttgctaccccaccacccaaactttctttccgtcgattatcaccggaggagatagccatcaagcgagacaagggtctctattattattgtgacgagaaggggttaacagggcatcgctgccacccccgcatccacctcctcatcgcagacgaagatgtggatttgtccctatcaccatgcccacccgaatcccaattccatcaaggggttcttctccaccgttgccttccgacgactctccgccttaattaagcttgaacgcgatgccaggaatgctagctcctgaaacctttcgtgcgtatggcaccgatcagcatcacaa

SEQ ID NO: 284230 - DNA, 541 bp, Glycine max
  unsure (1)..(541): unsure at all n locations
tctctcactcctcatgctatcgcatgttatatgttaatcctctcatagcattaacctaatgccacgtgtcagactcttccanntttagaacctggaatccttagccattgaaacctgcgaacccataggcgaatagagctccggcccgcggatcctctaagtcgacctgctggcctgcaatctttgcaaaaatagaacattaatgtgaaaagggttattgtgttactgacacttgaacaatacaacacacttacctatttctccgggtcttgttatacgatggtgtctccaataccaaatgctatgagatgatctattttaggccccaatgttggtctagctaatatgcaataaaaagagttacataattggtccactttttatttaataaattattatttgtgatatctatggggcacatttctctcccccaagaaagttgaaatgaacctgtaatgtgaggaggattcccattaattaacgtggaattaataacctccttataccactcacacttattgtgattgattgttccatagag

SEQ ID NO: 284231 - DNA, 386 bp, Glycine max
tggctcctctgtaattgttaactgcaggctaccttatctcttcgcatagtgacattttatgctacgcagcttcctggtccaaactaccattgccgagaggtatacttatttgagaatgtgtgctttttaaacaaacatcacgtctcttaaaattaactgtttcttctttctggtgactgtgagtggtaaactatgcaagctggattcttttcaaataatcttttgatttaactccacttcatgtatcgtgcaggggtctaaacttgctacactgcctcatccagatagtgtctttgaagtcctcttgattaattgttagtatactattgttcttgagttctttagctatgactcctttttggttgatatggtgctcatttggtttt

SEQ ID NO: 284232 - DNA, 334 bp, Glycine max
tatcttgccaactttgaacttcttccaagattccaaccagaaaaatcagcctcagttaatgtatgatattacatgatgcttgctttaatttaattttgttttgtttagtttctctatttgtagatttcattgatgtcacttgggaaaatatgatatgatgacatgacagagttattatcactttgccttgttttatgagattttagattaatgaagtattcaatttatgttcttaatgtaaggtgtgaattaatctttgttccttgcaatgtttcaagacttcctttattcatcatcccttccatttggtggtttttcaagatatactgtaatg

SEQ ID NO: 284233 - DNA, 385 bp, Glycine max
tgaggtatttgtgccatagtaggccagatatttcttatggtgtgggcttgataagcagatatatgaatgattcgaggacttctcatatggctacaacaaagagaattttgagatatgtgaagggcacacttgactatggattgctattctccaaatcatatcataatcaaagaataaggttaattgttttttctgatgcaggagtggtgatgtagaggacaacaaaagcaccactggatatgtcttcaaattacttggatcaacaatctgctggagttctaagaaacaagaagatgttggacattcaacttgtaagtcagagtacatggttgctgtcttatcagcttgacaattagcctggttggagtcactctttgcagaattg

SEQ ID NO: 284234 - DNA, 360 bp, Glycine max
  unsure (1)..(360): unsure at all n locations
agctttggcaatcggtcggctgacttaaatgaatcaaaggaaattgatggaaaatttgatttctaatgaatttcaatctataataaagaccatgtaacttttacttttgtttctgtatataatataataatgatggatgactatttgatgggttcttaaagcctgatgaagttgcagctttctatttgttttattgaatagttatacagaaataatccttcaatttctctgtctctctctttgaactcttctagtgtgtattagttatagctagatttaatcaatctgtcagcattgaagaattgtaatttcagactttgatctttgaactgaaaatcatctgcattgnttgtttgtttg

SEQ ID NO: 284235 - DNA, 400 bp, Glycine max
tgcccagagaaggagtccacagaggaaatgcttaccacctcaaaagactggaaagcggtttctaatgactcctctgcggcctccacataaggcatagaggacgggcagctcactaagatgtcttcctcgcctgacacgatgaccaaatgcccctccactacgaatttcaacttttggtggagtgtagagggaacaactcccactgagtggatccacgggcgccccaacagacagctgtagggggggttaatatccattatttggaaagtaacttgacaggtgtgatggcctatctgtactgggagatcgatctctcccctaacctctcggtgggtgccgtcgaaggcacgaaccaccattgaactcgattttaagtgggaggcattgaatggtaatttct

SEQ ID NO: 284236 - DNA, 354 bp, Glycine max
agcttgaaggcatgtaactccacccatcttcttatagtagaacaccggtaatgtgtccactatcattgttatcatctccctctccatcattgggggcactacttgagctgttagatccctccacctttgggtgtattctttgaaagattcatgctccctcttacacatgttctgtagctgcattctattcggagccatatcagaaatgtactaatactgtcaaatgaaggcaaccattaagtccttccaggaatggacccgagaaggttccagattagtataccaagtgacagatgtcctagtaagactttcatggaagacatgaatcaacaatcttcatctttcgtgtatgcc

SEQ ID NO: 284237 - DNA, 399 bp, Glycine max
ttttctgcaacctctctcctctaaaaattgcacattgcatcctctacctcaatcttgcatccttcatcaaatcttcactgagcatctgcgattcatgtaagtttctaacttcccttattcttttctattattgatactttaggatagcaatttaatttttagggttagattgtaagtagaatagataaaaattaggactttgttaggagttgtaagtggtagataatgttgactgtgttgcatgtttgataagggcctattagaggcctacaagaggaagtcgaaagacttcttcgtctgcatttttcctggaaaacgtgatgaactcgctaagcgcgtctaatgcgctaagcgagttcattaattaagccttgaatgtatacatttccagacgaactc

SEQ ID NO: 284238 - DNA, 362 bp, Glycine max
agcttaaccacagttttcagttacacgtcagaatttttctaacccgaccacagcttacagaaataaatttgcagtcaagcaaatgggaatgagacaattatatttatgggcagggcagggttggtcttttgtgaagtactagtgtattattacttacaaatcaacctctatgtagtagttgtacttaacacctttagacacgtggacaattctctttcatttaatttgcgcatacagcatacttttttccttcttttttttctttgtatctttcattttcattaaaccacctcgcatgagtcacatctaacagtaaagtaaaacgaaaatatagcagacaaaggggtagaatggtccattag

SEQ ID NO: 284239 - DNA, 399 bp, Glycine max
tgagtacacgaagaatctgaagtataaagtctatattctattgaactcgaccaatgacttgattcattgggatggtccaatgaactcgcgggtacatatttatttaggtattgctttattaatatttataaaacaaaataaaatgaattaaacaagttttcttagaagatgaattaaagagataaaataaatgtaatttatattataaattaaaatactttaaaactcttgaggttgagagtgggattttgggccaaaaccgggggccttccgcaacgaatgaagcccatgttgctgaggaatgagcagtagtaacaagtatgaagagatagataatccataagcataactgaagatgtgcacggtggtttcaagttcaatccttgtgggatggctttc

SEQ ID NO: 284240 - DNA, 359 bp, Glycine max
atcttgtgcctctctttttcgctcacttgaacttatacttaagcatatacttgctttatctcctaactcacatacttacttgagcgttagagtcctttgttttgcaggtccccctcctatcctcttgacaaaggctcttctcaaagcccacgtgcaaaatgcagaagcccacttcagccacatccaccctgatgtgtgttagctcccgattttggtaagtacatttggcatccaccatggggccgcagtaaaacatatcctgcggtctctcgtcaacttttgtcaatagatccagacgagcatctggatgccttccgagcttagctcacctaggcgagctggttacttcacctctaagt

SEQ ID NO: 284241 - DNA, 353 bp, Glycine max
tcaaaatgttacggaaaaagaatcagcaaaaaaagtgcaagggggtatagggggtgcaaatagcaacgaggcccacttgggccttccatgaagttatccaaaaggcggtgccttctggaggaagcaacctagctcgcttgggcgagctgggtgacaatcttctacttcctttgcctatgaataggggaaggagggaataactaatctgttcaaccctcctggaatgtgatattcactcaaaattacggagaaaaattgcttccgcgaagaatatcctacccgatgcacttccgtaacgctttcttgaccttttcgtgggtgataatgcgaagatcttcaaccgtacttcatcg

SEQ ID NO: 284242 - DNA, 361 bp, Glycine max
  unsure (1)..(361): unsure at all n locations
agcttccattgttgagtttttgcttcccttttcacgctttagttcactccaacaagtaagtattcaatccttgatgttttcagcttcccattggtatattttcttcatcttttggtgctccaaattgtgggaatatgcttgtatttgtggggcagttttggtttgtttttatgcttgttttcttagagttaaggatttgaatgagaagaccttangcctatgctgtattctgaaacaatggggcatgccacattgtccccatcctcttgcaatttatgtccaaacatgcgctcaccaagtgctcagtgaaatgccccaatgatgtatgaatatgattttgtaaaattgggagagtgggact

SEQ ID NO: 284243 - DNA, 396 bp, Glycine max
tctggtgggacatcttgacttgctttccaatctgacattcacttctagattctgccttcttctattttcagattgggaatgcctctcacagcacctttgtcaatgattttcttcatgcctcttaagtgcagatgtccaaatctttgatgccatattttgacttcatcttctttggaggatagacatgtggaggagtaactggtttcttgaggtgtccataggtaacaattgtcctttgatctgctgcccttcattagaacttcactcttctcatttgtcaccaagcattctgactttgtgaagtttacattgaatccttcatcacacaactgactgatgctgatcaagtttgcagtcagtcccttcaccagcagtactttgtccagactaggaagt

SEQ ID NO: 284244 - DNA, 343 bp, Glycine max
ttcttcttatccaaggcaattcttgagggtgaagctccttcttccttggcttattccctagtggatggtgcctcccctgtcctcttctccttttgcttccgctgcatcttcatggtggaaaatcaccattgaaagacctcattgaagctcaaagatccagcctccatagaagctccacaagcaagcttccatcaagtggcaatcagagcacaagagcttcaagtatgtgctccttaaacctacattaatatttttgcttaccttctcttccattgttttttattcatttttgctccatgtatatcctcaaatgccttgttctaaatgttgttaacatgattct

SEQ ID NO: 284245 - DNA, 386 bp, Glycine max
tgttaaaaacggaagaaaatgaaacctttaatgatcttactgatgacgaaagcttaaaaacaagaaaggaattaaaagtctcggattcgaaaacttacctgttgaagaacgaagaacgaacgaataacgaatgaagaacgacgaaaaaccttcacggattcgctcacagaaacatctcggaaacgttacggaagcacctcggcttggattttcttcacggaaacaatttttttcacccaaaatagctgaaatgcatagctaggcggatctgggatccttaccctttcgcctatttataggaaaaagggggaggaggttgtcgcccagctcgcccaggcgagctgcattgctatctctagaagcaaccctgcttccaaaatactcta

SEQ ID NO: 284246 - DNA, 422 bp, Glycine max
ttgagcttgacattgaggccttgatcacttaggcgattctagctcgtacccgggatcctctgagtcacctgaggctgcatcttacaggaaacccttcgcattgtataatttatttcccccatgaacccagagctgtcttggtcaaactatgatcccgaattcgttaaccgttggatcattgtgaaatttggatatgtcgttcgaaatataattgggcccgctataaccgttgtgatttgcgagatgatgttcgtggaaagagaaaaatgaatcctatgaagataggctaaatggaggcttcaatccctcttacgtttctcttatgttggggaaccctatctgagcagtcagaggagacactggatgactcttatggaactgctcaatatgttttatctctggctgaagacacgccactccct

SEQ ID NO: 284247 - DNA, 398 bp, Glycine max
tctcaacgccctaaaccccagaaaccccaactaataaaattattccaaaaaaaattaaaaaaaaataaacgcataaaaaccctaatgcaccagaaaatttcaggaaaaaaaaaaacctaccaacacaaccccatctttgcacttgatcccaataacagtcctgcaacaaagtttcaaatctaagatcactaccaatacaaaaattacaaaatcatttaaaaaaaaaaaacatactcataattattaaataaactctttttttcaattttaaaaccacgaatttaaaagtataataataataataataataataataataatgataagtaccaacccgctgttgtcgacggctttagcggcatactcgatctggaaaacgcggccatcaggggagaaag

SEQ ID NO: 284248 - DNA, 332 bp, Glycine max
agcttgtaagattatggggtacccatcacatgtggtactatgtggcggtcgggcgatggtgcaaatcaattctccacatccacaaatcacacataagcccaccatccccagttgcccaccttcattgagctcacgtactcccacgtagcccttatcctcgttcctctcaacgccgggtcctcatgaattctcccaagcttccacaacatccaattaattcaacatcccagcatcatgaactaacacagtcaagaatacatggcagatgcagaatactctgcccaaacacaaacaatatcacaattttcttacttaagacccagaacatttct

SEQ ID NO: 284249 - DNA, 393 bp, Glycine max
tgtataattccccaatttatggttattttggagtttatttagtaaatgaatcttgttttatggttaacgctatctctagaatattttcattggattgaatgatgaaatctgtgcattttcaggtgaaaaagaggctaagttttgaattgcaaaaagtagcagttgggctaagcgcttattcaccgctaagcgtagcttcagagtgcttagcgcaaaggagaatctggcagagcatcaggatcaaagctgcgcgctaagcgtgagatcagtgtgctaagcgtagtaggtgccttcagccaggctaagcgcgagactggcgctaagcccaattccacttactcgcgctaagagcgaaggtggcactaagcgcaatgtcgcgatttcagggcctat

SEQ ID NO: 284250 - DNA, 348 bp, Glycine max
agcttcttattcaaggcaattcttggtggtgaagctccttcttccttggcttattccctagtggatggtgcctcccctatcctcttctcctttgccttccgctgcatctccatgatgaaaaatcaccattgaaggacctcattgaagatcaaagatccagcctccatagaagctccacaagcaagcttccatcaagttatgaccatttgaatgtctcgagatcttccgtggttcaatttcaggcgtctccatatgtcatgtgcctgaatcggacctccgtaagaaaatttatgaccatttgaacttctctagagcttccgtagttaatttcgagcttctcgatatctg

SEQ ID NO: 284251 - DNA, 391 bp, Glycine max
taaagtatgcccgagtcattcatccctatgagatgttgttgaagtattggcgatcagaattgccattccttggattatagggttgaaccaagctcatgcttttacaaaaaggttcatcaagtcaagttgaaatatggaagtaaccgtcttgcaaaattggggcaaaagattaatcgagtcacatcactgcttcatctactgccaaacatatttaggattattgatgtccttgttacttccagtttcaccttgacaaagatgtcatggaccatgttgaaaatctaaattgattcaaccccatatcttgcgtaaaaattcgcaatacttcaattgtacatcattcgcatgcatccatgcttttcattggttgcattgctcgttgcattctttc

SEQ ID NO: 284252 - DNA, 345 bp, Glycine max
agcttggttcgaggtacttacccgtggaagatcgaagaacgatgaagaacgaatgaagaacgtcgaagaacgattgaaacctttgcgaaattcttcacggaaaacgttacggaaacgtttcggaagcgcctcggcttagattttcttcacggaaacaatttttccaagcaaattcgaaagagagagaagtgcctaaagggctgaaccctttgcttcttcacttcctcccctatttatagcacaataggggaggtgcttgccgcccagctcgcccaggcgagctcaactcgcccaggcgagccatgttgcttgctccagaagcaacagtctggagggcccaagtgg

SEQ ID NO: 284253 - DNA, 386 bp, Glycine max
tgggaggattgatggggacccggtgttgagagattcaaggatatgggctacgtgggagtacgtgagctcagttggaggtgggcaacaggggatggtgggtttatgcgcgctttgtggatgtggaaaacttgttgtgcaccatcgcccgaccgccacctagtaccacatgtgatgggtaccccataatcctacaagcttgagatgaggaagtgtaaaagggtgaaacttcctgcttttattgttgaccacagagtggtacctggagatatgtcgcgggggttaggagacctcggggacgtcaggtggggtgctattgcccaaaaccaagcttgaccaatcccgacccaacccgggcatagtcggtcagtgagaacctgtgatgtacc

SEQ ID NO: 284254 - DNA, 218 bp, Glycine max
ccctgctacattccatgctcaatgtcacttttgacccttgctcgggctgggaatgggctcattaaggtttaaaattctttttacggaccgtactcatatcgaaatgatacacaatgtccattccaaactgtccttttcaacacaaatgttctgaaaactttgaagggccgatataagacgcctcaaaccatattgagggataatgattgggtgtaact

SEQ ID NO: 284255 - DNA, 382 bp, Glycine max
tgtgcattcaatatcctgatgagggtgttccatatgttctcaagactggactaatacatttgctgcccaagtatcatggtcttgcaggtgaagatcctcataagcatcttaaggagttcgatattgtctgttccaccatgaagccccctgatgtccaagaagatcatatctttctaaaggcttttcctcattctctagagggactggcaaaatattggttgtactaccttgctcccaggtctattttcagttgggatgaccttaagagggtgttcttggagaaattcttccctgcatctaggaccactaccatcagataagacatttcaagcatcacgtaacttagtggagaaaacttgtatgagtactgggaaagattcaa

SEQ ID NO: 284256 - DNA, 348 bp, Glycine max
tgcattctactacttccaacaaaaactcttcatttacttggcatctcttcaattcacaattattcacttcacacctattgacaatcgtgctcactttaaaagcaatgatcaaatcaatcgtcagttatgccattggaaacaagcaaatattaaataccacactctagaaaacgctataatctaccttctcctacaaatcctctttcacttttctgtccagactccacttccacaccatccacaaaatgaaccgcacatctttaacagcatcaagtgaagtaagtcattcctactctcctcttcacgccagcaattgttttttccttttctcaaaatctacacttaatc

SEQ ID NO: 284257 - DNA, 385 bp, Glycine max
  unsure (1)..(385): unsure at all n locations
nttcgattcattctatgtacccatggtggtccacattgtgtttcgtgtatttttattctcgtttcatttactttttatatccccttttgacgtgcttaagccattttacttaagtcatttctcgcttaacttaaaaataaaataaatttccaccgatcgtttgaattgtattaaccgttaacttcggttaaaatgaattccgaccgttcggtcgtgccgtaaccacgttggaaatcaaaaaaagagataaaaaaataatataataataaaaaaataccttttagtaaaataaagcgggaaatcaatcggacgttttctctttgggatttctcattcttaatcgaattgactaataactaaagtgaaactaaggctaaaatcaact

SEQ ID NO: 284258 - DNA, 346 bp, Glycine max
agcttagccatggcagttggagagcacatggccttctaaacccccacaatagaatctcatacattcaaagctaaatgtcacttttgatcctttatgtttttgagtttgggtacattaagttttaaaagtctttttttggtccttactatttttgaaatgttacatttaggtccttttttgaattctccgtttacgacgctagtgttctgttaactttttaattcagatataatacttcacaaaatatattgggggataatgcttgagtgtctctatctatgacacactcagctggagcgtttatatgtattagatgacacaaaggtcaacaagtgcaaaagagagc

SEQ ID NO: 284259 - DNA, 400 bp, Glycine max
ttatcaaaaatcttttctctttttctctcgactattcttcattcttctccttcttttcacttttgttcttcctttttcttgcacaaattatgtggctcttccactggtgatgatcatggaaggctaaacactcaatcaatccaaggttccactccaagcaaagcctaatttgagttttggtttagtatttctaatatgtgtgaatgctcatctttttcttcaatcctattttcgattttcatgattatgaatatacttaggattgaaaatgaaatagtttagggattcctttcctaatttcgactttaatcacagattgttttagatgatattccaacctaatttgtgatctcaatgaatttatggattaatttgattgaaacaactctaatgacattga

SEQ ID NO: 284260 - DNA, 354 bp, Glycine max
  unsure (1)..(354): unsure at all n locations
agcttgtgaagattacaaaacatcttatatagcttgaaaatttatatgagcattgtccgttacctaaaatttatatccgtcaatgacttactaggaatcggatgtgttaaataatcaaatataaatcttattaatattcaaaagagcactataacaaattatacattctttttcttgtattgcccattatccacccaacaatatacaagacaaaaaattatctttattatgtgactcacaagttatcatgtgttatttacttggtctatactttaatgtgtatcanatacaccctattgaatcgaatccagatgttcaatcaaagagtatattattgttacaacttatacatta

SEQ ID NO: 284261 - DNA, 404 bp, Glycine max
taatggcagagcctactattgcttttccctttggcggaacaacttccaaatattactcacacatttcctcccaatcatagtaggttgcaccagtgattggcctactgtccacccttatgccaagctgtagtgctacatcctccagtgtaattgtacattctccaacagaaagatgaaaagtctgtgcctctggtctccatgatcaattttgaagtggcgtaattttgccacatcagcaaactcagtatgagcaagcaacaactcaattaaagggtgaggagcgggcatcaaatgagaatacaaaatgattattgctacttgtccctataaaacaaaagatacattttcataattgtcacgacaataaaaggttataatatcaattaattggtacttaccatgtt

SEQ ID NO: 284262 - DNA, 363 bp, Glycine max
atcttcataaggccttgtatggtttgaaataggctcccagagcctggaacaagagaacagatacttttctcttacaagttggattcatgagatgcactactgaatatggtgtgtatgttaaaagagaaagtctttcagacatcctcatagtgtgtttatatgtggacgacttgttgataacaggaaaagatttcaatgctatctcgacatttaagcaagagatgaaatctgaatttgaaatgtcagatcttagagaattatcatattttctgggcatagagttcaagaggacaaaggctgggatttttatgcaccaaagcaaatacacaactgatgttctaaagaggtttcaaatgtttgact

SEQ ID NO: 284263 - DNA, 401 bp, Glycine max
tgccagcagcaacagatttcttgagatgaacgaggacaagcttcttgtaggttgcaggcaactccttgtgcttcccttcgatgtatttggttatcgcgtattggctcgaaccggttctctctttcagactcgcaatcgcctctgctatcatctacagaataatcaaattaaatacaattggaaaagaaataaactaagagaattgattttgaaggagagtattttgggaaagtaccacggcgaagggagggtgggagaggggcttcttggacgacgccgttttcttggccttgggttgcgatgcggtagacatgatgatggcttgattgaaactcaaaacgaaaaaggagtaaccgttgttgaaattgaaacaagagatagatagaaattctgagagagag

SEQ ID NO: 284264 - DNA, 345 bp, Glycine max
  unsure (1)..(345): unsure at all n locations
agcttcaacatcagaccacttccagggtgctggaactacttcacatggacttgatggggcctatgcaagttgaaagccttggaggaaagaggtatgcctatgttgttgtggatgatttctccagatttacctgngtcaactttatcagagagaaatcagacacctttgaagtattcaaagagttgagtctaagacttcaaagagaaaaaaactgtgtcatcaagagaattaggagtgaccatggcagagagtttgaaaacggcaagtttactgaattctgcacatctgaaggcatcactcatgagttctctgcagccatcacaccacaacanaatggcatagttg

SEQ ID NO: 284265 - DNA, 403 bp, Glycine max
tgtaggattatggggtacccatcacatgtggtactaggtggcgttcgggcgatggtgcacaacaagtttttcacatacacaaagcgcgcataaacccaccatcccctattgcccacctccatctgagctcacgtactcccacgtagcccatatcctcgtttctctgaacaccgggtccccatcaatcctcccaagcttccacaacatccaagtaatacaacattcaaacagcacaagctatcacagccaagcaaaacagagcagaggcagagaactctgccaaaacaccaaccagatcacagcttttctcacttgaagaccccagtaccaattacttcgatccaattcgttaaccgctggatcgactccaaaattttactggaagtctatagtacataaccct

SEQ ID NO: 284266 - DNA, 347 bp, Glycine max
agcttgtaggattatggggtacccatcacatgtggtactaggtggcggtcgggcgatggtgcacaacaagctttccacatccataatgcgcgcataaacccaccatcccctgttgcccacctccaactgagctcacgtactcccacgtagcccatatcctcgtttctctcaacaccgggtccccatcaatcctctcaagcttccacaacatccaagcaaaacaacattcaaacagcacaagctatcacagccaagcaaaaacagagcaaaggcagaaaactctgctcatacaccaaccaaaatcacaagctttctcacttaaagaccacagtaacaattccttcgat

SEQ ID NO: 284267 - DNA, 383 bp, Glycine max
ttgagaaacatgtaaccctttggcatcatcaaaacattcagcttgatcctttgtctacaatctccccctttttgatgatgacaatcctgaaatcaagacaagctatatacaagatgatagcccgttcacatagcccttactccccctatcttttggcatgtatgcctaactttaatgattttaattgatttctaacccaagttctctccccctttggcaacatcaaaaagaataagcaagacaatcaatagataaacagagtcaaacattaaaccaaaataaatccatacattgtcataatcaaccaaagcaaagtctagaaatataataatagtgcaagattacgataactagagcaacaaagagccaaatacacggtgata

SEQ ID NO: 284268 - DNA, 188 bp, Glycine max
atggattggaacctcaattttattgtctctgtgcgaggggcatttttttctctacaaacattattttgcaaatcccaacggtgggaatatgcggaaatgagttcccaaagtggtgtccaaattttatgatgctccaatggttaatgaatatgggatcatagttttacttagacaagtttgggtgtatg

SEQ ID NO: 284269 - DNA, 394 bp, Glycine max
tcagagctagggagacatctctaattctagtcagtttgagccttagattagggagatgatggatgagaagaacattgtttggtgataattggaatagaagatcaaaagagatgatttacaaaagcctgtttggggaattgtagtacattataaaaccaacacaaacatgttaaaatgatttttggcttgagaaatcatacattcttattgtattgtttgattggaatccacatgaaaaagagcgtgtattgagttaaagaggaaagttggctcaggagtcaagactagaagtgtttgtggttcaacttgctaatttggaatggattttagataaaaggtcatccaatccgaaaataaaagtacagcttagtttggatttatttgaatacaatat

SEQ ID NO: 284270 - DNA, 335 bp, Glycine max
agcttatctagttttaatgttaggcctatcgaaaattgtctggacctgcaaacttgacattcttgatattgtcttaggcacgaagggtgtgttaaaaataaagatctcccacattgcctgggaattcaaacaaaatactccttatcttgggtttaaataacatccacaaccacaattgtggctacaataccaatgtattttgactcatcacaatgcaaccgcaaccgtaattgtgatcgcatcagctgcattttcccgtaatataaaaggtttttaactcacctaaatgtaaccaccatcacaaccacaatttaaacaatggttctataaaacat

SEQ ID NO: 284271 - DNA, 393 bp, Glycine max
tggttacctccttcttcaatacatcaagaatcatcgggttgagtcttctttgtggctgtcttactggtttagccccatcctctaaatttatctgatgcatacatgtggatgggctaataccaggaatgtccgccagggtccagcctatagccttcttatgcttcttgagaacagataacaacttctcctcttgctcatcagcaagggaggcatatataattactggaaaacttttgcttttatccaagtaagcatattttaaatttgatggcagaggcttcaattctggtgtgggcggctggataatggtagaaagagatggtttctcagcctgtacctcataaagaaagtcagaggtatgtgtacttcctgaaacatggttaattctatctg

SEQ ID NO: 284272 - DNA, 349 bp, Glycine max
agcttatgcctcatggccagttgactgtgggggctcacatcaatcctaaattagctcctcattactatggcccttttaaggtgttggagaaagtcggagcagcggcctacagactttctgaatctgcaaggatacattcggttttccatgtgtcactattgaaaaaagctgtaggtgattacaatgttgaggagacacttcccttcccttggagttggttagtgacaatgcagcaagtatggaaccagaggcagatttataattagctccgcctctgtaacattaagcaccatctttttcctaagaaatttatatactgggtttctagtctgggtattttgctttcatg

SEQ ID NO: 284273 - DNA, 394 bp, Glycine max
ttagctctcaacccaaactctcctcacaaaatctgatttcaggcttaaataggtggcattgttcgtgctcgtgcgcttagcacaattctggaccgcttagcgcacattagtgaatttcggcttagcgcgtgcctttctcgcttagcggatggactgaagtggtgcgcttggcaaacctgtacagctcatcttcttccagattcttccttgcacttagccaatgagtgttgcgcttagtggacgctcgctaagctagcggattggcttagcgagaaggtgaaaaaaccacttttcaaagcttgcctaattaacctgaaattgagagaaaatgattattaaacacataaaacagaattactaagtatttattacctatctttaactaaaagaactt

SEQ ID NO: 284274 - DNA, 333 bp, Glycine max
atcttgagatgaggaagtgttgaagggtgaaacttcctgcttttattgttgaccacagagtggtacctggagatatgtcgtgggggtcaggagaccttggggacgtcaggtggggtgctattgcccaaaaccaagcttgaccaatcccgacccaacccgggcatagtcggtcagtgagaacctgtgatgtacctaaacaggcgagctcctggcagtcaacagataaaaggaacaaagaccacaaagcaaggatgcttgtggtggctggccagctgtgaattttgtgtaatatgtggattatggcctctggtaatcgattaccaatggtgggta

SEQ ID NO: 284275 - DNA, 400 bp, Glycine max
ttgagccaaaatcttgactcaccataaaccttgttccagggtgagaatgtcaatccttaccctcagaagcaaaaaaagaagagaaggaaaatttccaatcaaaggaaaaaggagaaggaaaatttccaatcaaagaggaagcaaaaaaaggaaagaaggaaaatttccaatcaaaggaaaaagagaggaaaggaaattcccaatcaaagagtgggagaaagcaaaaagaaaagaaagaaaattcccaatcaaagaatgggagaaagaaaaaaagagaaggagaagaaggaaagaaagctcatgatcaaggatcgaaagaaaacaaaagaaatgtgcagagaggtctttggaccagacaatatctgaacaatacggaattgtcaccaaatgaacaaaagaa

SEQ ID NO: 284276 - DNA, 341 bp, Glycine max
  unsure (1)..(341): unsure at all n locations
agcttgtaataatcaattattgtttggatcaatacaatcgattataggcttgtaataatcaattattgtaatataatcgattataagcttgtaataatcaattattgtttcaaagacaagtttgaattgatataatcacataaggcttactctcatattcaattattggcttgataaaagtgttccatagaggaatttgacgaataaagaatatctaaaagaaattttaactntttttgaaaaccttaattatatttttaggtttcaaaatatttttaagccaatctagttcaattttgaagccttaatnattaaacgacacttagaactttcctcgtttt

SEQ ID NO: 284277 - DNA, 383 bp, Glycine max
tcacacatttcttcaatggcggactgggaggtgttagataaattagaattgttttccgatggtggtgaaattcaaatgggatggctgtaggagaaggctgatggtggtgacctaatttagggggttgagaaagaatgcataggagttgatgtgatgcaagatagaggaaacacatctctaggttgcaaaaggttgtttggagggggttcaggttagggcagaaaggtctgaccaaatagggattcataaatcaaggaagtttagggataaggagaaaggaaaataggtgattagggcagcagacctacaaagctccttcactaacatggaaagagggctagatatgtactatcacatacctatagcaaagaatggggagacaa

SEQ ID NO: 284278 - DNA, 374 bp, Glycine max
  unsure (1)..(374): unsure at all n locations
ntgtaggcatcgaaacctgggccttttgatcccttaagncacttagggctattgcactcggtccgcggattctctatggtcgcccgcagcctagcatcctttaaagtgggtaccacgccattgtcttgagcctgagacttgtcaataaatattctaacaggtttaagcgcaaatatgacccattttcgccattctccggaaagaccttagactgtcacctgggttttataaaactggcccttgacttggaggatacaatttagaccaaaccagtagctaatccaaatggatgttgcgtgcttttccggataaacgttttaagtaacaaagttccttattcgcagggacaaacttttttgtgtgctagaaggcct

SEQ ID NO: 284279 - DNA, 379 bp, Glycine max
tcccgcatccgtacttggaaggatctgattactgccttttttatgcaatatcagtacaattccaatatggctcccgatcgcactcagctacagaacatggttaagaaggaaagggagacctttaaagagtacgcacagtggtggagagacctggcagcacaagtgctcctcccatggtcgagagggagatgattgctatgatggtagacaccttactggtgttttactatgagaagttggtaggctatatgccctccagcttcgcggacttggtatttgccggggagagaatcgaagtatgtttgaagagagggaagttctattacgtctcctccacaagtaccaatactaggaggatcgaagcaactggggcaaaaag

SEQ ID NO: 284280 - DNA, 347 bp, Glycine max
atctttttgaacgtcatgggaagatcacaaaggtggttcttccaccaccaaagtctggacaggaaaagaacagaattggctttgtacattttgcagacaggtcaaatgctatgaaagcactgaaaaacactgaaagatatgaattacaacgtaacatattgtccagccttttgtggttattttatgtgaatgttggtcaataatatttaaggtttgttctacgtttcaggtcaacttttacaatgctctctggcaaagccacaggctgatcaatagtctggaggatcaaacacacagaagccaggaccaggattgcttccaagctatccaccccatgttggttatgg

SEQ ID NO: 284281 - DNA, 384 bp, Glycine max
taattcgtttgtaccatcttattttcttcttctacaagagctcatggagaagtttattcaaacaggacctttattttagctgttgttgctgttattaatgaatacttctgctctgcatttttaggtttcctgcacgaattcagaggctcaggttgatcgtggggtgcagaagaaagagactttcttttgacctgccttctaagctttagtaaggttgtcaccttaatgttgagttctgggaataacttgaacagtagcagcagcaacagtgggataacttctttagatatgccacccttgccccagtgtttaccactagattcacttacagtacgcaatagaaaatatacaggagagctgaggagggttcttggtgtgtctgct

SEQ ID NO: 284282 - DNA, 324 bp, Glycine max
agcttctgtcctttgctaactattggactgaatctcggtccgggcaattaaaaagatgggactgtacctgccgaggaagagggcttcttcgagggcgcagcggaggctggattcctggtggcccaagccctcgcaagatccacagtgttttccggggcagtcgatgcgggtgccccaatagaggtacttttcgaagggctgttgttgtcgtcgctgtaagaggttggctttcgagacggtggtggaaagaagagaggagaacaggaagagaagcgcaatcgctgtcactgctgccgcgaggagcagaattcgggatctcgcgga

SEQ ID NO: 284283 - DNA, 439 bp, Glycine max
tcaagaataatggcctcagcatggtggctggaaatactacaatagagaaacctagagaagagtggtctgaagatgaaagaagattagtgcagtacaatttaaaggcaaaaaatattattacttttgccctaggaatagatgaatattttagggtttcaaattgtaagagtgtcaaggatatgtgggacactttacaagttacacatgagggaacaactaatgtcaaaagatctaggataaatacttcaactcatgagtatgaattatttaggatgaagacaaatgaaagtatacaagatatgcagaaaagattcacacatatagtttatcatcttgcatcattaggaagaacttttcaaaacgaggatctcataaataaagtgttaagatgcttaagtagagaatggcaaccaaaggtaacaaccataacagaatctag

SEQ ID NO: 284284 - DNA, 402 bp, Glycine max
  unsure (1)..(402): unsure at all n locations
agcttattatatgattagatcttatattgtaaagtgtcactatgaatcttcgtgaaatatgctaaaaaagtctatatgatagtcattaataattttctagatgcttttntaagggaccactaaaagcttaagttaaacgaagacacatcatgaatgatttgttacatctttaacaaaccctagcacacaagagccactctagcttcgaagcctaaataatgcgcatgtccttctatcatgtgctgatattngagtttggttaaaaatagtgaaggctattangtaaacacacgtgaatgatttcatattacatctttaacaaaaatacgacgctcaagctaaagacatgtttctatatatctgnttacactggaatttggtaacaaccgctagtctaagtaa

SEQ ID NO: 284285 - DNA, 433 bp, Glycine max
tatataatactcacgctgctggccgaaactatggatcctgttaaaataaaattgtttcacaaatcgacttcagataaatcagatgagatacacatgcacaggcacaataaattctaaataaaatcattctttttacatctatttcaagatgaaataaatgatattctgaacaaactaaacatgcaagaggcataagaagtctaccacacaacattaaaggagtgtttggcaattggtagaagtgaaaattggaggaataagaatgaaactgagtatctggggtttagacttatgttgtgtctgaactcgtcatcaattttcactccactttttccttttcgcatatatacaaagcacgccgagagtatcattataaacaaaatcatattaccccttatgtgtctatctttcttagaatatgagctacttaacc

SEQ ID NO: 284286 - DNA, 442 bp, Glycine max
agcttgtatgagtactggaaaagattcaagaaattgtgtgcaagctgtcctcaccaccagatttctgagcaactccttcttcaatatttctatgagggacttagcaacatggagaggagtatgattgatgctgccagtggtggagctcttggtgatatgacccctgttgaggctaggaatttgattgagaagatggcttctaactcctaacaatttagtacaagaaatgatgctattgttcttagaggagtccatgaggtggccacgaattcatcttcatctactggaaataaaaagcttgatgccttggtcaacctagtaactcagcttgccatgaataaaaaatctacaccttttgcaagagtctgtggtctatgttcttctgcagatcaccatacagatctctgtccttctttatagcaatctagagtcaatgagcaac

SEQ ID NO: 284287 - DNA, 435 bp, Glycine max
  unsure (1)..(435): unsure at all n locations
tgtgactctnggcaatttctttaacaaaaccagtcacttaaaaagttatgacttttgaaagaatcttcagaaacaagtcacttgaagaattgtgacttttggaaatgtgtttttcgaaatcagtcactggtaatcgattaccattaaggtgtaattgattacacatcaacagatgtgactcttcattttgaattttgaaaatcttaacgttttaaaacactggtaatcgattactacattctggtaatcgattaccagagaataaaactctttggtaatgattttgtgaaaacttcttgtgctactcaatgttttgaaaaactntttaatacttattttgattgagtcttctgttgattcttgaatcttgagtcttgaatcttgatcttgattattcttgaatcttgaatcttggaacttgattcttgaatcttt

SEQ ID NO: 284288 - DNA, 442 bp, Glycine max
  unsure (1)..(442): unsure at all n locations
agcttgtatagttccncaatttatggtcattctggagtaaatttggtaaataaatctttttttatggttaacgctgtctctagaacatttccattgaatttaatgatgaaatntgtgcattntcaggtgaataaaaggctaagttttgaattgcaaaatgtagcagttgggctaagcgcatatccaccgctaagcgcgcttagcacaaaggagaatctggcagagcatcagcatcaaagctaggtgctaagcgcgagatcagtgcgctaagcgtatcaagtgccttcaaccaggctaagctcgagactagcgctaagcccaatttcacttactcgcgctaagcgcagcgtcacgatttcagagcctatttaaagcctgtcttgtgtagaatganggtaccacctttaccacctttatgacattnntatgacagcttctacag

SEQ ID NO: 284289 - DNA, 447 bp, Glycine max
accttaaaactcagcttcacaagcagcttccatcacttgataggttagatccttttatcttcttcgaagggacataagtatatcttggttgctgctgagtatttcaccaattgggtggaagaaattcctttgaatgttgatcaaggggatataataaacttcatagaacaaaatattatttttcgatttagtatcccataaacacttataacaggtcaaggcaccatttttattgatcgaaaagtggttcaatatgtcaattctcaaaatattaagttagtaacttataccccttattatgctcaagcaaatggtcaaggtgaagccatacacaagaatttggtaaggttaattaagaaacatggccaaaaacctagaagttagcatgaaagtttagaccaaattctctatgcttatcaaaattcaccaaaagggggccactattgt

SEQ ID NO: 284290 - DNA, 441 bp, Glycine max
  unsure (1)..(441): unsure at all n locations
agcttattgacttccaaatataagtctttaaactgcacattgagctactcttctaccaagaaagcttttatacataaacatttggctgaaatattcccaaccaataaaaacatgaagtttcacttgtgttgtcaaaacttgaacaatagcacaatcaaataaaaacatgaaattttacttgttttgtcaaaactacccaataaggaagataaatcttctcctcggtgagataaactaaattagttgcgtaatcaactgcaactgcttaatcgtgatacgtcttgttggtgagataaacctaattgagtatgctaacagggtgtgaatataaaagaaggagaaacatgagggataatgcataccgtaggcaccaattntctccaggcagcaacatgttgtgggaatgcaaaaaatcaaaatgaatgagataggctaatggag

SEQ ID NO: 284291 - DNA, 433 bp, Glycine max
tatcaaacattagtcataaagtgataaggaggtgatttcttcaaatagatcattagcagaaaagaataataattgttcacacttcacaggaaacaaaagctatgaaaaggactgaaaatttaaacagcagaatgagtttgtacctgtacaaacttggcaaagccagacccaagaggggatccaatgtacagagccattgaagctccatttagcaaggatgcgtatactagccatggccccatcatccgtccaagattagtgggccagcacactacatcacctttacgaacgtccatgtggcaccatgcatctgcagcagcttttagagagtaatattggtccatggaattgcctttggatcacctataccaccaaatgaggtacattatattagcttttggctagcttcatatggtgagtgaagtcttggtat

SEQ ID NO: 284292 - DNA, 439 bp, Glycine max
  unsure (1)..(439): unsure at all n locations
tgcttgttaacatatgccaacatgtattatatgtcactatagcctacacctaaattatggaaaatagtttaattcatttaatattatataaaaaatntaaagcaatcattaataattaaaataaatntaagaataaaaaaataataattcagaataaaaaattaaaataaatttctttattataatcataaatatctatttaactacccattaaaatttaaaacaatcataagtaattaaaataaatttcattaataaagtcatgaccttaatatattataaatatctatctaattaaacatataaaaacatcaatatattaatattataaaataatgacaagagaaaaaacttcataagagagaatgcactcttcatatatntcacaacacacataatgtaaatgtagcattctctacatattctcgttactaattag

SEQ ID NO: 284293 - DNA, 429 bp, Glycine max
tccaacatttactcgacacgtatcaaatacagatttttaaaagtctttaatctgattaacctcaatgaacgtgcaggcatttcacgttggcatgcgtgaaatgctgcacaaacatatgagattaaggcttgggatctcaaatttctatgttaataataattatgtcaacaaggcagctatatggagggtacgtgacgagaggatgagcaaagacacttgagatgataagttgtgccttctatgtcaattgtcaactcctttttaattctattgaataataaaaagaaaagtctaaaatgataattacttataataaataatgtctacgaacattacaagctgagattacctctcaaaaataagacatgttaaaattccacgcacaccttaatggcaatatatacttttatgttgtttgattgctatata

SEQ ID NO: 284294 - DNA, 413 bp, Glycine max
  unsure (1)..(413): unsure at all n locations
agtcttgccgcccagctcgcccaggcgagcaaggttgcttcctccaggagcaacagccttctggaggaatcttctggagggcccaagtgggcctggttgctatttgcatccccctttntactaaatgcacccccctttctattttttttgtaattctttttccgtaacgttacgaaactttacgaatttcgtaacgatacttattttccttccgtaaggttacgaatccttacggattatgtatttactctttnttagctntcgaagaagttacagaaactcacggattgcgcanaaacaccttttttcgatttccgccacattacgaaatntcacggatcgcgcaagcctgcttccttttgatttctgagacgtctcgagacctcatttattgcatgtcatctagtaataat

SEQ ID NO: 284295 - DNA, 424 bp, Glycine max
tctactgcaataagagttagttgggtcttgctatttagtagaaaaggttgctagagagtatatgccacgatttaattatgacatacaatagatatttgagtttttctcttaaaacttgtcacattgtcacaatgcatattagtactaacattatttccagctacttgtgaaatatctctagtggtaagaaagacagaccttactatgtatccatgcctctcacgtataactcatgatattatatagatatttttttgaaggtcagggcttaaaagcctgaacactatctcaattgtgggttttatcctcctcatattgtagttaggcctggatagccaccacatacgtcaaggggaggcaccaccacttcaaggcgaccaatagtattcttggcagcattgtctggtatctcccgactttatca

SEQ ID NO: 284296 - DNA, 431 bp, Glycine max
  unsure (1)..(431): unsure at all n locations
tgcttgtaatcgattacacacatactgtaatcgattaccagaggagattttcagaanatattcttaacagtcacatcttttcatttggttcttaaatggctatcaaaggcctatatatatgtgacttgagacatgaatttgctaagagttttcagaacaaaaagatcttatcttcttaaaaagaaaaatcgttttatcctcttacaaattccttggccaaaacacttgtgattcaataagaaattatttgagtgcttaaattgttcaatctatctctttcaagagagatttcttcttctcttcttctttattctgaaaaaggattaagagaccgagggtctcttgttgtaaagaaatctgaacacaaaggaagggttgtccttgtgtgtttcagatcttgtaataggaatttacaagatagtggaactctc

SEQ ID NO: 284297 - DNA, 433 bp, Glycine max
  unsure (1)..(433): unsure at all n locations
tgatcaaaacaattatctaatcattccaatccactcttatcatacagttgctcattcaaatcattcgcagacactcgttgcatacaaaacaaaccactgcatatcaaattcaactaattcactgttcaaacaagctttctgtacaatcaatcaactcaaagtactaaaatttaaataactaaaatttaaagaactgaaacataaacattgaaatttaaatgactgaacataaatcataaaataactgaaataaactaaattgttcaaaatgcacaaatttaaatgtcttgctcctgtgcatgctcattgagatccaacacctgagcagctagtgaatcctgagggataggctgctntagctcagatgctggtgcagatggcatggaatcatcangtatgggtgctggagatggctctggaatctggtctgtgg

SEQ ID NO: 284298 - DNA, 417 bp, Glycine max
  unsure (1)..(417): unsure at all n locations
tattttgtagctntcaggacttcaaaaaagccaaagatttccccatcctagttctaaatttcaaatgctatgaaagcttaatttaaaatatgtgtgcaccttggatcacaatgtgtgcaatttctaaaatggggttcaatttaatataacaaatagcgatgtacataatgtttgtacacatttatatatgtgtggcataatgaattttactcgtacagcttcaggataacatggcaaggttcaggctcataanagttatagcaccaaacttgtcggtatgccttatacaaacataaggtgaacccgaaataaacccaaaaagcattccctatgtcttgcttattcagcttgtttagttcatttggatattggcaaccttttcaattaaggaattctatagtgaacaggacatatctg

SEQ ID NO: 284299 - DNA, 431 bp, Glycine max
  unsure (1)..(431): unsure at all n locations
tgtcgtgacttcactattttgtttttaaatattatattgtaattttaaaagaatatacgttattatatgttataatattataaatgttaactcttttaataaattataagtgttaaagttaatattattttagggttttagaaatttaaataagttattagataataatattttagagtttagtcttttaataagttataagatttaagttattattattttagggtttagtcttttaataagttttaagttacatttgtattttttgacagatggctagcgaagaatccataataagagataatgttaacgatttcagtgacgatgagctacaatatgatgttcacaaacatgtagaaccaaggaatcaaagtgagttgtcttcatattttgaaactattagtagccaactntcagaaatcaagagtact

SEQ ID NO: 284300 - DNA, 436 bp, Glycine max
agctttaggctaatataaacgacaataactatctactcggatgtctgatcgagtcccgtaatatatcaagacgctcgacattgaatgttgaacctatgagcccattcacacgacattaactatttaatctgatgtgtgattgaatcccgttatatatcgagacgctcgaaattgaatgtggaagctttacgcaaattcaaactacaatgactttttactcagatgtttaatcgactccagtaatatatcgagacgctcgaaattgaatgttgaacctatgagccaattcatacgacaataactgtttactcggatgtctgattgagtcccataatatatcgagacgctcgatattgaatgttgaacctctgatccaattcatacgacaataactttctactcggatgtccgattcagtggtgtaatatatcgggac

SEQ ID NO: 284301 - DNA, 763 bp, Glycine max
  unsure (1)..(763): unsure at all n locations
gccccgacagagcgacacanagcacagtccagatagactagcaaccgggaccacgacgagccacacncaccncnccccccagagcgagcgcanattgagaccatcgcaanacccgnggcncnanacaaaaaacgccgacgtgacacganacgcgagganacctctgcatacagacggcgaatatatatatctacatcacgccccactcactcacgacgatgaagtgagaactatacgacacgaacaccatctcacactcagacacgaggactccaataccacgtagacagaacatggacgtctaacnagacacacagccgaatgncacgagccagtcaagatcacgggcgccacaccatacggcgatataggcacggacacacacgagagagggcgcacacacgacacactactcgcctcacgcgtacatctgcagaccaccgccgcangacgaagtaatatgaaccagcacacgaacgaaccgccgcacacgcactcaccagcatgcagcgtaacgcgagacatccgcacaccacgnagcacaagataccgcaccacgcaccactacgtcgcctcaccacaacggagccacaaccaagacagactgcggtgagaagcacagcacgcaatcgcatccagacngcacgcgacaacgcgcaagcgtcagccacgtcgcgatgaccgcacacaacaccacaangaccatacaccgcganagagcgacaccgacacgcatacangacaacacgaccgctcacgaccg

SEQ ID NO: 284302 - DNA, 379 bp, Glycine max
  unsure (1)..(379): unsure at all n locations
ttttcttgtggaggctntagagaatattggttgtaagagtttttggaggctttangaaagataaactaccacggttgggtgcttggtcttaattaagaaagtctacaggtgtatgtattaaagtagcctaggttggggtgaaccaatacaattccttagtgtgttgtttccttccttagtgcttcttgtttatccttgttattataaacttaaagtttgtttttgaaaagccttgttttgaaaagtataactgatatttgatcaaaaggttttcataaaatagttttattattcaaaagcaacacatactctaagtaaggaaagtcanaactaagatcaaaagaatttcataaactagttttgttattcaaatggaaat

SEQ ID NO: 284303 - DNA, 426 bp, Glycine max
tcactactcctatgtattcttctcaaactttactcattctctgcatcctttcttcattgtcataactcattcttctgatttgatcaccaagtttaaacatcttcgccatgagccttgctgtgtttgaagatggtggaggagcatctccacttgtagaagccatacctacaaggatagttagtgcacaagtaataaaaaaataggacctcaccactcaacctagtgtttcactcaagttcactcgtgtatcactttttcaaggatttttcttttataatatgcactcttgccttttaccactcttgctcctcttcagttcttaagcaaaatcttcaagcttaaaatcaagaagtattcaatgtgaaatatgtcataaatcaaaactcaactcaagaagccaagaatagaaatactctaagacaaaac

SEQ ID NO: 284304 - DNA, 425 bp, Glycine max
  unsure (1)..(425): unsure at all n locations
tagcttgcccagagaaggagtccacggaggaaatgcttaccacctcanaagactggaaagcggtttctaatgactcctctgcggcttccacataaggcatagaggatgggcagctcaccaagatgtcttcctcgcctgatacgatgaccagatgcccttccactacgaatttcaacttttggtggagtgttgagggaacaactcctactgagtggatccacgggcgccccaacagacagctgtagggggggttaatatccattatttggaaggtaacttgacaggtgtgagggcctatctgtactgngagatcgatctctcccctaacctctcggcgggtgccgtcgaaggcacgaaccaccattgaacttggtttaagtggaggcattgaaccatatcatgacactttggtacatatggccata

SEQ ID NO: 284305 - DNA, 434 bp, Glycine max
cttgagccaaaatcctgactcaccataaacctttgcccatggtgagaatgtcaatccttaccctcggaagcaaaaaagaatagaagggaaatttccaatcaaagaaaagaaaaggaaaatttccaatgaaagagaaaaaagaaaagaaaggaaattcccaatcaaagagtgggagaaacaaaaaagaaaagaaagaaaattcccaaccaaagaatgggagaaagtaaaaaaggaaggaagctcctggtcaaagaaaccagaagaaatgtgcagagaggtctttggaccagacaatatctgaacagtacagaattgtcaccacatgaacaaaaaggaaggaaaggaaaccacgacctaaaatggtcttctccctttaattaccaaccaaaatcccgtgcgctatgcgaccttttttctcgccccgcactaaacaa

SEQ ID NO: 284306 - DNA, 437 bp, Glycine max
  unsure (1)..(437): unsure at all n locations
agcttgcttttggagaggttccatcaaccgccctaattccttgatgctggtggtatctaggcctttaaccttgacttggtaaaacctcttgccggtttgattagtccccatgcttactaaagtgagacaaaaagctggtgcaaatcaaaactccgatatctcatgggtgggatggatgaatgcatgaaggaatgcatatgacacagctgtattttaagaatgcgggtgcccgggacattgtctcctttttagacacaacgtctaggggtagcaaagtgccccaatgtatgtatttaaaacggtgacccggaccctacattgattntgtctatagaggggatcaagacagaacccctatgcaatgcatatgcaaaaggcgcaatagcatganaatattcactgaacataagcaagagggtatatgatatttatgcatg

SEQ ID NO: 284307 - DNA, 425 bp, Glycine max
  unsure (1)..(425): unsure at all n locations
tgcctcgaagaggtccaggaaggacaaggcagccgaatgatactagttccgctccggagtatgatagtcaccgctttaggagtgctgtacaccagcagcgcttcgaggccatcaagggatggtcgtttctccgggagcgacgcgtccagctcagggacgacgagtatactgatttccaggaggaaatagggcgccggcggtgggcatcactggttactcccatggccaagtttgatccagaaatagtccttgagttttatgccaatgcttggccaacagaggagggcgtgcgtgacatgagatcctgngtaaggggtcagtggatcccgtttgatgccgacgctatcggccaactcctangatatccgttggtgttggaagagggccaggaatgtgagtatggccagaggaggaaccggtctgac

SEQ ID NO: 284308 - DNA, 435 bp, Glycine max
  unsure (1)..(435): unsure at all n locations
agcttctgggaaaaatccacgagttntcagtatcaaaactcctagtgtttcattggaattaggagtaacctacagtaataacaaattatctcatgaatatatcattccaaggctcattatttctcacgaaacttattcaccattagaaacaaagaggatttacctttctccaactatgaccaagaaattcattcacagctatagcattctgtccatacatcagtggtgaggaccagtaaccccacacaaaccatttgtgcacattctctggctcanagaacagaattatcatgataaaggttcattacactaatcaactntgaagttacattaccattttcttacctcgcgaaatcacaaatcctcccanaaccagaactataagtaatgcanaacttccaacagtatntgcaactataacatcccttccgaatg

SEQ ID NO: 284309 - DNA, 438 bp, Glycine max
  unsure (1)..(438): unsure at all n locations
tttggcaaaggaagaagaagaagaagttcaaagagactctttggttgaaaaagaatatatgaaaaagttgtgtaaaagttttgcttttatagactcttcatgtctggtcaagaaaaccattagaagagttataacctttaaaaaaaatagaaaaccattggaagagttatatcttttgatttttattcaaaacttgtcactggtaattgattaccaaaaccatgtaatcgattacacaaagctttttatgaaaggatatgactcttcacaattgattttgaatttcaacgttcagatacactgataattgattaccaatatcttgtaatcgattacaccattttgaaatcaattggaacattgaaaatttagttgaaagctttntgaaatcaaactntgtcactggtaatcgattacaggaaactggtaatcgattac

SEQ ID NO: 284310 - DNA, 440 bp, Glycine max
  unsure (1)..(440): unsure at all n locations
agcttgtacggtgatcttatcgtgataaactnttttgctttggtattctaagttgaaaactgtatcaagataaacctttntgaattttgccaagtttctgacataattgggggacaggtttaattgagctaggacttgttaatggcaattgatttataaaaaatgttcttatttctcattgcttgggaatgagaaataatgtatataaaactgttagtgttcaaggagacaatgagacatttaatgctactagaatagaaagtagaatcaactgacattttctanaggtgatctggtaattgaggagaatttcatgatggttcangaaggatggagccttgcagaaagtttntgtgtccgatgcattgtagctgctccttatgttgttccatacaggtacttaagaagttcatccncatcatgtatgatatccccattat

SEQ ID NO: 284311 - DNA, 435 bp, Glycine max
  unsure (1)..(435): unsure at all n locations
ngcaaggtgaactatggggctggacatgcttctatgttgtcttggctgcagttgcagttggatcttcatactatcatctcaagccagacgatgctcgccttgtgtgggatcgcttgcccgtgagttcaagctaacttcaattttattataaggcaaatgctaaccaatgcccttccaatgccccaagaccattggttaagaaaataaaaggagaaagatttttattggtttacataaaattacgctgttcatgatttttttttattttatgttctcctctgattttcatattaaatactttatccttttagcaagacccttgtacaaatcgtttcccttttccccctttttttcagcctcattttagtttccaaaactgattattcgctgcagatgaccgtcgcttttacatcaatcatggcaatattcatcatt

SEQ ID NO: 284312 - DNA, 443 bp, Glycine max
  unsure (1)..(443): unsure at all n locations
agcttgttggcacatctacgtctttaaatttcctgcagtcgacatttagaaagactatttgttcagagacagaanaagtcttttcctccaagcttataaaaataataacccaattnttccagaagcaggaaaaataggataaaatttgatagttgtttattaaattacaggtgcaatattctattaagaagtgatgaaaataagaagcaagataattgtttcttgcaatttttgaatcaagcaaagggtgttatatgagtgtctttcttgttaactatgggctatggcaaaggaaaagacatgtaattgtaaatggtcaaaggcttcactttatataatcttgccaaaatatggaaatgacattntgtatacagagcatatatagtgtcttgggtatatnnttggaagntattanaaaaagtcattgttattgctaaatgttt

SEQ ID NO: 284313 - DNA, 437 bp, Glycine max
  unsure (1)..(437): unsure at all n locations
tattnttctctccttagtattttggcaaaaatgagctctatataagtttataagctttacaaatttcaaaagcctgataataggcttgccacacaaataagaaaaggtgaccattaacaaaaaggatatcaaatcttctctcagtaatattttgcagcatttggtggaaaaataatacagccaggagctaacccagtaataactaataatatcaatatgtaatgatgtgtatatgtttgcagatgaattctaaaagcagacgtcatcattttcttatagaaaagtaagtagaaagtgagatggaaaaaaaaaggtcagatggtctcaggagaagagatgatttgtttgatgtattatgaactaaggaaagggattttccacaggcatatacacaaactacagaagcacatgtccagaggtcagctaacgatccacat

SEQ ID NO: 284314 - DNA, 400 bp, Glycine max
  unsure (1)..(400): unsure at all n locations
tgcttaacaaaaggcatgcaaagtgggtggaattcctagagcaattcccttatgttatcaaacataaaaagggaaaaggtaatattgtagtcaatgatctttctcggcgtcatgcattactttctatgcttgaaacaaaattgattggtcttgaatgtttgaaaagaatgtatgaaaatgatgaatcttttggagaaatttttaaaaattgtgaaaatttttcagaaaatggtttctttagacatgaaggctttcttttcaaagaaaacaaattgtgtgtgcctaaatgttctactagaaatttgcttgtntgtgaagcacatgaaggaggtttaatggggcattntggggtccaaaagactctagaaacattacaagaacattnntattggcctcatat

SEQ ID NO: 284315 - DNA, 431 bp, Glycine max
  unsure (1)..(431): unsure at all n locations
tgtgggattgtgtgatagtgattntgccggagatgtttatgatagaaaaagtactaccggatttgtattttttgtgggtgattgtgtttttacatggagttctaagaagaaaggcattgtgacactttctacttgtgaagccgagtatgtagctgcaacttcttgcacatgtcatgccatttggctaagaagattgttggaggaacttcagttgttgcaaaaggaaagcacaaagatctatgttgataatagatctgcacaagagcttgccaagaatccggtgttccatgaacgaagtaagcatatagatacaaggtatcatttcattagagagtgcattaccaagaaagaagtagaattgactcatgtgaaaactcaagatcaagttgcggatattttcaccaagcctctcaaatttgaagagtttcgaa

SEQ ID NO: 284316 - DNA, 432 bp, Glycine max
  unsure (1)..(432): unsure at all n locations
tgcttttatatttgagtacctgaaaaatgggagcctagaacagtggctgcatccaaggacattaactcctganaagccaggaacattgaaccttgaccaaagattaaatatcatgattgatgttgcttctgcaatacattatcttcatcatgaatgtaaggagtcgattattcattgtgatttaaagccgagtaatgtacttcttgatgatgatatgactgctcacgtgagtgattttggcttaacaagacttctttcaactattaatggtgccacttctaagcaaacaagtacaattggaataaaggggactgttggctacattcctccaggtatgttctaaactcccaaaaaattgtttctttgatttcttcccttttgatgaaaaactgatatnntactaactacaagtatggggcaatnnttctatat

SEQ ID NO: 284317 - DNA, 434 bp, Glycine max
tcacacaatttatttttttttatcaaacttgagttttggaaaaccaattactaagactttcctaactagatgatttaaatgatgcatgttaatatgtgcagccctatgatgccacaatcatgaatcatctatcttactcaccaagcaacttagctcatgaaaagatacatgttcaacattcaacatatagatattacctattctcttactgatctggacaactttaccggatatggcttcacttataagacatcaatttctattgaactctattttgaaccctttatcacaaagttgactaatgcttagaaggttatgctttagtccatccacatataacacattcttaatctgagttttatgttgattccctatatcatgagaatcattatttttcctttgttgttgtctccaaacatgaccatagtttggac

SEQ ID NO: 284318 - DNA, 444 bp, Glycine max
  unsure (1)..(444): unsure at all n locations
ttgcttatgcaatatgatagttggtatctttgccttcaagttacatacacgtgcctacaattgatatggtcatacatccatcanatatctctaattaaaatgaaattatgcggttcattacagataataaaatatttactttttatatgagaaaatcaaatgctgatattatgaatacatatataataaactagagtaacacccgtgctatgtagaagtaggggaagaaaaaagtttcaaatagttgctccatacttttaattaaagagagtgtagagtaataaaaaaaaaattggtgtgtaggccaatacgatttttatttttttacagatatcaaccataaataaatgtatgtaattaattaagctagcaacatttgtctggttcanagtagtcctgaacattaaattcttctacaattattgttggacatttattcttatg

SEQ ID NO: 284319 - DNA, 427 bp, Glycine max
tgcaatgtaatcctgtcaccgcttatacattgtattgtgtgatgctatctgcagaagttcacagatgaacacatttattttctaacataattcacgaaagattgaaaaaatatgatgagaagtggaaagaatcaaagaaattcattgaatcggaattgtagtgcttatttcaccttctgatttgcactttgcatctctcgttgtgctcttccaaggtcctctgacagagtactatgtgacctctcaatgtcaagcctagcttctctctctttaacaagagactccactgcagccttgtatttacaaagatgataaatagcttagagttcatcatatgacatttcctttcaccattcttgttctcttccaattgactaaaaattctttcttaccgactgttccatttcttccttgatcaagttttctt

SEQ ID NO: 284320 - DNA, 346 bp, Glycine max
ttgcttatatctacttaaaccaatatgaggttgggctcttatactaaagccacttagaacctttggttgctacctacgagagtccttagatatcaatcactgtgggcagctcttgccctcatggcaccttcattggatgcacccaaggatgccacacgagcctcctgatgatcgtgttgatgctaaccacatcaactaacttagccatcacactcaccagatctgcataacacattgacacatattctattggacttctccacagaatggagattatgatgggccatatgcccccatgtactactgttggggctataagcagattatctaagcatatagattctat

SEQ ID NO: 284321 - DNA, 431 bp, Glycine max
  unsure (1)..(431): unsure at all n locations
tgagctccttcaactgctcaaagctcttaatattttattagtatccttgnggaaccttcacccgacgaatagactgacaaaagcttattttctcctttttggacaaagtatggcacgctgggggcaaataaattctcttcccatcagaccttggatgcaactgtgatcgtatgcccatataagctagatgttgacgggtattcaagccatccttcatcttgccttgaatgttaaggagcgtaccaatcacactgtctcaaacatttttctccacatgcataacatcaatacaatgtctaacgtcacgatcagaccagcacggaagatcaaagaaaatagacctcttcttccatatgcaactcttacttttatccttcttttgggacttcccagatataggatgtaagtgtggaacccgctcatatacctgc

SEQ ID NO: 284322 - DNA, 441 bp, Glycine max
tgcttctcttggaccttgaacaagcaatcaactcctctttcagaaccctgctatgtgctcgcgactggtccctttcttcccttcgcaacttgagttcattattgctaccccatagagctccgcgaaatttgttccggccatactcttccttgcgagccctcttggtctcttgttcaagggctcttgcggtaattgcattctcttcccgtaacccggcacactccttccgaacgtgtgtagcagccaacttgaacttctccttggcgagttttgcctttcctaactcgcttttgagagcttggacttcttcgtcctcttccggtgcttcaaaattctcttcgctgacgacttttaacttggcgagccaatctaaacctcgtatgcgaactgtcagccattcgtggtacccaccaatgatgccattacgaatgcctctaagct

SEQ ID NO: 284323 - DNA, 431 bp, Glycine max
  unsure (1)..(431): unsure at all n locations
tgtgcaaatcagatcactcctacattttatctctttttgcattgtatgttagtctcgtcctttgtcacgggaagccggaatgtccatatcaccttcttaattgtacacatggggcactgcgcccccaaatgcgcgagtaagaagagataattttccgggctctcgtgtccgtaaaatgcattcatatcatgcatcgcataagcatctcttcataacatcataatggacatatcctgcatttgtccgttatcatattccagcctcaccttttgcatgagtcatggcatcatcatgcatatgcgtccaacaaactttttgatctgcaaaattgcataccatcntgtttcatgtttgctcatccttgcgttttcctctacaaaacaaaaacaaagaagggggaagcgtgaaacttcacactacattcttagttt

SEQ ID NO: 284324 - DNA, 415 bp, Glycine max
  unsure (1)..(415): unsure at all n locations
tatttgcattntaagacaaatcccccccaccccgaaggctgattctcaatccagcagtcccttaccaccttgtggtaatgcttgttattaagccatccatcanagaccttataaggcttaggaccccaatcaatgctcttagatttcatgaggatagggcagtgatcagagtagttcctttcaaggttgtgctgcgaactgtctggccacttagaaagccaaccatcagagacaacagctctatccaatttgcttttacaggaaccattangcctaacccatgtgaactgcttacccacactangaatatcttccacctccatgatagcaagccaatcattgaaatctgacatgatgctggactctgaattccatgatngcttccatctctctgaaggtgcctaatacataaaat

SEQ ID NO: 284325 - DNA, 432 bp, Glycine max
tgagcaaaaccaaaggtaccgtctctttttcatatttgttttggcatcaaccaaagataaatgattggtatctagtcgtcttcatattggtcctttatcatatgatctgtccttttctttaaagtagcctatattgaagtgatgctatgattatggtccgttagttgtaagatgaagacttgcatcaagaaaagcgttttaagataaagattttctgttttagttgtacgtagagaaacaaaagttacaatattacttaaatgagaggaaagaattatgcttcacttcagcaagaagactcagtgtatgtttgacttaatattagtaaacttaattatgaataaaatcgattttgtaaaattaatttagattaaaagtgaaatcatctttattatggatcactggtttaggtggttcatttaggatcacttt

SEQ ID NO: 284326 - DNA, 425 bp, Glycine max
  unsure (1)..(425): unsure at all n locations
agcttgtagatccccttgcaggactttntcttgttccatattgaccaaaacaatacattntgaanaatattaaacaaacctgtgctacacatagatgacatgtgttggatacctacaaattatattatgtattgaaacaaaggtcatttttatactctgaatccttaatataacctcttatacccttttctttaaaatttacttagcgagtattttttttccagtgatcaagatgattatgaggttgtacaaaaagtgggcagggggaaatatagtgaagtttttgaaagcataaatatcaatagaaatgagcgctgtataatcaagattctgaaacctgtcaagaaaaaaaaggtactcctttctttgcttgtnttatcctagtttactcntacctgcgactgtgaataagccagcaatgatgc

SEQ ID NO: 284327 - DNA, 427 bp, Glycine max
tgcagaaatatgtgatcctcttggacatctgtgggtttcatggtggagcagacaatgtgaaattctttcaaatgtttgtgcgagtcttcacctgcaagaccatgaaactttggaagcaaatgaatcagtccagttttaagaacatatgggacatcctcatcagggtattggatgcacaagttttcgtaggtgaaatcaggtgcagccatttcccttagagtcctctcacggggtggaggttgtgccatgttctcagaatgtgcaaaatcagaatgctcagaatcagaatgctcaaaattatagtgctcaagatcaggatgttcaaaatcaccaataacagaatgcacagattcaccagtaatggaatgctcagaatgatcaaaaggtataaaatgatgcctaactaatctatgaaatgtcctatcta

SEQ ID NO: 284328 - DNA, 395 bp, Glycine max
  unsure (1)..(395): unsure at all n locations
agcttatatatggaatacttacttgttggtgataaataaaagcgcanaacggaatcgaaaaatgcgaagagtagagatcctagggctgcaaactcgtaaattccgtgggtatgggctttgaatggggggaaaagaagtttttgaatgcaaaaacgtccccctttcgtcatttttttatattttggtgcaggggttgctcgcccaggcgagctaacctgcacttttttttttaggggaaacataaccatggcccccctctctttacaggttaacgttcgcctactcgaacttacttaagttagaattaggcatcgttttacttatttaaaacaaaaaatagtagttatcattgtgaattcaaggatactgtgctgtcttgagtgacttctctgttg

SEQ ID NO: 284329 - DNA, 440 bp, Glycine max
  unsure (1)..(440): unsure at all n locations
ntatgtgatgaacattggttaatggcaatgcatgaagagtttaatcaatttaagagaaatgatgtatgggatttagctcctaaaccaacctctcacaagtcaatcggaaccaaatgggtgtttcgaaacaaacttgatgaatctgacatcacagtaaagaataaagcaagattggttgcaaaaggatacaaccaagaagaaggaatcggctatgatgaaacctatgctctagctgcaatgttagaagctataagattactactttcatttgcttgtattatgaatttcagacttttttagatggatgtaaaaaatgtcttcctcaatagatgcattgaagaagaagtgtatgtagatcaaccacttggatttgtgcattatgaacatcctaaccatgtctacaaacagacaaaaggctctatatggtttgaagcaagcan

SEQ ID NO: 284330 - DNA, 436 bp, Glycine max
  unsure (1)..(436): unsure at all n locations
agctattataaagggaaagaaaataatcaatgtataaatgaaccaaacaagtcaaactcaagcttcatacttttaacaagccaagtacaagttttaaatntacttcattntaaataaatgaccaaaacttagcatcttctacttttgcaaaccaagcatcaactttaatttcttggcttgacttgatactttgacaatgcccttaacaatatacattactccaatttgattgaacttaagtgttaatattacatgtaatataatttcacttgcacacaccgaanaaaactcattgaccaaatggcagcacctgatattacttctagaatataaggtttatntgcaaagttaccatttcaatgcatcttatcctanagactgctttcaacatcacacacacacacacacacancaattaatcaaaacaatttacctt

SEQ ID NO: 284331 - DNA, 435 bp, Glycine max
tgcacttcttcgctttccttagggacttcagcctctttctacttgaaatctttagttcgggagccaagttatcccttgcatccgagccttcaaccatttatgatatccaccaataacaccgttgatgcttcctctaagctccttatcctttctttgcaccacattccatgcttttcggactcgtcgaagcatttttgcattggggtcattgaagccacgtgctatgaaaggcatgatactctcttccgatggtgcccctctcatatgatagcctagttgtcttatggcaagtttgggattataattaatacaacccctcgttcccatcaaggggacatttatgaacccttcacatgaggacaatactccgacccttccttccttccatagggggaaccaattaacgaacgcccctaccatacccaccaagagttg

SEQ ID NO: 284332 - DNA, 441 bp, Glycine max
  unsure (1)..(441): unsure at all n locations
agcttttattatcaaagtaattggcatactaaaaattaccaacaaattattaatttataaaattgatagcatagtaccattatgagacgagctgctntagagcttctgaccaccatccactgtccttcagaatagaaaagccattcacgtgcacgactctgagatataacattcaatcatgaaattcaaacagaattactgcataatttgatgccctaggtgtaaactgcagatagatataaaaaaaggaaatcagatatcctgtggaatcagctccataaatgcatattgatgcacattgcaatccaaaaaattaaaaaacaaaattagatgagaaaaacaatatatgaagaacttgagaaatactagatactctatatctgtcaagtaacaaaccattatccctacctctataataaacaaataatccgatcctagatg

SEQ ID NO: 284333 - DNA, 428 bp, Glycine max
  unsure (1)..(428): unsure at all n locations
ngaacatctcttaattagttcgtgcaaatccgtggatcagatatttgtggcggatgaaaactcgggtcaccatcatcatttcagaatatctgctccaactgaactggtgagcatttcaaattgctttaatttgttctttcttatgttagacttattagcattctattgtgaacctcaagcatattatcaactgtgtgatataggttccgattttccccaacttggagacatttgtgatttctcacatggacaacttgaagtcaatatggcccgaccaactcactgaaaattccttctataaattgaaaaagatggaaatcacatcctgtaacaatctcttgaatgtgttcccatgtcatgtgctagacaaattacaaagcctggaatcactgaatntatggaactgtatggcactaaaagttgtatat

SEQ ID NO: 284334 - DNA, 428 bp, Glycine max
  unsure (1)..(428): unsure at all n locations
nttaatgactaatgacactacgcacgctgggaacgacccgctgagtttactgcgagctgctcggacgaatactaccctatagacactagttgcatgagaggcattgaccgatataccatgaccttcagaatagatgagcactcgcgctgatccacagtgagattctatgttaatacaggagaggatgaccgtattactgcgctctttaagcccctgagcgtatacggaacattcttgctggattccgcgtcctgacatgctgtggatacaagtcgatatggtccctatcttccacgaagctgagcggtgcattgcatatactaatgtggtgaacaccccaaacgcggacgcgtttaaaagtactcgaatgcttctgcgtatgagctaggaattccaaccttatagagctattgccgtcgctagcgtcg

SEQ ID NO: 284335 - DNA, 264 bp, Glycine max
  unsure (1)..(264): unsure at all n locations
tatagaatactgccgctngagcgatgctcctgaatcggacgctacgaggtgaagtttttatccttggaacttctcaagagactgctctgtttaattttgagcgtctctatgtataatgcgccggagatgaacacaaatgtggtaaattgatgagcatttgaatacctacagagcatccgatgatcgttaacggagcgtcattatatgcgatgagcctcaaacggaccgacattcgataagttttgaacattcgaatttcttgag

SEQ ID NO: 284336 - DNA, 409 bp, Glycine max
  unsure (1)..(409): unsure at all n locations
agtctgtatgaactcttagcttatcggcctacttatatgcaacccatttgagaatagcttgcatgtttgtgaaaatcttaccacaactatgctcctccagaaagattataatttgacatattttatgtcactgtggttcatgcacaataactaactctcctataggtgttcatagcgcttattatttttaatatattatcataatgtaaaatctattgactaaacttatataattattatgctatattatgtatcattaaaatntgtgtaacatatttatgttgaaaattattaattatgtacttttattaggaatgattaaggaagataatataatcaaccttttttgtaacataatagtgcatagtgcctcacttgatatataacattatttttaagaatattgcta

SEQ ID NO: 284337 - DNA, 432 bp, Glycine max
ctaagcttgccatagaatatgtatacctttcggaccaactattgggccagtagccatcatcattgttggggctagctaagcttagtgatctacattgcaccgacgataaattacttggcccaatgccagacaaaattagtggactttaatgtctaatttaatggatctggatttgtctggtaactccctgcacgaaacagtccccatttatctggatttgtctgggaactcgctgcacgaaacaattccccaatggtgcttttctttgtcatcgttgttacgcttatctctttacggaaatcagcttacaggaccaatgggtgaattctcttcttttcccttgtattattgtgatctctcttataacaagctacaaggtaatatcccaactcagtgtttcatctacacaatctcactgtgttgagactatca

SEQ ID NO: 284338 - DNA, 396 bp, Glycine max
  unsure (1)..(396): unsure at all n locations
attttctcaaggaggtgagcttagttatgagaggggtgtgtgtaactaagctctagcttctcaaggaagttntctcaaagaagcttctcaaggaagttttctcaagaaagcttctcaaggaagctacctagtctataaatagaagcatgtgtaacacttgttgtaactttgatgaatgaaagtcttatgagatacacttcaaagttccacttctttccttcttttattccttcaatttcctgctccccccttctctctttcttttcctccattaaagcatcttcttcaagcttcttatccaaggcaattcttggtggtgaagctccttcttccttggcttattccctagtggatggtgccttccctatcctcttctccttttgccttcactgcatc

SEQ ID NO: 284339 - DNA, 427 bp, Glycine max
tcattaagaggcttcctccagaagcttcattattaggcttcctccacaagcttcattaagaggcttctagcacactccagacatcttctcaaagattccaatggtcagatcatggaaaagtgtcttgtgaagttgcagaccaaattttgagaagatccaatggttaatgaaggctgggcagtgtttttaccgaggcagcttcatgtagctttctctagaagcttcattaagaggcttcctccagaagctttctcgtggtttctttgagaagctttctcaagaggcttctttgagaagctagatccttatctatccacacccctctattaactaaattaacttccttaaaaataattatggatgaaaataacgtaacaaataatcaaacatcaaacataattactaataatatatagatatatatatc

SEQ ID NO: 284340 - DNA, 417 bp, Glycine max
  unsure (1)..(417): unsure at all n locations
ttcttgtatagttccccaatttgtagtcattttggagtaaattntgtaaataaatcttgtttatggttaacactgtctctagaacaattccattggatttaatgatgaaatctgtgcattntcaggtgaaaaagaggctaagttttgaattgcaaaaagtagcagttgggctaagcgcatatccatcgctaagtgcagcttcagcacacttagcgcaaaggagaatctggcagagcatcaacatcaaagttgtgcgctaagcacaacaagtgccttcagccacgctaagcacgagactggcgctaagcccaatttcacttatctgtgctaagcgcanaggtggcgctaagcacatcatcgcgattcagggcctattaaagcttgtctgtgctaatagggtacactttacaacatcta

SEQ ID NO: 284341 - DNA, 435 bp, Glycine max
  unsure (1)..(435): unsure at all n locations
tccacaacatccaagcaaaacaacattcaaacagtattgctatcacagccaagcaaaagcagagcaaaggcagaaaactctgctcaaacaccaaccaaaatcacagcttttctcacttaaagaccacagtaacaattccttcgatccaattcgttaaccgttggatcgactccaaaattttactggaagtctatagtgcataagcctacattgtgaccgttgggatctactagcaaagatcaagaactcattctgtactactctttccacagccaaccacacacaagcattttctgcaccaagctaaaatcctgctgcacctattttgacagcaaaattctgcataagtgcagatttcgaaaatcacacttcccctcatccaatcttgctcanatcaaatcctacaagtcccaaatcatgtatcaaacatgtcta

SEQ ID NO: 284342 - DNA, 427 bp, Glycine max
  unsure (1)..(427): unsure at all n locations
ttgcttcattggagcttgtaggcctaggatcttcttcatcaatggattcctatgcttcttgaaagatgaatggcagtggaatggagaaggaagagagaggagatgccacttcaacgagaagatgagtttagaagaagctcaccaccataggaggccatggataatagcttggaggaagaaggagatgaatgaagggagaggaagagaagagcacaaatttttgtgctctaaaagagctctgaaatctaaagtttaattttcaaatgatcaaagttggaaaaatgcacacacataacccctatttatagcctaagtgtcacacaaaattggagggaaatctaaatttctattcaaatttcacttgaatttgaaattgaatntgtggagccaaattttggagccaaaatttcactaattattgatagtg

SEQ ID NO: 284343 - DNA, 430 bp, Glycine max
tgaaggtaaactagatgccttggttaacctggttacccaattggccatgaataaaaaatctgcacctatcgccagactttgtggtttatgctcctctgccgaccaccacacagacctttgcccttatgttcagcaatctgaagcaattgaatagcctgaagcttatgctgcaaacatctacaatagacctcctcaacctcagcagcaaaatcagccacaacaaaacaattatgacctctccagcaacaggtacaatcccgggtggaggaatcatctcaaccttagatggtcgagtccttcacaacaacagcaacaataacaacaacaacaacaacaacagcaacaacaaccccagaaacagcaaccaattgagactcctccgcaaccttcccttgaagaacttgtgaggcaaatgactatgcaaaacatg

SEQ ID NO: 284344 - DNA, 378 bp, Glycine max
  unsure (1)..(378): unsure at all n locations
tgtttgaacaaaagaagtggaatcatgcaacaaaatgtgaaacaatactacaagatgcctatattacctttcacttacccttntctcaaattggtgtggtattggccatcactcaaaatgactcttcattcatcttccgattcgcacgatcccaaatgacaagatgtgaatgcatgcatgcttatgattggaagttaagtgcaacaattaaacaagtgttatcatgttcaattttacttaaacgcttacgacaccccattaattgagccaaatggctccggattcagtgggcaagatcgagagtgtatgttcttaagaagtaaaagacacaacacaggaggttaagatgcanatcattaatccacatttattaatgct

SEQ ID NO: 284345 - DNA, 414 bp, Glycine max
  unsure (1)..(414): unsure at all n locations
tgaaggtgtgtagccaccatcttttcatagtagagcactggtaatgtgtctactatcactgttatcgtcaccctttccgtcattgggggcgccacttgggctgccagatccctccacctttgggcatattctttgaaggattcatgcccctttttacccatgttctgtagctgcatcctatccagagccatatcagaattgtattgatattgcctaatgacggcaaccattaggtccttccaagaatggactcaggaaggttccgagttagtataccaggttacagttgccccagtaagactttcttggaagatatgcatcagtaatttctcatcttttgcgtatgcccctatcttccgacaagttcttggggcaagtagtccccttgtacttatcanagtccgacaccttgaa

SEQ ID NO: 284346 - DNA, 436 bp, Glycine max
  unsure (1)..(436): unsure at all n locations
ttgtctttgtggaaacttcatgtgctactcaatgttttgaaaaactttntagtacttatcttgattgagtcttttctgtagaagcaagcttcatgatgaatcaagattgattcaaggagttttgatgataacaaagatgatgacaaaaagctcaaaagtcaagaacacttcatgttaacaaagatgatgatttcaagaatcaaagaatgagttcaagattgaatcaagaacacttcaaggttcaaaaggaaatttgatttcaagaatcaagaatcaagtttcaagattcatgttccaagaatcaagatcaagattcaagactcaagattcaagaatcaagagaagactcantcaagataagcattanaaaagtttttcaaaaactgagtagcacatgaaattttctcataaccttntaccanagaagttttactct

SEQ ID NO: 284347 - DNA, 430 bp, Glycine max
tatgcgcatatttccttacaaacgttctcttgcacaagacattctattaaccgaaaaaatgcacccatatacaatcaaggcagcttcgttacctagattatttacacgtacttccaaggtgtatttgttacttacatcacacacctccttggctaaactcacatacatgcatactcaaagcattttggggtaccaaaaattgcacatgtgcacatcttggtatttctaatacctatacatacacaaacttcatgatgaatcttaactatctacacaataaggtgctacattttatgctcttttcaagtttttgctacctaaagccgcatgcaaattcaagtatattttcctttgctgactaaaattgtattcaaattaagaggtatacattttttggtaatgtatcttctttacataacatgcaacatat

SEQ ID NO: 284348 - DNA, 434 bp, Glycine max
  unsure (1)..(434): unsure at all n locations
tgcttatagccttgggcatgaggggggatgatggaaagccaccttaattgtgatcactctttagccagaaagggctacctacggaggggttgaccaaaatggctattttaagtgtcgtagagtgcactacaaccactggaatgcagctcttatgcgattgagatctcacattcactagaggtatgacttaagctgtgtttataaggattgggttgttctcatcttacaggttgattttgtgggttgagttagaccataaacccaaattgtaatacatgaggaggacaattggatacggtanggttatactatntacaacatatggagactgattctagtaaaaaggtgttgtcttcttgtcattanggtagcttcccacatttggcttcaatgtanacgtcttggacatcntgcctttggtattcttatgtctt

SEQ ID NO: 284349 - DNA, 421 bp, Glycine max
tcttttggaccttgaacaggcaactaactcctctttcaaaaccatgccatgtgctcgcgactggtccctttcttcccttcgcaacttgagttcactattgctaccccatagagctccgcgaaatttgttccggccatactcttccttgcgagccctcttggtctcttgttcaagggctcttgcggtaattgcattctcttcccgtaacccggcacactccttccgaacgtgtgtagcggccaacttgaacttctccttggcaagttttgcctttcctaactcgcttttgagagcttggacttctttgtcttcttccggtgcttcaaaattctcttcgccgacgacttttaacttggcgagccaatctaaacctcgtatatgaactttcagccattcgtggtacccaccaatgatgccatta

SEQ ID NO: 284350 - DNA, 274 bp, Glycine max
agcttgtcgatgctgaagaagatgatgacggcgacctcatcttacctaaaaggagatagctcgtgagcgatattgagaatctcgatagaacactatacaaccctatcatgcccgactatctagttcttctaccaagctagctacacggaatcgctacacatcacatcttatatatacacaaactatataagtcactctctctataagaaagaagatacgtactatacctaaaccgatgacacacgtcatactgttagtccttcaaatgcattat

SEQ ID NO: 284351 - DNA, 454 bp, Glycine max
ctttgcggtgtgtagaccggccaccctcatatgtgctagcgcctatactctcgtgagtcaatggcacaacactactcctcacgcgcatcatatgtgggacttgctccgcactcactctattatatcctgccatgtgctgatccttgcataacgtaatatgccgtaccagactagctgttccacattaatactatcatagagtcaagatgacgtatcccaacttgcactgtgcgaagaccacaaatgcgatctctgactataatgttgctcactcgcagagtcatccagatggcctgcctctaccgatccgagtctccgctactacaagagagatcaaccgttgagacccgaccatgtcactatctaggcacttgcgttctctggctagctatttcgataaataggcgcctagtatgcacatctgaggggggctctcaacacgtacatcatctat

SEQ ID NO: 284352 - DNA, 423 bp, Glycine max
  unsure (1)..(423): unsure at all n locations
agctttgagcagattcaaacgacaataactttttactcggatgtctgattgagtcccagaatatatcgacacgctctacattgaatgcttatgctctgagcaaattcacacgacaataactntttactcggatgtctgattgagtcccgtaatatatcgagaccctcgaaattgaatgttgatgctctgagcaaattcaaacgacaataactttttacacggatgtgtgattgagtcatgtaatatctcgagacgctggagattgaattctgaagctctgagcagattcgaacgacaataactatgtactcggatgtctgattgaatccaatgatatatcgacacgctcgaaatagatcatgatgctctgagcatattcaacgacataacttgtactgggatgttgaagagtctgaatatatc

SEQ ID NO: 284353 - DNA, 438 bp, Glycine max
taacaaaaggcatgcgaagtgggtggaattcctagagcaattcccttatgttatcaaacataaaaagggaaaaggtaatattgtagccgatgctctttctcggcgtcatgcattactttctatgcttgaaacaaaattgattggtcttgaatgtttgaaaagcatgtatgaaaatgatgaaacttttggagaaatttttaaaaattgtgaaaaattttcagaaaatggtttctttagacatgaaggctttcttttcaaagaaaacaaattgtgtgtgcctaaatgttctactagaaattctcttgtttgtgaagcacatgaaggaggtttaatggggcattttggggtccaaaagactctacaaacattacaagaaacattttattggcctcatatgacaaaggatgtgcagaaattttgtgaacattgcattgtatg

SEQ ID NO: 284354 - DNA, 443 bp, Glycine max
  unsure (1)..(443): unsure at all n locations
agcttattacaagaaattagtttgtaagaaataagtntgattcagagtaagtctcatcgaataatattttgttttaacttgtattagtctattntagaatattaggttagtgatattaaatgaaacaattttactattttcaaacatttgataatattgtgttaattatattgtatatgtgaatgaatcatgatataaaatagtaattctaaggaaaaaaataaaatttaaataagtaatttattggtccaaactgaatcaaaccgttcatgaatgggttgggttgggtttaaaaaaattgtgaaaatcaaaccgaaccaaatcgatgaaatttgattgagttgagtcttgaattttgccaaaaccagtccaaatcggcctacaaacacccctaaaaatagttatcanagaatacaacttattataaaattgatccttgaaca

SEQ ID NO: 284355 - DNA, 341 bp, Glycine max
  unsure (1)..(341): unsure at all n locations
ntgcgtaatcgattacaaggatttggtaatcgattactagtgataagttttgaacaaaaatcaaaagatgtaactcttccaatggttttcaggtttttctaaaggttataactcttccaatggttttcttgaccagacttgaagagtctatnnnagcaagaccttgatttgcatttgaacaacacttacaacctttacaaacaactttgtcacatattattttacaacctttgaatctctttgaacatcttcttgaacttattcttcttgttgttggatcgagtggcctcaaaataattaataagggggggttgaattaattactcctaaacttttactaa

SEQ ID NO: 284356 - DNA, 59 bp, Glycine max
agccttagattggactgtaccgatgaatcgctggtctgtacgacaatgaactgtatggc

SEQ ID NO: 284357 - DNA, 464 bp, Glycine max
  unsure (1)..(464): unsure at all n locations
ngtcgtagggtacgtgggtgctgcgacctccacacttgtattatattatcgtggctcagtggtccaattgggcgctccataaaggtaatacattgaatctctgacacttggacacattcgttcagcagcaagacttgtctaccagaagaaaatccgaatcagatgcacaatgggaatcccaaaaggggatttgggacaatttgaaccacaaggtggaattgtctccaggataattctaacgcatcttgtgaatagtaataccagagacctccctgcctccaagagtaactctggacacttagacaagaatcttatcccgcttggaaactccgtcaggcagaagatgctacgcacactaccttctgagcgccatcctcgtctgacaccctcaaaatttgaacgagaggggttgtggaatatatcccccgcgaccatatacatcagagaggtgtccaagacctatt

SEQ ID NO: 284358 - DNA, 440 bp, Glycine max
  unsure (1)..(440): unsure at all n locations
agcttctacttatgtggtagggcgggcttccttcactttcttgtctccaacgcgagctctaaccactgttcttccttcccacgatgcttcttttcatgtccgcctgagtgggcttatagcctaagccatacttcccacgatttccttgggtttttatcaggctagttatgtcgccgttgtctttgcctaaacccatcccgggttcataaccgttccccaacataactcgggccatcattaccgctgcatcggacagacaaggctgcccaaagagggagtccacggaggaaatgctgaccacctcaaaagactggaaagcagtttctaacgattcttctgtggcttccacataaggcatggaggatgggcagcttaccaagatatcttcctcgcctgacacgatgaccaagtgcccctccactacgaatntcagcttttgg

SEQ ID NO: 284359 - DNA, 431 bp, Glycine max
tgtactatatgaaaagataaaatgatacaagggcaaattagtatttcttgaaaatgatgaagatgttgcctttgtgcaattttttaaagctcgccccaggcatttgtttaaacatgagcttgaagtgctcaaacacaagtttgggcgcacgactctcgatggccatgccatacaaacattctatagattgcagtagtattgctttggcttggaacctaaaaagaagccacctattggttcttatcatcattaaattgagtgttgttatcagactttgaaccacttcacttctgcttcactcaagaaactcccttccatgatctattcatggcaatgggatttctatgctacgtctaatcacaccttctcttttatgatgatattttcattctctcgcttcttcttcacccatcatgtagaccccatcattg

SEQ ID NO: 284360 - DNA, 374 bp, Glycine max
tagtttggtgaccactagctccctatgatcacgcatgatgcttagaggattagttagttagtctaacctcctcaaggttggacatgtatatatagacccaaagaatacacaataaggtacgctttcaatcactccatacatagatgcacaaaacaccttgggcttgactgacttaatcgtctgagtcctttttgcaggcactttcttcaacattggagtatgagatcggagattccattaatatgaggaacaaaaggagagaggtagacagctcatcagaagtcagccacaactcaccagaactcagtctgaacatttaactcagccacaactcaccggaactcagccaaaacatttaactcattcacagagcg

SEQ ID NO: 284361 - DNA, 449 bp, Glycine max
  unsure (1)..(449): unsure at all n locations
gaccttaaatctccgcttgcggtactttaactttctcaatgtacaaacattttttcacattgaatttattatacatagtatatatttccattcagccttttatataataaagttggcaattgacatatatatttcactttttttatgatatggagagtcatgagatgttttgattattgattttattctgggtacttttggtatcattccttaagactattgaagtgtggaaagagctgcatactaatgtggattaactatctaaggcctgatatcaagagaggctatttctcaagtgaataagaggaaattatcattaagatgcatgagttgctggggaacaggtatatattcgtcgattcattcttcagattaatggcattaatgatttgtcttaattaataatagaaagttcgaacagaatattagtactangttattaccatgaa

SEQ ID NO: 284362 - DNA, 387 bp, Glycine max
tatcttatcacatatggagacgcctgaaattgaaccagagaagatctcgagaaattcagatggtcataacttttcactcagatgtccgatgctggcgcatagtatattgagacgctcgaaattgaacaacggaagctctcaagaaatgtaaatgatcataaatattcactcggatgtccgattcaggcgcatcatatatcgagacgctcgaaattgaacaatggaatctctcgagaaattaaaattgtcataacttttcactcgcatgtacgattcaggcacatcagatatcgagacgctcgaaataaacaacggaacctctcgagaaattcaaatggtcataacatttcacactgaggtccgattgatgcacatcacatatggaga

SEQ ID NO: 284363 - DNA, 413 bp, Glycine max
tcaccggatgatgccgatcgagcatttcctaatcgatttcatccaattgttattcagggattgaatagaataaacaatggccggtgtcggtccttatatggccccgactgatatctttcagccgacattgcgcaatttcttttacaaacgctggccgataatatttttttttttttacggtagaggaagttttttgttttggtgttgcctaaaaaattaacaacgtaggtcggcaaggtttttccgtgcgacctcaaccgagggttcgttccgaccgacactggcatgttgatatctcatttatgaggccaacaaaacgttggcacaccccggcataaacaaaaaaaaaatattctcgaatattgatcgaaaaacatgatagctgacgttagcatggagagatgaccgatcga

SEQ ID NO: 284364 - DNA, 434 bp, Glycine max
  unsure (1)..(434): unsure at all n locations
agcttggataaatgttcaagctatacgttgattaattattaaataaataaataaagttttatgaaatattaattatgcaatacatgaattataaaataaagtaacaatttaacttacataaaagagattcataagtaagaaattaagtcaagttcactacataatgtacgttgataatagatattatatcttagtagacgtaaatatgagtcttggatatgaaattatattaatatttttttaaaagagattgagcactcaataatcctactcaccttgagtagaattatctctatgaaagatacatgtgatctctanaacaaacagccttcagaagatatacatcatgcatgagataatcatatatttaagcaacatcctttcaaacacaagcttattaaatggttgcttctcatgttatctcatccactaaa

SEQ ID NO: 284365 - DNA, 218 bp, Glycine max
cgcgttgcttatagactgcagggcattgtaaactcttgtgttccccgcatccggggaaatcagaggctcagatattcgtaggcaacccggtgatggatatatatatctctctatatagagtgtaattgatagtagtgtattaaatacgaacgtagatcaaatacatatgattattatgcccgagtgttcatctatatatcagaggatgttatgtatca

SEQ ID NO: 284366 - DNA, 439 bp, Glycine max
tcttataagaacaaaattgcctcaatcatttccaaatatgcatgtgaattatgaagcatcaacaagaatcaagccaaggctattgtgcaagcaatcaatggggcaaaacacaccatatgattatgatgatggatggctcaaattctcacaaaggtaaactcatcactttcaaattgagctctcaaaactatcatgacatgtagaggagaatcaaggatttcaagtcacaaaatgtcaagaacttttattttcaaaacaattacccatttcttgaacatatcctataattcaaagaaaaacatgcaaagtcgtacatgcacacaaaattgacccaaaatattaaactatagatccgacaaaactagcaacattaacaaattaacacatctaacatattaacaaaaccaacataactagcataaccaaagaatactccccc

SEQ ID NO: 284367 - DNA, 429 bp, Glycine max
  unsure (1)..(429): unsure at all n locations
ntgccgatttagttntctctgnaaaaaggattgatgtttgtttgagaagaggcaaatttgattatcctactttgatgaataggaagcctgcggcaaatggagagaataagaaggagggaggaacccatgttattgtgactgtcgttcctgcatggccaaatttcccaccagctcaacaatatcaatactcagccaatatcaacccttctcattacccactaccttatcagccaaggacacccaatcatccataaagaccacccctaaattagcgacaaagcccgcctatcgtacatccgatatcaaacaccacccttaacacaaaccagaacaccaaccagggaaggaattntccagagnagaagtctatagaattcaccccaattccggtgtcgtatgctaacttactctcatatctactcaataatg

SEQ ID NO: 284368 - DNA, 201 bp, Glycine max
  unsure (1)..(201): unsure at all n locations
tagctttcttgctcatacagttgcatgattggagttngtctctgacgcaccattataatgagacattttctatgaaggcgttcttaattgactgctcactgtgatatttcctcacactcttcgcgattatatgcgctcatgaattccttcaccgacaccttgtagaccacatccacttattctactcaactgacctcaaac

SEQ ID NO: 284369 - DNA, 370 bp, Glycine max
ttaatctagatggcgtgcatgtcgctccccctatctttatccatcatgcccttgagggctttgatgatgccacacatcgatataacattgcatgcattgagagggtctgagtcttgacattagagacttgcttttcttagccgatctagataattgttaacacttaatagcggatcgatccattgcatcatcatcatcatatgtcttactatatgatcgtactgatgctaatgctatatgacgtagtgcaccactagatcatctcccaaatgcttatatactacactgcaagcaagtatccaatacatatgccgcaggacatatatatctcccttgaatgcacatatgcagctcatctcccctttttggc

SEQ ID NO: 284370 - DNA, 414 bp, Glycine max
  unsure (1)..(414): unsure at all n locations
agcttgcttttcctttgtcttttggatcttcaatacctttttcacaatcttttgctcttcaaccaagaaagctcgaatgattctacagaaccagagacaaaagtaagcaaggtactccatcaatttgcacaaagaaaattaaacatactgtagattaagaagattgagaaaaacaaacctctctctaacagcactgccagacaacacaccaccatatgcacggttcacagtccttcggttnttgggtaaccttgatctcttatattctgttggccttaaatgtggaatctgcaattgccaagcattaataaccattatgttataccgtgtatcattcatacataatcctntaccaatcatagaaagaaaaatctagttgtaggaaccttgaacatcataatcttaactnttaag

SEQ ID NO: 284371 - DNA, 431 bp, Glycine max
  unsure (1)..(431): unsure at all n locations
tacacattcgtggagaanaacagattcaagtttttctgtattggataagtcagggatctcaataaggtttcgacaaccacaaaggctaattatctttaaattagcaagattctgtgacaagaaagatgcatcacattgttcagaaattgttaaaatcataaccatgagccttaactgaaagagaaacctaagcatgactcttgcgaatgagcttcacttgaggcagcacaaaaccagttaccattgacaactctctcatgtacctttacaaattgaaagaaaaattagcatgtatgcaacattcatacctgaaccccgtcccaaggctttttaagcttgctatcaggcatgtggagctctacaatntgttcagcacanaagttagacggcaaagacttgagatagaatctatcccattcaaggtacatcaa

SEQ ID NO: 284372 - DNA, 437 bp, Glycine max
  unsure (1)..(437): unsure at all n locations
tagcttgtgatttcacttgatcatacaaaaaatccatggataaaatactattactattttgaagcttgtgattccacttgatcatacaaaaaatccctaacaagcttgtgatttcactttatcatacaaaaaatccatggatatccccataggtgtgaatttttttgccattcccattcttgtgtacttatatagtattaaaaacccatgtgggtcaacttaatgatgaaagttttaaatagtttgtacgaaattgtagattcaaatctcatgatgattaatatacacacaaaagaaaataatattaaaagttactccctccgttccattataattatcgtgtaaggagataaaatttatcctanaataattgtcattntggctnttcaatntagcatttaatattttttcacttatatctcttatatagtaatgat

SEQ ID NO: 284373 - DNA, 423 bp, Glycine max
tccatcaagtggtatcagagcacaagagcttcaagtatgtgctccttaaacctccattaattttttgctttaccttttcttccgttgttgtttcttcatttttttctccatgtatctcctcacatgtcttgtgctaaatgtttttaacatgattctttagattttccaccaattaaacttgctatagaagctagatttgattttctatggttcaaatttcttgttcttgttcttgaactttttttttgttttctaagtttcctacatgatgcctatgatgaagttgagttgtggtgctgagttgtggctggatttgtgaatcaaaataagtcttaagctctcttgaattgtgttattcaagataattgagcataatcaaacacaaattgtaactatccaagctttaagcaacataaacactac

SEQ ID NO: 284374 - DNA, 439 bp, Glycine max
  unsure (1)..(439): unsure at all n locations
tatgattaactagactntgaacccttgcattgcacgggttattttaaattatatatatatatatatatatatatatatatatatatatatatatatatatatatatatatatatatatatataattntatatatatatatttataaataaaaaccatagtttttaaatattttatactatgtgaaatataattatattattaatgagagagtggattaattatatttttaattgagtgaattttatcttacagagtgagtatattaaatattttgtgtgattgtttattcattcaagtaataatggtgatgcgatatctcttgaaagatatatatacatatataaaattatccattttaaagatattttgtagtgagacacatatatatatattaatatggagagataatattaattcttagtgagcacatgttctctg

SEQ ID NO: 284375 - DNA, 434 bp, Glycine max
tttgtggaaaggattgatcaggttgtctctatctttactcttggttttcgtgtacggttttacatagttttttgtttgtgcatgaatgggctcaaaacaaatcattttcaaagagggtgcattttttaatcgacctcatttgtttgagggtgaacatttttctttttggaaaaagagaatgaattttttttaaacaaattatcccagtgcatggaatgccactattaaaggtcctttcattcctataaacaaataaatggtgaattagtacctaaagaatgggatgagatgaaggatgacgagaaaataaaagtgcaaaatgatcaaaaagctaaaaacatttaaacttctggtttatcttcgggtgaattctttcgtactgcaaggtgcaaaagtgcaaaggaaaattggaatatgcctgaagtcactcatga

SEQ ID NO: 284376 - DNA, 417 bp, Glycine max
  unsure (1)..(417): unsure at all n locations
agcttatacaacttgttgtaattgattacaatgaggctataatcgattaaaatagaaagttnttgcctttgaagaaaattctctaactaagaaactnttcttcacacaaaccatgataatgcatgatgtaatacaaatatcaaatgtactaagatgtaacaaccaagataacaaccaatacaaatgccactcaatggagttggggatgtaaaaaccaaaacttcttcaagctttagcccttaggttgttcagaagctagctagttagttaagttgaacatcctttagattgctagctggttgaaatcaagcttaacgaggtggatatagataaataatacgaggaaaaaagttctaaatataaaattctattaaacttttaaattataaaagatattaaaagttaatataatacaag

SEQ ID NO: 284377 - DNA, 436 bp, Glycine max
tcatgatgaatcaagattgattcaaagaagttatgactattacaaaggtgatgacaaaaagcttcgtgatgatctcaagaatcaaagaatgagttcaagatgttcaagattgaatcaagaacatttcaaggttcaagaggaaaattgatttcaagaatcaagattcaaggttcaagcttccaagaatcaagatcaagattcaagactcaagattcaagaatcaagaaaagacttaatcaagataaatatgaaaaagttttttcaaaaactgagtagcacatggatttttctcaaaacctgtttaccaaagagtttttactctctggtaatcgattaccagattattgtaatcgattaccaatagcaaaatggatttgaaaaatttttcaactgaatttcaatgttccaattgatttcaaaatgttgtaatcgatta

SEQ ID NO: 284378 - DNA, 156 bp, Glycine max
agcttttatgattatcgaacgacaatcacttctgactccgatgtctgatagcaccccctagtacatcgagacgctctgaatcgaatgttgaagctctgaccatatcttgacgacgataactctttattcggatgtgagatggaatgctgtaatata

SEQ ID NO: 284379 - DNA, 253 bp, Glycine max
tcatcattcactttcgaaagtctcgatatattacggtactaactcacacatcccacctaaaaggtatcgccgtttgaatttgctccgactttcaccattccattgcgatcgttctgatgtaatacgggactgaaccatgacatcctagtaaagcgatgccgtcgtctgaatacactcctatcttcacttttaaatactgatcgtctcaacatattacacggactctgtgagacattcgaacaataagttcttg

SEQ ID NO: 284380 - DNA, 367 bp, Glycine max
  unsure (1)..(367): unsure at all n locations
agctttatagagcctgtgtcgtcagcaagaagttcaagttcatagccatctacgtctgatgagagtatgatgatctaanggacgtatatatggccatcgatgactccttggaatgagaatcctataatgcccgaagtgaagaacactaccataactagttgtgaggggctctatatggcatctatagtgagttcgaacgccgaataggtgataggaatcattacgggtcatacgcatgatctggaaagacgagctaaaggcttgccttaggtcaaaacgaaatttgtcccaacatttagagtgaaactgagaggtatatgtgggccttcatcgatgactgcaattagtaactaatctatcggcactg

SEQ ID NO: 284381 - DNA, 418 bp, Glycine max
tgccgcccagctcgcccaggcgagcaacgttgcttctctttgaagcaacaaccttctggagggcccaggtgggcctggttgctatttacaccccccttgtttactaaatgcacccccctttctatgtgattgtaattctcttccgtaacgtatccaaactttacgaatgttgtaacgatacctattttccttacgaccggttacgaatccttaccgattatgtattgactcttttttaactttcgaagaatatacagaaactcactgattgcgcaaaaacacctcttttcgatttccgccacattactgaatttcacgaatcacgcaagcctgctacctttcgatttctgagacgtctcgggactccatatattgcacgtcatcagaggataatcctcggactaaattatggtatgac

SEQ ID NO: 284382 - DNA, 94 bp, Glycine max
agcttgtcttaatcttgtccaccaccagatcttgagctgcagaacggactaccattaataacatacgtacctactgacgagagggtaatagaac

SEQ ID NO: 284383 - DNA, 431 bp, Glycine max
tatagaatactgccgctatattgatgcgccgtgaatggacatacgagtgaaaagtttttaccatgtgaatttctcgagagcttcctatgtttaattttgagcgtgtcgatatattatacgcctgaatcgaaccttagtgtagaaagttatgaccatttgaatgtctttagagcatccgttgttcatttttgagcgtctctatatgtgatgaggctgaatcggacctccgtgtgaaaagttatgaccttttgaatttctcgagagcttccgttgttcaattatgagcgtctcgatatattatgcgctcgaatcggacatgcatgggaaacgctaggactattcgaatctctcgagagcttccggtgtgcaattgcgagcgtctgcatatattatgcgcgggaatcgcacatacaggggaaacgttatgacca

SEQ ID NO: 284384 - DNA, 428 bp, Glycine max
ttctaatgtgtcataagagaaatgtggacgagagagctgtgaggtctatacgcgagatgactgtgaatgttacaaaaaatagggaatttgaggagggatgtatgaatgatggatagcgaatgctgagaaaacgaacataatacatgaatgactggccaaaagttcacgacaagacaaatagcgataaataggtagttataaaaggaggaaggaaatttcgaaaatccataaatgaaagatacaggaaggctaacagaggtatatggtcaacgcacaagagacagagatggtactagaacagaaaacaaagcggatacaccaaaaaatgtcagacacatgggaaaaacgttgactatgatactatgcaaaaaatgagcaaatgatagaagcaaaacatgtgagaaggatctacatcgcgacgatggccg

SEQ ID NO: 284385 - DNA, 417 bp, Glycine max
tgtcgaaatgactaaaacgcattcttgcattgattgttctaagtcttggaacccttgtgacacttgtcattttgctaaacaaaagaggatgcctttccctgacaacattattgtttcctcccaatattttgatttgttgcacatggatatatggggctcttatgctcatccttcattacttggtcataaatattctcttaccatcgttgatgacaaaaacatatatacatggattattttcctataattaaaaccagaagtgtcaaatcatattaaacactttatatctatggttgacactcaattctctgtcgcagttaatagcattagatcacacaatggccctgaattttccctgaaaaatttctatgattcccaaggtatttttcatctaacttcttgtgtggagacacccca

SEQ ID NO: 284386 - DNA, 440 bp, Glycine max
  unsure (1)..(440): unsure at all n locations
tgcttggacaattgtacatgtgaagcatttggagagaagtgagattttgaagcccttttccatccaacaactntaaaccactgaaattgtgtaggaccaganattatagagaagtgggcagtaactgctccttcaaaagggtgttaataagatcttcatcattacggagacccttaactaaaagatgtgacagagaagttaggtgttggaatagcaaacctaactcttgtctagacatagctgatagtactcgaacatcaacgtaaagtgatcgtaaaccggaaggaaaacaccttgnggacaatctagcttctgaatccaagtgttcaatggcggggagatcaatctgatctggcagtgatctatagttctcacaatcagtgacaataaaacaactaatttggaagctgctcctccaccttgagtagtaattgcttcca

SEQ ID NO: 284387 - DNA, 385 bp, Glycine max
  unsure (1)..(385): unsure at all n locations
tatatgctacaaagtgtttagcaaacaccacaaaccttatcaattctcttatctcttcataatcaaggtggacatattgtaaagtcataatctagaaaaaacaagggaaaaaatttcaaccctgagcccacaaaaacaaagagttgtgtcagaagttaaattcaaagacaataaattactctcataggtggacactagaaaaatggggcttaccatatgcaggttcaaatgtccaaatgaccatatattaactctttttattgagaaaattaacatatagaactcacaaaagactaagatatcagggcacaaaatgataatgatgatgataaaattattgatactntggacctttaacaactcatgggtttaacatggaagatca

SEQ ID NO: 284388 - DNA, 393 bp, Glycine max
tgcttgatgaagaagagaatactcatatcagtacacgtatagctggaacaatgttagtactgtgacacatctattagcctgcatccaggatttagatcataaatagatgatattttataagtagcataaaaaaccaagagtccaagacttggttcatacttagttgatagtatttcattattaattttattagcttaaacaattggcttgcactgctgtccacaatttgtctcctgcatgaagttataatcaattaaataatcctaggaatacttatgtttcattgttttgtgaaatcgctgactattggttactacatgtcttaatagtggttacatggctccagaatatgctatgagaggttacttgacggataaagcagatgtatatagc

SEQ ID NO: 284389 - DNA, 408 bp, Glycine max
  unsure (1)..(408): unsure at all n locations
tctaaaagatttgtgcacccacaaaaggaagctatttgcaatgaaaggattagcatgggcagaaatatgtcagcatttataggtaaatttgttcctcacattcctgagaaatgtaaggacccaggtactttctgtataccttgcattattgggaacagtaaatttgagaatgccatgctagatctatgagcatcagttagtgtcatgcctctgtccattttcaattctttatctcttggacctttacaatctacagatgtggtgattcatttggcaaatagaagtgttgcttaccccacaggtttcatagaggatgtgttggttcaggttggtgaacttatttttcctgttgattnttatgttcttaatacggaagaaggattttcccatggtttagttccaattatt

SEQ ID NO: 284390 - DNA, 396 bp, Glycine max
  unsure (1)..(396): unsure at all n locations
agcttagccctagaggggatggaccttttcaggttttggagaggatcaataacaatgcctataggttggacctcccagaagagtatggagttagcaccacttttaacatttctgatttaattccttttgtaggtggagctgatgttgaggaggaggaactaacatatttgaggtcaaatcctcttcaagggggaggggatgatgcaatcctccctaggaagggaccagtcacaagagccatgagcaagaggctccaagaggattgggctagagctgcttaagaaggccctacggttctcatgaacctcaaggtagatttttgagcccattggacaaggttgggtccaattatctntgtacatatttgattangatgtcattatatttggtccttgt

SEQ ID NO: 284391 - DNA, 428 bp, Glycine max
  unsure (1)..(428): unsure at all n locations
tcccaaggaagttttctcaagaaatcttctcaaggaatctacctagtctataaatagaagcatgtgtaacacttattgtaactttgatgaatgagagtcttgtgagacatacttcaaagttccacttctctccctcttttattccttcaatttcgtgctcccccctctctctttctctccctctttcttttcctccattgaagcatcctctccaagcttcttatccaaagctcatcttggtggcgaagctccttcttccatggcttattccctagtggatggcgcctcctctcacctcttctcctttgtcttccgctgcatctccatggtggaaaatcaccattgaaggacctcatttaagctcanagatccagcctccatagaagccccacaagcaagcttccatcaagtggtaatcagagcacaag

SEQ ID NO: 284392 - DNA, 439 bp, Glycine max
  unsure (1)..(439): unsure at all n locations
atcttctatcaagtggtaatcagagcacaagagcttcaagtaggtgctccttaaacctccattaattntttgctttaccttatcttccattgttgtttcttcattatttctccatgtatctcctcacatgtcttgtgataaatgttgttaacatgattctttagagtttccaccgattaaacttgctatagaagctagatttgattttctatggctcaaatttcttgttcttgttcttgaaccatgaattgtgttgagtttaagttcctttgagttttgtcttgttatttttttgtagatgaaacctaaaccataaaattcttacaaaaatattaaagtagaagaaaaactcataaatctagagtgacttgttcacctattgtagttntgtcatataagtcatgcctagtcatgaaactngtcacataagaattcttat

SEQ ID NO: 284393 - DNA, 428 bp, Glycine max
  unsure (1)..(428): unsure at all n locations
ttgagccagaatcctgtctcaccataaaccttgttcttggtgagaatgtcaatccttaccctcggaagcaaaaaaaagagagaaggaaaatttccaatcaaaggaaaaaagagaggaaaggaaattctcaatcaaagagtgggagaaagcaaaaagaaaagaaagaaaattcccaatcaaagaatgggagaaagaaaaaaagagaaaagagaaaagaaggaaagaaagctcctgatcaaggatcgaaagaaaacagaagaaatgtgcagaaaggtcttttgaccagacaatatctgaacaatacagaattgtcaccaaatgaacaaaagaaagaaaaggaaaccatgacctanagtggtcttatccctttgattaccaaccaaaatcctgtgcgtcggtgacttgctcgcctcgcgcaaaacaaaaac

SEQ ID NO: 284394 - DNA, 433 bp, Glycine max
  unsure (1)..(433): unsure at all n locations
tctagcttgaaagtgctctatgcttcatgtttcaattatatgcaaaaagtcttatattcatcacaagtaaatattttataattaatttaaataaattctcattaaatataaaatatttgctcttgttagatatattaataatgatacacactatatgattttaatatttatataatattaaaaaatatttttattaaatttttgtgcgaattaaaattaattattctatcacgttgtcttgtgaatgtagtttattattgtggaatgttaacgataatctttttcacattatatttctaacactntatatgattgattagaatttattcaaaatgattaattttagtgggtctcacgtttaaatcgaaagaaaaaatatattatntacaaatttaaaatggatattaaaaagaaagtgtcaaaaaatgttact

SEQ ID NO: 284395 - DNA, 427 bp, Glycine max
  unsure (1)..(427): unsure at all n locations
tttgttttatataggtctcatttttaagtgtttgttgtctcacaatgagtagatttctacacttatcttcatatgatgaatgcggtcgttgggggcatttaatgtttgcattaaatgcacgtccttttctcatgtagagaatccactattctaagcttgcgtgttgagtattaagcatgtagtcacctcctttttgtcaaagtagattttgtacagcaaaactcttcatttgatggtgattgaaaaatttcatacctttatttcatttattcttcataaaattcaacagatcctaggagaatatttctacaaaaaagatttcatatattaaatatcatcttaaatgttgtattagatcataatcatatttatctattgtctaacaaattagacacaaacttttctaggcatgtntgctaaaacatta

SEQ ID NO: 284396 - DNA, 412 bp, Glycine max
  unsure (1)..(412): unsure at all n locations
agcttgacatcntttgatatatcatacaatcagtttgagggtccacttccaaacattctagccctccaaaatacttcaattgaagcattgagaaataataaaggcttgtgtggcaatgtcactggcttggagccttgcacaacatcaactgcgaagaaatctcatagtcatatgacaaagaaagtcttaatatcagttttaccccttagtttggtcattctaatgcttgcattatctgttttcggagtctggtatcatttacgccaaaattcaaagaaaaaacaagaccaggctacagatttactatctccaaggagtccaaacttattattaccaacgtggagtttgggtggcaaaatgatgttcgagaatattattgaagccacagaatantttgacgacaaatatctta

SEQ ID NO: 284397 - DNA, 425 bp, Glycine max
taaaggtggcaccttatcctcccaccaatgagcctaccaaacctcaccccacaacgaatggtaccactcaagtcatgagcatggacgaaggatctccagtccaagccttgactatcttccaagtaagcctggatgatgaattcgatgtagatccgcgtgatgacacttttgacagagtcccaaagcctattgaaagcttgtcaagctacagcttaaatccaatcttgagcaatctatgcaactcagtagggacctcaccaaccataagcacagacacatagttgatgtcctacacaggaacacggacctgtttgcttgatagccttctgacatgtagggaatccaccccaacattatctgccacaagctcatcatctgtccccaggccaaactggtatcacaatataagaggaagatgggagaag

SEQ ID NO: 284398 - DNA, 410 bp, Glycine max
  unsure (1)..(410): unsure at all n locations
agtctcctctaccgtaaaananaaaaacattatcggccagtgagcgtatttaaaaagtaattgcgcaatgtcaactganaaatatcagtcgggctacttcacgaccgatgtnggctattgagttntctatgcaatcccttaatgaaatatttatgatgtcggtaaggaaatgatcgatcggcgtcatgcggtgatgcttcttttttagacctcgatcggtcatctatcttggcggacgtcgactggcatttttttcaatcaatatcggtgaaaaatatttttttgccgagatgggctaatgtnttcctggccgaataaatgggaacatgccagtttctgctgaaacaaaacgtctgttgagctcgctccaaataacctagccgacctacattgtacattttttatgcaac

SEQ ID NO: 284399 - DNA, 436 bp, Glycine max
  unsure (1)..(436): unsure at all n locations
ntacagcagatnttagtaatgacccactaacctagaattaaaataacttaatgccattaagctagggaattaaaaaacaaacttaatggctgagtgtaactgaaattgtggcaaccaaaagtcacccccaacagccaacaagtcagccaccatttggtctcccaaaaggctgatgcctatgttgccaattgggcccttattacaacttgaactaaacctaactaaagcccttttagttgattaacccaaaacatatttttggtcagccaactggtacgaaaattgaccaagaggagttgaaaatcaacacaagtgacattcaaagggaagttaatggcgtgggggctgtttggaatcctcatcaagggctgagtttaattacttggctattttaagcattgtcatcagttaagacaaataaaattcagccattcaa

SEQ ID NO: 284400 - DNA, 418 bp, Glycine max
  unsure (1)..(418): unsure at all n locations
agcttgataatggaggatttccttgagggtcctctcttatgcaatcatggaacacaactccaaactcaaaaatggaggacacatgaatgacaacgccattcattcatggngctccgataaagggtaagaatggaggatttgcttgagggtcctctcttaggcaatcatggaacacaactccatactcgaaagtggaggacccacgaacaggcctaagcaatagcattcatgtggctccgaaaaaggatgagaatggaggattgccttgagggtcctctcttangcaatcatggaacacagctccaaactcgaaaatggaggacacatgaatgacaacgcaattcattcatggtgctccgaaaaagggtgagaatggaggatngccttgagggtcctctcttatgcaatcatgatacac

SEQ ID NO: 284401 - DNA, 432 bp, Glycine max
tcttttggaccttgaacaagccatcaattcctcttttataaccatgctatgtgctcgcgactggtccctttcttcccttcgcaacttgagttcactattgctaccccatagagctccgcgaaatttgttccggccatactcttccttgcgagccctcttggtctctcgttcaagggctcttgcggtaattgcattctcttcccgtaacccggcacactccttccgaacgtgtgtagcagccaacttgaacttctccttggcgagttttgcctttcctaactcgcttttgagagcttggacttcctcgtcctcttccggtgcttcaaaattctcttcgctgacgacttttaacttggcgagccaatctaaacctcgtatgcgaactttcagccattcgtggtacccaccaatgatgccattacgaacgcctct

SEQ ID NO: 284402 - DNA, 441 bp, Glycine max
  unsure (1)..(441): unsure at all n locations
agcttattaaanaaataatgtatcattagaaaaccaagttattaaaagcaacaatatattatcttttatctcacctgttttaatagaaggttcatcttcacctttcattaaattgccattcacattagacaatattcaacacttgatagtcaatattttgttactatgtagcttatctctttattcaaaaaattgaaaaaagcaacatatatagcaacttaaaataatattaagaaacaaaaatgtaaatacttaattcaatcaaaaaagggaatgataaatcaaccaaaaaataaattacgaagttatatatatatatatatatatatcaaaactctctacagaagaaaagtcaataaaaatgcataaatgaatntgtataantaccatttgggataaaacaatnntttttntactanaaaacatagaattactcacaat

SEQ ID NO: 284403 - DNA, 428 bp, Glycine max
tgcggactataccttcgaccgaacacggccgtgtttcttctatgcccggattcaaggcgggttgcagcaccggctccgcttccctaactatattggaggcggttgcggttgcggcagcaccccaagatttttagataacgtaatgagtccagaacttctcattttataaaaagaacaaagctttcatctagccaagattatacaaaggtgttacaaaagaacctaacgattcctaattatatgggccatcaaatctatcatgtgctgacagtaattgattagcccatggatctcctcgggggcagtacacactttggccatggcttttgctttggctaacagacgcgggaggtcttgacttccatttaaggtcaaggcgaacctatccatccacatagtcgcttcttgatgcaacgcatcaatcaccc

SEQ ID NO: 284404 - DNA, 445 bp, Glycine max
  unsure (1)..(445): unsure at all n locations
agcttttatataaacatggcctcagcaaactccttatttccagaagggaattctatcaatagacctccaatctttaatggagagggttaccattactgganaacccgaatgcaaatntttattgaggcaatagatctaaatatttgggaagccatagaaatagggccttatatacccaccacagtggaaagagtttcaatagatggtagttcatcaagtgaaagcataactatagaaaaacctagagatagatggtctgaagaggatagaaaacgagtacaatacaacttanaagccaaaaatataataacatctgccctgtgaatggatgaatatttcanggtttcaaattgtaagagtgctaaggaaatgtgggacactcttcgataacacatgaaggaactacagatgttaaaagatctangatatatgcactaactcatga

SEQ ID NO: 284405 - DNA, 433 bp, Glycine max
taccaccataggaggccatggataagagcttggaggtttaatgagatgaatgaagggagaggaagagaagagcacgaaattttatgctccaaatgagctttgaaatctgaagtttaatattcaaatgatcaaagttccaaaaaaatgcacacacaaggcctctatttatagcctaagtgtcacacaaaattggaaggaaatttgaatttctattcaaatttcacttgaatttgaaattgaatttgtggagccaaactttggagccaaaatttcactaattatgattagtgaatttaagctatggttcataccactaattaaagatcaagtccaagattctccactaagtatgcttaggtggcatgaggcatgtaaagcatgaagcacatgcacaaagtgtgactatatgatgtggcaatggggtgtagcaagc

SEQ ID NO: 284406 - DNA, 417 bp, Glycine max
  unsure (1)..(417): unsure at all n locations
ttttgcttttattttagtagatgaagatgaatctgtggccacctcatggactcctctaaggataatagcatcatttcttgcactgaattgttgggagttggaagccatcttctcaatcaaattcctagcttcagcaggggtcatatcaccaagagctccaccattggcagcatcaatcatattcctatccatgttgttaagtccctcatagaaatattgaagaaggagttgctcagaaatctggtggttaggatagctngcacacaatttcttgaatctttcctagtactcatacaagctntctccactaagttgcctgatgccttgaaatgtctttctgatggcagtggtcctagatgcanggaagattttctccaagaacactctcttaggtcatcccagctgaaacggacctgg

SEQ ID NO: 284407 - DNA, 434 bp, Glycine max
  unsure (1)..(434): unsure at all n locations
ntctagcttttcattggtgtattntgatctccttttggtgctctaaattgtgggaatgtgcttaaatatgtggggcaattttggtttgtttacttgcttgattaggttgaattgggggtttgtatgggatggccctaggcctataatgcattttgaaacaatgggacatgccacattgtccccgttctcttgctattgatgcctaaacgcgcgcccaccaagtgttcggtgaaatgcctcaatggcattagcgcgtgacttttgtaaggaaacaacccatggggcattttggtttgcacatattttctattttttggggcatgcattcgttcctgaaaaggttagagtaattgccccacatatattctaggcctaggaaccaaagttntatgcaaaaagaacacaagaggaggtgcatattgngtaaagttacc

SEQ ID NO: 284408 - DNA, 428 bp, Glycine max
  unsure (1)..(428): unsure at all n locations
tgcttgtcattgctcanaagaccctccaagagataagaggaaaattcctgaaagataacaacaaaaatgaagggctcatttcttcatgacctagctaatggaatttctgtcgcctcaacataccatgttgggaagtcgtcaaagagatatcttttgcctgattcgtgtggcaaatacagcaagtccatcactaaatcaaagcaaaatagagcaccctttcatcacaaatctggattcttacaaagattccgagagcatggtatatatataatctttaacaacttaaattttatttttcgctattgcttagttgcaagatatagaacaatcttctgtcataatttgtatgatgcataatttgacatgattattggaaaacaaaatgaagctcttattgatggctngaaactgtngttgtaaaatgcagt

SEQ ID NO: 284409 - DNA, 430 bp, Glycine max
cttggtaattgctgacgaatgcagtcacagtaacattagattatatgactttgagcaaacatcattctctctataatttgtctccattttgttaaaactcatatgaagttggagccaattgtattagtagctcttttagcccttaatctttttaggcacatacttgaaactgacatttgcaattttttaatgcttgcaaaagtttgagacaattagttttggttggatcattctgattcatgattcaaggagcaaaattttcactgaatgtgaaacaaatagtatgattttcctgaaaactatagtcaagtgttctttaggatcttaatttgtctcccgtggaccctgattattttttataataataacttgcaggaatatgaagacagattaacggttgtaaagattgatcatgatgccaacccgcagc

SEQ ID NO: 284410 - DNA, 418 bp, Glycine max
  unsure (1)..(418): unsure at all n locations
tttctttccgcaagacttacggaaagatcttagagttgaccatagcagaggtgtccatagaagccattgcagcacttacccaatactacgaccagcccttgagatgcttcacattcggggacttccaattagtaccaaccattgaagaatttgaggaaattctaggatgtcctctcgggggaaggaaaccatatctttcctccgggtgtctcccctctttgagcagaattgcaactgtggtcaaggattcagccagaggtttggaccgcataaaacagactcggaacggcatagcgggcctgccacagaagtacctagaagacaaggcgaggggtatggccaatcaaggagactgggtcccgtttatggatgtgttagctnntgctaattttggggtcatcctctttccaaacgtgga

SEQ ID NO: 284411 - DNA, 428 bp, Glycine max
  unsure (1)..(428): unsure at all n locations
ntctagcttttcattggtgtattttgatctcctttttgtgctctaaattgtgggaatgtgctcaaatatatggggcaattttgatttgttttcttgcttgattaggttgaattaggggtttgtatgagatggccctaggcctataatgcattttgaagtaatggggcatgccacattgtccccgttctcttgctattgacgcctaaacgcgcgcccaccaagtgttcggtgaaatgcctcaatggcattagcgcgtgatttttgtagggaaacaacccatggggcaatctggtttgcacatattcttgggacatgcattcatgttcgaaagagctagagtaattgccccgcatatgtcctatgcctaggaaccaaagtctttatgcaaaaagaatacaaaaggaggtgcatatcgtgtaaagttaccc

SEQ ID NO: 284412 - DNA, 434 bp, Glycine max
tgtcttatctaaaggaaatggttaaataccacctcaagctaatattaagaatgtggctaagtgtttcttttgcaagaagaatggacacatgaagaagaattgcaccaggttccagaaatggcttgagaagaaaggtaaatcaatctcattagtatgttatgaatctaatatggttagtgttaatattaacacctggtggattgattatggatctactattcatattgcgcattctttatagggtatgcaaaacctaaagaaaccagtgtgaagtgagcaaagcattttatcaagcaataagctatgctcacatgtggaggacattggaacttgcatattgactctaagtagtggctttattttagaattagaaaggactttgtatgtaccaagttcttcccgatacttgatttctatttcaaggcttgtaccgt

SEQ ID NO: 284413 - DNA, 429 bp, Glycine max
tgtctcagcatttatgcgagacggagaccacatgcttctatcatcgccaagtaccaagaagagttaggtctagccacggcccacgagcatagaatcgcggacgagtatgctcaagtatacgcggaaaaggaggctagaggaagggtgatcgactctttacaccaagaggcaaccatgtggatggatcggtttgctcttaccttgaacgggagtcaagaacttccccgcttgttagccaaggccaaggcgatggcagacacctactccgcccccgaagagattcatgggcttctcggctattgtcagcatatgatagacttaatggcccacataattagaaatcgttaggaaacttgtatggtctctcagaccttgactagatacgacttcctttttgaaatataatgagttggtcccatgtttctactc

SEQ ID NO: 284414 - DNA, 423 bp, Glycine max
  unsure (1)..(423): unsure at all n locations
tgcttgttgtttcagcatatgattagcaagatgatgcaaccaattctaaggataccctccgaagtcctaacggtttcactgttgaagcaagtaaaacaaaatatgccagagataaatgagcgaagcagctggaaaatctactagtggatttggcattttctccaaagagtgtcatctatagttcagtccactacagaagttatgtacatcacttgtagtgaaactggagtggaaatgcaagtactgaccaacagttagttgtgtggcctttgtgatacgaatatacttggaagtaaaaagtagttggacaaaagggtcaaacaatgaactctgaatacgtgtgaatgaagttattcaattgattggcgttgattcttcatcattgntgagttcataaaagaaaggatccttaaggagatctgt

SEQ ID NO: 284415 - DNA, 430 bp, Glycine max
  unsure (1)..(430): unsure at all n locations
nttccagagctacttggatgagcatatatnnntttctttctcactatattcttttttaatatatatgaaccagcaagtcagaaacctgttaagaattaagcttctgtaatgcattactaaccaattcttttaacagaacgttccttctgtataaaatgctccaacttcaataactaagctagaaccaatttgatagtcccactacaatatttgtggaagaaatagtgacaaaactgggttcattcatggaagccaagattgataacattgacttcacaaaatgttgtcgcatagcttatactaaattagacaccaccattaatgaaacattgcatctagttcatatcaatggtgtcgtcagctatcaactgantttcccaattaaaaatttgttaatggattntttggaaatttgaggctgtagtatgct

SEQ ID NO: 284416 - DNA, 432 bp, Glycine max
  unsure (1)..(432): unsure at all n locations
agtcttcaagttagcagcgtcttttccgttgaacttattttgtatatattttatgaatgagattgtttgtcntaatcaaattgtactctcaccttgcttttaggaaagatttgtatgaactattatattttgcatgtctttttaaatggtattatcttttatttaatatagaaatagctgaaacttctgtttttgatgtcttaattttgtttcaagattttctgaatggatgcagcatgaggaatatatgctttgttgggtaaattatgagatagtcatcttctaagcaaactgttattgtcctatgtttgaaaatgtacagaatgtgcagctctatcaagtattccacgtggtgactggtactgccaattttgccaaaacatgttccagagagaaaagtttgtggcgcacaacgccaatgctgtggcagct

SEQ ID NO: 284417 - DNA, 429 bp, Glycine max
  unsure (1)..(429): unsure at all n locations
tagcctcagtttaaacaattatttggcccccactccttactttttaggccaagaaagcatcgcgattcgccagcccaaagacactcccaccatttgcttttacttttacttttgtttctttttatttagatttttttttatgtgaatgaaagccagaaatcatgagatttataacagtttatacacgttaaatcaaattaactaaactccttgataatatatttgatcagtactatataattttggtttcctagatttcaattatgagaattgcatatttttatatatcataattgtgtgattttaattttttttaattntttgttataaattttaaagacatggcactaaataacgtgttaatgatatgatagttgatgtagaatttgtgcaattgaaactntgagcgacaaanatcacataattgtg

SEQ ID NO: 284418 - DNA, 439 bp, Glycine max
  unsure (1)..(439): unsure at all n locations
tagcttcccgccaatggtatttaaaatttcatgaggtcatttcttcatttagctntgaagagaatgtcatggatcactgtatataccagaaggtcagtgggagtaagatttgtttccttgtattatacgtagatgacattctgcttgcgactaatgataagggtatgctatatgaggtgaaacaatttctctcaaagaactttgatataaaggatatgggagaggcatcttatgtcataggcataaagatccatagagaaagatctcgaggcattntaggcttgtctcaagaaacctatatcaacaaagttttagagagatttaatatgaaagattgttcaccaagtgtagctcccattgtgaagggtgacaaacttgctntgagtcaatgccccaaaaatgattntgagcgggaacacatganaaatattccatatgc

SEQ ID NO: 284419 - DNA, 425 bp, Glycine max
  unsure (1)..(425): unsure at all n locations
tctagccaaatggacttaccttgaattaattcctttttagcccttttgagccttgtttccctttccttgttttgaagctcactacaagccttaaatgaaaaaccatgatatcaccatatccttaaggaattttggagctttggaattgttttgggaataagtgtgggggtttttgtttcattggataacatgttttgttggctatgcttcatgatgtattttgggccatacttgatgtacattgtatattggttaaatgttggacatgctgaatgagatgttgtttctcaaaggctacgtacgtaaaaaaaaaatcgaaaaagaaaaagaaaagcaataaagttgagtgaatatgatcttaaatgacaaaagtatgatgagactctnggttctactctntatgttntaaatttatctttacttct

SEQ ID NO: 284420 - DNA, 445 bp, Glycine max
  unsure (1)..(445): unsure at all n locations
agcttcttacttgggaatcagaaaaatactatggagcaaggtttttcattcttaagtacttggataaaatgataaatcaaagtaaaactttcaagtaaacttaaatattattgttccaaaagttactcttaaaatatcatattttgttgtataacagaagctggttttcatttttctcttaatatttcttttgtaaattttttttaataaaatatcagagtatatctttcgtaaataaggttttccaaaaaaaataactaagcatgcatgcaacaactaaaactaatgagaagcaataataaaggacacatcacacgaaggatttatattggtttactccaactcgggctatgtactgtacctacatatatagcatntctccactaataccaagcaatcgactaaggaattatttctctcctaaagcctctgtaggctcctacaa

SEQ ID NO: 284421 - DNA, 451 bp, Glycine max
  unsure (1)..(451): unsure at all n locations
tgaactatagaatctgcagctgctaccatactcagaatgcctatcatgggaagaattattgtcgtttacgctgaccacatgacagcgcgagagtgttatgcctcaagtctcacaatcagtagatggactaaatgagtcgagcctacgacacagctggtggcatacactgacctgaataatctgagggatacctagcttgatccgagagaagaatgacagagggaaaatatgacggaagaagtcgagccttttctactcagtagagaaacatcccagtgcaccaaactcaaatagttaatgatcgcagaggtggaagaaaatattacccatgtactagaagctaatggagacttattctgatggtccagatcagatatgcctataatcgactctaagattccactatcacaagctangaatctatctagaatctaaacctgttgtgcaaaga

SEQ ID NO: 284422 - DNA, 371 bp, Glycine max
  unsure (1)..(371): unsure at all n locations
agctattatattgggaaaagggtgtgaataacgattagttatgtagagacaagacacgatagatacaattgtgaaaagaactcatttatatgcactctgaagtanaaggagaattatgacactaacccaagtccaacttctcaatgattcttaataacattgcccttataccatttgtctatgcaattattttctcgttgacactaattagaaagcaacctagaaaatcgaacggtataatttactcaagaggtgaaagtcagtatatatgatctttcttctatataattaacttgatggttatatgtctttggataaaaagtcaagagtttctgttattgttatctgttacgtaagactattcctaatga

SEQ ID NO: 284423 - DNA, 434 bp, Glycine max
tgaagaatgtaggaacgagaatgtctcatcaagaatgtatgagtagtcaggatttagtgccaggtaacatggaacatggaatagatgctactccaataacctgttgggcagaaaacaatagcctttccaaactgtgtttgcaatcaaataagtttgaagtatctactgggggaaatgatgccggtctgtcctcgcagcctaagattaaacctctaaatttttttaactgtcatgaaagcagcaaaaacaacccagtggagactaaaaattattccatcttgggccatagtaaggacaaggaagaagtggcatcacattcatcttcaaccaaacaaaatacagataataatgataacatcgattctaatgtgctatgtgatagaaaggaagaagagaatatctgtcacagaagagataatctgggaagtctgtgg

SEQ ID NO: 284424 - DNA, 376 bp, Glycine max
  unsure (1)..(376): unsure at all n locations
agctattacttttagttgattcactctcgtatcataaactaaaagtttggtgtttcttacataaaagttgagacatcacaatcttaaaaagctcaaactatgaaacagtggtatacaacaattattgatgtgaatatatctgcatgtgatttcaaggtcattggagctattctcatattaatgggactntactcggatctgtggggcaagcacaaggagaacaaagagaaagaggcagagataaccattgaggtattgaagtgttgatcataaaatgggatgaggttggagactgtggtagaatatgctgaaacaaacaacgacattgagatgcaaaagggtgaagcctcaagagagctaagggtagccattggag

SEQ ID NO: 284425 - DNA, 433 bp, Glycine max
tgaatagcagatccagtgcactcagcataatcatgttttatcactatgttccctaaaaattctgtgggattgagtatctaaaaagtaatgacaaaattgattagtttattaattaatggatgacttttttttatcggttaatgaatatgtacttgttgcatgcattattaacttatataatacttacttccaaccattcttgagttcctgatggttcccatgctgctaaaccaccttttctactctgcaataattaagagaaaaaagaaccacagttgcatcaaaagtaaatattctagtagtaaaagtaaatcaaacatcaattattaatgtcgtctgcgctaaccccaacttcccaatgataaaagattaaacaaagagaaggaccatcaattgattgatctattaattaattaaaagcatatgaccatga

SEQ ID NO: 284426 - DNA, 186 bp, Glycine max
  unsure (1)..(186): unsure at all n locations
agcanctagccaaatggactcaccttgaattaatgcctttgatagcccctttgagcctatgtatccgtaactttgttttgaagctcaatacaagccttaagtgagaaaccatgaactcaccttacccttaaagaattatggagctgtggaattgttttgggaataatctgggaataagtgtggggg

SEQ ID NO: 284427 - DNA, 437 bp, Glycine max
tcatgatgaatcaagattgattcaaagaagttttgattattacaaaggtaatgacaaaaagctcaaaggtcaagaacacttcatgataacaaagatgatgatctcaagaatcaaagaatgagttcaagattttcaagattgaatcaagaacacttcaaggttcaagaggaaatttgatttcaagaatcaagaatcaagattcaaggttcaaggttcaagcttccaagaatcaagatcaagattcaagactcaagaatcaagaatcaagagaaaaattaatcaagataagtatgaaaattttttttcaaaaactgagtagcacatggatttttctcaaaacttgtttaccaaagagtttttactctttggtaatcgattaccagattgtggtaatcgattaccagtagcaaaatattcttgaaaaagttttcaactga

SEQ ID NO: 284428 - DNA, 438 bp, Glycine max
  unsure (1)..(438): unsure at all n locations
agcttatttagaaacaactattacgtcctaccactctaggctacaataatatcctctaggccactattggcacacctttagactcatcatgaatctaanaaactcaagtattgtttaacactaagccattnttggctttcacaaacaaataatgtttgattgaatacacaaatttaaatcactcaacatagtggataaacaattaagctcgaatacaaataataactttgatatgtaaatgatgaactaattaagcactattatgtatcacccaatgacttgacaatttctcacttcaaaatgctcttgtttttcacttcgtattttcgttttttttcttcttgcacttgataacgatgccttggtcactntttataaacttcatgaaagtattcattacgagattatngtttgtctctgaattgaccgttgtcttac

SEQ ID NO: 284429 - DNA, 427 bp, Glycine max
  unsure (1)..(427): unsure at all n locations
tctcccccattttcttataaatggggggagaagtgaatataaatttcgtttagccctcttggtaattcagaatcacttaaaattagtgaaaacaattggttccgtgaagaaaatccgagccgaggcacttccgtaacgtttccgtaacgtttccgtgggtgatttcgcgaaggttttcgaccgttcttcgacgttcttcattcgttctttgtcgttcttcggtctccaaccggtaagttccctaaatcaaacttttcaattcattctatgtacccttagtggtcctcatttgcttttatgttctttcatttacatttcatttactttccgtacccccttttgacgtgctttagtcatttgcttaagttattttctcgcctaatcaanaaataaaataaatgtccaccgttcatttgaattgtaacat

SEQ ID NO: 284430 - DNA, 400 bp, Glycine max
  unsure (1)..(400): unsure at all n locations
agtcttctgaagaaagtgatgaggtacaagccctaaaggcagagcttgaaagagcccgggtagtcgaagagaagttcaagtccatagccatcaaagtctgaanagagtatgatgaactaagggacgtcaatatggccacagctgaagccttggaacgagaaaccaagaaggcccgaaaggaagaacatgaccaaaacaagttttgaggggctttatagggcagcaatagtgagcccaagctccgaagaggtgaaaggaatcatcacgggtcaaaggcatgatctggaaggacgagctaaaggcttgccttangtcgaaaagaaatttgtcccaacagttaaagcgagactgaagggaatatgtgggccatcatcgataagtgcaaagagaagctaaatct

SEQ ID NO: 284431 - DNA, 433 bp, Glycine max
  unsure (1)..(433): unsure at all n locations
tccaagaatcaagatcaagattcaagactcaagtattatgaatcaagagaagacttaatcaagataagtatgaaaaggttttttcaaaaactgagtagcacatggatttttctcaaaacatgtttaccaaagagtttttactctctggtaatcgattaccagatttttgtaatcgattaccagtagcaaaaatgtttttcaaaaaactttcaactaaatttacaacgttccaattgatttcaaaaagctgtaatcgattacaatgatttggtaatcgattaccagtgtgtttgaacgttgaaattcaaattcaaatgtgaagagtcacatcctttcacataaaagctgtgtaatcgattacactaatttggtaatcgattaccagtgattgtttctgaataaatcaaaagatgtaactcttcnaaatggtttt

SEQ ID NO: 284432 - DNA, 398 bp, Glycine max
  unsure (1)..(398): unsure at all n locations
agttttatgggcctacgaataattnttgtttggacaataacatattaaatattaaaaattaaaaagaaaattntggacaggtaataaagtatatggttggtatttggatgcgtaaaacttaaagagtcactagagaggttctctctctctatctctctcccgccattgaagtaaagtaactatctatcgttctgagaatgagaatcaacgcattctgtgtctccgcctctgcttctatatattctccttttcctaatccacatgtactttntcggtttttccattcttctgttatgtatttacactaattactttttagtttaaccactgtgactctcactgattaatcgtgttatctctagggtgcgctactgcaagattggaagcttcggaagcat

SEQ ID NO: 284433 - DNA, 420 bp, Glycine max
  unsure (1)..(420): unsure at all n locations
ntgatcagaagctcctctttgaaagagcgcaacttgtctaattgaggacatagcgcatgatctcggtcgatcattatgcatgctgcttgtggccagccttgaagtgtccatagattttagagaaaagattggcacattgcaaaaacagctgatgaatgcgagatttggtgggaatatgagtccaacttcaagttcgatatcaagatttgtcaatgaagcgaaggagggaggggaaatagaagaggagataattgatgttactagtgatgatgttttactacagcttaagaatggtgatgccgaggaatttgcagttgcactcttaaggctaaaaaagttcatcaggggtggaaaactggatagcgggttaattaatgtggaagctgctgtttccattctttttaaccgtccattttcgtc

SEQ ID NO: 284434 - DNA, 435 bp, Glycine max
tgctttaaataggctctaaaatcgcgacgttgcacttagcgccaccctcgtgcttagcgcgagtaagtgggtttgggcttagcgccaatcttgcactaagcttggctgaagacacctattgcgcttagcgcactggtctcgtgcttagcgcccggccttgatattcacgccctgccagattctccttcgtgctaagcgcgatgtgtagaaacaagcttcatgatgatgaatcaagttgattcaagtagttttgatgatgacaaagatgatgacaaaaagcccaagagaatgatttcaagattgagtcaacaagttcaagatcaagtttaatttcaagtttcatgagaagaaatcaagaagattcaagaatcaagagaaatttgatttcaagattcaagagaagatgaattcaagattcaagagaagaaatcaaga

SEQ ID NO: 284435 - DNA, 429 bp, Glycine max
tcatgatgatgaatcaagtcgattcaagtagtttttatgataacgaagatgatgacaaaaagcccgagagaatgatttcaagattgcgtcaacgagtttcacgaatcacgagaagtgtgattttgagattcaagagaggatgaattccagattcaggagaagaaatcaagaagacttcacaagggaagtattgaaaagatttgtcaaaagacaaacatagcacagttttgtttttcaaaagagtttttctcaaaattttctaagttaccagagtttttactctctagtaatcaattaccagtttcctgttgtcgattaccagtggcatagtttgatttcgaaagctttcaactaaattcgcaacggtccaattgatttcaaaatggtgtaatcgattacaagatattggtaatctattaccagtgtatc

SEQ ID NO: 284436 - DNA, 436 bp, Glycine max
  unsure (1)..(436): unsure at all n locations
agcttgtcggtgatgggatccaactttcgccacaatacttatctttattatattttggacagggacagaaaatggatgctatgcccttttgctaaacgtaattntaaataataataataataatataaaaagttacatattacattttatataaatcgtattccaataaacttgtttccaaattttaagagaaacttacttaagggatttagagcattatttcgatgataatctttatatgagttatttaattttttttcttattgaaacatgtgacatggcattatttatataaacaatcgttatttaataaatttatattataaataaaatatttttcaaacataataactcataaaattaagttaattaattatttgagccattttaacatcagaataaatntcatacaaaatatttaaatttatgcaaaatt

SEQ ID NO: 284437 - DNA, 423 bp, Glycine max
tgtccttggtttagacatgatttatacatgatttattacttgtttgattcaatttgggcaaaattggacgagggcaagtgtgatttcgaaaatctgcactattatgcagaattttgctgttgaaatgtgcagcagaattttggctttgtgcagaaaatgatgtgtatttgctggttgtggaaagagtagtatagattgggttctggatgttttctagcagatcccaatggtcacaatgtagatttatgtactatggacctccagtaaaattttcgagtcgatccaacggttaacgaattggaacgaagagaatgttactggggtatttgagtaaggaaagctacggcattggtttgtgtttttgggcagagttttctgtctttgccctgttttcttggttttgatagttcatgatgtttggat

SEQ ID NO: 284438 - DNA, 515 bp, Glycine max
  unsure (1)..(515): unsure at all n locations
gagatgcnttgagctgacgtctcatcnctgggcgatnctctcgncccgtgatacttataatccagctgcgcgctttttatttttccttaaagagatctatgaaagataaagcggctttaagaaacaatttctgctccgaatatgacaaccaccgttttatgaatgctgaacaccatcagcactttcaggccatcaatggatggatatttctcctggagcgacacgtccagctcatggacgaccagtataccgactttcaagaagagaaagttagcccgcggtggacatcactggttacccccatggccaagttctacccaaacgtaattctcatagtttatgcgaatgcatggcctatatacgaagacttgccagatatgcgatcctatgtgaggggtcactggatatctttcgatgaggaagctcctcaccactntctgagataccctctaatgctttaagaggtcctagaatgtgaatttgcctaagaagaacccgcttcaccgatttgatga

SEQ ID NO: 284439 - DNA, 429 bp, Glycine max
  unsure (1)..(429): unsure at all n locations
tttcgtaaaacttatggtaaaatctgggacctatccatggtagaagtctccacagagaccattgcctccctcgcccagtattatgatcagccgatgaggtgcttcacctttgggaacttccatctatcacctatggtagaagaatttgaagagatcctaggatgccctctaggggggaggaaaccatacctcttcacagggttctatccctcattagctagaatttccaagatagtccaaatctcggcgcaggaattagaccacaggaagcaagtcgaaaatggggtggttggaataccgagaaaatatttggaggcaaaagcaagaatcttggtaggtaaaggcgagtgggccccgttcatagatattctcgcactgttgattntcagaggagtcctctttccaaatgtggatgggttggtggacctg

SEQ ID NO: 284440 - DNA, 383 bp, Glycine max
  unsure (1)..(383): unsure at all n locations
ttgcttgatttgtgagttgantttagccttagtttcactttggttattagtcaattcattcaaggaaacttccaaagaataacgtccaatcaattntgtattntatattatttaaagatattttgactattttattattattttgctttttttggtttaaccgaggttacagcgtgaacgatcaattagattttgttttaacagtgattaaacgagattacaacacaaatgatcggttgaaattcattttatcatttattaggtgagaaaacgacttacacgatcggttaaagctcgttaaaaatggaagagaagaaaaccggacatgaacaaaatgaatatgatagctaaaaaacaagagatgaattgaaagcatcggattc

SEQ ID NO: 284441 - DNA, 428 bp, Glycine max
  unsure (1)..(428): unsure at all n locations
tcaacttaaagagagtagttcaggcttagcgcaacatgcgcgctaagcacacttccaagcatttcaaaaacaataaagaattggcacttagcgcatcctgccgctaagcccatctcgtgaaagttcaattccagaatggatctgtggcttagctcaggacagcgcgcttagtgctgctacaataaatttttccagagaagaagttgcgcttagcgcatcatctccactaagcccactgcttgaagtttacttctagtgaagatgttaggcttagcgcagtgatgtgcgcttagttgaactattcagtcaactagtcaggggtctaagcgcttagcgcaagagagctcaggcttagtgcgtgaagacatggcgcttagcggatggacaactganaaaattntcaaagtcttttctgtccatctcttcac

SEQ ID NO: 284442 - DNA, 435 bp, Glycine max
  unsure (1)..(435): unsure at all n locations
tagcttcaacattcaattntgagcgttntgatatattacgatactcaatcggacatctgagtaaaaagttattgtcgtttgaatttgctcagagattcggtattccatttcgagcatcccgatatattacgggactcaatcagacatccaagtaaaacgttattgtcgtttgaatttgctaagagcttcgataatcaatttcgagcgtctcggtatattacgggactcaatcagacaaccgattgaaaagttattgtcgtttgaatttgctaagagcttcgataatcaatttcgagcgtctcggtatattacgtgactcagtcagacaaccgagtgaaaagttattgtcgtttgaatntgctcacagcttcaacattcaatttctagcatctcgatatattccatgactcaatcatacatccgagtaaatagttg

SEQ ID NO: 284443 - DNA, 425 bp, Glycine max
  unsure (1)..(425): unsure at all n locations
ttgagcaaattcaaacgacaataagtttttactcggatgtctgattgagtcccgaagtatatcgagacgctagaaattgaataccgaagctctgagaaaattcaaacgataataactttttactcagctgtctgattgagtcccgtaatatgtcgagacgcttgaaattgaataccgaaggtctcagcaaattcaaacgacaataactttttactcggttgtctaactgactcccgtgatatattgtgacgctcgaaattgattaccgaagctctgagcaaattcaaacgacaataacgttttactcggatgtctgattgagtccagaaatatgttgagatgcttgaaattgaagactgaagctctgagcgaattcaaacgacaataactttntactcggatgtgtgactgagtcccgtaatata

SEQ ID NO: 284444 - DNA, 390 bp, Glycine max
  unsure (1)..(390): unsure at all n locations
agcttattatatattgatacgctcgaaattaaacgtcggaaactctcgggaaattcaaatagccataaatnttcacacggatgtccgattcgggcgtataatatgtcgagaggctcgaaattgaacaatggaagctcttgagaaatttaaatgggcataacttttcacacggatgtccgattcaggcttataatatatcgatacgctcgaaattaaacatcggaaactctcaagaaattcaaatggtcataacttttcacacggatgtccgattcgatcgcataatatgtcgagaggctcgaaattgaacaatggaaactcttgagaaattcaaatggtcataacttttcacacagatgtccaattcaggcttataatatattgatacgc

SEQ ID NO: 284445 - DNA, 427 bp, Glycine max
tgaatcggacatccgtgtgaaaagttatgaccatttgtttttcacgagagcttccgttgttcaatttcgaatgtcactatatgtgatgcgccaaaattggacattcgagttaaatgttatgaccatttgaatttctcaagagcttccgttgttcaattctgagcgtctcgttatgtgatttgtctgaatcggacatccatgtgaaaagttatgaccatttgtatttctcaagagcttccgatgttcaatttcaagcctctcgacatattatgcgcccgaatcggacatccgtgtgaaaagttatgaccatttgtatttctcaagagcttccgatgttcaatttcaagcgtctcgacatattatgcgcccgaatcggacatccgtgtgaaaagttatgaccatttgaatatctcgacagcttccgatg

SEQ ID NO: 284446 - DNA, 324 bp, Glycine max
agcttttataagaaagtgaagtcaaaaacttttaatgttggagatttagtttggaaggttatcctgcccatggatagtaaggatcgagccttgggcaaatggtccccatattgggaaggactcgttaaaataattcatatctattcgaatggtgcttatgaattagaggaattaacccctcagaaacgtactttgagtataaatggtaaatatttgaaaaaatataaaccaacattgctcgaagttaaataagcatagaattacagaagaatggaacataaaatggtataacagtaaaattgccacaaaggcatgtgtcaaatt

SEQ ID NO: 284447 - DNA, 437 bp, Glycine max
  unsure (1)..(437): unsure at all n locations
tgtccaatgaggtgacaatgaanatacctagtgttactatctgatatacagtttttgctgctcgttttattgtcaattccaactgcatcaatgcatctttaacaagcataccacgaaccagagcagcaaccaagttgaccttctttggactctaaaataccatagaaaacaaggtatgtaaaatgtgcaactagtcagatattaatcagatccttcttaaaccataaattaaggcattttccacagcaaaccagggaaggcatttcaatggctaaaaaattagatgccaacttttctgcaaaataacatgttggttaaaacacagaagtttcttagcaagtagctaggcagtggcaccacataaatgtaacaaaacattgtaattcttcaatatttatgttatggctaagctgaacatacttgtgataatacttatg

SEQ ID NO: 284448 - DNA, 438 bp, Glycine max
  unsure (1)..(438): unsure at all n locations
agcttatactaagttcagcctaccatcctcagtcagaggatataccgaagactgcttttangatccgttatggtcactatgagtatctagtcatgccccttggtatgactaatgctccaggtgtgtttatggactacatgaatagagtatttcacccttaccttgatagttntatggtagtattcatagatgatattttggtatactctaagactagagaggaacatgaagaacacttgaggattgtgttgcatacccttagggaccgacaactntatgctaagctgtccaagtgtgagttttggttagagaaagttagtttcctagggcatgtgatatctcaagggggtaaacctgtagatccctctaagatagaagtcgttcttgagtgggagagtcctaagctnttgtgtgggatacccaatgtaagcatagttt

SEQ ID NO: 284449 - DNA, 424 bp, Glycine max
  unsure (1)..(424): unsure at all n locations
ttgagccaaaatcctgactcaccataaaccttgaccctggtgataatgtcaatccttaccctcggaagcaaaaaagaatagaagggaaatttccaatcaaagaaaagagaaggaaaatttccaatgaaagaggaaaaaagaaaagaaaggaaattcccaatcaaagagtgggagaaagaaaaagaaaagaaagaaaattcccaaccaaagaatgggagaaagtaaaaagggaaggaagctcctggtcaaagaaaccagagaggtctttggaccagataatatctgaacagtacagaattgtcaccaaatgaacaaaaaggaaggaaaggaaaccacgacctanaatggtcttctccctttaattaccaaccaaaatcccgtgcgctagcgacccttttttctcgccccgcactanaaaaaaaaa

SEQ ID NO: 284450 - DNA, 432 bp, Glycine max
  unsure (1)..(432): unsure at all n locations
agcttcttagtttcagatgatgcagctgagtttgtagctacctcatgcactcctctaatgattataacatcatttctggcgctaaactgctgggagttggaagccatcttctcaattaaatgtctagcttcaataggagtcatgtctccaagggctccaccactggcagcatctatcatacttctctccatattactgagtccttcataaaaatattggagaagaagctgctctgaaatctgatggtgagggcaactagcacatagttttttaaatctctcccagtattcatacaggctctctccactgagttttctaatacctaagttatccttcctgatggctgtggtcttggaagcanggaaaatgttttctaagaatactctcttaaggtcatcccagctcgtgatgaaccttggagcaaggtaatac

SEQ ID NO: 284451 - DNA, 432 bp, Glycine max
aaccaaatgctcaccactgctagaggagaagcctttatgttatttcatataaacctcctcctctaaatcaccattaagaaagcatgttttcacatccatttgttgcaactcaaggtcaaaataagcaactaatgccaagataatacgaagagaatctttcttagatacaggagaaaaagtcattgtgtaatcgattccttctttttgagtaaatcctttagcaacgagtcttgccttgtatctctcaatgttgcctaatgaattgtttttggtcttaaagacccatttacaaccaatggcctttgccctattaggcaactctacaaggttccaaactccattgctctgcatggaattcatctcatccttcatggaatcataccataaatttgactctttacaactcatggcttaatcaaaatatttgagatt

SEQ ID NO: 284452 - DNA, 408 bp, Glycine max
agcttgcagaagaataaagttcaaggtcaagggaagcagatagtggaagaaagaaaatggagaataggaataagcggaagagagaaaaatggagaaaaggaaaaactgaatattatgttggataatgctcaaatgagcaaaactcacatttacatgaatacattgtgccttatatgactaaagctagtaagttgttacataattggttacaagaataactagcttgtaactaactaaaactaactaatgctagtaacactagtaatctatatctctaatacaatgctcaaacaaaccataaagtaaagtcatgaattcaggatccatacatattattctggtggcggctgaagacaatgacatctgcacccagtctcatactaccagtcttgaagccatttccatcta

SEQ ID NO: 284453 - DNA, 374 bp, Glycine max
tgtatcttttatgatgaagcagctatgaagtatttttcactaggtgaggctagctgcataaatcaaaagacaccattgttttctatcttcaactaaaccctttgctagtccatttagataaaatataaacataaaaaaaaaatccaggttttcatgtctactctagtcatgatgatcaggttttgggtaatgaaacacaaataactctgaaattttttgagagaactaaataagaaaaatcctaacaataaggggaaaaaaataattaagaaaatcaagagatgtacacattacagatgtacaagaaagcaggatagtgagacccctagatcaaccaaaaaaaggatatttagatttccaaatgtttttattat

SEQ ID NO: 284454 - DNA, 429 bp, Glycine max
  unsure (1)..(429): unsure at all n locations
tatcttgtgaaatatggcataacaaatattgacgaatgtntgtttatgggtcagactattctagagcaattggaaggccttcctaggcataaagcanatgccagatatgtgaactatgttgcagaanaggacaaaaataatggtaatttatatgattcttcacttttagctaataataacatggagcttttctctgagcctgagcatgctaaggtgtttggtcatgttcgtaagctttcaaatgagagtgttgaaagcgatggaagctcaatacgaggtagtgacatgtctaattttgggattccaagttcatctggtgatggctctcatgaccttcctggatctgctttggtttcaagagagacagatattatgggccacacanagtcgaagtctactggtgaatactcaatagtccttccactagat

SEQ ID NO: 284455 - DNA, 426 bp, Glycine max
tagtgtagaactggccaccaaaataaccttttttaatttatgagttgatcaaaatgaaaccctcgtgcaacataaaaggcagaagcaaataataattatttacctcttttcttctctcagctcgctcatcacacttgaaactgaatccatattttgggagcgcccccaccctgcgaggtttggcatcttctgcagtaggacttacaactggattaaggataaaccataaatacactgtgccactctcagtaacaaactaacaacataaataatataaacaaatccacattagctccccattgcctctcaccaccataaacaatgctcaaccaggaaaaaaaaggatacgaagaagattctgcttctccttgaagattatcatggggatctttcttcgataattgtggtctagtcttctccctgtat

SEQ ID NO: 284456 - DNA, 403 bp, Glycine max
  unsure (1)..(403): unsure at all n locations
agcttctcccctaattntctataaatagggggagaagtgaagtagaaaagggttcagccccttaggcacttctctctctctcgaaatagctgaggaaaattagttccgtgaagaanatccaagccgaggcgcttccgtaacgtttccgtgagtaattacgcgaagattctcgaccgttcttcaagattcatcgttcgttcttcattttcttcagtcttcaacgggtaagtacctcaaaccaagcttttcaattcattctatgtacccgtggtggtccacattntgtttcatgtatttttattctcgttttcatttactttttatacccccttttgacgtgcttaagtcatttatttaagtcatttctcgcttaatctaaaaataaaataaatttccaccgatc

SEQ ID NO: 284457 - DNA, 408 bp, Glycine max
  unsure (1)..(408): unsure at all n locations
ngagtaaggcacccctttggtttgaagacgcgttcttgttgagaggcatccacataaagttctccacagaaaatgctttatcttgggaggtatacgaagattccatatagtggaccagcttccttgaactttgagagcttctttgttcaccatagtctccattaaaatatgataatctgatcaaaccgagtatgtccccatggtactaactttcaaaatcaaaatatcagaatcatgaagattgaagagtggcatcatctttatttcttgggaatcttctttattgaaaaattgatcagtaacctcaatgttccaactattgctttcaacatcaataagcgaatgtactgtcaaatgttcaagaccaaaaagaggtaaggacgaaacataatacttatctttattctg

SEQ ID NO: 284458 - DNA, 439 bp, Glycine max
  unsure (1)..(439): unsure at all n locations
agtcttgtaacaaggaaaaataaaggaaacaggaaacatcataattcataaggagttctctgaccttcgccaattcaatagtgctcagatccattccgattctggttgtatagaactccctagtcataaagtcctttcagtatatgaatttgtttgcaaaatttccagcagaaaccaacttccgaaatatataagaggaggctaaagatatgtagagttgctcctgcataaatttagaacataacaagcagttcaagcctcaagctaggaagtaaaagaaaaattttaattctgatctagagcagaataactaacatagcatactgtgctacattactttcgaggcttcaattactcanatcagggtaagttcataagatagatatacaaccagtatatantgttataatacatcactctcatanaaatattagcattc

SEQ ID NO: 284459 - DNA, 441 bp, Glycine max
  unsure (1)..(441): unsure at all n locations
ggaccttaaatctcagcttggccaggtattcatgtttatctagcctttgagtatgtccattttgatttatggggaccatctagaggaaaaactcatggtggaagctcatactttctcaccatcatagatgatttctccagaagagtatgattgtatgttttgaaaaataagtcagaatcttttcaaaaattcagagaatggcatactcttattggaaatcaacttggtacaaaattaaaagttttaaggactgacaatggcttggagtttgtttcagagcagttcaatgagttttgcaggaaaataggcatcaaaaggcacaaaacagtccctcacacaccacaacagaatggtttagcagaaaggatgaataagaccattttgganaaagtgaagtgcatgctactaagtgcaggactgccaaataccttttggggagaa

SEQ ID NO: 284460 - DNA, 270 bp, Glycine max
  unsure (1)..(270): unsure at all n locations
agcttgtgccacctacatagcataggtttttcatggttgatcaacctaagctgtggntgtaaatattataaantttacatacccaaattaaacctataagttagaggtgaccaatgagttacctattatgatcagtcaaacttactatatgtttcttcattaaatcttaatcaattaatgtgatggctaaaaatattggtcgtaaagctgattatccacatctaggactaccgacttgctcaccaagccataaggagaagaatcattctc

SEQ ID NO: 284461 - DNA, 433 bp, Glycine max
  unsure (1)..(433): unsure at all n locations
ntagaaccacaaacaaaaaattatttgttattagctttttgtaaaacaaaaaatatgacatatgttaataaaaaccatttcatacactctgcaaaaccatttcatacagtatttgtagtgtactctcaatggaaatacacttatgagataacctctaatatttttttatcagtgaaaaactctataaaaaaaggtaaaaccaaaagacagaaactccaaggaccttataagtccaatcagctgagcccactgagcatcaacagtactccattgatccccctcaataaccaaaaaaatatgaaatacggcatgtgagaatagggtcagagaggataacattagcacagaccatgatatcaaagatggttgacagacacgaaatcttgtttgcaaaacaagaaaaaagattcactacataaataaaagacataac

SEQ ID NO: 284462 - DNA, 372 bp, Glycine max
  unsure (1)..(372): unsure at all n locations
tctagcttaagaatgagtccgcgaagattaagaatgcttaaagtttatgtgagaatattcaaatgttcaatccttttacaagaaagacaaaaatagaagttcgtatatgaaatattcaaatgtttcatatatccttttaaatgatgttgaagtgtttacatgtaattatccataatatcctgtttatctattttttttcatactacttttgtactcaatatagttctatatatatatatatataatttactactatcgattctttntataagaaacaaatgatacttcaaaacatttcatgcatccatgacagaagattaaaggcataagctagaccatccaaacaagaatacaaagttnttgtgcttgatc

SEQ ID NO: 284463 - DNA, 423 bp, Glycine max
  unsure (1)..(423): unsure at all n locations
ttcaactttgagcctgagcaagttgaatcttattctgctcacaggctaatctgaagggtgttgtgttgaaggctangcatatagctgaagcagctttgtttcttgcttctgatgatgctgctgtttacatcagtggtcacaacttggtggtggatggtgggttctctgtggttaatagaagttattctttcacaccagcttaattacatgtagagccaaaaaaacatagttttgtggctggttggcattaatttccctagccttcatcaagttgagaacatgatgatgtcatgcagtgcgtcaaattaccttgttactgggacttttttttcatttgcactctactaataattctgcaatgtctcttctttgtttgcattttcaaagcatacattcatcaaccttgtctgcttgtgactcaaa

SEQ ID NO: 284464 - DNA, 436 bp, Glycine max
  unsure (1)..(436): unsure at all n locations
tgctttagacctttgatagcatgttggcatcccctgcattcttgttctagtcagcttcaaacttattacaagaaaaatgacctatacctacagacaaaaactgtcactataaataaaaaatccgtaggtaaatgtatgatagactttgttctacggacgttttttccgtcaactttgagcgacatataatgacggctaattgtctgtcactataggttttacctactatgtatagtgtgtaggtaaaagtcattaacttctacttacatctcctaactgtaggtaaaagtctttaatatgtacatatcatcttcaactgtaggtaaatgtttagatcttagagaaagcttataacatacataattgaatgtgggcagtgcagcaaaccaatacctctctgcttcttctgactanaaaagaattatataaactcatg

SEQ ID NO: 284465 - DNA, 418 bp, Glycine max
tatcacccttactgatgattgaaaaaagcttttaatggaagtcaagagcatgatagtgcaacgactatcgacaatgttcctttggaaaatgatcaagtgaaggtcggtattaaggaagtttgagatgttgatgctcgcactcctgtacccactcaagaggttcaattagtggagtaggcatttaacaccttccttgcttgggcgacacatcttgtgaaacctttttcagaacaggtatttcatttagtttttttaataattattaataaaggatttgttacaaatcaagttttgagtgtcattcgcttaatgtttattaaatgtgttggataaacaggtagttgcgggattggcgaaacctgtacatatgttggatcctgacattgatcccctttacctgatgacattgacaatcttg

SEQ ID NO: 284466 - DNA, 434 bp, Glycine max
  unsure (1)..(434): unsure at all n locations
tttcttttggcactagccattctttctggcactcgtttntggtttttctagtccttttcttattatttaattgttggatcccaatcccaattctatttggggggtagcttaaatggttaagtagagcggaacggaagaccctttgatagcatgtgacgcgaagtcctcaagtacgaaggtgattagcagcggagtggtccttaaggctgtcgtacctgctctagtccttccggcgtaatgttctccgaagaatcggttcagtctttccctctgtggctgctacttctttacttcttcactagtcttgagattntagccgagactttgctcaggtctcatagaaaagaagattccttcccgctcttctctgaatggagagaatgagttctactctttcactggaagctatcttactaaagagtggtcctatcttt

SEQ ID NO: 284467 - DNA, 427 bp, Glycine max
ttgcctaaagctatgagtcgagaaagatttgtatttgacagatagcttaccccgctttcacgggaagggtcgcttcgctcggggagtggaggggaaggagaggacaggttcagccgtcagagtagagtagtggagccagaaaggaaagaatgagtagtaccagagagacatgttacgaaagaaggaatcaccaaccataaagaaatgtaactgtcctgggatataggaaattcttcacatcttctcttattctctttatggttacccggtaatgccctatctaaaagtggattattgtatgatagtcttatccttttccttccccagcttgaagtaaacccatctctactctcttctcggagtttcactgtggaactaaggcatctacttcactattgagtgggaatcccggatctctgtctgaaag

SEQ ID NO: 284468 - DNA, 328 bp, Glycine max
agcttgtagattggctagacatgatacatgtcagggtttggtttggttcaaggataaaagggatgccccacattatttccatgacacaaatgcaaaaatgatgatttggaaattttatgcaaaactggtcatgcatgcacctatgcggacactcaagtgtcaaatttttatggtcatgtgatgctagggctcaggattcatttcctctattttagatcaacccaatgtttccaaaatatgttcttttatcaatttgtgcattcatccgagtccattttgggtactcgggaaaattttcacagcattcacccttcatgtgtgcacacat

SEQ ID NO: 284469 - DNA, 426 bp, Glycine max
taagataacttactggagaagcttgtgtgagacaacttcgttgattagctcgagtttagctacgcacacccatctaaaaactaaactcacctccttgagaagctagagcttagctacacacccctataatagctaagctcaccccatgacaaaaaggacatgaaaatacgaaaaatatcctactacaaagactactcgaaatgccctgaaatacaaggctaaacccctatactactagaatggccaaaatacaaggcccaaaagaagaaaacaacctattctactatttacaaagaagagtggacccaaccttggcccatgggctcaaaaatctaccgtaaggttcatgagaaccctaaggccttctttatcaactctagcccaatgctcttggagcctcttgctcatggctctggtaactggtcc

SEQ ID NO: 284470 - DNA, 384 bp, Glycine max
attttccaaattattgtaccaaactaccgcggctccggccaagctatcttgaaaaaagtgtattaatagcttctcatccttagagtgtgcgcccatcttgcgatagtacatcttgagatggtttttgggacaagttgtccctttatacttgtcgaagtccggtactttgaacttcggggggataacaacatcgggtactaagcaaagatctgtcatgtctgcgaacgaatagtccccaaatccttccacggctctcaatctctcctcgaggagattgagcttactcctttcttcagatgctgtgggcggaccttccgtggacaaaactattggttgtgtcgtgattgtcgcaacctacccttcggtgggagggcgacacgtgac

SEQ ID NO: 284471 - DNA, 401 bp, Glycine max
atgcagctgagttggtcgctacctcatgctcttctctaatgactatagcataattgctggcgctaaaccgctgagagtcggaagccatcttctcgatggaatatctggctccagcaggagtcatgtctacaaaggctacaccactggcatcatatatcatacttctgtccatattactgagtccttcataaaaatattatagaagaagctgctccgaaatctgatggtgaaggcaactggcacatagatgtttaaatctctctcactactcatacaggctctctccactgagttgtctaatacctgagatatccttcctgatggctagagtcctagaagcacggaaatatttttctaagaatactctcttaaagtcatcccagctcgtgatggaccatgga

SEQ ID NO: 284472 - DNA, 389 bp, Glycine max
  unsure (1)..(389): unsure at all n locations
agtctngacaaatataattatctacttgttccttcttagtttcttgtatacacagcatgtctgctctttcctttctaaccattcttctaaccgccgcccatttcactcccctccctaacccccttatgttgtatgtgataatctttattattcaggcttcctgttacccaacttattggcatcctccttgtccctcagctccatcttcgtaaattgtgaccaccattgcatctcctccctcacatgtaactcccaaattctgcgccatctcccattgtgctgaggcttcctttgtattctcacttgtgtggtggctatctttttgcaaatggggctgagttataatctgcacttcatctggtgttattattcattcctgttcttctaac

SEQ ID NO: 284473 - DNA, 420 bp, Glycine max
  unsure (1)..(420): unsure at all n locations
ggaggaaaagaaagagttaaaggaggagcacttaattgaaggaatgaaagagggagagaagtggaactttgaagtgtgtctcataagactttcattcatgaaagttacaacaagtgttacagacgttatagcctaggtagcttcttgagaaacatccttgagaatcttccttgagaagctttcttgagaaacttccttgagaaatttctttgagaagcttccttgataagctagagcttaactacacacacccctctaataactaagctcacctccttgagaaactttcttgaaaagcttccttgagaagattcctagagaagctagagcttagctacacacacctctctaataactaagctcacctccttganatgagaagctagagcttagctctttgtatcaagtgaccacagaata

SEQ ID NO: 284474 - DNA, 386 bp, Glycine max
attttctctacaagaaataaagtttttttcaatagaaaactctcaaaaacacttctagctttgtatctaaacaggcttataatatgcttaaattaatacagataaaatcataaatccatgcatatatgatatatccttccctttgtactattcttctatctagggttttattatcatggaaagaaagacatagacttgttagccttgaaggttataatacttcttgagttttttgtagcatgaactagttaacatatgttgatgcttcttttcagataagtgtaggattggatcagggcctcagaatgagtggtatttcttcagccataaggacaagaaatacccaacaggaaccagaacaaatcgagcaactacagctggttttt

SEQ ID NO: 284475 - DNA, 420 bp, Glycine max
gctggacccgggatcctctaagtcacctgcggctgcagcttaaactagtatgtggtaattgatgtgtgggagtgttagttatatattattggagcttggaggtttgtttggtagaccggagtggagagtttaacatttaactaaggacaacgaatttcaatactcatgtaatatagtagtatttggtgtgttatcattatttttcgataatcggatatttcttaagcacactaggtaggttttaagactaaagatacctagcgcacataaaaatgcatgcgagtcttagtgattatgatatgcttttgatgcacgagatttgattctttgttcattatgcatcccttaatcaaacacgcttcctcaacacctgacataaagcactcttgtccgttggtttattaaactgcaacatggtac

SEQ ID NO: 284476 - DNA, 440 bp, Glycine max
  unsure (1)..(440): unsure at all n locations
taacaaanatggtggagggagtcctaccacacggtttgccaatctctcgaattctgttaagtagtcattaacagaaccgcgttgcacaagcttgaatagagctcccttgggatcgtcatagaatgttggagcaaaccgcgattccaaggcttgaagaaacccttgccatgatgttatgaagccattgctgaacatccactggtaccagctgagggcggcgtcgtcaaggtaaagtgaggctacggtgattctctcttcctcttacgtgttctgatttgaaagagttggttaattttgaagatccatccaagaggatcgcgaccgtcaaagcgcgggatatcgagcttaacggagttacggtggtttctcgagctgtttgaggaaggttggttctggtgtgcatcacgcatcctgaggtggtccaagatcgaatccaccct

SEQ ID NO: 284477 - DNA, 379 bp, Glycine max
atcttgagggattagtaggttaaacttaaatagcttgttaagcatatcattatatggaatttgctcaggccatttgttcctgaaattgtcaaagtccttataggtagtgtattcggaaggatgtgtatatgtttgtatatagatgttgtcttcaactgcaccttgcaaaagtggcctgaaacatagccggttttgaaccttaacaaatgatcattgcaatcctataatgttgtttgtgaattcactctgattttcgtatgttaatggagaacctatgtgttttagaagaaacttttgttgattctgaagcactgaggttggaaaaggctattatattgcaactaggaaaggttggtgctcctgagttattcaatgttta

SEQ ID NO: 284478 - DNA, 415 bp, Glycine max
tgcgctgagttgatccatacatcgcgctctctcctcatgacgataacttatatgctggcgctttgacgctataaaaccttatattaaaaaatggtgctagattcaatcccatgtttttgctataatgacaaactctattgatctatactctgacaccctatcatggaggaaatataatgaaagcatgagggaacgtttatgctatgcatgacacaaatgcactttacagacacaagagccaggaagatcgtgtcttcttactcacaagcattgggcctcatagttcattcacagtcattaccatggtgccccatgcatgcatttaagaaggtgattggaccttccgatttcccgtgacaaaatgacaagacaaatgcaaggcatgagtgatgacacagtatggatatacatgcat

SEQ ID NO: 284479 - DNA, 361 bp, Glycine max
ttcttggtgttggatgttttttttataaaaaatgtccgacaacggttagattcttttgacaaaaacgccttactcttttatctctcagatttatagcacctgtgaactttgactggattgagaatttggctaggtcttgttggacgagtaacgtgtgacattgagcctagattataataaatggaaaccaagtagcttcctgtcaaattcaaactcgttgatgaaaaactatggccacattaattaagactgtttacaagggcttttgatttttagaagctgatagttgaagttgttaagagaatctaagctcgctcagattctgcaaatcctgtgacaaaacaacagcacgaggtgacga

SEQ ID NO: 284480 - DNA, 425 bp, Glycine max
  unsure (1)..(425): unsure at all n locations
tatattgttattactggggattcagcacacatttatggcttgcgtcggngatagaaaggaatcagaatggatggataggataatatcagaaggagccatcccacttcttgaaccagataattgttcaaatggctgggctacccctcctggtgatgcattcatggttagaggccctgagtattttacaacaagggttaaggttccagctggtgattatatgctcaaacctctcggttttgattggattaaaagttcagtgaaaattgcggagatattaaaggatccaaatagtcgagttaggaatgccattgataacgagtttccagaaggtgataaaccctttgtgtgggccttcaatcttcaagtcccaaccaaggataactatagtgccattgcatattttacaaccaaagagtcagttcttg

SEQ ID NO: 284481 - DNA, 370 bp, Glycine max
aggaagtgtgcgaaggagaaacttcctgcctctattgatgaccacagagaggtacctggagatatgtcgcgggggtcacgagaccttggggacgtccagtggggtgctattgcccaaaaccaagcttgtccaatcccgacccagcccggacatagtcggacagagagaacctgtgatgtacctaatcaggcgagctcctggctgacaacatatatgaggaacaaatacctcaaagcaaggaggcttgtggtggctggccagcgtgtgaaacttgattgagatgtgagatatgggcgtctggcaatcgactaccaggggcgaggtatcgattacgaggcttaataatgaggacaggaagcctagatggtct

SEQ ID NO: 284482 - DNA, 465 bp, Glycine max
  unsure (1)..(465): unsure at all n locations
agatgatttctcaacctcaactgccatcganccacncntagnannaccggccganannnngaanatttagtggtgagggtttgntaagggggagttatgaaggggggagattatggtagtgaggatataaaaagaataaaagatgaaagagnaatgaggttagaggtgggtggttagatgtgaattttggtaatatgaggaagggggaatatggtaatataatattaggttgaaaattgaggataggaggttaagatggtttatggtaatagattaaataggggtgtaatatattaagaggtttgaaaataaagtaaggaaatttaaggagggtgtggtaatagattaagagggtgtgtgaatgattaaaaagatgaatgggttagtggtaattgattataatggatgtgtaattgaatagagaatgtattattggatatttgatgtgtagaaggtatgaaaatt

SEQ ID NO: 284483 - DNA, 478 bp, Glycine max
  unsure (1)..(478): unsure at all n locations
atgaacctgattgctgcatgcagaccnnggcgcaatngcactcggaaccgggatgctatagaggcgactaggcaggcatgctattcttattcccgaggagcaggttaattatatgatgcaacaacgctcgcgaaaagactgagctcactataaaggcgcaatcatttcgtatggagcattttcttgagcaagttaccctggcctggagctcaaactacattggtgagacccaacgagggtactccgcctgagcccacctgtgcgggttgatacccagccaactaacccacaatctctattggtaaagccactatcttctcttgagcgtgaaatacgtcccccatcttcacctctgattatcaattccgatgcaacattgtgatgaaacaccagaccactctgattcaccaaaaggagaaacagctgaacttcctactttcctagtaggaggaaattctgattcgacatctggagaact

SEQ ID NO: 284484 - DNA, 342 bp, Glycine max
  unsure (1)..(342): unsure at all n locations
acaanaaactcagcttcagtgctcataacttttattgctgcaattttgcaacaggggaggtgatctgggaatacataacccaaactctgcaaaggtgtagatttctgattcatggcaagctgagcactaggtagaccacgcatacgttttccttcaagcttttattttcatagatgaaatgaatgcgtggccacctcatggactctctaagacaatacatcatttcttgcctgaattgaaggagatggaagccatttctaatcaaattcctagcctaacggggtcatatcaccaaagctcaccctggagataatcatactctctcatatgctagtcctcata

SEQ ID NO: 284485 - DNA, 375 bp, Glycine max
atcttattgaggcacttaatgttttgcgtgagtgttttaatccaatcacttatgctttcttctggagagatataatataatttctgatgttgtttaattttcagtagaggttcataactcaattgtttgaactttgtggtttttacactgtgattttagagagggagggggaaatgatttctgttgccactttaagaatttttggcaagagggttgctgaaataccctttgtggctaccacggtgcagtgtaaaaagattgtgtgacattttaatgaatgagattgagaagcagttgacttacttggaagtacaggagaatgttctgccttgaagtttgacagttatgaaaaaggacaccaacctgaatttctca

SEQ ID NO: 284486 - DNA, 425 bp, Glycine max
  unsure (1)..(425): unsure at all n locations
tctaaacactcactgccttctcaagataattcttcccaccatcatccaaaacattgttatatctgacatgccgcttcagcttctcacactggataactgtcgcagggtgccatgatcctagaaatcccaaatccacactcctcacctgcaaaattccaaaactttccaaatttcaaaagaatcccagataaaaaaaaaatcactcactcatgctccctactaccaaagcaagtgatcacaagagaaaaatccaaactttgcaaaccaaaaacgacaccgtgttatggtagcctaaaaatagagcgacaaatcaaaaaacactttcactttgcatgcagggtggcgaanaagggaattgaataacgaaaacgacaatgtcatangtaatgtgcctaaaaaactatgaaacgacataagacccaatc

SEQ ID NO: 284487 - DNA, 352 bp, Glycine max
ataacacgcacaacctgcaagagatggctcataacaggccaatcataactatggagcaatttcttgagcaaggagcctggccggaagcgcaacttccattggtgagacccaacgaggctactccgcctgagcccacctgagcaagatgaaccagagccaactaacccacaatctctagagggaaatccactatcttctcttgagcgtgaaagagatcccccatctccacctctgaatatcatcaccgatgcatcatctgatgaagcagctgcccctcctgatccaccaaaaggagaaacaggtgaccttcctacttccctagtgggaagaatttctgattcgtcatctggag

SEQ ID NO: 284488 - DNA, 416 bp, Glycine max
  unsure (1)..(416): unsure at all n locations
tagaaagtgtgcttactaatgttagaatttggatgtanggattaagtgggtctaacttatgtcttatatgtcatcaagaaaggaaactcttttccatcttttttgtgattgtatggatactaagttgatgtggcaattttttattcgagtataaggttcaatacaacatcaattctttcataaccaattgtcgcaacctacccttttgcgggtgtcgcaacatgcccttttgcgggcgagcgaaggcgaggctcacgggtgcgctttccaaaggaggaaagatgcgcggagtcgccaccaacgtttatttgtgggaaacgtcggaaaaaccgaaggaaaccggtcgaaatgaaaattctaagttcgggagttgtatttacgtttcaagaaggtattagcacctcttacgtttgtct

SEQ ID NO: 284489 - DNA, 392 bp, Glycine max
  unsure (1)..(392): unsure at all n locations
atctntatcctcagatccctcttgttggacaagacttagaccaaacaacattattgtaacaacatatttaaaaccaaaacttaatccgcaaatccctcttgtaagactaagtttcaattctgcttcattcaagttctaaggcaacaatacattttccaatgttaaaatcacctaactaggcacacaaatggttgatcagaccaagggcatacaaaatttaagctctgaaagaagcattgaacacaagaaacacaatcaattagatattaaaataattacattagttgctcattagaaatccccaacaagggtgtttagccaacaattacaaaagaaaccctaacaataatgagcttacaaagcctaggtatctctacaaaagctactcatct

SEQ ID NO: 284490 - DNA, 432 bp, Glycine max
  unsure (1)..(432): unsure at all n locations
cccatggaagctcctaatatctcccacactttatggggagggtcattcttggatggccttgattttcttagggtccacttggaccccatttctaccaactaaaaaccctaagaaaactatattatctacacaaaaggtacacttctctatatttgcatagagggtgtttttcctaaggactgaaagaacttgcctgagatgtcctaagtgatcatctaggatcctactatatactaaattatcatcaaaataaacaactacaaatctacctatgaaatcccttaagacatgatgcataagcctcataaaggtgcttggagcattagtgggcccaaaagcatcactagcccttcatacaaaccaaacttggtcttgaaagcggntntccactcatcaccctctttcattcctaattggtgataaccactttta

SEQ ID NO: 284491 - DNA, 391 bp, Glycine max
tgtttttaaaatttaaattcaaatttctaaaagttgctacatatagtttaaacttctggtaatcaattacataccttgtgtaatcgattacaggcttttaaattcaaattcaaaattttcaaattgtttcataaatcaatttagccactggtaaccgattaccagagaggaaatatcatatttttgagaagataattgttcttaaaaaacttttgtaaaatattttctttagccaaacctaggtagcatcaattaaggaattctttctaagatcctaactaagtacatcgttcttcttgcatttctgaattcttgacttgaatcgcgctcatctttggcatcatcaaaacttcatatcatatatgcttctacaacatcaaatagtgcactt

SEQ ID NO: 284492 - DNA, 441 bp, Glycine max
  unsure (1)..(441): unsure at all n locations
taaagggttgtgggctgggatgttaagccataggatttatgctgatcaaataaagtcaatagaacccaaaatcttatttaagaacaacaaagctctttgccatttagaccagaaaggagttggtcgttaagatgtattgtttaaggaactgctttccatttcagtaataatttcatcttattttcgcttcaaatcctatttacaaatatttgttagttaataaggaagaaaaaaaatatggaaacagaatattctttaaaacatagaaaagaaacataatctgaaaagatacatagtgaaattagaaaaataaaaaataaattgataggtagacagagcaaaatgcagccttaaaattcatcataagagaaaacaataaactaacttcagataattntcaaatgcctattaaatttagaattataatatatgcatgcaaag

SEQ ID NO: 284493 - DNA, 391 bp, Glycine max
  unsure (1)..(391): unsure at all n locations
atcttggagcatgcttattacatggagtagatgcaaccaaaataaagcttcattcaaatttaaaattgtggaggtttgaccgagttatgttcaattntcctcatgtcagctttcatgggaaggaaaataacacattactaattaagtgagttttcttgtaagattcagttagaagactaattaatgtggcaccctctaccccgacatacatatagtgaaaggaaacatagaatagtgggagtaacttaaaaagatttacttcacaattcaatataaaacttctcaacggagtaaaggttcacattcacccattaaccaagttaaaacttatcggtaagaatataaaaacatgtttcggctccaaacaaagaccataccggtattataacta

SEQ ID NO: 284494 - DNA, 435 bp, Glycine max
ctcagcttatcctcagatccctttgttggacaggctcatttatacagcccttctaggtttagactaactcaaactaagcttcatcctcatatccctcttattggactagacttagcttacatagcttacgaaagtttagactaatttagcctaagctttgtcctcagatccctcttgttggactagacttagaccaaacagcattattgtaacaacatacttaataccaaaacttaatccgtagatccctcttgtgagactaagttgcaattctacttcattcaagatctaaggtaacgatacatttctcaatgctgaaatcacctaactacgcacacaaatggttgatcagaccatgaacatacacaatgtaagcactgaaagaagcattgaacacaagagacaccttcaattagatattaaacgtattacatc

SEQ ID NO: 284495 - DNA, 388 bp, Glycine max
tttttaggtttggcttgcaaacacatcttgaaggagctcaacgatctacaagagtatccttttacgtcatgcagataagcttctcaatcctttttcctattttttttcctgtcttttttgttgggttgtatgtaacaaaaactattattcgtgattatatatttatatatttattgcaatgtgttatctaatatatctaatgtaaaggagtagtatatggagaaaagatgtagatttgaccgctatgatagagagaaaacaaataaaaaactctctctggtattttttgattattataaagatttgggacttgaaaaaaaatctaaacacaaaataacatgtagatttgattgctttgagagagagaataaaataacaaactctgtct

SEQ ID NO: 284496 - DNA, 433 bp, Glycine max
  unsure (1)..(433): unsure at all n locations
ntntattgacaatttgcataaatatataaaattttttactcgtaatgttttataaaatgatgttttactaattcatgtttacaacaattcattcaaaatttcaaataaatattaaattaaaatgtgctaaatacttagttttctaaaatgatgttttgctaatttatgtttacaacaatccatttccctccaaccaaacacactttaaacaataaacattagtgttgtgtagcagaaactttccaatagaaaggagaaggatgcaagtaagtgaatgaaattttagggaccagaacatatgacatcccccaaatattgaaaagaaaaatgcaaaagaaatccatgattccatgctcagtggaaaaacttanaggaaagcatccacactcaaaagattcatcggaagacatttgaaacccttgtaaataaaagc

SEQ ID NO: 284497 - DNA, 382 bp, Glycine max
  unsure (1)..(382): unsure at all n locations
ttcttgctttgtgagttgattttagttntagtttcactttgattattagtcaattcattcaaggaacctttcaaagaaaaacatccgattgatttttttgattattttattattacttttttttagatattttgattattttattattattttgtttgaagatattttgattatttttttattatttttttgaagatattttgattattttattattattttgattttttttatttaaccgaagttacaacgtgaacgatcggatggattttattttaatagtgattaaacgagattacaacacaaatgatctttaaaattcattttatcaattattaggcgagataacggcttaattaaacggtaaaaagctcgttaaaag

SEQ ID NO: 284498 - DNA, 442 bp, Glycine max
tggacttcctgtgttttgggaacctctccttcctcaggtgtacccaaacccaatcacctggttcaagcatgactttctttctgcttttgttggcttgccttgcatagctcgcatttttcttttcaatttgagccttcacttgctcatgcaacttcttcacatactcagctttagcctgtgcatccttatgcttaaacatagcaatgttaggcataggcaacaaatcaagaggagtcaaaggattaaatccatacactatctcaaatggtgaacaattagttgtgctatggacagcccgattataagcaaactcaacatgaggcaaacaggcttcccaagatttaagatttttctttaaaacaatcctaagcagtgtgcctaaagtcctattgactacctcagtttgaccatcaatttgtgggtgacaagtagtagaaaacaa

SEQ ID NO: 284499 - DNA, 272 bp, Glycine max
gatctatagcctcagatcccgctcgatggagacgacttaaaccacactgcattattgtgacgacatatttaacaacctgacttaatcctgagatgcctcttgtaggactgagcttaaattgtgcttcattcaagctctaaggcaactatacattttccaatggtaacatcgcctaactcgggacactaatgggtgatcgaacaagggcctacaaagattaagctctgaaggaagcattggacacaagaaacacagacgactagatattaaaa

SEQ ID NO: 284500 - DNA, 75 bp, Glycine max
ccggaaagagaactgcattacacctgagaagaaatgttctgtcatggtcactcggacatgcatcttcaaaaggcc

SEQ ID NO: 284501 - DNA, 376 bp, Glycine max
  unsure (1)..(376): unsure at all n locations
ttcttgtcttaaacactacattctttgtcctactaagccattgttggctctaaacaaatcaataagatttgttggaagattatgcactgactaaatatgtgatcgtcttatagacaaatatatcacttaacacttttagtcttttctttcaaggtatacaaggtgtttttgagagcttagtaactatacaagaattttaaaaaaactttataagaaagaatgaaagaataaggtcacacagatgattcgggtattgtttcttcanagcttcttttatatatagccttcatctccaagtacctgttggtgcatgtaatgcttgcattaaatgcacatctgatcgcaaccggcaagtgtaccggatcgcacaagtagt

SEQ ID NO: 284502 - DNA, 413 bp, Glycine max
tgcagatttggccttcgccagtgaaaggatcaatgtgggtccgaaaagaggcaaatttgatcatcctactaggacgactgaaaaaactggggcaaataaagagggtgaggatgaaggagaaacccatgctgtgattgccattcctgtacggccaagtttcccaccaaacccaacaatgtcattactcagtcaataacaaacttcctccttacccaccacccagttatccacaaaggccatccctaaatcaaccacaaagcctgtctatcgcacttccaatgacgaacaccacctttagcacaaaccaaaaacaccaaccaagaagtgaattgtgcagcgagaaagcctgtagaattcaccccaattccagtatcctatgctgacttgctcccatatctacttgataattcaat

SEQ ID NO: 284503 - DNA, 435 bp, Glycine max
  unsure (1)..(435): unsure at all n locations
cggtacctcggngaatcctctataagtcgactctgcattgcatgcaagtcttcataaactttatacaacgaatgacagctctgatatcactatgttacacacagtggcctcagatatcgataagaagggggggttgaattaagatatcaaagactttcctcaattaaatttttaattctcctttttaaaattttcaatgtacctttattatgaattactaaaaagacaattcaaaataaacttctttaatgcaaaagaaaaataacaataactaaaagaagtttaagggaaaagaaagtgcaaactcagtttatactggttcggccacactctgtgcctatgtccagcccccaagcaacccgcttgagatttccactatcttgtaaaattccttttacaatgtctgaaccaaggacaacccttcctttgtgttca

SEQ ID NO: 284504 - DNA, 425 bp, Glycine max
tgcctaattaacctgaaattgagagagaatgattattaaacacacagaatgaaaatactaaggatttattacctatacttaacagaaaatacttataaccttacaaaatagccataaattaagagagtttgatacagttgatacgagttttatacacaaaagttagtcattttcaccgactaacaactcccccaaatttacagttttgcttgtcctgaagcaaaaagagaacaactcacttgtgctcaagtgacaatgacatgcggtgattatgtacgaaggtgtatgctacaaagtgactgattgcatgataagagaatggagtataatgccctcatcacttgtcattcacaaggtatgcagttatccaaagagaagaataaaatgtgacctgaacagatagatgaggttaggcatatgacaga

SEQ ID NO: 284505 - DNA, 380 bp, Glycine max
ttcttgttgataattagctgcgacaactttgtaaggtattgcatactttgtcgtaggagcccacgtgcggtgcttttggcggttgacgcaaacctcatctcatgaataattctactagtaatttcgatatgtcgcagtattcaaagagatacgttattctttttatacaatgcaatattgaatattagtgtttagtagcactatgttttattctttttagacaatgcaatgtgaagtgaaattgtgattgaatattagtgtttagtagcactacgttttaacacgttacattgtcacgtgtgttctagtaagagatgttatcttaagattataatgaagcaagatttttcgtcgctaacttttactttatctacatgcat

SEQ ID NO: 284506 - DNA, 307 bp, Glycine max
ccaactgatcatatccctctttctttggtacagtgttaactctttaactgcacctttggcgtatgtagacgatatagctctaatatgacatgacattatggctatcaaacgtactaccatattactggaccaaaccgacaagatgaaagatcatggcgcttataaaattattccttcgcatcgaggacgcttgttcccaacaaagcatccatctatgtcataagaaactttgcctagatatgctctctgattcaggaatgcctgcatgacgcccagcatgcacacccatggattggactactcgtcc

SEQ ID NO: 284507 - DNA, 348 bp, Glycine max
ttcttcttatccaaggcacattcttggtggtgaagcttcttcttgcatggcttattccctagtggatgtcgcctcctctcacctcttctcctttatcttccactgcatctccatggtggaaaatcaccattgaaggacctcattgaagctcaaagatccagcctccatagaagccccacaagcaagcttccattataagggggcacattacttctcaatgccccaccaagaaaaccatgattatgaggggccaagacattgatagtagccaagatgaggctactactataccctcctctagtggaagtgaagaagccaatgggacagaatctagggaagatatctacc

SEQ ID NO: 284508 - DNA, 425 bp, Glycine max
tgatcaaaacaattatctattcattcaaatccactcaaatcatacaatttcttattcaaatcattctcaaacacacatttcatacaaaacaatccactgcatatcattttcaaccaattcactgttcaaacaagctttttgtacaagcaaacaactcaaagtactaaaatttaaagaactgaaacataaaaactgaaatttaaatgattgaacataaatcatataataactaaaaataaactaaaatgttcaaaatgcacaaatttaaatgtcctgctcctgtgcatgctcattgagatccaacacctgagcagttggtgaatcgtgagagataggctgctctaactcagatgtggatgcagatggtatgacatcatcaggtgtgggtgctggggatcgctctgggatctagtttgtggaagtct

SEQ ID NO: 284509 - DNA, 354 bp, Glycine max
ttcttgccttggtttagacatgattgatacatgatttgggacttgtaggattcaatttgggcaaaattggatgagggaaagtgtgatttcgaaaatctgcactttatgcagaattttgctgtcaaataggtgcagcagaattttggctttgtgcagaaagtgttgtgtatttgctggctgtggaaagagtagtacagatttggttctggacgttttctagcagatcccaacggtcataatgtagatttatgtgctagagacttccagtaaaattttcgagtcaatccaacggttaacgaattggaacgaagagaatattactggggtatttgagtgtgaaaagctgtgatgttg

SEQ ID NO: 284510 - DNA, 400 bp, Glycine max
  unsure (1)..(400): unsure at all n locations
ntgaggatttggtctttgccagtgaaaggatcattgtgggtctgaaaaaaggcaaatttagtcatcctgcttggacgaatgagaaaactggggcaaatgaagagggtgagaaagagggagaaacccatgctgtgactgatattcctatacggccaagtttcccaccaacccaaaaatgtcattactcagccaataacaaacctccttacccaccacccagttatccacaaaggccatccctaaatcaaccacaaagcctgtctaccgcacttccaatgacgaagaccacctttagcacaaaccaaaaaaaacaccaaccaagaaatgaattntgcagcgaaaagcctgtaggattcaccccacattccagtgtcatatgctaactcgctcccatatctac

SEQ ID NO: 284511 - DNA, 374 bp, Glycine max
  unsure (1)..(374): unsure at all n locations
ttcttgaacgttnttgggaacttttttttagagacaacggatgttaacaattaaaaaataaataaaagcgttctgcatgacatattttgggatttaaaatattgcttgtgaacaaattttgttgcattttccttatattttgttctcaagcaataattatttgtgtaaccaagttgttgatatgatttaggtttaattactcatttagtttttatagtttccaaacttttatatgttaatccctatagataataagtgactttttcagtctttgtagtttaccattccgataagttcttaccgttaaaattgtttaacatcgttaaattattgttgccggtcattctttcccagagctccctctcttccgagag

SEQ ID NO: 284512 - DNA, 412 bp, Glycine max
  unsure (1)..(412): unsure at all n locations
tgagaggttggattntagggtaatgttcctaattatacattgagcattttgtttataatctccatccttctttttaatgttggaacaatagcatttgtagacatacctgatttgtccttttgaatatcaagaattcagatatttaacttgagtatttatatttagttgaatagctgagctttcagtttgtatatgaatattcatggttacataactttctatcgattatcaaattctaatttaaaaattgctctctatcaggcctttcatgccctcacattgaagtgaaattntctccttttatcagtcaattgcacttactgatggaagttcctctgtatctgtctcccaatattctcaaactgtggatacctgttaaccatgtgcaggtagcatcaagtgtttttctgga

SEQ ID NO: 284513 - DNA, 383 bp, Glycine max
atcttatctttatctctaccaacaaaaaaaaaaaacccagagtaaatgggacaaaatctgattaatcagactttctaacattagatatcaatattaatattatatatagttaaataatacaaatataatgttaaattaacgtatattgtttaacatattttaaaataaacaaattcattctaaacataatacataattgcttaagagaatattaacgctaaatcatgttaggacaatccaaaccacaacgtgaacaatgttacaaaatgtatcatgttcatttctaatattcaaacctatgcaaattaactaagttggattgaatcaaggtgtgcttgaattattggtgggaaaatacaaaaacatatttgagaataaaatca

SEQ ID NO: 284514 - DNA, 431 bp, Glycine max
aagcttttggcatggttttgttcatatatatttctcctaatattgtgattatattattttaaatattaagctactaccgattgcaaacatcctgcggactaaagtgccgaaatgtatggtggcagcgaggcactactttgagttgttcccatgtgcctaacttcaacatataacctctgtcttgctttctttatgctgctgttaatgtcaaattgtttaaatttaaatgtgcaagctgcttaagcagtactaagttagtcgatgctgtcatgtaaaaatatctaacgggcttttactcatttaacttgaaagtatagcagaatttgagctttgcattagtggacatgcgggatttaaacagcagattgacgacatatttgtggaaatatgttagataataatctatttgattcttggcactttcagtctta

SEQ ID NO: 284515 - DNA, 391 bp, Glycine max
agcttctatatattgttcgttcctaatttctctacaattgcatcacctctcaatgagctggtgaagaagaatgtggcatttacctggggtgaaaaacaagagcaagcctttgctttgctcaaagaaaagcttactaaggcacctgttctagctcttcctgacttttctaaaacttttgagctagaatgtgatgcctctggagtgggagttggagctgtattgttacaaggtgggcaccctattgcttattttagtgaaaaactacatagtgccaccctcaactaccccacctatgataaagagctttatgccttaataagagccctccaaacttgggaacattaccttgtttccaaggaatttgtcattcatagtgatcatcaatcactta

SEQ ID NO: 284516 - DNA, 434 bp, Glycine max
  unsure (1)..(434): unsure at all n locations
tctccttccatggtttattccctagtggatggcgcttcctctaacctcttctactttatcttccgctgcatctccatggtggaaaatccccattgaagtacctcattgaagctcaaagatccagtctccataaaatcttctcaagcaagcttccatcaagtggtaatcagagcataagagcttcaagtaggtgctccttaaacctccattaacctccattgttgtttcttcatttttctccatgtatttcctcacatgtcttgtgttgaatgtttttaacatgattctttagaattttcaccggttaaacttgttataaaagttagatttgatttcctatggttcaaatttcttgttcttgttcttgaaccatgaattgtgttaactntaggttcctttgagttctgtcttgctatttttttgtggctgaaact

SEQ ID NO: 284517 - DNA, 344 bp, Glycine max
atcttgggtctgggttatagcaccccacctgacgtccccaaggtctactgacccccgcgacatatctccaggtaccactctgtggtcaacagataaaagcatgaagttacacccttgaacactgactcatctcaagcttgtaggattatggggtacccatcacatgtggtactatgtggcggccgggcgatggtgcacaacaagttttacacatccacagtgcgcgcataaacccaccatcctctgttgcccacctccaacagagctcacgtactcccacgtagcctgatatcctcgcttctctcaacaccgggaccgcatcaatccttccaagcttgcacaac

SEQ ID NO: 284518 - DNA, 432 bp, Glycine max
  unsure (1)..(432): unsure at all n locations
ntgatttcctttgttccgganacctttcttttctcatgtgcacccaaacccaatctccgggttcgaagacaaccttctttctccctttgatggcttgtttagcatagcttttacttttcctctcaatttgatctttgactctataatgaagcttcttcacatagtccgcctttgcttgaccttctttatgcttaaaaacagaaacattaggcataggcaaaagatcaagaggagttagtggattaaaaccataaacaacttcaaggtttaagaaagaagaatcatcggatgacgccgatcgaacatttcctaatagacatcatccaaatattattcagggattgaatagaagatacaatagccgacatcggccgttgtaaatcagcgactgatatttttcagccgacgttgcgcaatttcttttacaaacgt

SEQ ID NO: 284519 - DNA, 388 bp, Glycine max
agcttccttctacacctgaaaaagaggatgagataggtgcacaaaagagaaagcttcctaacaaaattattcatgtaggtggaccctcttcttgtaattctgacttacagaagccttctatgcctcttgcattcccacctagagtaattccaaacaaaaggatggaagaagtggaaaaagagatcttggagacctttaagagagtagaggtgaccatatctctgctagatgccatcaagcagattccaagatatgccaagtttttaaaggagttgtgcacccacaaaagagagctcaaaggagatgaaaggattagcatgggcagaaatgtgtcagcattgataggtaaatatgttcctcacattcctaagaaatgtaaggacccatg

SEQ ID NO: 284520 - DNA, 442 bp, Glycine max
gcttgaaagcagagctcacaaagacaagagtggtgaatgagaagttggaaactacaatcactagggtcaggaaagattgtgatgagctgaaagacatcaacatgaccacagtcaaagcattagagcgagaaacaaaaagagccagacgggaagaatgaggtaggaacaagtttcgaggggctttgtggggtagcaataacaagctcaaacttagaagggccgagagggacaaattgttcgccctcactcacggatcacttcttactcttttcttttcttttcaaaacacgaaaatggggttgtgtgtgttaccggtaagcagaccagatcgtcaagtattttaaattaaaatggagtgatccgagtattgaacacagggaacttgtggattagacacaagtttgttcaggaatcaggcattgtgtaaacaaacattgatact

SEQ ID NO: 284521 - DNA, 387 bp, Glycine max
ttcttattcattcaatccaataatagattctttctgactcgagtagaaattcatcataaaaaaaggaaaccataaaaaataccaagcaaagcataattgagaaacaatgacactaaacaagtgtgaacggagtttgcttttgtctagagaggcagcaaccctgagcttctttgaggaacaacatagatatacacaaacaatgtcaaaattccaacccacaaggccaaagtgataatagcaacagtgaatgagatgatgatcaaagccagaaatgaagcagcacctccaacaataagcatggcacaagttatcaaaggaagaagatttatgttatgtttctgaagtattgtttcaatgatcaccaagaaggagtatacgacaatgctc

SEQ ID NO: 284522 - DNA, 444 bp, Glycine max
  unsure (1)..(444): unsure at all n locations
cttgaatctttcgggtgaactcgaagggggttcaatgtccattgtcaaatatttgcttaaacaagacaaccccagaagcaatttaacaagacagcactattaagacagtttttttgtcacaatgatgagaaagtcacaaggaacaaacaaccccttcctcttcaacaaccaagcacaaatttgatgactttttgcagtatattaccatcataccctccctaatattcgtaaaccaaatcatccaccaagtgacgtgtttgatttagtttattgagaaatataataatgcattgcccactgcatctgcatgaatcaattgacgcttaagttgtttaaggttaacaagaaatatcgttttgatttctggttatataaaaatacaaataaatgaaagaaaattnttattggtctataataattttatctgccaacaaaattgtctct

SEQ ID NO: 284523 - DNA, 379 bp, Glycine max
atcttgtttatgacccttacctttaccttgatgatcatcaattaccctattggcttattagtatacatatagttaaatagctccctgaaactccttggggtaagatttatcgaatgcctccatttgaattttatactcctttgtctttcgactatcctagcattttattaaccttgcttctttgttttggttttagctctttctaagaagatcccttaagatgctgtaatattaggtaaggaatgaaataacacgaaacacactaacaggggggaggagggtttaatagcgtatatatcaaagatataaacttttgcaatataaaagtgaatatagataacaatatattaaaaataggtcatccactgaagataaagtt

SEQ ID NO: 284524 - DNA, 424 bp, Glycine max
  unsure (1)..(424): unsure at all n locations
ttccagaggcaagctaatttgtacgccctcccgatggagcatttacattcattatcttctttgtggactttttctaagtgtggaattgaaatcctcaatcccttaccgattggcatcctccagctgaagtattaattgtggcaattgactaattcaacaaatgggttgaagccgagctggtagccaggatcaccattgaacaagtacataaatttttatggcaatcaataatgtgcctatttgggatgctaaaaaccttgatagtagacaatggcacacagttcaattgcaatagtgttaaagaatttgtgacagccacaatgtaaagttgatttttgcttcggtggaacaccctcaatcaaatggtaaggtagaggtggccattaaggtgatactaaagggttntaaatcaaactttcaacat

SEQ ID NO: 284525 - DNA, 359 bp, Glycine max
ttctttgagccaattcaaacgacaataactttttactcggatgtctgattgagtcccgtgatataacgagacgctcgaaattgaatgttgaagctctgagcgaattcaaacgacaataactttttactcggatgtctgattgaggcccgtaatatatcgagacgctcgaaattgaatgttgaagctctgagccaattcaaacgacaataactttttactcggatgtctgattgactctcgtcatatatcgagacgctcgaaattgaatgttgaagctctgagccaattcaaacgacaataactttttactcggatgtctgattgaggcccgtaatatatcgagacgctcgaaattgaat

SEQ ID NO: 284526 - DNA, 412 bp, Glycine max
taaacattcaacttcgagcgtctcgatatattactagtctcaatcaaacatccgagaaaaaagttattgtcgtttgaattggctcagagcttcaacattcaatttcgagcgtctcgatatatgacaggactcaatcagacatccgagtaaaaagttattgtcgtttgaattagctcagagcttcaacattcaatttcgagcgtctcgatatatcacgggactatatcaaacatccgagtaaaaagttattggcgtttgaattggctcagagcttaaacattcaatttcgagcgtctcgatatattacgagactcaatcacacatccgagaaaaaagttattgtcatttgtaattgctcagaggttcaacattcaatttcgagcgtctcgatatattacaggactcaatcaga

SEQ ID NO: 284527 - DNA, 388 bp, Glycine max
atttatgcattcttgtccttaattcaaataatatagtagccaagttggaataaaatcattttatccaagcaaagacacattatgtgatatgccataagcaatgtgtgcattatgtaaagtctctccgcttgcaggggcaaggttgcatacatctacactccccaaaccccactaggtgaaagcctcatgcatggggtctcatttatgtacagccttaaaccagaaggggtgaaagtttattttcaaaaaaagacagatagaaccactcactaaaagtaaacaatatatgctatagaccaatacacaaacaaaagcacagcttactcaataacaaaaacattcatattagatatgatagactctaatttcctttaaaatgtcgcgtgat

SEQ ID NO: 284528 - DNA, 420 bp, Glycine max
  unsure (1)..(420): unsure at all n locations
tgtaaaatacaatcaggagctatctcatgctctttaaaaccaaaactcatcttcaaagcttgctttgccatttcatccacaacactgttggcttctctgaccacatgattccaaacctcattttcatattgccctgaaaatctgtgaatctcttcgacaagttgatgctgaggatgacccaaatcacatctcccatcaagaaggtttatagcctccctagaatccgaatccacacgaataagtcgaaaagccgaccatgcaaacttaagaccaagtaaaatggctcgaagctcagcataaagaacactgcctcctccacttttggcctgaaaactgcaaagcaaggaaccagcanaatcgcggattagccctccatagcccgcaagactgccaaattgagcaacagatgcatcacaattc

SEQ ID NO: 284529 - DNA, 376 bp, Glycine max
atcttgtctgtccgatgcagtagtaatgatggcccgagttatgttggggaacggttacgaacccggaatgggtttagggaaagacaacggcggcatgactaacctgataaatgccataggaaatcgtgggaagtatggtttaggctataaacccactcaggcggatataaagagaagcatcgtgggaagaaagagcggtggtcaaagctcgcggttgaggcaagaaagtgaaggaagcccgccctgccacataagtagaagctttataagcgcgggtctgggagactaaggtcaagtgatcgcgatatacgaagatgatgttccgagtacattgtatttggtacgaccatgcccttctgattaccagctgggaaac

SEQ ID NO: 284530 - DNA, 422 bp, Glycine max
tgcttgtggagctttgatggaagctggatctttgatcttcaatgaggtcctttaatggtgattttccaccatggagatgcagcgaaagacaaaggagaaaaggtgaaaggaggtgccatccactaggtaataagccatggaagaaggtgcttcaccaccatgatgagccttggaaaagaagcttggaaggatgcttcaatggagaaaaagaaagagggagagaaagtgagatgggggagcacgaaattgaaggaataaaagagggagagaagtggaactttgaagtatgtctcacaagactctcattcatcaaagttacaataaatgttacacatgcttctatttatagactaggtagcttccttgagaagctttatatagaaaacttccttgagaagcttctttgagaaaacttccttggg

SEQ ID NO: 284531 - DNA, 389 bp, Glycine max
tttcatgcattcttggcacaatagatcacattaagacttgtcagcttagtagattctttgatgtgtgttgggagagacacaaagttgttccatgatacttttaagtctttcaagttaggaaaattgtaaataataacgtgaacatctttttcgaatagatccatagtttggaaatgtaatatctctagttttgggcaagctgaatgatagtttccttccaatcttctaaatgactctcgaagtccatgacatcctacgatttttaatgtgacaaaatttggcaacactaacaagctactaggcaaatgttcgagtcccaaacaaacatccatgtcaagatagttgatacactgttaagctaagtgcagggaaattagaggagtatatgg

SEQ ID NO: 284532 - DNA, 426 bp, Glycine max
tatattataaaaataaattgttaacttataatgattattattatgatataacatgtacacatactattatgattaagtcggttaattaagttataatttgcactctgcctttatctcaaaggagtcaactcaaggtttctttattatccatttagaatgaaacacatataagttatactcgtgagcatgctaggtatccacttttaaatgaaaaaaaagtatagaggtagattatcaattactttttttaaattatattgaataacttaattattttttatagtataataacttaccataaacaaatattaaagaagtatccgtgtctattctatagtctcttcttagaaaaccataatggttggctctttattggaaataataagtcatgatagaaaatcacataaaagcccatttcctcttttc

SEQ ID NO: 284533 - DNA, 368 bp, Glycine max
tcattcttgagatgaggaagtgttgaagggtgaaacttcctgcttttattgttgaccacagagtggtacctggagatatgtcgcgggggtcaggagaccttggggacgtcaggtggggtgctattgcccaaaaccaagcttgaccaatcccgacccaacccgggcatagtcggtcagtgagaacctgtgatgtacctaagcaggcgagctcctggcagtcaacagataaaaggaaaacaagaccacaaagcaaggaggcttgtggtggctggccagctgtgaattttgtgtaatatgtggattgtggcctctggtaatcgattaccaagggtgggtaatcgattacaaggcttaaaaatgaagacagg

SEQ ID NO: 284534 - DNA, 418 bp, Glycine max
  unsure (1)..(418): unsure at all n locations
tggagaagatgcttcattggaggaaatttagatggagagaaagagagaggggggagcacgaaattgaaggaataaaagaggtatagaagtggaactttgaagtatgtctcacaagactctcattcatcaaagttacaacaagtgttacacatgcttctatttatagactaggtagcttccttgagaagctttcttgagaaagcttctttgagaaaacttccttgagaagctagagcttagctacacacacccctctcataactaagctcacctccttgagaagcttccttaagaagattcctaaagaagctagagcttagctacacatacctctctaatagctaagctcacctccttgagatgagaagctagagcttagctacacacccnctataatagctaagctcacccncatgac

SEQ ID NO: 284535 - DNA, 373 bp, Glycine max
ttcttatccttatggcctgcctccggacttcaccccccgtgccaccccggaagatttaagccaagcccctactttcgaggggcaactcccaccttatgaagactatcccgggcaagatgatggggaaggagatacccatcttggccccctgctccacctcaaagatctgtccccacatgaactaccccaaccgaacatagtccgccataccccggcctcacccacacctttaaaagaatctgttcccttcgcggaagataagggaaagattgaggcgctcgaagagaggttaagagcagtcgagggccttggcaattacccattctcggatttagcggatttatgtctcgtgcccaatatcgtcattcctccc

SEQ ID NO: 284536 - DNA, 414 bp, Glycine max
tcatgactaaatctaatcaagaaaataacttatgaatcactggaaatatgtctaattcaagattgagagaaagtcgtgacgattatgtccttcaatctgcaaccacttttgacaaacaaactgttgtaattttaatgtttatttcaaaagaattttttttagacttagttaaagaatattataaattatttataactctcaatttctttgtctcaggttttctttatattggtttaatgttcatttgacttattcaaattcttgcttaatggtttaacgttaaaatgatggtcaggtgcaatttgatgactaacataatttgttttcaaacattggagatttttttaactaacaatatttgctttgaccatttaaaacaattaattgaatgtgaaagcaacttaagtgacttgt

SEQ ID NO: 284537 - DNA, 173 bp, Glycine max
agcttgcaagaggattggtagaggggctctcatctaaggcctttatgtcttagatctcaaggacactcttgattgtaaatttacttttcctgttatcaattcccatccaaattccattccttgtaaaaatgctcatatttggcattctagatttggtcatatctcagacaaag

SEQ ID NO: 284538 - DNA, 107 bp, Glycine max
tgatgacggtggcgccttccggaagactcgtttgtggttcttccggaactttcggaggtcttccggaaagctcccggaacacctctttcggaaagtttccggaagaa

SEQ ID NO: 284539 - DNA, 387 bp, Glycine max
  unsure (1)..(387): unsure at all n locations
agctttcaactgagtagatgacaatactagacggtggttttacaaactattattctaacatcttccattntgaaagattctatattttgactaacacaatattcaacccctttcagtgtgattcatgttatttcatataatagtcgttgattaaatttgaacaaatttaatattgatgaagagttaaattacttgcataaatgtcacttattataaatttgtgtctatataataataataataataataataataataataataataataataataataattaatttttattattattattattattattatagcaacgtttaagaatgagcatgcctatatatatacatatanttttaaaaataataaataaaatatagaacaatt

SEQ ID NO: 284540 - DNA, 436 bp, Glycine max
  unsure (1)..(436): unsure at all n locations
tagaagatctatatatggactaaaacaagcatcctaccaatggtatatttagtttcatagtgtggtctccaaatatggattttgtggaaagtgttgtagaccaatgcatataccttaaagtcaataggagtaagttgattttcttagttctatatgaagatgacattttacttgctaggagtgacttaggtcttttgcatgacactaaatttttcctctcacaaaactttgatatgaaggatatgggtgaagcttcctatgtcattggcatagaaattcatagagatagatctctaataacattaggactatctcaaaaggcctacatagaaaagttttgaaaaaatttaatatgcaaaattgttcatcaattaccgcacctatagttaaagggaaaanttttagtatcaatcaatgtccccaaacaacattggaa

SEQ ID NO: 284541 - DNA, 387 bp, Glycine max
  unsure (1)..(387): unsure at all n locations
agcttctttttttttcataagttaacattaatttcttgaaacagttaaaaagaaataccataaaattaattagtaaaatgggctttgtaagtacgagttttataacatctgataaaacaatgtggtaaatcacgagtcgaacaacttgtttcttcatgtttgtctttcattgtgaccccttccattgctttgatatcctacaagtttctaccttagatagtataggagtaagcaaatattatattatttatctaccagtgtgaataagatctatgttcatgtaaatgcaacattntatttatttctttgttcatatacatgctccaccagaccagagttctttcacatcattatatgctttaccaacacttttgtttatcaccaaaa

SEQ ID NO: 284542 - DNA, 429 bp, Glycine max
  unsure (1)..(429): unsure at all n locations
nttggcacaaagaagaagaagaagttcaaagagattcaaggcttgtaaaggattgtaatgaattgattggattgatagaaagattgattaaaaatgcaaaacaaagccttgcttttatagactcttcatgtctggtcaagaggaccatttagaagagttataacttttagaaaaaacttaaaaccaatttgaaaaagtcaaaaaccatttgatgagttacatcttttgatttattcagaaacaatcactggtaatcgattaccaaatcagtgtaatcgattacacaaagcttttatgtgaaagtatgtgactcttctcttttgaatttgaatttcaacgtttaaaggtactggtaatcgattaccaaaacattgtaatcgattacaactttntgaaatcaattggaacgttgtaaattcagttgaaaaa

SEQ ID NO: 284543 - DNA, 357 bp, Glycine max
atattactagcaactctaagatgagcgaatagacatcttacatactaagaaggtaatgtataaatcaatcctcaccggaatgactgagtaaaaaccatttggtattggatctgaaagcattccaatctgccagagtgctagtgatgctgtcagagaagacagcacatcttcgacaacatgtcgaggagattacttattacttaaggtctcatcttgagaacccaaagaaacagatccaaatttttcaacaaaatctgaaggccaccacaacacattagatggcccttgctctgccggccctgcatcttctcgtgtctcctccatgttcttatatatttagaatgaaaaaccatttcg

SEQ ID NO: 284544 - DNA, 445 bp, Glycine max
tcaagcttctgacaaaatccatcaacacatgcggactccaatttgtggcttactattatgttcctcaattttgcatgatttgtcctcacttctctgccaacttcattctcatcatccatcacaattttcacagctttgcttacactctccttcgtgaaccagccatcttcttcacccttctccacttcaaccccaatctttaagttttcacccatcatccttgcattaactatatgatcaccatctacctgtggcagtaacactatttggcacttattcactagtgcctcagttaatgaaccagcaccacaatgtgttatgaagcaacccactgaagggtgttccaaaatcagctgttgctgtatccatccaccgaggacaattactctctcttcaaccctttccttgaacccttctgggagagcagcttcaagtgtctcaaacc

SEQ ID NO: 284545 - DNA, 379 bp, Glycine max
ttcttgagaatggagaattgcactaagcaatcactacgcatagctccaaactcgaaggtggaggacacatgaacgaaaacacaattcatggggctccgaaaaaggggttgagaatggagaattacactaagcaatcactacgcatagctccaaactcgaaggtggaggacacatgaacgataacgcaattcatggggctccgaaaagattgagaatggagaattgcactacgcaatcactacgcatagctccaaacgcgaaggtggaggacacatgaatgaaaacgcaattcatggtgctccgaaaagaatgagaatggagaattgcactaagcaatcactacgcatagctccaaactcgaaggtggaggacacatgaa

SEQ ID NO: 284546 - DNA, 440 bp, Glycine max
ttgtaggattatggggtacccatcacatgtggtactatgtggcggtcgggcgatgttgcacaacaagttttccacatccacaatgcgcgcataaacccaccatcccctgttgcctacctccaactgagctcacgtactcccacgtagccgatatcctcgtttctatcaacaccgggtccccatcaatcctcccaagctttcccaacatcaaagtaatacaacattcaaacggcacaaactatcacagccaagaaaacagagcaaaggcagaaaactctgccaaaacaccaaccaaaatcacagcttttctcacttaaagaccccagtaacaattgcttcgttccaattcgttaaccgctggatcgactccaaatttttactggaagtctctagtacataagcctacattgtgaccgctgggatctactagcagacatcca

SEQ ID NO: 284547 - DNA, 376 bp, Glycine max
  unsure (1)..(376): unsure at all n locations
ttctatgaagaaatgagctacaaacctacacgctcacattcaattcttttttttataaagctgaacttaggagatttgagaaattctattcagatcgggaagtttagatgatagaagaagaagagaggattcacgccaagggttagtntattgcaattaataagattgcaatgaaggttcataagctctctgaacccagaagtataaagctctgtataaaagagacgaaaaactaactacttaactgaaaataggtacaacagaaaagaaaaatacaaattttgttagaacataacctatgttaatcaaccacccaaactagatgctcccttttacgagactgaactctccaccaaattactagagattggacgac

SEQ ID NO: 284548 - DNA, 331 bp, Glycine max
ggaggagcgccagattgactgagtaacaactgatacaggtggaactctgaagagtatctcataagactttcattcatcaaagttacaacaagtgttacacatgcttctatttatagactaggcagcttccttgagaagctttcttaagaaaacttccttgagaagctttcttaagaaaacttccttgagaagtttctttgagaaaacttccttgagaagctagagtttatctacacacacccatctaaaaactaagctcacctccttgagaagcttccttgagaagctagagcttatctacacacacccatctataaactaagctcacctc

SEQ ID NO: 284549 - DNA, 213 bp, Glycine max
  unsure (1)..(213): unsure at all n locations
atcttctagccaaatggacttaccttgaattaattcctttgatagcccttttgagccttgtttccctttccttgttttgaatctcactacaagccttaagtgaaaaaccatgatatcaccatatccttaaggaattttggagctttggaattgttttgggaataagtgtggggggggttttagnttaancttctttaacttactttaatggag

SEQ ID NO: 284550 - DNA, 424 bp, Glycine max
  unsure (1)..(424): unsure at all n locations
ntaaaagattggctaagattttgttaaaacatattctcttagacaatgaaggaaagctggagttgctgcacatgatgtccaacgttatgtcaaagaataagatcgggctgcacaatgcacaaggcaagataaagtgtcaaatgaagaattgaagctgcaggattcacgatgtcggatataatgtccaggacatcctgcctgaaaatactggaattgctaaaagcattgaagctgcaggatccacgatgtcggatacaatgtccaggacatcctgcccgaaaatactggagttgctaaaagcattgaagttgcaggatccacgatgtcggatacgatgtccaggacatcttgcccganaatactggacatataaatctgttatatctttaacagattattgtgcagttagcaagagattagatga

SEQ ID NO: 284551 - DNA, 381 bp, Glycine max
atcttgaagaggatgctttaatggaggaaaagaaagagagaaggggggagcacgaaattgaaggaataaaagagggaaagaagtggaactttgaagtgtatctcataagactttcattcatcaaagttacaacaagtgttacacatgcttctatttatagactaggtagcttccttgagaagctttcttaagaaaacttccttgagaagctagagtttagctacacacacccatctaaaaactaagctcacctccttgagaagcttccttgagaagctagagcttagctacacacacccatctaaaaactaagctcacctccgtgagaagctttcttgagaagctagagcttagctacacacccctataatagctaagctc

SEQ ID NO: 284552 - DNA, 419 bp, Glycine max
  unsure (1)..(419): unsure at all n locations
tgtccataatagtcaatgatattttttaggatgtttctttcattgtcatctgccctgcaaaatataaaacaatcataaaaaattaaaaggtgcatgagggtagaaacccatatacataccttgattccatgagtgtcagatctcctctcatgatattttattaatgaagaaagtccttatgtacagatgatgagtatgtaggacgacagcgagttactctgcctaagtcctcaccctataacttattgtagacaaaagtcaccacaaattataaatctcttattctccttttgactcattgtgaaaatatattgaaattcaaagattgaaaaagcaactttaaatttaaatggctaaaaaaataatccaaattttaaaaaagaactaagaaagaaaaaaaaactatctntatattcctt

SEQ ID NO: 284553 - DNA, 381 bp, Glycine max
ttcttgtttttgggcaatagcaccccacctgacgtccccaaggtctcctgacccccgcgacatatctccaggtaccactctgtggtcaacgaataaaagtaggaggtctcacccttccccacttcctcacttcaagcttgtaggattatggggtacccgtcacatgtggtactaggtggcggttgggcgatggtgcaagttgactatccacatccaaaaatcacacataaatccaccatccccagttgcccaccttcaactgagctcacgtactcccacttagcccttatcctcgttcctctcaacaccgggtccccatcaatccctccaagcttccacaacatcgcaagcaattcaacatccaaacatcatgaactatca

SEQ ID NO: 284554 - DNA, 425 bp, Glycine max
actaagctcgcacaggggctgaacaatatcttattgacatgttggcttttcatacaggccgacaaattgattgggcacacttagtccgatattgcatgcataaagcattgcgattaaatgctccattgccatatccacacttaggcactctcttccttcaacactttaacatccctcttgattctgaaccttttgtaccaatcaagagatccttgttaattggtgccgctgtgatcgcatcattagggtaccgtaaagagcatgaaggctctcgggcgaaaaaaggtgcacaccccattgatgaagaaggacacttactcagtggagaagattcctctgttcttcataggattatggacaggtacgatggtcttcatacctttgatggtgaaaggatcgatgctctggagttactaatggacatg

SEQ ID NO: 284555 - DNA, 351 bp, Glycine max
ttcttgggcagtccctcattttataagtcagttttgtgaggttgagttaagccctatgcccaaagtctaagatttgttaatatttaatgatattaatctatatgtgttcatattgttttgcatgttctggagcagtgcccaggcaaagcttgtatatgcttgtgagtgaaatccccatgctgtagaagcactccaacataatctacaaacaaattttgtggctgatcggtgcatcatacttgaagtagataatctaatcacagcttccaaggtatagcgagtgtatttaactatgtattcacccagcaccgtagaccgagctctaccgtatcttgcggacatctccatgtt

SEQ ID NO: 284556 - DNA, 423 bp, Glycine max
  unsure (1)..(423): unsure at all n locations
ntccttcgagtccctgcatgtttagccctgatcttggtcataggattggacgaattgatctggtcccacctttaagtttagatggtcaattagggaaagcaattgcatcgcctccaatgtctcctcgaggacttagacagctctctttgcccgtcaaatcattgcatgagaaattgcagaattcaccgcaagtgggtgttatacatttggctcttcaaaataactcagatggcttaattgttaggtatctgctactatgctactatgtttcatgaactcctattcattgtcaatagttatttttgcccgtgtggatggaagcctgatgctattgtccttttatttagttggcacaatgatgtatttgttgtggctgaacctggagagctcgctgagaaatttctacaaaatgtntaaattcag

SEQ ID NO: 284557 - DNA, 378 bp, Glycine max
  unsure (1)..(378): unsure at all n locations
ttcttgcttgtggggcttctatggaggctggatctttgagcttcaatgaggtcctttaatggtgattttacaccatggagatgcagcggaagacaaaggagaagaggtgagagtaggcgtcatccactagggaataagccatggaagaaggagcttcaccaccaagatgagccttggataagaagcttggagaggatgcttcaatggaggaaaagaaagagggagagaaagagagaggagggagcatgaaattgaaggaagaaaaagggagataagttgaactttgagttgtgtctcacaagactctcattcatcanagttacaacaagtgttacacatgcttctatttataaactaggtagcttccttaagaagcat

SEQ ID NO: 284558 - DNA, 414 bp, Glycine max
tctacttatgtggcagggcgggcttccttcactttcttttctccaacgcgagctttgaccactgttcttccttcgcgcgatgcttcttttcatgtccgcctgagtgggcttatagcctaaaccatacttcccacgatttccttgggtatttatcaggctagttatgccgccgttgtctttgcctaaacccatcccgggttcataaccgttccccaacataactcgggccatcattaccgttgcatcggacagacaaggctgcccaaagagggagtccacggaggaaatgttgaccacctcaaaagactggaaagcattttctaacgattcttctgcggcttccacataaggcatggaggatgggcagcttaccaagatgtcttcctcgcctgacacgatgaccaagtgcccctc

SEQ ID NO: 284559 - DNA, 377 bp, Glycine max
tttcttttttcaggttattgtgtaaaaatcagtttgtccaatgggatgatgattttcaagtggcatttgaaaagattaaatgatgtttgatgaatcctcctatgctcatgccattggtgcccggaagacctcttatcctatacatgacagtattagatgagtcaatggggtgtgtgctcggacaacacgatgaatctggaaaaagggaatgggccatctactacttgagcaagaagttcacggcatgtagatgaactaattgttcctagagaggacatgttgtgccttggcgtgggcagctcaccgtttgaggtagtatatgctgagttacactacttggttggtgtccataatgtatcccgtcgagtacatcttcg

SEQ ID NO: 284560 - DNA, 419 bp, Glycine max
  unsure (1)..(419): unsure at all n locations
tgctgcaacagcatgtaactctttntaaaataatttctccaagaacagtggaaatagtaaaccaagtgaaaatgaacagtaccaaagaagaacaccatcttttgcaatttcaaagagctcattggttgaagggtcaataggaagatatttcttgaggaactcatcttgtgctagatagtgatttatatgtgctacatatgatgctttctctgattcacttattgtgtgaagcaatgtggttgtagctgccttgaggaacgctgacgagttctttggactacttccggttctagaattcacaaatgtttggagtttcaagtagacctgtcatcattatattatatcactattacaagttatccttggatcaaaatttaacctgatcacaatagctgaaattgttctagtatgtttctagt

SEQ ID NO: 284561 - DNA, 379 bp, Glycine max
agctttttgtaaactttgtaggatatggacatcccactgagaagcactaggaagtaccttttcaaaaaaacagacttgttgagattaagggagctagcatctttagtaagtgatccagttgattttcaagctcaccacgggaagttgctcagaattcttagagtagatattgaggagggatgcctagagaccctagttcagttctatgacccgctctaccattgcttcacatttcccgattaccagcttgtccccacacttgaagagtactcctacctagttggcttacctgtgccagacaagatacctttccatggttatgagcctacccctaaaccctccgacatcgcagccgctctccatcttataacctccatca

SEQ ID NO: 284562 - DNA, 421 bp, Glycine max
tggatatttgaattacggatcttctatagtgaaatattgaagtattaattcagtgtatggatgctcattctgattactacgaattcgttctcagggccgaaaaggttgttgaggaagtagccatcattgaattgaagacgccaaagcaaagtttgacaccaaacgagtcccaacccccttcaacttctagtcaagaccaaaagtgagaccccaattttatttcccttttttgtttctcttaacccgctgtcatactcataccggtactgtcattgcaaatagattacacttatttttgacacaataatcgtgactcatttttttgtcacaataattggtatgaccaatattttattggattcgcaactctatatctgtttgattaattatttttaatttgcaatagggttgtgttgtatca

SEQ ID NO: 284563 - DNA, 350 bp, Glycine max
agcttgtctcatcgtttatgcgagacggagaccaacatgctagctatcatcgccaagtaccaagaagagttaggtctagccacggcccacgagcatagaatcgcggacgagtatgctcaagtatacgcggaaaaagaggctagaggaaaggtgatcgactctttacaccaagaggcaaccatgtggatggatcggcttgctcttaccttgaacgggagtcaagagcttccccgcttgttagccaaggccaaggcgatggcagacacctactccgaccccgaagagattcatgggcttctcggctattgacagcatatgatagactttatggccgccataattagaaatcg

SEQ ID NO: 284564 - DNA, 389 bp, Glycine max
  unsure (1)..(389): unsure at all n locations
agcttgngtgttgcttatatatcctagctttaaccctacacctaccaccaactgccatatcaagcaaagaaaggaatattagatatatgatgcccatatcttcttcaaccagccacattacacaattgcaactacaaccgacaaccattctatatcacatgtccacctaactttctatcttcaataacctccgtaatatcatgcaaacatgcccccaaagatgtgattgtattaagcatgcaatataacggtgcataacagaatacctttcttttagcccttttaaccatttccatgcatgtattttagcattctcaaagaagaatgaattctacttatgttgcacgtacaatcatttaatcaaattcaactcactcacaagacctact

SEQ ID NO: 284565 - DNA, 426 bp, Glycine max
attatgaataaccaagagaccagtcaaattatgataaaaggataatacatatgtccagattaagagatatgatagatcaccagcttatcacgaaccacaaagcattgccgctgaattgataatatgtaagcctcatggacttcgatgacttcatccaaatactttgctgcagtcataccttgacatagatgacgccatgcgctgtgatatacatgcatacaaagtgtaccatcagataagaacgcttaggtttccttctcacattgcagaactgaaggaagcttgctgaaccacgagcgtatactaatgggaagattgcattgtgtgactagtgatcatcatataaggaattaaaggtcattataagccattacaactagatctagccattatactattacattagctcgccttagtattatttgt

SEQ ID NO: 284566 - DNA, 385 bp, Glycine max
agcttgtgcatcaactcatgtatacatatttctattcgtagattattagaaatccattatatggttttgcatcagagtgaataaaacgtattggaaatttcgttctatgaaaataattatatgtagcgcatatttctattcgttgattattatctattatcaaaatgttttattaaatattaaattgataagtttaaggattttttttaaaataaatattaattagattataaatgagttaaacaagtcaagatcaaactttcattttttttttcaacaagttaagtccaatcttttagttagactctttaaataaatgagtcaagctaaagttattatttgtttttcacaagtcaaacttaaaatctaatattcaacctgactc

SEQ ID NO: 284567 - DNA, 442 bp, Glycine max
  unsure (1)..(442): unsure at all n locations
tactctnttcctgtaatgcctcattgtattcatattaacactaagttttgactacctaaaaagagtatcacatttatgactcatttagttcatcaaattataacacaaataataacataaagttgaagacaaaataaaaatatttacatagtttaatcttcttcctattattattattaaaaatattattattgctctcattattattgtcaatattaaggatatccttattattatggtcatctttcattattaatggtaaaaaaatcatttataagttaaatgatatcatagtaatataagttaaaacaaaataaaaaaaagcattatgacttatagaacttaccttttctccaataaaattggttccattaaatgctgaaaggagtaaaaaacacaaaacaaaacgatcttcaactaggtgcattaataaacaaaatat

SEQ ID NO: 284568 - DNA, 387 bp, Glycine max
agcttcgactttttggatcattcttttcaaattagagattgttcttcttccttcaatcaagcaaaatagaatgtgtttccgtttacttgctgttcgacgggcatcattcacggctagccaagcagcttcaaaatctgtacaagttccaaagggctatcttgcagtgtatgttggggagaaacattcccgaacaccaagagaacattcccgatcctagtgagaaagcatagctagaggtactcttcatgtcatctgccgaacctgcccaatcattatcggtgtagccaagtaattttgaagtggttttggtagtataccatataccgaactcttttgtcctttgagatacctcaaaattctttttgctgctccaaagagtatttgact

SEQ ID NO: 284569 - DNA, 443 bp, Glycine max
ctttgaacttcaaatgctttaggatgtgaatcacttctgttgtcctaaatgcctgcattcatgaacatatatagaagaaataattggagaggaatcgttggctacatgaatcactgaggtgggaggactataagacaagactggttggatgggaccaacagggaggcaagggcatatggacggccttggaggactttctcgctgatgctgattccgtgtgaaataaaatagatgtcaaacatcagaaatatttaaaatgatatatgacctctcgctatccgctgccttataattcatcagccacaaattaccttgcagttgtacttcgatgtaacgtgaacagaacatgtccagagcatgtttacaaaaatatggaatatcaattaatgcatgaatagacgttacgtttcactgaggcacgtctcatttggttacatgtggag

SEQ ID NO: 284570 - DNA, 384 bp, Glycine max
  unsure (1)..(384): unsure at all n locations
tgcttcatgatgaatcaacaatgattcaaaggtattttgatgatagcaatgatgacaacaaaagatgatgacaaaagtgatgaacaaaaagctcaagagaatcaaagaacattcatctcaagaaaatctagaacaagtcaaagagttcaagaatcaagaagaattcaagaactcaagaagaaagcctacaaacaagaatcaagattcaagatctcaagaatcaagatcaagattcaagacttaacagattcaaaatctcaagatcaagattcaagactcaagattcaagaatgaagaaaagactcaatcaagataagtattaaaaagtttttcaaaactttgaatagcacatgagttnttgacaaaacctttaccaaagagttt

SEQ ID NO: 284571 - DNA, 406 bp, Glycine max
tattaatttgaactcgtgcttgtacataagttcttttaattttattttgaaagccgtagtgcttatttttccacccagatactgcagatgctgcagaatttctgccttaaataagttgcagtgcttatttttctaaaagctacagtgcttgtacataagttcaattaatttgaatctactctgcaaatgctgcagaatttctgccttaaccaaattaggagataccatcaatcagcatccccctcaaggcatttctcctcctgctatagttaataattttgtgaaagtaggaggtattactgtccccctctttgatccatttgcttcttgacttctgcctcacaatagattcatgaagagtatccttttcccaaacttcaacttcaaatttcttcagatcttggac

SEQ ID NO: 284572 - DNA, 380 bp, Glycine max
  unsure (1)..(380): unsure at all n locations
tatttttttatgcagaacggctgcgccataatttcaaagaatttattgatcaatatggtgaaagtgattttccaattaaagaaatggttgagaagctaatgacaaacacagtcaaagatgaagagtgtatgttaccagggattcatcctccagaacgggaacaacctttgagttctatatttgatgaagcggaactttcttcttcggtaactaacacattccacttttttatttaggtaaaattagttatttcttctaatttattttttaaattcaaatagatcttttaatttttatgagatataatttgatactctaattctgtaaaatgattcaatttgatcttacagncaaataatagattaacggtattaataaat

SEQ ID NO: 284573 - DNA, 391 bp, Glycine max
tcaagaattagccttatgattttcgcctgaacattatcttattttcaagcgaaaaagaatccttaataagaatggtcaaccggctgagtcggtcaggttagaaccaaaagtccaaattgacctaacccgcatgttgactcttggagacctaaacccgtccaaatggactttcaattcaagttaagtgagtttcaagttagaagggtacaggttaaccagtacaattataggtcttgaaaatcattgttacccccaacttgcaaataacctcaaatacaaagcagaattgcgaatctatgataacaatcattgcagcactaatacattatcttcattatacagtgatacaactaatacccctataacctgagtaaccatttttgccattatc

SEQ ID NO: 284574 - DNA, 367 bp, Glycine max
tattttctactgcaagctgagggtctattaaagctaccagtagcctcactgttatcctctgtgctacaacaggatataatccttttatactacttaggatcaaactaatcttgactatagcattcataaatgtataataatacatttgatgaaagcattaagaaaatctatataacattgttgtaactatattagcgacgcatttggaattaaaatgcgagattggaaggtgaggctttgcacttacaggacttctactgctgctgttacagctgcactccaattctgttcacgctgcagtggtgagggatttaaaagaggataaactataacgcgctaattctaaaaccctttattatgttctatt

SEQ ID NO: 284575 - DNA, 496 bp, Glycine max
  unsure (1)..(496): unsure at all n locations
aggcaccagtagatnnccgttagcaanntcganagccatcagacanacacgcnaccctactcatatctctggcgtgccgcgacgcattcgtactatacactaagtttttattacctaanaggagtatcacatttacgactcatttaatccatcgcaccatgacacatagaataccataaagctgaagactatacaatacagtccacttagcttcttgtcgtacctaatatgcacatgaaacatcaaaatataggtctcatatttactgccaataaaatcgatatcctcatgattaaggccatgtctcattatcaatgggtaaactactagttataagtccaacgatttcatagttatatcagctcactcataatataatgaacgcattatgacttataaaactcaccatatgttcataatattagcttcattaatgctcacacgagcgagcacacataactcaatgattgtcactaagcgttatcacaaaccatat

SEQ ID NO: 284576 - DNA, 565 bp, Glycine max
  unsure (1)..(565): unsure at all n locations
cccgtctctcgcactctctcantcntattatattgatatggagaanaagcgaaccgaggcaagatnnanatancnnnacacncaagcacacagacacngcntttgangccattgagttcatagcatngcanancgcgnaagngactcggaacccggagatcctgatagagaagactccaggcgggccttcctttacttgcgtgaaccattaaatcacggcagaaactatataacaacagccgagctcaagacgacggaacaaaagaacaatcatagatcaaaattaatactacataagaacgaggctgaagattataatcaatacaatataagagaaatgcacaaaaagcatggaatgagaaaaataactggggacaggggaagagaaaaatagatatctcttagatatcaaaagacaggaaccggacaagaaccacgaaaacatatactatagcgaagtgaaaagaccgaatacctgtgagccgtgggacaaatgtacaaactggcaggaaccgtagatttgacaacagccaatttatctatacattatatgcctacaaaaccc

SEQ ID NO: 284577 - DNA, 400 bp, Glycine max
actaagagttgactatttatgaagagtatcacatttaggactcatttagttcatcatattagaacacacataatgacataacgtagaagacaaaataaaaatattgacatagggtaatcttcttcctattattattattaaaaagattatgattgctctcattattattgtcaatattaaggatatcctgattattatgggcatctttcattattaatgcgaaaagaatcattgataggttaaatgatatcatagtagtataagttaccacaaaataaaaaaaagcattatgactgatagaacttaccttttctccaataaaattggctccattaaatgctgaaaggagttagaagcacatagcaacacgatcttcaactaggcgcattaataaacaaaa

SEQ ID NO: 284578 - DNA, 378 bp, Glycine max
ttctttaggttgctcattgactccagattgctgcaaagaaggacatagatctgtatggtgatctgcagaagatcataaaccacagactcttgcaacaggtgcagatgtagatttttgattcatggcaagctgagttactatgttgaccaagacatcaagttttccttcaagctttttatttttagtagatgaagatgaatctgtggccacctcatggactcctctaaggacaatagcatcatttcttgcactgaattgttgggagttggaagccatcttctcaatcaaattcgtagccgcagcaggagtcatatcactaagagctccaccactggcagcatcaatcatactcctctctatgttgctaagtccctcata

SEQ ID NO: 284579 - DNA, 428 bp, Glycine max
tatgctacaaatatttacaatagacctcctcaatctcagctgcaaaatcaaccacagcaaagcaattatgacctttccagcaacagatacaaccctggatggaggaatcatcctaacctcagatggtccagccctcagcaacaacaacagcagcctgctccttccttccaaaatgttgctggcccaagcagaccatacattcctccaccaatccaacaacagcaacaaccccagaaacaaccaacagttgaggcccctccacaaccttccctcgaagaacttgtgaggcaaatgactatgcagaacatgcagtttcagcaagagaccagagcctccattcagagcttaaccaatcagatgggacaattagctacccaattgaatcaacaacaatcccaaaattctgacaagctgccttctcaagctgt

SEQ ID NO: 284580 - DNA, 122 bp, Glycine max
gatgtgttgccatattgatggatggtagagccccacgcgtaatttactgtatatgcaatcttacccttacattgtacctggctagcatgcgtgcaatagttattatcaaaccattgtatgta

SEQ ID NO: 284581 - DNA, 415 bp, Glycine max
tgtaatcaatacttcttgaatggacagtatctgttatgtttatgatcaaggcaaaaccactagtacaaatttaaaagggggcaccataatgtttcacagaatctatatttgatattcagcatttcatcatgaatttgatatcaaaagatgtcatggagagtgacagatgaaaacactgaaaatagagaatcaggccccatgagcaacaaagaaaaactcaaggtgtaaaataagaaacttgaggagctacatcagacaatgaacaaaataacaagaggtgcagatttgaaagatagtggttggcctggctaaaaaattttaaatgataaaagtatatttagatcaagattattcaaataactgacaatagtataggtaagagtaccagaataacagtaatttcatacctatgacc

SEQ ID NO: 284582 - DNA, 375 bp, Glycine max
  unsure (1)..(375): unsure at all n locations
tttctttggctaaattagtctaaactttcgtaagctatttaagctgagtctagtccaacaagagggatctaaggatgaaacttagtttaagttagtctaaacctaggaaggctgtctaaattaagcctattccaacaagagggatctgaagacgaagcttggattgattcagtctaactagggatcgaggtttagtaatttaggctacaacatagaacacaaaagcatgattgattagagaaacatctttatatacatcagctggtttgttagaaagacccaacacctttacgtactgctgtcaatcttacttacttgcattnttactatttttagcctagacttagtttaattctattctaaatcatcaattat

SEQ ID NO: 284583 - DNA, 421 bp, Glycine max
  unsure (1)..(421): unsure at all n locations
tcgaggcgttgactcaagttattttctctgatatttgtgaatgatttgaaccaaagagggaagatctgatctgagtagatgacatcatgggtcaacaagatgagagagaaaatgaaccaaatatgggggaaaggaaactaaataacgagccattaacctggaaactgatgaggcagtggctcatcaagcacgatttggatagacccaaatttgccatgatgcgtcgttatgtttggaagaggattgcacatcaagtacgagtcagatagaccaaagttgatcatgatgcattgccacgtgtgatggaggccggcgatgcatgcaaaaccatgtatgcccaagaatagcatgtgaaagtgcatcttaactntgatggtcctgagaatttgtggactaataaattgacatatacagcagtttt

SEQ ID NO: 284584 - DNA, 474 bp, Glycine max
  unsure (1)..(474): unsure at all n locations
gagtgggtcncttttgatcctttgaattgccctgaacatcgacnaccggaaaancagactcagctggaacaatatcataggggacattgtcctcttgaggggaactagcaaagcactctcaccaaatcaaaaggcggcaccataaagtggcgcaggtacgagtgttgagaatttacatgactacatgtgtgcggaaccactatgatgccctgagtgagtgatatatgacaactctgggaacagagaatcaggctcgatgagccacaaagagaatcttcaagagtatagagtgaaacgttgtgagctacatcagacactgagcgagatcacacgaggtgcagattggagagatattgtttggccagactaaaggcgttgcagtaatataagcctatatagatctagattaatcttaaacgtgcgactatcttgtcaaagtaccaacaaaacaggacctggtgcctatgacctgcg

SEQ ID NO: 284585 - DNA, 329 bp, Glycine max
agtcttgtatattggctaaacatgatacatgtcatggctaggtttgattcacggataaaaagcatgccccacaatatttccatgacactaatgcatatatgatgattcggaaacttcatgcaaaacttgtcatgcatgcatctatgcggacactcatatgactaattattatggtcatgtgatgctagggctcaggattcatttcctctatttttaatcaacccaatgtttccaaaatatgtacttttatcaacttgtgcattcatccgagtccatatcgggcgtccggtatatttcacagcattcacccttcaggcgtagacacattt

SEQ ID NO: 284586 - DNA, 437 bp, Glycine max
tctacctctctgggcaatcttatgtggtggatcttaccttcaaaaccttttgaccttctaccattacctgcaagcaaacattgtgttctggagtaagcttgtcttccacagacaagtcgaaatcgatttttgggtcttcaaaacctaactccacctttctcttccccatgacaactatgcagcttgcggacaacatgaacggccttcccaagattacaaggatgtcagtatcttcagagatatccataaccacaaagtctgctgggaagatcaaatgttgtaccctgaccaacacttcaatcactccacaggacctggtaatggagcggtcagctaattgcacagtcattcgagtgggcataatctccaactctcccagccttctgcacatggagagtggcatcaaattaatgttggctcccagatcaatcatagcc

SEQ ID NO: 284587 - DNA, 386 bp, Glycine max
  unsure (1)..(386): unsure at all n locations
atcttctccttcaattttctataaatagggggagaagtgaagtagaaaagggttcagccccttaggcacttctctctctttcgaatttgctgaggaaaattatttccgtgaagaaaatccaagctgaggcgcttctgtaacgtttccgtgagtaattacgcgaagattctcgaccgttcttcaagattcaccgttcgttcttcgtttttctttagtcttcaatgggtaagtacctcaaaccaagcttttcaattcattctatgtacccgtggtggtccacattntgtttcgtgtatttctattctcattttcatttactttctatacccccttttgacgtgcttaagccatttatttaagtcatttctcgcttaatctaaaaataa

SEQ ID NO: 284588 - DNA, 438 bp, Glycine max
  unsure (1)..(438): unsure at all n locations
tgtaggattatggngtacccatcacatgtggtacttggtggcggtcggtcgatggtgcacaacaagttttccacatccacaaagcgcgcataaacccaccatgcccctgtgagcccacctacaactgagctcacgtactcccacgtagcccatatgctcgctcctctcaacaccgggtccccatcaatgctacgaagcttccacaacatccaagtaaaacaacattcaaacagcacaagctatcacagacgagcaaaacagagcaaatgcagaaaactctgctcatacaccaaccaacatcacagcttttctcacttaaagaccccagtaacaattccttcgatccaattcgttaaccgttggatcgactccaaaattntactggaagtttatagtacataagcctacattgagaccgttgggatctactagcaaact

SEQ ID NO: 284589 - DNA, 319 bp, Glycine max
  unsure (1)..(319): unsure at all n locations
atctgcactttattttataaatctatttatgtacaaagtgaagtaaccaaataactaactaactaactaacttcactaatatatccagtaactactcagaaggaaaggatggacttaatcgattaagcccatctaatctacctaattaaactaattacacacagcaaaacccaaattcgcagcccaattattgaagtgtagtgattcttagtttcaagcccaatttgacccgcgaaatggtagaatgtccaagcttatttgcgaaagataatacaaaattgaatctattnctctgagtctttcaagaactactcacatg

SEQ ID NO: 284590 - DNA, 435 bp, Glycine max
tgctaacccatggaagctgctaatatctcccacacttttttggggtgggtcattcttggatgaccttgattttctcagggtccacttggaccccatttctaccaactacaaaacctaagaagactatattatctacacaaaaggtacacttctgtatatttgcatagagggagtttttactaaggactgaaagaacttgccggagatgtcctaagtgatcatctaggctcctactgtacactaaaatatcatcaaaataaacaactacaaatctacctatgaaatcccttaagacatgatgcataagcctcataaaggtgcttggtgcattagtgagcccaaaaggcatcactagccattcatacaaaccaaacttggtcttataagcggttttccactcatcacccttgttcatcctgatttggtgataaccac

SEQ ID NO: 284591 - DNA, 347 bp, Glycine max
ttcttattattaagtcttataagcctcataggtcggtctgtatatatatttatattattttttggataccaatatatacttctattatttttttgatacaattaattttttttaaaactaacagactttgattacacattactgctccataactttcattcttataatcaagtaagactttaattacaatttaggtgtgagtcatatgtgctcctttatatttctcattatctttattggctttcctattactatgtttcctttttctttaactttcttattacgttactacttcacagcaaaggaatattaaagatttaatgtgaagaaggtttttaaaaggacta

SEQ ID NO: 284592 - DNA, 440 bp, Glycine max
tgtaaaggattgattagaaaagtgttcaagatttgtaatgattgatttttaatgcaaaacaaagccttgcttttatagactcttcatgtctggtcaagaaggccattcagaagagttataacttttagaaaaacttaaaaaccatttgaaaaagtcaaaacccttttgaagagttacatctttagatttttcagaaacaaacactggtaatcgattaccaaatatgtgtaatcgattacacaaagcttttgagtgaaacaatgtgactcttcacttttaaattttgatttcaacgttcaaggacactggtaatcgattacaaccaaaacattgtaatcgattacagccttttgaaaatatttggaacgttgtaaattcagtttgaaaacattttcaaactcattttgctactggtaatcgattacaacaatatggtaatc

SEQ ID NO: 284593 - DNA, 381 bp, Glycine max
ttcttaacaaagtcaatgaaagaacaacaacatatcatgtgcttcattgttatggttatcttaatcatcgtttcaatattttaaaaaaattatatataaacataagattaaatacttttttattttttagatttaattttattttctaaatattcaaaaaatactttgatttgttttcatatttttattaaataatttatcatatggcattatcaagttaatgttccaagttagtcttacaattatatgtatttcattgtttataaaattttaaaacataaataataatagatatcgatactaaataaataaaattattttataaaatatattatatatttcaatcatattaatcatagttgtcatcaatatatgtataca

SEQ ID NO: 284594 - DNA, 406 bp, Glycine max
  unsure (1)..(406): unsure at all n locations
taccctaacaaataacaactcttattgcaccacatgacctttgcaactcccaacacagaatcacatccacaccccaccagatacccctacccccaaagtctgcttctacgagtattcagtaattatttgattacacgtgtgcagaactctttgttgccaaactttattatttggaacatttttaggaacatcacatatgattgaacatgcagaaagagaatttttaagattctagagtttagtcatgttgaaatgaaattgaatattgagattttaaacacatccaaaaatgtggaatnttttctttataatactaatggtctagtggtaaattatcttttattattatattctttatattaaaagtaggactatcataattctagtaatataaaaatttgatact

SEQ ID NO: 284595 - DNA, 375 bp, Glycine max
gtctttcgaatcggctatcagatcaatcattggtcgggactgaatcacatttaaaggtctttatccctccttaaaaatatattctgtgaaaatcaaactcacatatagagaatatgtgcgtgcgtgtgtgtgtgcatatatatatatatatatatatacatatatatatatatatagatatatacttcatatgcatagacgtttctttcgtggtggacatagagtcgcccaaacacacatgtgcctgatgatcaacattattgagaggagagatagaccaactaggatatctcgtcagattgaaaccggttatcacgaccggatcgggggtcttttgagagcgagtcacgagcattgtaaagacgaattagtaag

SEQ ID NO: 284596 - DNA, 378 bp, Glycine max
  unsure (1)..(378): unsure at all n locations
tgcttgaagacatgcaacgaatgtaattatacatgtatatttcatgtgcttttgtgctacgagcaacactctgcctcaagacatttccaaccttattacaaaaggtgcttttgcacataatattgtaaaaattgaaaccagttattgtaaggattaatagaataaaaatgcatcatcgtgatagccataaccaaatgacaaattctaaaaggtgatgagcttcacttctcaaaaaaactaacataactttcaggcattatagtcgccatttggcagacataaaataaattaagtaaggaaatcataaagcagcctcgacattaataaataggaaatatacattanataatgatatgttacctcgttgatagcaagcac

SEQ ID NO: 284597 - DNA, 376 bp, Glycine max
ttcttgtaggattatggggtacccgtcatgtgtggtactaggtggcgatcgggcgatggtgcaaatcaactctcccacatccacaaatcaaacatgaacccaccatccccagttgcccaccttcaactgagctcacgtacccccacgtagcccttatcctcgttcctctcagcaccgggtccccatcaacccctccaagcttccacaatatccaagcaattcaatattcaaacatcatgaactaccctaaaccaagaaaacagggcagaggcagaaaactctgcccaaaacacattccaataccacaactttccctactcaaataccccagtaacattctcttcgttccgattcgctaaccgttggatcgactcgc

SEQ ID NO: 284598 - DNA, 419 bp, Glycine max
  unsure (1)..(419): unsure at all n locations
tgtagaatggctagacatgatacatgtcagggcttggtttgtttcaagggtaaaaagggatgccccacattatttccatgacacaaatgcaaaaatgatgatttggaaactttatgcaaaactggtcatgcatgcatctatgcggacactcaaatgtcaaatttttatggtcatgtgatgctagggcccaggattcatttcctctattttatatcaacccaatgtttccaaaatatgttcttttatccatttgtgcattcatccaagtccatttcgggcgtccgggaaaatttcacagcattcacccttcaggtttacacacattntttcaaaaattggttatgatcaatgaatttttttttttttttttcaaaagcatgttggcttttcagctagacaacttatttttcttttttctc

SEQ ID NO: 284599 - DNA, 378 bp, Glycine max
  unsure (1)..(378): unsure at all n locations
ttcttttattctctcccccaaaggttgacccataattgggacaactttactatggtgtatgctcgatgctgtattactaaaagacaagcccccacatctcacatgttgtccaagagtaggggtgttcaaattaacttgttataaaaaaaattaaccatagatgtatataaccaatttcataataattggataattaaaaatatttataagtgttaactaatttattggttaagttaaagttgggttatttaatttttggatatgcctggatgtatatttgataaccggctatgataaaagagatatttgataacagataataatgcttanaacttaatacactatgtcgcttcttctctttggtatgcataacatgtt

SEQ ID NO: 284600 - DNA, 424 bp, Glycine max
ttcttccacttcatgtttcttgtggtgtctttcttcatgctacagcttctgcccaaaattcttttggtagcttcttgcttttgagcatgcttcgagccatatcaaggattgttctatttttcctttctgtcacaccattctattagggggatcttggaactattaagggacatctgattccattctcttcacagaactctttggaagggaattctcctccttggttagtactcatggctttgatcttttgactactttctttctctattatagctttgaacttcttgaaggcggaaaagactttggattctttctttaatacatatactcatgttttgcttgagaactaaccactgaaaaggatgacataggcacttttatctagtgagcatggcttgattggcccacagacgtcaacatgtat

SEQ ID NO: 284601 - DNA, 356 bp, Glycine max
tttcttgaacatcatttgttgatttgattcacttgtctcttaacaccacttgacaccaatcataaacaaagggagttttgtttgcaccataaacactattaaaaaatactgggaactggactgctaataatacagtagaaaaatctgctatactgcaaattttgttaaattcttgaaaaaaaaacaatactcaaatttacccccaccacattaacaataactgatacaagatgtagaatttcatatgttacagaccatatggactgttgaccataatgagctttatcatactatagcatttaacagaacttgaccagatgctcgagtaccacactactcatatgatgctaattcac

SEQ ID NO: 284602 - DNA, 424 bp, Glycine max
tagcacgcatggtgtttatgttggtggaaataattttggttctggcctttctgtcatcttcagggtccacaccatcagggagagacaccaactttatgtgtgagtccatgatgactttgtcattcccaccaccacttgcactcttcagtttttcgtagttctcatctgaactcaagagggtgattttgcagccatatttggccaaaacctgtgagaactgaagaagggggttcatgtgccctaggattgggtaaggcattgcaagaaaatgtgagatacccatcataacggggtgagttggaatcttgcaagtgaagcaaaatttactggtgatacttagaacaatagcttctttgtgtaattcgaggttgcgtgaatgggttagttactttgtggatatatatatggacctgaatgctagctg

SEQ ID NO: 284603 - DNA, 369 bp, Glycine max
  unsure (1)..(369): unsure at all n locations
ttcttgtactccaatcattcataaacctgtttcaaacatttcacataaatattgttaatggtatattttaaccaacttacatcctcagttaacaaatggaacacctaataaatcaaatttacttacattagccacaactgtagtatggatatgttcaaacacttgtcacctaaaataaggtcactaacatctgtgtgtgtgatgaaaaagccatctttgacattaggtatcccaaatttttccccatcccatgccaactcaattggcttttggtaaatatcaaacaagttctttaccaactcttccaatggataaactacagccactacattgtccattntagcacatttaaccggtatgggcaaacgc

SEQ ID NO: 284604 - DNA, 417 bp, Glycine max
tctttgcgaaaacttccttgaaaagctatagcttatctaaacacacccatctaaaaacaaagatcacctccttgagaagcttccttgagaagctcgagcttagcaacacacacccctctaataactatgctcacctccttgagaagagaagctagagcttagctacacacccctattatagctaagcgcacccccctgacaaaatacatgaaaatacaaaaaaaaagtccctactacaaagactactcaaaatgccctgaaatacaaggctaaaaccctatactactagaatggccaaaatacaaggccaaaaagaaggaaaaaacctattctgatatttataaagaagagttgatccaaccttgacccatgggctcaaaaagctaccctaaggttcatgagaaccctagggccttc

SEQ ID NO: 284605 - DNA, 376 bp, Glycine max
  unsure (1)..(376): unsure at all n locations
ttcttattttataaaactatcactctcttttatttattattttttttcttataaaataatatatgactgacaattattttgacaggggaagtaatataaagatcacaacaataaggatcaaccttgagtctctatgtaaactatcaacttttgtcactaggccggacataatggattaatatgaaaaacatttcataccaaaaatttagtatttcaaaaatatgtttcttgccttgcaattaaaaaattatggatttatttcattaaaattttctattaaatgcgtaagagaacatgagaataaactaaactcataagctattgtagttactttgtataattacactctataattgcaacttanaaagacaccaca

SEQ ID NO: 284606 - DNA, 423 bp, Glycine max
  unsure (1)..(423): unsure at all n locations
taaactaataagtgaaagcaaatgaatgattttatatctcacacatgcctttaagcaagaacccttttagtttcaagggtaaatagtgcataggcccaccctacctcatgcagaagttgaaattaatcttttaccaacttggaaaaatagagacaaggatcaaactatagaccacatgatcataaatgctctaataccatatcatgaaccaactatcctaaaagattactttgttgggtaaaaacatttaaatgcttttatatgtaactagagtagcaacaaagcctagggaaaaaaaaggcaatccaatctgaatgcaaatgaattaaaaaggaaaaagatcgaactaccaaaaaattatagcagaagccaacacatgtcctattttgaacagattntcaattacatactacggataaaaaa

SEQ ID NO: 284607 - DNA, 479 bp, Glycine max
  unsure (1)..(479): unsure at all n locations
cgctcacgcncnncntttgaacctttgattctttgcatgcanagcgncannnnnaactcnngacccggcgaggcgatatcagtagacctgaattgcaggctttcttgctttctctgcangcatactagagccgtgacacacatttcgcctaaatagtgtttatggaatataacaaccaactgacatttctcagacaacgaatggagacacctaatcaattggatttacttacaatatccacaactgtactatggccttgtgtgaacacgcttgtcacctcaaagttcgtcactaacatatgggtgtgagacgaagaaacaatgtttgacattacgactcccatacatcttccctacaatgcaactatattggcgctaggtaacatgaaactagtactgtccaactcttcccatggtgaactacaccactccattgacattttaaccatttaaacggtctgggcaaacgcctttgtgaat

SEQ ID NO: 284608 - DNA, 350 bp, Glycine max
caagagacacctgcttgagacacctccttgagaagctcgagcttatcaacacacacccctctaataactatgctcacctccttgagaagagaagctagagcttagctacacacccctattatagctaagcgcacccccctgacaaaatacatgaaaatacaaaaaaaaagtgcctactacaaatactgctcggaatgccctgtaatacaaggctaaaaccctatactactagaatggccgagatacaaggccaaaaagaaggcaaaaacctattctgatatttataaagaagagatgatccaaccttgacccatgggctcaaaaagctaccctaaggttcatgagaaccc

SEQ ID NO: 284609 - DNA, 518 bp, Glycine max
  unsure (1)..(518): unsure at all n locations
cccacccccgctccaactttaaaaaaaaggaagtgtttaaccccgctgtatcatcnacaaacaaccacannngcctgagcatgaatcttcgaaaccaaggcgaaacgactcgcaccgggatctataagacgaccgttgctgcattcttgaacaccagcgagaccacgtgcgagtgaatacactgtgacgagatggaatacttagaatctaaccacgagtgacaggtagtataactaggacctggaagcaaacagaaggtcgtaaatgaacctcgaaagagagaccaaaaccgaatgatgctgtagaacaatacagtgctcgcatagtagacaaaggcatgacgctaggagagagagtggactacactcacaccactgaacgcagcacgaaaagaacatatatacgggagctaaatatatggtgacactcacagcctatgagtacaccaaatggaggataaaaaagtatactaaaaggagaaccggtagaagatatacatacggaccaaccagaccgcc

SEQ ID NO: 284610 - DNA, 322 bp, Glycine max
tgactacaccgtgattctaagacttagtctctcttcaaaatttctgagagagcttaatcttcatgggtgttcatctctaaaggaaatctcactggaatgagaagacatgaatacattgaatatatctggcaccactatatgtgcattgtcgctatcaatgtcatctctccccaagcttacatatttggatttaagtgattgtagattgattgagagacttagccttcactcaaaatctctctccaaacttaatctatgtggttggccatctctctcggaaatctcagcggcgcccgaggaactgacgaatatctatttgtat

SEQ ID NO: 284611 - DNA, 191 bp, Glycine max
gacatgacattcagcaagtatcctctctgtgcaaggttgaagtgcaactgtccaacctcagtttggcaataattgcaatgtgatcgcctaccatcattcgtaatactctagtccacagatcacactatatggccgatggcactctatgctcagaatcactgtcaggtgccaactatgctaaaatattaccc

SEQ ID NO: 284612 - DNA, 385 bp, Glycine max
  unsure (1)..(385): unsure at all n locations
agctttgagtttattcaggcgacaatatctttttactcgtatgtctgattgagtcccgtcatataacgagacgctcgaaattgaatgttgaagctctgagccaattcaaacgacaataactttttactcggatgtctgattgaatcctgtcatatatcgagacgctcgaaattgaatgttgaacctctgagcgaattcaaacgacaataactttttactcagatgtctgatatagtctcgtaatatatcgagacgctcgaaattgaatgttgaagctctgagcaaattcaaacgacaataactntttactcggatgtctgattgagtcccgtcatacatcgagacgctcanaattgaatgttgaagctctgaggaaattctaacg

SEQ ID NO: 284613 - DNA, 432 bp, Glycine max
tcaacattcaatttcgagcgtctcgatatatgacttgactcaatcaaatatccgagaaaaaagttaatgtcgtttgaatttgctcagaggttcaacattcaatttcgagcgtctcgttatattaaaggactcaatcagacatccgagtaaaaagatattgtcacctgaattggctcagagcttcaacattcaatttcgagcgtctcgatatatgacgggactcaatcagacatccgagtaaaaagttattgtcgtttgaatttgctcagagcttcaacattcaattttgagcgtctcgatgtatgacgggactcaatcagacatccgagtaaaaagttattgtcgtttgaatttgctcagagcttcaacattcaatttcgagcgtctcgatatattacgagactatatcagacatctgagtaaaaagttatt

SEQ ID NO: 284614 - DNA, 389 bp, Glycine max
ttcttgtatttgttataggaaggagtgctagcaaacagcggcactttttctcattggttgaaattcatgttgatctcacaaatcggagaacaggacttaccaaataggaaatgaaacttacatatttagtggacctacatgaatttcacgggttaaagaagtatattagataatgtgttcctagcatttctcttgttatacttataatgcctatactacagtttttgtttggaaaatgtccaggaacaccttgcaagatcccttatggccgtgggcacattcctggcttcatcagccaagataatataagagttggggacatcatcatcaaagatcaagtcagtattatgactctaattagtactgtgattggttgggctttatgtgct

SEQ ID NO: 284615 - DNA, 433 bp, Glycine max
  unsure (1)..(433): unsure at all n locations
tatccaaactgaaacttcaacaaattaggcactgtctaattcgttatattttcagtacacaaaatcaaagtgatcaattctaaaagttataacataaggtacattgatagttccatccataaagggtttacttaaagttgcggatctgaaagtggtccagccatcaacgacacttctgttgccagtaataactgtaacatcctttccatcgccaaacagaacaatattggtcttataacttgggatttcaacattttcctcgtaagtcccttctttgacatagatcactgtcctaccagcactgtcatttggagcaaagttgatagcctcagtgatgaagctaaagtttcccgttccatcagcagccacaacaagctctcctccatcattgctntgcaagagacggcgaacggttttcatcgacaaccacaac

SEQ ID NO: 284616 - DNA, 386 bp, Glycine max
tgcattctttgtcttctttggatgctgacttgtggcaagaagccattaatgacgagatggattctttagaatctaacaagacctgacatttagtagacttgcctcctggttgcaaaccaattggttgtaaatgaatcttgaaaaagaaactaaaacctgatggtactgtggataaatacaaggctcgccttgtagccaagggttttaggcaaagagagaatgtggatttcttcgacaccttttcaccagttactagaataacatctattcgggtgctaatatctcttgtttctattcacagtctagtagtacaccaaatggatgttaaaattgctttattaaatggtgaattggaagaggaaatctatatggagcaacctgaaggg

SEQ ID NO: 284617 - DNA, 421 bp, Glycine max
  unsure (1)..(421): unsure at all n locations
tctcaaggaagctacctagtctataaatagaagcttgtgtaacacttgttgtaactttgatgaatgagagtcttgtgagacacaacttaaagttcaacttctctccctttttcttccttcaatttcatgctcccccctctccctttctctccctctttattttcctccattgaagcatcctctccaagcttcttatccaaggctcatcttggtggtgaagctccttcttccatggcatattccctggtggatggcgcctcctctcaccgcttctcctttgtcttccgctgcatctccatggtggaaaatcaccattaaaggacctcattgaagctcanagatccagcctccatagaagccccacaagcaagcttccatcaagtggtatcagagcacaagagcttcaagtaggtgctcctta

SEQ ID NO: 284618 - DNA, 377 bp, Glycine max
  unsure (1)..(377): unsure at all n locations
atctttgatctaccaccgccaccatcatcttagttntctatcatgtttaatattattagtactttgatttctagccgtgtatttggctatattattatgacatttgaacaatttagtatttcttttatttgcataatatgattgaacaattatgaattatgctttatgactatgtggtttttatatatttgatatattcatgtttcttgcttcatgattggattagatttttccaatgaatgtcttgtgaatgattagtaatatatgtatgttttatatttgttgcacactttggctttttgttgatgccaaagggggagagaaataggattaaatcaagaactcacataagaaattaacttaatttcaagtgaagc

SEQ ID NO: 284619 - DNA, 422 bp, Glycine max
  unsure (1)..(422): unsure at all n locations
ntgtgtaatcgattacactattttggtaatcgattaccagtgattgtttctgaataaatcaaaggatgtaactcttcaaaaagtttttgactttttcaaattggttttaggtttttctaaaagttataactcttctaaatggtcctcttggcaagacatgaagagtctataaaagcaaggctttgatttgcttttcaatatacttttccaatcaatcttataaaatcctttacaagccttgaatctctttgaacttcttcttcttctttgtgccaaaatctttccaaagttttctggttttctaaaccttgaaaacttgtgccattcatcttttcattctcttctaccattgccaaaaagaattcgccaagggctaaccccctgaattctttttgtgtctctcttctcccttctccaaaaga

SEQ ID NO: 284620 - DNA, 377 bp, Glycine max
  unsure (1)..(377): unsure at all n locations
ttcttacatatttaggtttaagtgactacacagtgattcaaagacttagtcttcattcaaaatttctgagagaacttaatctcaatggttgttcatctctaaaggaaatctcagtggaataagaggaaatgaatacattgaatttatctggcaccactatatgtgcattttcgctatcaatgtcatctctccccaagcttacatatttggatttaagtgattgtagattgattgaaagacttagccttcactcaaaatctctctcaaaacttaatctaagtggttgttcatctctcttggaaatctcagtggcgtcagaggaaatgacaaatataaaattgtattaaatgctaagagaacttaatttanaagattgt

SEQ ID NO: 284621 - DNA, 425 bp, Glycine max
taacccttctatagatcatgttaaaacacaccattatgtttgtgcaattaaggaaatactgcaattatttgaagtggtgtcaatcttgaaggtgaactttcataaaatttgtttggcaattatttcaagtgatgtctattatcatcattctactttataaacatattttcatatatggtgtatagcaactataattagaattactgtaggttgggaaaaatgaaaatatatattctacttgcttgttaatggcttaagtgaggctacaaagatttttccctttctttttattcccctattttttcttgcttagttctatgttactttcattttggaaatttcttttattaatcttctaaaatatttcttacagaatcatgggtgatgttctacccttcaagtcttcaagagttaagattgagatt

SEQ ID NO: 284622 - DNA, 379 bp, Glycine max
ttcttgaagcattttttacaacagagagtttcatctccagatcaggtgttgattggccaaactgctaggctatcaatttgaagttaagtacaaacctggcttagagaatagagccgctaatgctctgtccagatgtcatggtgaggtagaaatgaattctattatttcttttcccttgtgggctgatagacagaaacttttggatgaaataactaatgacccgtacattcaaaagttactgaaagaagtgcaggagtctcctgatgttagacctgagtttcaggtgaaacatggagttttactttatcatggcaggctggtgatttcccccgaatcaccctctattccttggctattggaagaatttcatagtactcct

SEQ ID NO: 284623 - DNA, 424 bp, Glycine max
atacctttcatcatggcatgttgacataagctctttagttgagggtaaaatttgtcaaaaaagaaataatattcgacaaaaatataagagtttgagataaaatttgtcaaataaataatattatgatcttattaaaatgtttaatggggcttaattttaaaaattttctaagttttctaccataggagctctttttttcaccccatccatgttgtcacatgtgggtgaaaagaggaaagagagggatgggatttctcttgctttaagcataacgggccaaagtgggaggcccacacgaatggttattagctcagtagtaaagtgtgtccttgataattgtgtctgcttggagtggagtgagacatgtcattgaatagcaaggagatagccacttcgttatgaaattagaaaagttaagagccct

SEQ ID NO: 284624 - DNA, 363 bp, Glycine max
ttctttgaggttgagttgcttgcagctatcgcctgtcactggaaagggaaccttctctgtctaactccaagaaaaacaattactagggtttatactttatactaaggcactttctatcgtggacccccccacatgcagaggcttccccatcccaagttcaaccctctcaagaccaagcctcgaccactgcgacagaatcagttatagatccaattgagcagaaaattcaagtagcaaaacctctaaaatcattgtcataccctaatttcgtccggggattattatttgatgctatacaacctttgattggccgcttcgagatacttggcaccctttgttacacaatatgtgaagtcccgagac

SEQ ID NO: 284625 - DNA, 422 bp, Glycine max
  unsure (1)..(422): unsure at all n locations
tgtgcctcttcacgtccggaatatgaatgtagcttatagatccaaagacccttaggtgctttgctgatggcttcttcccgttccaagcttcaattggagtcatgtcttttacagacttagttggacatctgttgagtatgtaaacaacattgtagattgcttcagcccagaatgtgttaggtagtcccttctccttgagcatcgatctagccatttccataactgtgcaattctttctctcggacactccattttgttaaggagaatatgcgactgtaagttgtcgctcaatgccttcatcctcacaaaatctttcaaactcgcgagaggtgtactctntgccgcgatcacttcttagtacttttatccgttttccactttgattntcagcaagggccttgaactttntgaatactccaaag

SEQ ID NO: 284626 - DNA, 511 bp, Glycine max
  unsure (1)..(511): unsure at all n locations
ccctcccgcctctggatctaataaagggagttccaaacgactatgcatcacatccgccccgacncatgagcttgatgatccttgacccacagggcagtgactcgtagagcgaaccaatagatgcatttggggcattcactcacaaggagatgcagctgcgttcgagacgtaaagcagatcacgataagcacccctagacaacaagacgtgaaggtgactagccaactatgacagaagaaacaataagaactactgtacatgcatagaacgaatgtgcaaccatggatcaagcaacatgaataggcggataggaataacaccgacaatacatggttctgaggtgcatgatgggacaacattagtgcaagcaatctcctgagaagggaaaggaataaccgcatgtcatatgcttgatgcacactgaggctctatggtcgagccttagggcgagagaaatatgatcaaaccgtgaactcacataagaagatatacttagttcaagtgcagcccg

SEQ ID NO: 284627 - DNA, 162 bp, Glycine max
aagcaaaagacatgcacacgtaactagttatgcgtagatgacagtgctactatccgctatagcaccagacccactccagcgtatggtctatacaggcgttattataatgcgacactattgcctttgcacagttattttccccatgagtgccaatgatattat

SEQ ID NO: 284628 - DNA, 472 bp, Glycine max
  unsure (1)..(472): unsure at all n locations
cggcacacgnatgaagcattgattgcctccatngacatnccgcnaangacaccgggatactctagagatctacctggaggcatgcgtttcttgctttctttatcgagcgcccgaatagagaggaactcaatatcacgtgctgaatggacaaactggtaggctgtcataccgcagaatatcaccaacccgtcttaaacagattagcctgtaatgctctgcccacatgtcatggggaggcacaaaagaagtctatcaattcgtttacctcgtgggctgatacaccgaaactattggatgaaataaccaccgacccgtaccctcagacgtaactgaaacaagtgcatgagtcgtccgatgtcagacccgagtcatatgtgacacatggagaattactttatcatggcatgctggtgaattccccacgaatgccctctattccttggttattggtagaattccctacctcctcccc

SEQ ID NO: 284629 - DNA, 493 bp, Glycine max
  unsure (1)..(493): unsure at all n locations
gacactgaccccagtgaagcgttgaanttgangtgttgacatccacaacnttnanaatatccagacctcagtaacatctgactattatgcctacacgattttctttagggaggcaagacgcaagaaggagatgggatcaccttcgcaccaacagctccacacacaatcctgtctctcaaaagtatgatgaagctccccaaaaagatctagagagtcctcgatatcgaacgatgtatctctgagccaccataggagaccttttttttaccccatgcatgctgacagatgccggtgaaaacacgatacacacgcatgggacttctcttgctttacgcatatccggcctacatcgggaggtccacagcaaggtgttatcagcttacccaatatattgagacctgtttaaatgtcgtggcttagacctgacgcaatcaagtcactcataagatcgagaggacgccttgcgatacaataaacaatcacgaggccctct

SEQ ID NO: 284630 - DNA, 305 bp, Glycine max
  unsure (1)..(305): unsure at all n locations
agcttgtgttttactcaacatggatatgcatttgtgcttgtgatgcaagaaaattttcctcgacgcaccccaactcatcaggtcattatgattacttgtaaactttttgggttatagatataaatagaattctaatattcttaaattttaattcataaatgtacattaacagaatttanaaataaattataatatagaagacactatatggaaaatgcatggattccatatggaagtggtaacagacagctgtatgactctactatttactaattactatatgaataaactctccccttgcactc

SEQ ID NO: 284631 - DNA, 435 bp, Glycine max
  unsure (1)..(435): unsure at all n locations
nttaaactaatttaattattgcttaagaattttatattcatctatgatgcacttgcgaatcaatcaaaaccatgcacacgtaagttggtatggtatgatgattgtgccgctattcactattgcaaaagcaccttttcacgtcatggtatctacatcggttatcaaaaaccgatgtaatacataatgcagtgctattttcgtaattaacgccaattatattatgccgtcaacgacggttttagtgaaaccgcctttgattttaatcttactaaggcggttttataaagaccgtcttagattcaagtgatttttaattattttatttattggaaaatgatttttaattataaaaactcatgttggacactgttcccatcttcgtaaaccctaaatccccttttatatatgcagttggcgaagaagcgagccgacaac

SEQ ID NO: 284632 - DNA, 390 bp, Glycine max
agctctagcatgtgtctccgtgatagaagccatttgatcttttaaggctgataggtcgaccttcatctgttcttgcactccctcttcattatccatttttctggattgagtgttataagggtgcctttgcgcttttttagttatggcgagttccctaaagaaacaaacaatggtgagtatgccaccaaaacatgaatatgctaatgaatgatcagagcacttggattcacctcaaggccttttatagataacgtgatgagtttcagaacttctctgtgtataaaaaggaacaaaacttttatctagccaagatcataccaaagtgttataacagaacctaacggtttctaattatatgggccatcaaatctatcatgtgttgacagtaat

SEQ ID NO: 284633 - DNA, 430 bp, Glycine max
  unsure (1)..(430): unsure at all n locations
tctacttatgtggcagagcgggcttccttcactttcttgtctcaaccgctagctttgaccaccgcccttccttcccgcgatgcttctctttacatctgcctgagtgggcttatagcctaaaccatacttcccacgatttcctttggcatttatcaggccagttatgccgccattgtccctgcctaaacccattccgggttcgtaaccgttccccaacataactcgggccatcattactgctgcatcggacaggcaaggctgcctagagaaggagtccacggaggaaatgcttaccacttcaaaagactggaaagcggtttctaatgactcctctgcggcttccacataaggcatagaggatgggcagctcaccaagatgtcttcctcgcctgatacgatgaccagatgcccttccactacgaatntcaac

SEQ ID NO: 284634 - DNA, 301 bp, Glycine max
  unsure (1)..(301): unsure at all n locations
agcttcaacgttcattntcgagcgtctcgataagttacgggactcaatcatacattcgagaacaaagttattgtcgattgaattatctcacaagttcaacattcaatttcgagcgtctcgatatgttacgggactcaatcagacatccgagggagaagtcattgtcgctcgtattggctcacagcttgaacgttcaatttcgagcgtctctatatattacgagactcaatcccacatccgaatacaaagtcatggtcgtttgaatcgcctactagcttcaccattaaatttctagcgtttt

SEQ ID NO: 284635 - DNA, 295 bp, Glycine max
ctttagccaattcagacaacaataactttttactcgtgatgtcttattgagtcccgtaatatatcgagacgctcgaaattgaatgttgaacctctgagcaaactcaaacgacaataactttttactcggatgtctgattgagtcccgtaatatatcgagactctcgaaattgaatgttgaatctctgagccaattcaaacgacaataaatttttgctcggatgtctgattgagtcccgtgatatatcgagacgctcgaaattgagtgtggaatctctgagccaattcaacgaaca

SEQ ID NO: 284636 - DNA, 389 bp, Glycine max
agcttttttttcttatttcaataggcatcaacatgaagtctatcaacataagttaattaaataagtgcttaatcgagatttttgaactaaatgtgccctaacatgagttcagtgatacaagcacactagaaaatgatgtcataacatgtatcaattgaatgtttgaatgcaaaaccaattttttgcatgaagttctccagtaccatcattttcaggggacccgctgccacaatttaatttcaaaattgccaatcggtaaatcacatcatctatactaagctacgtaaaattcatatacaattaacaccactaatagaacaatgcatgaaaatcccctaccatgtaaagatgctgaataataatgtacaaatcactgcagaaacattgag

SEQ ID NO: 284637 - DNA, 446 bp, Glycine max
agcttaagctgtaacactgattcataagaatatgatactttcttcccacactttcttccgctgagtatgctggagctaagcaagttacgactcttttctactggaactgggatacaccttcccgactatgttagcggctatcgctgctgacgttccatgactggtggacgcacaccagcctactgaagaaactcgacaaaaagcgttgctgtctccagctgcataggtgaactcttgacattgacagtgaactgttgccgaaatatggtaggaccaatggtgttaacatcagctatttaatttcacaggcgagttccatatgcatatgtctctatcccgaagccaactcatactccttagtccctcacatcaaaacaaagtccaagctctacaaaatattaacaagtaactctagatgtcgcagcggacataacttagatcaagtt

SEQ ID NO: 284638 - DNA, 376 bp, Glycine max
tgcttcaagaatcaagtttcaaagaatcaagattcaagaacaatcaagtttcaagattcaatcaagtttcaagaatcaagatcaagattcaagactcaagattcaagaatcaagagaagactcaatcaagataagtactaaaaaaagtttttcaaaacattgagtgcacaagaatttttcacaaaatcttttaccaaagagttttactctctggtaatcgattaccagtagccaacattgttttcaaaactgatttataaagctgtaatcgattaccatcatcatgtaatcgattaccaatgttttagaacgttagatttcaaatttcaagagtcacaactagtgataaaacattttcagatcattgtacacttgt

SEQ ID NO: 284639 - DNA, 421 bp, Glycine max
tgcttgagaggataccatgacaaacaacattggtttccttctacttcccaaatacatataaacagataagcccatatgaaccaaatgtttttccatagaaatcatacacaataatattatgaggaataaggtcatcagtagtcttaccaaatcttctcagcataaattttggcagaatatttatagttgctccatcatctaccaatattttgttgataatttagtcctctaccatggcagtcaaatttagaggcttcatatgagatttcgtctcatttgttggtggatcagaaacaacagcattatgatgaaaggtaaaacaagacacttgagtcacctaaacaacctttgtagttaaagaatgatctttgaaacactattcccttgcacaatcccttatcacatgatgagcttgatattc

SEQ ID NO: 284640 - DNA, 382 bp, Glycine max
ttcttatcaacggtgacccactatccaacaccataggcttcttcatattataaatattcctcagcgtcctcttcatcctcataagaatacactagaacatcgtgaaacatgtcaacattggctacatcatctaccactatgtcatccagttcctgataccaaagtcattaaaatgcttctcataagatttaaacaaacgaaacaacaataccatatatcattcattagtgttaccacaaaaaatgttgacgatgcatcaccaccattctcaccatgtatatattcaccccttccactcatatttgtcacacattacacaacaaacttcctaagtcagtaaggacaaaccagagcattaaacgacatagtgtgttcatcatta

SEQ ID NO: 284641 - DNA, 421 bp, Glycine max
atcttgtggaaccatggagtttagcctctttgttgtacacctatacagaacatgcatagttgtcatagcagcctcaccctataaactatgaggaagatttttctctttaagcatgcttctaaccatgttcaagattgttcgattgcttctttctacaatgccattatgttgggggtgtaatgagcagttacttcatgaactataccatgctccttacagaaaccttcaaattctccagatgtgaattcacctccaccatctgttcttaagatgttaatgcattttccagattgcttcttcacaagagctatgaagtctttaaaaatgttgaacacatcactcttggctttgattgggtagagccacaccttcctgctaagatcatctacaaaagacacaaagtatctattctctcctaatg

SEQ ID NO: 284642 - DNA, 381 bp, Glycine max
ttcttgaccaatcccgacccaacccgggcatagtcagttagtgagaacctgtgatgtacctaaacaggcgagctcttggcagtcaaccgataaaagaacaaagaccacaaagcaagggggcttgtgtggtggctggccagctgtgaatcttgtgtgatatatgggatatggcctctggtaatcgattaccaagggtgggtaatcgattacaaggcttaaaagtgaagacaggaagctaagatggcctctggtaatcgattaccaaggctgtgtaatcgattaccaggcttaaagataggatcaggaagtcgagatggcttctggtaatcgattaccaaggggtgtaatcgattaccaggcttagaaatggagacagtaggt

SEQ ID NO: 284643 - DNA, 418 bp, Glycine max
  unsure (1)..(418): unsure at all n locations
nttgagtgaaacaatgtgactcttcattnttaaatttgaatttcaacgttcaaggacactggtaatcgattaccaaaacattgtaatcgattacagccttttgaaaatatttggaacattgtaaattcagtttgaaaactttttcaaactcattttgcgactggtaatcgattacaacaatatggtaatcgattaccagagagtaaaaactctttggtaaatgtttgctcaaaaactcatgtgctattcaaagttttgaaaaaactttttaatacttatcttgattgagtcttttcttcattctttaatcttgagtcttgaatcttgatcttgattcttgagatcttgagtcttgattnttgattctaggctttcttcttgagtcttgaattctccttgattcttgaactcttgactt

SEQ ID NO: 284644 - DNA, 381 bp, Glycine max
ttcttgtctcaacgtttatgcgagacggagaccaacatgctagctatcatcgccaagtaccgagaagagttagccatggcccacgagcatagaatcgcggatgagtatgctcaagtatatgcggaaaaagaggctagaggaagggtgatcgactctttacaccaagaggcaaccatgtggatggaccggtttgctcttaccttgaacgggagtcaagaacttccccgattgttagccaaggccaaggcgatggcagacacctactccacccccgaagagattcatgggcttctcggctattgtcagcatatgatagacttaatggcccacataattagaaatcgttaggaaacttgtatggtctctcagaccttgactaga

SEQ ID NO: 284645 - DNA, 428 bp, Glycine max
tccttaagaagattcctagagtagctagagcttatctacacacacccctctaatagctaagctcacttccttgagatgagaagctagagcttagctacacacacccccctataatagctaagaacacctccatgccaaaatacatgaaaatacgaaaaagtccctactacaaagactactcaaattaccttgaaatacaaggctaaaatcctatactactagaatggccaaaatacaaggcccaaaagaaggaaaaacctattctaatatttacaaagaagagtggacccaaccttggcccatgggctcaaaaatctaccccgaggttcatgagaaccctagggccttcttttgcagctctagcctaatcctcttggagtattctatcaaatacccttaaggggtaggattgcatcacaagatcaagt

SEQ ID NO: 284646 - DNA, 364 bp, Glycine max
ttcttttttgaggatcttgcggactgcgtgtgtcatcatacctttaatgccttctcctacaatcctgaacagcagaggaactaggggatacccttgactccacaccattgttgttgataaaccttagaggggatacgcattaatcccacctcacatagatgctgattcgttgcttgctgatataccggaccgttcttttgtgcataaccccagtctaaacaacatatataccaaaactgacccagacactgccacgatcgcctttttaaaattcaccttgaagatagtcattggatacttgctattgcttgcttcctcaaccacctcattgataatcacatgactctggaagatatgcctacct

SEQ ID NO: 284647 - DNA, 418 bp, Glycine max
cgcatgtctataagatggctgcatgcggaaccacaccttgatgaagggaggctgccactctctctggctggtctgaccatcttcgactgtgagaaagctaaagaaactggactacatggggctgtgtaagctctcctatgtcacgcgactgaggcttgaagactgccccaacctaccacagctaccagaggagggtcttgccacatccagatcatatctacttattatatgctgccccaccctcgagcagcgttgccagaaccacagaggcgacgactggccaaagattgctcacagttacagcacttccagacccctgcataatttgatagaatcacggtaatgatgctgattctcaagaatcatcatcaaactttttcttttatagtagatctgaattatcatgaaccttctacac

SEQ ID NO: 284648 - DNA, 367 bp, Glycine max
tttcttgtgtctgaaaaatgtggttgttggggcattaaatgcgtgcattcaatgcacatacttcttcatgctagaaaaccactctttgtcactcgtgtcttgaacactacaataggaaaccacttccttttgtgttagaacatgtttgggcaatagaactcttcttttgatggaaattgaaaaattttagaacttgacttcatttattcttcatatgattcgataaatcataggagaatgtctttgcaaaatagatcttaaacacagagtattaaatgaagtctaatgaaaactctaatattgtatcagatcatgattacatcttgctactatctggaacatcatacgcaaacttctgggaacatgt

SEQ ID NO: 284649 - DNA, 421 bp, Glycine max
ttaaaatttgaggccactcataatttatttcactgttttgactaataatctaattaaaatggcgaggagcatgtgaggggattctaattgttgtcctattcaaacatatgttagtaaaagggttatttctatgtgcgtagtgatcctattatgatatatgataccattttcaaaactagacacacaaggatttctatagtgataactttcatgaaattacattaagagatgattgatatattgattttataagatgatggtactgcaatgcaataaaataagcatgtgctacttttttatttattatgaattatgtggatttttacttggactttgggataccatttcatgaactagattccttatgcttattggatgatgttacatgataatttattatgtgattgcttctataatgaga

SEQ ID NO: 284650 - DNA, 359 bp, Glycine max
tgctgtcttagcacagaagatcacatgtcggagagtattactgaacttctcataggcacggatgatggcatgctattgaagataatccgatgaaatagcaatatccatggctctatgcggccgaggcagccgctggacagcgctgaatctggtgatatcactgtgatgatgacaatcgggatcgacatcggatgggtgctcatgcactactagggactccttgtgatgagatgcacacccatggactgaggcaatatatttgcgaggcagggtgttcaagataccagcttcattgatagactgagagcgcatgaggtgctcgggttcattaaagcactggagcgttatctaacgcccat

SEQ ID NO: 284651 - DNA, 292 bp, Glycine max
tgcatgatgtacattctccacgttgcttattcatattctacgtgacacgatcctgatcttgatgatactacactggcgccatcaaattactctaaccggaatatactcacatgaaatagcctaacccttcgagatctattcttgactcctaaccagactggttataagtgagctgcactatgcacaagagacaccattaactagataactgcgcattatgtctagacatgcacacatgtagctgctctagcaaggactaaagacttcaagcattttccagtacgcaaaacct

SEQ ID NO: 284652 - DNA, 370 bp, Glycine max
ttcttggaagcatgctatgatgctgatgttagaaaaattaaatacgacaggaactaatacctgtacaatagaggaatgaaggtagaagttgtgaggcacaagagttgctcctaatagactcatcagcacaaatgcactctccccactcaactttgttagtattccattaatggataatggaatgtctggttgattaatgagtgttccaagtacaaacgaaagaaatacaaaacctgacacaaacaggcccaggatcttcaccttctcaatgtcctagagaaaggatatatcataagtgtattgtcggtcaacagagattcatgaataaacaaataatgatacttaccaggagggcatatagaaggagatg

SEQ ID NO: 284653 - DNA, 373 bp, Glycine max
acacccgctttttccttatctttacaagaaacgaacgagaaaagcataaacaaatatttcaactgcccactggccttaatgcgaataagggagtgcgatcatagcctactaaagcgtgtcacgatttatgtggacgaattgaatgactaagctacatatgttgcccgaatgatgtagatggaatgatacagatgtcgtttgatttgaagaatgggttgtcattacattagataaggtgaaagatagtacttatgtactctagtctcaatctcaattgatccacatcgaaatgcgagcttaagactttataatgagtggtttataatgcgttgcgtgagcagttatagattcaggtgcattaaattaatcttac

SEQ ID NO: 284654 - DNA, 372 bp, Glycine max
tttcttttgtccatgcattcctaaagtttggaacagtgtcctaacaacagaatttctcacttgcaaaacaaaactttcagtaccagaaagctttaacatccagcaacaacaatagtagagagaaatataagtttgatggtctattgaaatgggttttgttctattgtccaaatttccctaatcggtatacaagtagtagagagaaatggaagtttgaaggtctatttaaatggttgtaagttgtaacatttatttagggagaacattaggtttatgaattatggtcttcttcgtcatgcaatgaaacccaatcttgatacacaatagacccaaggaatgaagcctagatttctgctatattatgatttcttt

SEQ ID NO: 284655 - DNA, 390 bp, Glycine max
  unsure (1)..(390): unsure at all n locations
nttgaggttctggaataattgattatcaaatgaggtaattgattgtttcgtcacacaaaaagcttataaagtttccagacacaatctaatcgattactaaatgtggtaattgattatctcgagccacaaagtcttccttcttctaaaactggctttataatcaattactaaattgataattgattaattcgatgactttagccaaatttgaaatagaagtgactttagccaaattaagcaacacatacaccaattaaccccttgttcattaagcacaaacataatttaagcacataggcaattaattgaacacgaagtgtgcacagattaacagaatgcatgtgggttaattggtgaagggaaaaccgatatgagagcaccattaaaaat

SEQ ID NO: 284656 - DNA, 379 bp, Glycine max
tatctttggattcagaggaacagatgatcctcccggaatcactgcaagtaaattatcccatcctcctcgaatacctccacagtgcctctctatcaactccttcagtggaatactcatttcctcctcaacagtgcaaggcttgttcacatgccccgacacacaaaacaactttgtcccagcattgttcttcctaccaaaactggcaaaccattcaggcccacgccttagaatggttggagaaacagcaacagtttccacatttgtgacagtggtaggacatccatacaacccagcattggctgggaagggcggcttcaatcttggtttaccttgtttcccttcaagactctccaagagggctgtttcctcaccacaaata

SEQ ID NO: 284657 - DNA, 416 bp, Glycine max
  unsure (1)..(416): unsure at all n locations
tgttaaagaacgacgtaatcattaatcactagttgttaattatcactagagttatttatgcattaaagactatagcaacaaaaagaaagtcgtattccccagtcagaaaaaaaatggtatttgctcgagtcatacgatcaagtctcgttacttcagatataaatataaggagaatatccaacaatggtatgaaattatgtcgtataccttttcttcaatatggatttaagcacccagccttctaagaaagtatatagatggtttgctagaagatgaaaggaaaattaaatttgtgtttatgatacaagaaaaacaggctgaatgaaagtttctcaagggatgagaactgaaaaaagaaagatatttcatcttanattatgttctcttaacacaattagttttatgtacattataaa

SEQ ID NO: 284658 - DNA, 378 bp, Glycine max
gtgctttcatctagccaagattatacaaaggtgttacaagagaacctaacggtttctaattatttgggcgatcaaatctatcatgtgttgatagtaattgattagcccatgaatctcctcgggggccgtacacacttcggccatggcttttgctttggctaatagacgcgggaggtcttgacttccattcaaggtcaaggcgaacctatccatccacatagtcgcttcttgatgcaatgcatcaatcaccctccctcttgcttctttttcggcgtacacttgtgcaaaatcctccactagcttttgttcatgggccacagactggttcaactcttccttgtattgccctatgatagctagcatgctttgctccgtggc

SEQ ID NO: 284659 - DNA, 422 bp, Glycine max
  unsure (1)..(422): unsure at all n locations
tataagaacaaaattgcctaaatcatttccaaatatgcatgtaaattatgaagcatcaacaagaatcaagccaaggctattgtgcaagcaatcaatggggcaaaacacaccaaaagattatgatgatggatggctcaaattctcacaaaggtaaacttatcactttcaaaactatcatgacatgtagaggaaaaacaaggatttcaaatcacaaaatgtcaagagactnttattttaagaacaattacccattatttgaacatatcctataattcaaagaaaaatatgcaaagttgttcatgcaaacaaaattgacctaaaatattaaactagaaacccaacaaagctaacaaaactaacaaatttaacacaaacaaaactaacaaaactagcaaaaccaaaaccaaagaacacttcccccc

SEQ ID NO: 284660 - DNA, 230 bp, Glycine max
gccgacaagttgggacctcatccaatgtctcacctttgcaaggagctatgctccagcgatttgactaatgaataccctaaccatctcacactaattaatctactatatacgccttctccacaataatctaattaagattatgacatacatcgcattaggtatgagtcttgcatgtactatccctcattccgcactaattgacgacgaccgtggtgagacaaaaatcatga

SEQ ID NO: 284661 - DNA, 505 bp, Glycine max
  unsure (1)..(505): unsure at all n locations
caccatactccactcaccgccacactcgggacactccagactacactacaaaaacaacagacagcgttttgatcgatccattgcagngcacctatanaacactcaagctcgagccaataatgccatgttgagggccaaaccggtcttgtatgtcagaacctatgcacttaaatcacagggccgcgacaaggagccaacccacgcaccaatacactcaaccagattaaacgagcctaaacaacgcccaactcacactggacggaagtaacatggaacaatagggggacgaacctaccaagaaacatcatccgggacaagaacaaaataacgacatgtcgcgcaggcacaccgagaacaacattactcaccgtgaccgaagatctctcaccctcgccccaatggacatagtccatccgtatccgcacaacgccgaactttccacagggacgatcatgaagccagaactaatgaaccaagaacaatctagcaagctaaaagaacacgc

SEQ ID NO: 284662 - DNA, 377 bp, Glycine max
  unsure (1)..(377): unsure at all n locations
ttcttggcatttccaatggtggaaggaccttanaagactttataatcagcctgatttccacagtatccaccagaatatggtatggaaggttggttgtggggacaaaatcaaattttggcaagattcttggctgagtgaggactgtaatcttcagcagcagaagtataatcaactcttcatgatcagtagacagcaaaatctttccatttctaagatgggaaaactttctcagaacgtatggagctgggagttcaagtggagaaggagattatttgaccatgagtacgcgttggctgttgatttcatggatgaaatttctgatatctctatccagcatcaggttcacgataccatgctttggaaagctgattctagtg

SEQ ID NO: 284663 - DNA, 422 bp, Glycine max
  unsure (1)..(422): unsure at all n locations
ttgcagcgtatgccactctactctaaattcttgtttgatatgttaacaaggaagcataaatatattcatcaagaaaacatcatagtgtaaggaaactgcagtgctatgatccaaaagatccttccacccaagcataaagatcttgggagtgtaactattccttgttcaattggagaagtcaatgtgggaaaagctcttattgacctgngagctagtatcaatttgatgccattctccatgtgcagaagattgggagagttggaaataatgcccattcgaatgactttacaactagctgaccgctccattagcaggccatatggagtaattgaagatgtgttggtcagagtaaaacattntatcttcccggcagactttgtggtgatggatatctctgaagatactgacatctttgtaatatt

SEQ ID NO: 284664 - DNA, 462 bp, Glycine max
  unsure (1)..(462): unsure at all n locations
cgagtggtgnntttgatgcatgatacatgagcgacttcagctcgtacccgggatactctagattgacctgcatggacggtttccttggattctgcggaaccgatgatcgcaacggggtctctgctccataaatcttccatcctacacgaataccttcacgtcgactaatgtataaacatctctagtggaaaatcctctatactcataacagtgcagagggtcgataaaatatcctcttattccattcgacctgagtccaccaatggcgtattcctatccataaaggatatggaagcatgcaacgagtctttaaatgtgtggacaatgaaccaccgattccagcagtgtgtaagggtgctgaaatctagtctaactagcgttggaagggaaaggcagtttcaaccctgctatagcttgtgaacgatatatacaatactggacggctctacctccccgatacac

SEQ ID NO: 284665 - DNA, 337 bp, Glycine max
gaggaattatctgcttcaggcccttaatccgctggaggaagagctcttacatcccagtttgttttcctacgacccacgggaagacttccgcacatgcagcgctcccagtgaaataaaggcttgcccttctacgatagttacgccggcgattttgtacgaagctcccctgggacgaaattgccctacctttctcattggttaagaccacctcctaatagccccagcgtgtcaaacaacgatattcagtcgtttcgatctaacccccgtccaatatcaaggcggggcgacatgaagatacccttaaacgctttacccaaaatctggcttccatctgacc

SEQ ID NO: 284666 - DNA, 366 bp, Glycine max
ttcttgtaataaaaaacaagtaaataatctttacttagagatgaactaacatcttttgtctgacccaaacgatgagctctatccatcgcctgtagatccaatgttggattccaatcactctcgtaaaatatgactgtgtcagcagctgtcaagttgatacccaatccaccagctcttgtactcagtaagaacacaaaaatatcactcctgaaacagagatataaagaaacaagtcatcttcagtagtctcaccaaagtagacacattaaagcatgacaacacagacattacctgtgctggaagtctctaaccatgtctctgcgatcctgaatagtggatgacccatcaagtctaaaatatctatat

SEQ ID NO: 284667 - DNA, 393 bp, Glycine max
  unsure (1)..(393): unsure at all n locations
tgtcaaaaagggaagcaagttagaaactcttttcttagcaagaacattgtttctacttcgaaaccccttgaactacttcacactgatttatttggtccctctagaactatgagtttgggttgtaattactatggcttagttatagtagatgattactcaacgttcacatggactttgtttttgaaaacaaaaaatgaagcttttgatgcttttcgcaaacttgccaaggtgattcaaaatgaaatacgtcttaacattgtttcacttagaagtgatcatgaaggtgaatttcaaaatgagtcttttgaaatattttgtgaagaaaatggaatttaccacaattnttctgccccaagaacaccccaacaaaatggtgttgtggagaggagaaat

SEQ ID NO: 284668 - DNA, 369 bp, Glycine max
ttcttcatacaattaatataaaacctatatcctaatgtcacatcctatcagagcgttgtgtccccgtgtcctctagcatgaggttcttcatagtcatccacctattcatctgctcccccgaacacacgttcaagatcatcacaggatccaaacacaacaacacacagggagtgagttatcacattcctagctaatagagaaacaagacaattaaatatacatattatataaatgagatactacttgcttaaacataactcacgtaatttcatcacgttgtcattcaaaattcactttcaatcatcaatcacattacacaagaatctcacactccaatcaagatataataacacatcaatttcataataa

SEQ ID NO: 284669 - DNA, 410 bp, Glycine max
tatcaatgtggcagttccggggaccattgtctaattggcgatcaatacaaaaaaaatactcaatccatgggaaaggaatgaaaatcacacactttgcctcaactctgctaaagcaattggatgtacagtagtcaacattggcacccaggacttcattgaaggaagggtatgcttgtaggcattcaagtttccacccataaaagcagaattattgtgggcgtgtacactgcagaacaacaaaatttaagattaaatttaatttataaatgaaatcctttgttaagttatgaaataggaatttttttattctaaaatcaaatcctttggtcagaaagttataagaattttttctttttttttttttaatttaggtgtgatactacaaaaaatctggcaaatttgatatttct

SEQ ID NO: 284670 - DNA, 365 bp, Glycine max
  unsure (1)..(365): unsure at all n locations
ttcttgtttggtgttttattctcttcttttcttttgttatttcttctctttttttctttttttttgtcttttctttcttttttaattgatcctttttgattttcttcttcttcttttcatttcttttttcttttctttttttttcttaatactttttcttttcttctattttttcattttttttattattttcggatccgcataaaattagggtctgacaaagagaataaaaacataattattctattaattatcataattgtaattcttactcttttcccactttagatgttaattagcatctggtatatatccaccattnttctttacttatttatcatatacggatataggttcataagggg

SEQ ID NO: 284671 - DNA, 380 bp, Glycine max
tcagggatttcaaattctgcctgacaaataataaattatgttgtattgtaagtaaataacaaatttagactattaaagaaaatcaacaaagaaaactcacatacctgaatatcctcccatatcaaatccttctaagcagtagggacttccttccagttgtcatatgtgacgtcgaccttatcatgagcgaaaatccccaaatatgttcttaatttcttcatgtggggactgtcggccttgccggtagcagaatcgacgttgaccgcaggtctttctgccccaggtggtctagtggccaataatcgtaaccgtgttgccttgcgtgtccgcttcaatgtagatggaaacggttatgcgtctgcaggaagaggaggcgagac

SEQ ID NO: 284672 - DNA, 342 bp, Glycine max
ttcgcatgctttcttctagccaaatggacttaccttgaattaattcctttgatagcccttttgagcgttgtttccctttccttgttttgaagctcactacaagccttaaatgaaaaaccatgatatcaccatatccttaaggaattttgtaactttggaattgttttgggaataagtgtgggggtttttgtttcattggataatatgttagttggctatgcttcatgatgtatttttgggccatacttgatgtacattgtatattggctaaatgttggacatgctgaatgaaatgctgtatctcaaatgtttcttgtttcaaaaaagataagaaaagaaaat

SEQ ID NO: 284673 - DNA, 439 bp, Glycine max
gtgacctataaaactcagcttatgatgatgaatcagttgattcagttgttttatgatgactaagatgatgacaaaaagcccaaagaatgatttcaagattcaagagaagaagaattcaagattcaagagaagaaatcaagaagacttcacaagggaagtattgaaaagatttttcaaaaaacaaacatagcacaattttgtttttcaaaagagtttttctcaaaattttcaaagttaccagagtttttactctctagtaatcgattaccagtttcctgtaatcgattaccagtggcaaagtttgatttcaaaagtttttaactgaatttgcaacattccaattgttttttaaatggtgtaatcaattacaatatattggtaatcgattaccattgtatttgaacgttgaaattcaaattcaattgtgaagagtcacatc

SEQ ID NO: 284674 - DNA, 321 bp, Glycine max
tgctcttaaactctatacaagaatgaagttctgataccactcgatagacaggtggcctcagatatctttaagaatgggggttttgaattaagatatcaaagactattctccaattaaaattttaactctcttcttgagttagaaatttacccttaatatgaattactcaaaagataatttagagtaaacttctttatagccaatgatagatgacgatatataaaagaagtttaagggaaaagagaatgccaactcatgtgttatactggttcaggcacaccctatgcgctacgtacagtctccaagcagcccgcttgagat

SEQ ID NO: 284675 - DNA, 386 bp, Glycine max
tgcatccactagaagagaataaacatgtgattagaactttgactgaaaatgttagtcagtttgtcagattgattgtgaaggaatgcattgaccgtatcccggtgagagtgtgatcctaaaattttgagagaaacgactatcatttagtactaatttttgcatgaacctctgaagtatggactgaatgcatgaaattgaggatgatgaaggccatgtttgattgtgatagtcacttagccaaaaagctgaccatgtgcttgaatgattcatccctggcacccagtttgagctgaatgaattattgattgattgaaccttgagcctatacagtgttatctcctactaccttgtgttacgttgtaggagagcatcatccacaggaagct

SEQ ID NO: 284676 - DNA, 369 bp, Glycine max
tgcttgtaaagcaggttaggcgcacgcctaattatttttaatttttataaagacaaatgttataagaagtgaggctgaattatgattctagaagaagaaaaattaaagcctttttttgaaaaaaaaaagttaacgtttaaagaaaaactttgtaagaaaaataataaatttttacaaaaacttgtttagacaatgaaaatagatttcgcagaacataaagtattttcaagatgaaatgaaattcaaacccctatattaatttaaagcaaaagataaatacaattaagacatataagatataaagaattatactagtttatctttaccactaaggctatgtttaagttttgattaatcactaagtttcac

SEQ ID NO: 284677 - DNA, 405 bp, Glycine max
tggtgccaaatgtcggcatgaagtcactcgtgatttatgttctataagagattgtgtttacagttccttgaacctgattgttaattttacattgaagaatatgtggggatttaaaaataataacacttgtttaaagcttattgagaaggtgaattcaatatcaaaatattagcacatttgatcttctgcaacacttatagactagagattagagattaattcacatttcgcaatcatggttagcaactcttggacagcttgtggattgatagaacaaaagtaatgtaaaggcaaaaagaacttgactagaaacatatgtgatgaactaaggtctacgctaatactggcaaaaatgtcactgttttttttttttaaataatgcttttataaccattctaaaaagct

SEQ ID NO: 284678 - DNA, 384 bp, Glycine max
tgctttgagccaaaatcctgactcaccataaaccttgacccagggtgagaatgccaatccttaccctcggaagcaaaaaaagaatagaggggaaatttccaatcaaagaaaaagagaaggaaaatttccaatgaaagcaaaaaagaaatgaaggaaaattccccaatcaaagagtgggagaaagcaaaaaaaggaaaagaaggaaaattccccaatcaaagagtgggagaaagcaaaaagaaaagaaaggaaaattcccaatcaaagaatgggagaaagtaaaaaaggaagaagaagaaggaaagaaagctcctgatcaaggatcgaaagaaaccagaagaaatgtgcagagaggtctttggaccagacaatatctgaaccgta

SEQ ID NO: 284679 - DNA, 423 bp, Glycine max
tcaagtgatacagacagtgaaatcacttttgatgtgcttgccacatcctatagagaactatgcatcaaaagtgagaagattcttcagcaagaagcacaactgaagaaggtcattgcaaatctggaggctgagaaggaggcacatgaagaggaaatctctgaacttaaaggagaaattggctttctgaattctaaactggaaaatatgacaaagtcaataaagatgctgaataaaggctcagatgtgcttgatgaggtgctacagcttgggaagaatgttggaaaccagagaggacttggatttaatcataagtctgctggcagaacaaccatgacagaatttgttcctgccaaaaacagcactggagccacgatgtcacaacatcggtctcgacatcatggaacgcagcagaaaaggagcaaa

SEQ ID NO: 284680 - DNA, 165 bp, Glycine max
  unsure (1)..(165): unsure at all n locations
agagctttagtttgaatgcacacaatctgaccaaggcgcagaactttcttgagcacactttctatgacaaanaggagattcaactccatttgcttagatctcaatgacaggatacgagtcaaggagactatgctaagattgtcacggtaaacaaatggggggggg

SEQ ID NO: 284681 - DNA, 417 bp, Glycine max
cttctcttctgttcactggatcgggttccaggatttgattggtaggttcagtaagggttgtgttgatctgcaccaagatgcttaatttgcgttgaaaaattcattcatttgcgagactcggcatcggaaatgaaccagttagttgaaagttcaacgactactcaaagggtatctagagttcaagctccactggtaataagtcctttccctccaatttttttatctgcatattagttttcttcttttgaatagtataatttttctccatttttcagttgcagctttcttttctttttatttttttgtgtgtggataaaaggttcgatttgccagcgctgtgcttgagggtttggttaacttgagttcctatcattctctgcttgtgtttggaagagaggcagagaactaagttgtaac

SEQ ID NO: 284682 - DNA, 372 bp, Glycine max
tagcttatatgatatttcatgatcaagggaatgctctttgattagccggtgtgtgtgactgaaaatcttgatgaggatacctcatcgccaaactatgtgaaagctggaagatgggaaacaacggctgtatgtgtcgggataaacatgacacccacttgtcttagccctattttagtttaagttgatcgagcacttgagtatacgtcgaaattattatactgcaaaactacattaatgcatagaccaagtgaataccgtacgtgccattcgcatattctttggcatatattatccattctttaattaaacaaatgccgaattaactaatcacaatatcaaactgatgcgcctagaagaatatatattacttac

SEQ ID NO: 284683 - DNA, 423 bp, Glycine max
gcttcttcacaagtacttgctggagaaaaagataagtttattatttgaaatatgtttcttctacctaacacattggtaaggatgtttaagccgtatacaattgctggcaatacatacattatgaaagaaaatcaatcaaatgaccaaactgcttggcaatgacacataaatgtatcacacatctattgtgctgtattcaagaaaaatcaagcattctaaggccatatgatatcttataaactcttctatcactctactgatgatgatgattcgagaaagcgctttagttctttgtagatgactgaaggggtacagaatcaccttcatttgtgctgtcacggtctttcccaaaaatcttagatgcattcaatatctgtttcaatcaacatataatctatcacttacaaacagtggaacatcata

SEQ ID NO: 284684 - DNA, 380 bp, Glycine max
ttcttgcaagatggaagcaaagaaatctatcaatggggggtagaataaccctcattaattcagtcttaacagccttacccatctatttgctgtccttcttcaagatacctaaacatgtggtgcaaaagattgtatctattcaaaggaatttcttatggggaagtcaccaagactccaacaagatcccttggggaggcgccatttgcacatgaatcactcttgaggcaaaaatcaaggatcaaatggctcagggaaggtgacagtaacacatgcttctttcataaatccataaattttagaagacattataatgcaattcaaggaatattcattgaaagtatatgggttcagcaaccaaaattggttaaggaagaagctgt

SEQ ID NO: 284685 - DNA, 418 bp, Glycine max
tgttgacacgcggagatttacgtcatcttccgcgcacactagatctgtcatactgacatttgagtcacgctgacgggcggaaatacccgagtggttatccgtataaacattcttttgctgtctgtaagacaaaaagcctgatagcacgcagagactaacgtcgtcttctgcatccttcgtcaatcgcggccgacaagcccgttggcacgcggagatttacgtcatcttccgcgctcacaagatctgtcatactgacatttgagtcacgctgacggacggaaatacccgagtggttatccgtataaacattctttttgctatctgtaagatgaaaagcctgatagcatgcagagactgacatcgtcttctgcaccctttgttcccccggggacaacaagtcagttgcatgcagagatat

SEQ ID NO: 284686 - DNA, 368 bp, Glycine max
gagctttgacgcattctctctgtctctctatcccttctctcaatttacaccatgatgtataatagaagctatcaatatttgcttcttcgttttcttttcaactatattttcgtaggtggaaattatattgaaatcagaacagcatgcactaaacaaagaattgtacacacacaatattgaagttgctttatccaaaccaaatatttcaaaaataagaagaatttagtcgaaaataattaatgagaaactactctatgcagtgagagtattacactgcaagtcccagatagagggtatgactactacgcgtgctagctttaagagctatagctactatgatttctgattgatgaacagtgtcatgcatt

SEQ ID NO: 284687 - DNA, 428 bp, Glycine max
tgagatacaatattgtactaagaaagtatgaatcttacctattaaattaacaaaggctgctattaggtatctcatctcttggctatttcaagtagttatgcgtaaagacaataacaagaagaatcaagctaagaaaatcgtcaatgtcaactcataattaattaaaacattaacaaaacaattcctacataagtttactaattcaatttataaatatattgcattttgttaaagacttatcaatcctcaatacttattcctgtctcgattataagtaaaaaaggacatatgtcacatttattaaggaaattagttatcttcattaaagtgtgcgagtttcaattaataaatgagttttttccctaaattatctttcatttaaacttgatatcaagcataaaaatggttttggtcatactaaatgaata

SEQ ID NO: 284688 - DNA, 388 bp, Glycine max
atgatcgttgtgtgcatgcattcttgtgggatttggtgatagtgattgtgccggagatgtagatgatataataagtactaccggatttgtattttttatgggtgattgtgtctttacatggagttctaagaggcaaggcattgtgacactttctacttgtgaagccaagtatgtagctacaacttcttgcacatgtcatgccagttggctaagaagattgctggaggaaattcagttgttgcacaaggagagcacaaagatctatgttgatcatagatctgcacaagagcttgccaggagtccagtgttgcatgaacgaactaagcatatatatacaaagtatcatttcattgtagagtgcattaccaagacagaagattaattgact

SEQ ID NO: 284689 - DNA, 405 bp, Glycine max
gttcgattcattctatgtacccgtagtggttcactttgtgtttcgtgcattactattctcgttttgtttactttttataccccctgttgacgtgcttaagccattttacttaagtcatttctcgcttaacttagaaataaaatcaatttccaccgaacgtttgaattgtattatccgttaacttcgggtaaaataaattccgaccgttcggtcgtgccgtaaccacgttggaaatcaaaaaagaggtaaaaataatataataatcaaaaagacatcttttagtaaaataaagcggaaaatcaatcggacgttttctctttgggatttctcattcttaatcgaattgattaataactaaagtgaaattaaggctaaaatcaactcgcctagtcaagctcggccaca

SEQ ID NO: 284690 - DNA, 211 bp, Glycine max
ttactcgcccggatcttcatcgaacgcggctgcttgctgatcggacctcagtgtcgaaagttatgaccatttgaatttctctagagcatccggtggacaaatttgagcgtgtcgacatattatgcaccctgagcaaaaatatctgtgagaagcgatgacccattgactttatcgagagctttcgatggttaagattgagcgtcttgaatat

SEQ ID NO: 284691 - DNA, 404 bp, Glycine max
tatactatatcgagacgctcgaatttaattatcttatatctcttgagaaattcaaatggtcgtaactttttacacggatgtccgattcgggcgcataatatgtcgagatgctcgaaattaaacaacgaaagctcttgagaaattcaaatggtcataacttttgacacggatgtcctattcaggcaaatcacatatcgagacgctcaaaattgaacaacggaagctcctgagaaattcaaatgcttataacatatagtgacactcgaaatgtccgattcatgcttataatatatcgatacgctcgaaatataacatgtaaagctctcgcgaaatctaaatggtcataacttttcacacggatgtacgattctgacgcataatatgtcgagaggctcggaattgaa

SEQ ID NO: 284692 - DNA, 316 bp, Glycine max
ttcctccagaaacaacagccttacggacgaacgaaccggaaggcccacctgggccagaatgccatatgcaccccccgctatacaaagtgcaccccctactaaatttctgatagagaagtttccgtaacatcaccaaaatctacgaaggacgcaccgatacttaatgacctaccgcaggggcacaaatccatgcggattaggcatatacactgtgacagctacccaagcaattacggaaactcacggattgcacaaaaccacctattgccgactaccgacaaattactgaatgtcacgggtcgcgcaagcctgcttg

SEQ ID NO: 284693 - DNA, 559 bp, Glycine max
  unsure (1)..(559): unsure at all n locations
cacacacacgcnacacccacacaatgcgaaataacaggacagtcactacgcacncgcgacaacatccacacncaacacaacgacggtnnnntttgattacatngcatcgccaancacgtgacacaancnacaaccaggcgagagagagccaccgaagagagagccaactttgactacacatgctagcaacgctactaggacactgcagaccggaagaatccccatatcggagaaccataaacgcgggctcccatgactacctacaattacgaagtgtcgaccccaaacgacacaaagcgggaaaggctgacttactgcaacaccgctgaacagcccatgaaaacctcaagacctccatatatatcatagaccccgaatacggacatcgcatccaatgctacgcacagacaaggcgaaggcacatcacaggtatgacactgaaacatactagcacagacgaagcaacaaaaaaggcagcccgtcagacaaacgaacagcataatatgagacctggaacaagatggacacctatacaaacaagcgcgctacatacttctcg

SEQ ID NO: 284694 - DNA, 376 bp, Glycine max
ttttcatgctatctttgccttgcaaatctgttgaaattggacggaaggaacgatcaatctacccttgaaagagttctgactagatgacatgatccatatgcgttttcaccatctcatgaagaacacaaactatttttcttactcattatattcttaatgtaaactgagcctcgagctcattagcatatttttaatgcgtttttctttgcactttttaaatctccattcgtacgttaatgattaattgttctaaagaccacttccacttcactataaggctcttacacccatgggcgtgattcgaccctatctcactcgcccatcacttcctgtctctataatttttttctttacccaaaatgcgtcgagatataaa

SEQ ID NO: 284695 - DNA, 367 bp, Glycine max
tgacactactcaatactctagctagcatttgcataatctgctgggcggccctctacatttatcagagttcttctacctgaactcagccatttgtgaaaattatccctaattcaccatctcagaactataatatagtttgcggaactcgtggaactcagaagatgctcaactacaatcctgtgttattatactctaatggaaagggagaaacctacaaagcgtgttcgcgacgatgatatctgttaatctctttggatatatcccgaatctgagagagcgtaataagattcccttggaggacccatttctgaagaacgttggtggcgcttctcttgggagcctaagcctgaagattctgctccttacg

SEQ ID NO: 284696 - DNA, 370 bp, Glycine max
tcttgtcaaggcccccagccgggacaagtgttgtccgggctgcttctatcaagttgtctaggatggacatgctttttgtattacaagcaaagtcagacgtgtcaagtgaagggagtccctaattttgacaactctaccattttctaacttttggagaatgcattaaaggaaaatgttctcgtttttccttttgctacaggcgaatgttgcgcacgggcgttacttttgcatacgtgtcactcgtggaatgggcacgtactggagacacggtacgtgggtgagtggagctccatagtggtgcaaaatttttgggcatcatttcagctcctgccagttactgaagggttgcacctccactctaaatggagtg

SEQ ID NO: 284697 - DNA, 425 bp, Glycine max
ttgtaagcacaaatcagaagtaggtcgctctaacttagagggctgaagctgaaacacaaatttctcactcaaagatcttgcatatagtggttgttcagtgacatctaagggttttttaaaacaatttttcaaataagcacttggtgtaaaatgatgttagaaaaagataatatgaatacttaataaaataatatggagagaagtataacaacttggattatatcggttcgctcaacttgacctacgtctagttctcctttactcactggtaaagggttccactaatcaataactaattacatataagtattctaatccgcaactcctgaatttacaagtattcttaacaccacttatagaatcttcctagactctccctgaatctaagaacccaagtattttgaacactaagtcactcctgtcac

SEQ ID NO: 284698 - DNA, 505 bp, Glycine max
  unsure (1)..(505): unsure at all n locations
catcatgcactccgagcacctcgccatcgttaacctatgtngcatcttcctacanaaannacaaagcaggggnntttgagcgtgtgatggagcgttgaannncccnnggttaaagggnccccagcgtggccccacnacgggtggcgncttcttattccacacggacacacatcacaaaataaaaccctctcatatttctcccacatctcttgccaaaatataataaattcacccccccataatccccaaaaaaaatccggggacacagcggcgctctggggaaacaggggggggggactacaaagagtcgctgtccttggcgacatgggtgctctacggacgcacaaggggggggcgccgcgagacgtacccttcgtgggggtcctcccagtgtctttcattggcgtgcgcgccggggcgggcggttatactcgcctctgaagcgcacggtggcggtcttatcggtgggcggggcgcccccaatgaaacgagaggtatgtttgcg

SEQ ID NO: 284699 - DNA, 409 bp, Glycine max
tatcggattatggggcacttgtcttatgtggtactatggggcgatcagcgatggcgcaagtcaactctcccacttccacaagtcaaacataaacacaccatccccagttgcccacctttaaattgagctcacgcactcccacatagcccttatcctcgttcctctcatcaccgggtccccatcaacacctccaagctttcacaatatacaaacaattcaatttcatttgtcatgaaactaccctaaaccaagaaaatagagtggaggcaaaaaactctgcacaaaactcattcaaattccacagttttccctactcacataccccaataacattctcttcgttccgattcggtaaccatttgatcgccttgaaaattttactggaggtgcctagtacagatatctacat

SEQ ID NO: 284700 - DNA, 367 bp, Glycine max
ttgctttgtgtaatcgattacacttatttggtaatcgattaccagtgactatttctgaataaatcaaaagatgcaactcttcaaaaaggttttgactttttcaaattggttttaagtttttctaaaagttataactcttctaaatggtcttcttgaccagacatgaagagtctataaaagaaaggctttgttttgcattttcaatttattcattcattcaatcttgaatacttttccaatcaatctcttacagtcctttacaagccttgaatctctttgaacttcttcttcttcttcttctttgtaccaaaatctttctaaagttttctagttttctaaaccttgaaaacttgtgctattcatcttt

SEQ ID NO: 284701 - DNA, 407 bp, Glycine max
  unsure (1)..(407): unsure at all n locations
tattagagttttaacacactctttttaacacactctccactgttggtcctcaattaattgagaattataaaatcagaataatgactcatcatatgagtagtgggacctgccaaatttgtgatttttaagaaatttgagccaacaaaaaaaagtgttcaagagaatatgttagagacagtgttgctaccatttctctgtttaggaatggtgtttgtagttattagtgaaaatagaaatagaaaatattttccttatgtcaaacaggcttctgcattactatttttagtttttacaacattatgatagatcattatatattttttctttctctaaaacaaatgatttatttattgtcttgnggtggtgtatataaaaactgatcaacacattntacttttctttttttg

SEQ ID NO: 284702 - DNA, 301 bp, Glycine max
gagcttgcccaaaacccacaagttttaagtttcaataaattacatattacattacattttttaagaactcttcataataatctatatttacaaccctttctaatgcaccttgaaaaatactcaggaacaaagatatttttaatgaagatattattattggaataaaaaaacatgctagataaacacaatcggtatacacataagttcagaatggcaagggacaaagtataatcttcacctgtttgtgacctcaaactaaaactcataagtgataggaaatcagatggaaaatatataactt

SEQ ID NO: 284703 - DNA, 421 bp, Glycine max
tcctcaattgtttagcttgactccatcttctggttaagctggaaatgtccaaaggcggcacaataattctcctcaaaccagccaaacagagaacctctctgataggaaatcactggatcctccttcaaataacgaagtagcaagttcagcagaaggtatgttttgtcatcttaggccttttgtctaaatgttttgttagagctataaatcatatttgagtctccacccaatagcttatgcatttgggagacttggtcgttgacatggtatcaaagcctctctgaccaatggattaggatttcaatcaatccttgcctccatgatcccccttcttcataattcaattaagcttcaatacaaaggaaagtgagcttgtgcaccatccatgtttaaccttaaaggactcttgctgttatgttaa

SEQ ID NO: 284704 - DNA, 148 bp, Glycine max
  unsure (1)..(148): unsure at all n locations
ctcgtacccgagatcctctaatcgacctgctgcatctgttttacatcttatntanttangacccactatcctagaacatacatatctctatgcccctaacctacggaattaaaaataaacttacatgctgattgtgactgaatttgtg

SEQ ID NO: 284705 - DNA, 178 bp, Glycine max
tatggatggaatacttacttggcggtgacgaactttagtgtcgaaaccaatcaccaaatgcgagaaatgatgaccctaaggctggaaactcgttaatcgcgaggatatggctcttgcaacgtggaaaagacgatgctgaatgacaaaacttcccgacttgcgacatctatatatattg

SEQ ID NO: 284706 - DNA, 376 bp, Glycine max
ttcttgcctttaagttgaccaaatctaataccaccgacaaccgtgtgaagctagtgcacctcgcatacaaaggcttcttagaatcaatttgtaattgcttatacaaaggtgcatgtgcttgccaaaaatcgtcttgtccaagatcgtgtatcatgtcttttatatgatttgggatgtcttcattaaccgcgttagtatgagagcctattgttatatatgttgattcaccatgcgaaatccattttgtgaaattcagaattatcccctcacatataagatgtgatcttatgtcattgagtgactgtcgtctcccattcccacatttgacacatggacaaaaatatttttcacccataagtgatgcatttcgttcagc

SEQ ID NO: 284707 - DNA, 419 bp, Glycine max
taaagtatgcccgagtcattcatccctatgagatgttgtttaagtattgtcgatcagaattgccattccttggattatagggttgaaccaagctcatgcttttacaaaaaggttcatcaagtcaagttgaaatatggaagtaatcgtcttgcaaaattggggcaaaagatgagtcgagtcacatcactgcttcgtctactgccaaacatatttaggattattgatgtccttgttacttccagtttcaccttgacaaagatgtcatggaccatgttgaaaatctaaattgattcaaccccatatcctgtgtaaaaattcgcaatacttcaactgtacaccattcgcatacatacatgcttttcattgcttgcattgctcattgcattctttccttgaaaaataaaataaaataaataatg

SEQ ID NO: 284708 - DNA, 380 bp, Glycine max
ttcttagggatggaatacttacttgttggtgatgaacaaaagcgcggaacggaatcaaaaaatgcgaaaagtgatgaccctaagactgcaaactcgtaaatcccgtgggtatggcttttgaaagggggaaaagaagtttttgaatgaaaaaaaacgtcccccctttcgtcacttttatattttggtgcagaggtggctcgcccaggcgagctaacctgcactttttttttttttttttttttttttgaggggaacatttaaacatgcccctcccttctcatggattagcatcttgcctaacttgaacttacttaggttagaattaggcgttgattacttattttattattgctatcatttttttcaaatagtaaaagaaa

SEQ ID NO: 284709 - DNA, 422 bp, Glycine max
  unsure (1)..(422): unsure at all n locations
tggagaggatgcttcaatggaggataagaaagagtgagagttagagagaggggggagcacgaaattgaaggaagaaaaagggagagaagttgaactttgagttgtgtctcacaagactctcattcatcaaagttacaacaagtgttactcatgcttgtatttataaactaggtagcttccttgagaagttttctagagaaaactttcttgagaagcttctttgagaaaacttccttgagatgctagagcttagctacacacacccctctcataactaagctcacctccttgagaagcttccttaagaagattcctaaagaagctagagcttagctacacatacctctctaatagctaagctcacctccttgagatgagacgctagagcttagctacacacccnctataatagttaggctcac

SEQ ID NO: 284710 - DNA, 375 bp, Glycine max
  unsure (1)..(375): unsure at all n locations
ttgttgcgagcgcnnacctcgtccttcaggagcatgcctttgacccatgatgattcctttcacctcttcacgagcttgagctcactattgctgccctataaagcccctcaaaactttgctttggtcgagttcttcctttcgggccttcacggtttctcgttccaaggcttcatcggtggccatatagacgtgccttagttcatcatactcttttcagactttgatggctatgaacttgaacttctctttgactacccgggctctttcaagctctgcctttacggcttatacctcatcactatcttgtgaagctataagctcatcatctctcatagtctgtagatttgggagccaatccaatacttgtgtgcggac

SEQ ID NO: 284711 - DNA, 408 bp, Glycine max
  unsure (1)..(408): unsure at all n locations
ntgagccaaaatcctgactcaccataaaccttattctctgaagcagaatttataaaaagaaggaaaggatattcccaatcatagagaaagcataaaaggaaggattggatattcccaatcaaagagtgggagaaagagaaaaaagaataagaaaggaaattcccaatcaaagagtgggagaatgaaataagaaaagaaagaaatttcccaaccaaagaatgggagaaagtaaaaaagaagctcctagtcaaagaaaccagaagaaatgtgcagagaggtctttggaccagacaatatctgaacagtacagaattgtcaccaaatgaacataaaaagaaggaaaggaaaccacgacctataatggtcttctcccttngattaccaaccaaaatcccgtgcgctagcgac

SEQ ID NO: 284712 - DNA, 201 bp, Glycine max
tcaaatatttgaaggtctacctagtacacttgaattattatcttttttcttaagctcatttacctctgcctggtagtggctgggattgagtatgcttatgtgacacggctacacagattgcgaagttaatatatggatttgggctgcagatgaatgatttcactgataagccaatgataaaggttctgtggagatgtaact

SEQ ID NO: 284713 - DNA, 420 bp, Glycine max
  unsure (1)..(420): unsure at all n locations
tcccagatccgatcatggaaggacttggttactgttcttattaggcagtaccagtacaatacggacatggctctcgatcggaaccagcttcggggtatgactaaacgagagcatgagtccattaaggaatatgcccagagatggagagatctcgcagcccaagttgtatcgcccacgcagtcaccaccgccccaacatggatgaaagcaccccaaaatatccaaagctcataccagcccaatcccccaaattttttaatccgagccgagaattccctcccgactcaagtaaaaggaccacccgcagcagaaagagcgccagcccgacgcacagctccagccgcaccccggctagttaataatacagcccccggcgtgacctatanatatgcacagcaaccgaaagacaacttcccttcta

SEQ ID NO: 284714 - DNA, 435 bp, Glycine max
  unsure (1)..(435): unsure at all n locations
gcagatcnnnttgaagctttgattcattcgactaccannggcgaanncaactcgtactcgggatcctgttgagtgatccggatgatgcttttttatgtcatgctttaccgaatggattccttgagcctcactccatacacaatgcacttgatatgcgtgctgaatgtcagtgttacattgaaacatgggtgaaggaatcccaaagagaagtctacctaggagcttacttgaatccataaggtcatttattgcaatgggtgtacgaaaaataatgtgaccttatgaaccttaatattgcccattatagggcccatggcacctggtttgcctatgtcctaagaaggaatgttgctaaattgttcgcccctaagaaccggatttcaattaacttcactacaagttagtttaatttcactaataaggatggaagttggn

SEQ ID NO: 284715 - DNA, 365 bp, Glycine max
tggacactttcaatatgattgtcctacgttgtattagaaaccattttatgctgagatggaggataaagaggaacaagaggatgagctcttgttaataaccttcatagattgcatacaagggaagaaggatgagtggtttctagactcgggatgcggcaaccacatgagtagtaacaaggagtggttctcagaattggatgagaactttcggcacaatgtaaggcttggtaatgatactcacatatctgtgaaggggaaaggtagtgtttggatggttgtgaatgagattatacatgtaatcacacatgtatattatgttcttgaactcaagaataattcatcgagtatatgactgcttcaagaaa

SEQ ID NO: 284716 - DNA, 354 bp, Glycine max
ttcttctatagaagggtcggtcctaatttctctacaattgcatcacctctcaatgagctggtgaagaagaatgtggcatttacctggggtgaaaaacaagagcaagcctttgcttttctcaaagaaaagcttactaaggcacttgttctagctcttcctgacttttctaaaacttttgagctagaatgcgatacctctagagtgggagttggagctgtattgttacaaggtgggcaccctattgcttattttagtgaaaaacttcatagtgccaccctcaactaccccacctatgataaagagctttatgccttaataagagccctccaaacttgggaatatgaccttgtttcc

SEQ ID NO: 284717 - DNA, 413 bp, Glycine max
tccactatactacaaattgtagaatcatattatgtatccattctctggtgctcgataagaacatttatactcaccaacatacaattctccggccataaaaatcttaaggggaaaatatatatcagttatattagcactgcccaagttgtcagtatggtattcccttagcatgcataagtccccgaggactccaacaataaattttgatccagtccctaaaacatggtgctccctaaatgggaaaccaaaggggtgttcagcatttcattagcaaataattcagcccatttaaaataaagaaaaggaaataaaatctaagaaacaacagaaaacgaggccagtgtatgagatataaatgcagaataaaggtggcatcatccaatatgattaagatgagccatatggattaactg

SEQ ID NO: 284718 - DNA, 354 bp, Glycine max
ttctttaaatgtgtctaaatgaccataacaattgataagatgtcgctctaaattcttaaccatttggactcatcactaactattcaattgccttaagtgactaagtgaaaaaaacttagccaaagaggacatcgctctcatattctacttcaaccagaccaataattaacactctaacttgactggacaatagcgaagacagagttgaggactttaaattattttttttatatataaaactgatacaactagcttcaaagcttgagagacttatgtactactcgaacttgagaagcctttgtactctgtgatcgaccaagccggcaactcacatttaaagaatctagtggataa

SEQ ID NO: 284719 - DNA, 418 bp, Glycine max
tatgctacaaacatttataatagaccccctcagcttataaaccaataacaacagaataattatgatctttcaagcaacagatacaatccagattggaggaatcatccaaatctgagatggacaagtcctccacaacaacaacagcctgtccctcccttacaaaatgttgctggtccaagcaagccatatgttcctcctccaatgcaacagcagcagcagcagtcacaattgttagtgcttagcactactgagtttaaaaaggttggctaagattttgttaaaacataagcacttagacaatgaaggaaagctggagttgctgcacatgatgaccaacgctatgtcaaggaataagatcgggctgcataatgcacaaggcaagataaagtgtcaagtgatgaattgaagttgaacgatc

SEQ ID NO: 284720 - DNA, 384 bp, Glycine max
  unsure (1)..(384): unsure at all n locations
atgcggttgcatgctttctntgaaagcggaactcgaaaaaacaagagtgatctacgtgaagctaatgacggcattcactacagtcatgatagattgtgatgagctgagaggtcaacatgactacggttgaatcattatagcgggaaacaaaaagggcccgaaaggaagaatagagcaggaacaaattccgagggaccgagagggaccagtcaaggatggaaagcatggtgttagaggataagttgaatgcttgtcaaaggtcgaagagaagcttgatggaacggttgagcacaacaaaagaaaatatgttgacaattattgatcaatataaggagaaggtgaacttagctactagtcatgggtagaggctagaggatgaacatg

SEQ ID NO: 284721 - DNA, 418 bp, Glycine max
tttccctcactctcacgttgcttttttcttcctttctcctccaccattgaagcctccatcaaagctccaaactttactcaccatttctactccaaatcgcaaaaggaagccattttcggagtcgtgaagcgcatctcaacgttgtgggacttcaaatttcaggtttgggtagacttcttctcacatgattttcatgggtattgggtgtttgggagatatgatgggtagttttactaggtttatgccttatggtagttatttgtgaaggaatttgttgaaagcatgctaaaattatcatgtttgatgtgagtcaaatttacccattctgttttaggggtttatgatgatgctttgtgatggttgtgtgctgaaattgatgatagaaaactgatagagatgaagggtagagctaaccgag

SEQ ID NO: 284722 - DNA, 463 bp, Glycine max
  unsure (1)..(463): unsure at all n locations
ggagagacncgtggancctttgaatgcatgcattgccaacgcaagtacatctagttcccagcgtcgtatcatacatcaggctgatgcattcttatttgatgctncagtggatctaaggggcttacgttacataatacgccacccagaccacaatacaagctgaaagtgtctactctgttgcacttggtcagaaagaatcctattgataggatctcctagtacctaacgagcaacaatcggcacactcaatcgtgacgtgtctcctaatattatatatccccctctttaccgcatttgccttacaactatgtgccattgaaacctgacatgactcattacaatcaatgtgatagtagtctatccatgtgctgtccatttgaacacctcaaagcatatctaacactgctcatatacctgcagaatgctcatatcgtttcctcaatacaggactgaaccatcaccg

SEQ ID NO: 284723 - DNA, 408 bp, Glycine max
tgtgcctcttcacgtctgtttatgaatgtagcatatatgatccaaagacccttaggtgctttgctgatggcttcttcccattccaagcttcaattggagtcttgtcttttacagactcaattggacatctgccgagtatgtaaacagcagtgtagactgcttcagcccagaatgtgttaggtagtcccttttacttgagcatcaatctagccgtctgcataactgtgcgattctttctctcggacactccattttgctgaggagaatatgcgactgtacattgtctctcaatgccttcatcctcacagaatctttcatactcgtgagaggtgtactctttggcgcgatcacttcataatacttttatccgttttccactttgattttcaacaaggaccttgaactttt

SEQ ID NO: 284724 - DNA, 364 bp, Glycine max
tttcttcaacatcagaccacttccagggtgctggaactacttcacatggacttgatggggcctatgcaagttgaaagccttggaggaaagaggtatgcctatgttgttgtggatgatttctccagatttacctgggtcaactttatcagagagaaatcagacacctttgaagtattcaaagagttgagtctaagacttcaaagagaaaaagactgtgtcatcaagagaattaggagtgaccatggcagagagtttgaaaacagcaagtttactgaattctgcacatctgaaggcatcactcatgagttctctgcagccattacaccacaacaaaatggcatagttgaaaggaaaaacatgactt

SEQ ID NO: 284725 - DNA, 402 bp, Glycine max
ttccgctcggatgtccgattcatgtgtatcacatattgagacactcgaaattgatcaatggaagctctcgagatattcaaatggtcataacttttaacaaggtggtctgattcaggcgcataaaataacgagacgtttgtaattgaacaacggaagctcgagagaaattcaaatggtcataacttttcacacggaggtccgactcaggcgcgtaatatatcgagatgttcgtaattgaacaacggaagctctcgagaaattcaaatggtcaaaacttttcactcggatgtccaattcaggcacatcacatatctagacgttcgcaatggaacaacggaagctcttgagatattcaaatggtcataactcttcactcgaatgttcgattcaggtgtatcacac

SEQ ID NO: 284726 - DNA, 378 bp, Glycine max
acgttcttaacaaatggcatgcgaagtgggtggaattcctagagcaattcccttatgttatcaaacataaaaaaggaaaaggtaatattgtagccgatgctctttctcggcgtcatgcattactttctatgcttgaaacaaaatcgattggacttgaatgtttgaaaagcatgtatgaaaatgatgaaacttttggagaaattcttaaaaattgtgaaaacttttcagaaaatggtttctttagacatgaaggctttcttttcaaagaaaacaaattgtgtgtgcctaaatgttctactagaaatctgcttatttgagaagcacatgaacgaggtttaatggggcatttttgggtccaaaatactctagatacattac

SEQ ID NO: 284727 - DNA, 280 bp, Glycine max
tcattgcctaacaagccaacttacaacagcaagcttcaagagactcagcataaggatgcacagaccaaagttgcgtatgtaaaaaaattgtatgaccaagtgaaggtgcaaattgcaaagaagaatgaaagctatgccaagcaagcccaaaagaaaaggaaggaagtggtacttgaacccggtgatgatcttggacatttgaggacaaatgttttccaagaaggagggaatgatgagaatcatgaaacaggccatatacagtctaaaggcccaagtggag

SEQ ID NO: 284728 - DNA, 379 bp, Glycine max
ggtgcttaagcttcttcaactgcacaaggctcttaatgtttgaagagtatccttgtggaaccttcacccgacgaagacactgacaaaaacttatcttctcctttttggacaaggtatggcaagctaggggcaagtaaattttcttcccattagaccttggatgcaactgtgatcgtatgcccatatcagctagatcttgacaggtattgaagccatccttcatcttgccttgaatgttaaggagagtcccaatcacactatcacaaacatttttctccacatgcataacatcaatacaatgtctaacatcaagatcagatcagtacgagagatcaaagaatatggacctcttcttccatatgcaactcttacttttatc

SEQ ID NO: 284729 - DNA, 409 bp, Glycine max
  unsure (1)..(409): unsure at all n locations
ctgacatgagtcatcaaaagactataaatatgtgaccatggaatggaatttaagatgatatccatcatctatctttcaatcttctctcacacatcattcagatatctttcaactctttctacaaaaggntctgatgctttttctttgcatctttctaaaagttttgatcaaaactttctcttccaataaatattgttcagaaacttgtgctattcatcgttttcattctcttctccctttgccaaaagaacaaaggactaatcgcctgagaatttttctggatcgttcctttcccttaagcaaaagatttcaaaggactagccatctgagatatcttttggttccccttacaaagattcaaaggactaaccgcctgagaattctttgtccaacacattggagggtatat

SEQ ID NO: 284730 - DNA, 373 bp, Glycine max
tatcttttcatttggttgctctgctacagtccccaagcattagagagaaagcgaaggaatggaagcctcaatttcattgtctccatgtaaggggtatttctctctctacaggcattcattagcaaatcccaatggtatgaacctacgaaattgagtaccataaacgatttctgagtctcaaaataatccaacggttaacgagtttaacattgaagtgttactaagatggatttgggtatatgccggaaagagattggattattggagaggaagagagaacacatttaggaggaagagagcataagaacatatcataagtgtaataattgatcgaatatttatctatttataggtcgggtactctgagcttatt

SEQ ID NO: 284731 - DNA, 423 bp, Glycine max
  unsure (1)..(423): unsure at all n locations
ntagtcaaacaaaataatccagatatgtcaaagaattgngtgttgaaaaagcacaacaagactttntgtgattagtttaaagatacaatctttgtagatgagaatgcttcaaaaacattaagaaagctagcagatgggcctaaaagaaatgttataacccgacaaggatacaacataaacaagtattcattttacacaaaagcacaagatgacaaaagtacaatgcagaacaacggggtcaccctaagggctgaatctcaacacttcgcaacttttgttttgtaaattacagtgtagtttacaaaagcaaaggtgaaaggaaagatattgagctggtagaggaggaagagccatagattggtgctgattgttctggagcaacctctaataaatctgagatttataaggaggaagcacataata

SEQ ID NO: 284732 - DNA, 388 bp, Glycine max
tggagtgcattcttgctctagaacacaatgtttgcttacaggcaatggaagaaggtcaagaggttctgaaagtaagaaccaaaacataagatcgcccagtgaggtaaaattgtcaagctaatgacgttaaagaagcgcttcctgggaggcaacccagttttaatttctgtagtttttgttttcatgcattagatcattgggaacttgctgcataatctgtacataggagtatattagcctatctttgaatgttaaacataagggtttcaatttcttggaaaaaggactgaaaaataactcagaaaatattttataaaaaaatactcctttcgctaagcgcaagtctcacactaagcgcatcattattcatgcgctaagccatgagtct

SEQ ID NO: 284733 - DNA, 419 bp, Glycine max
tgttgttgctgctccacagagcccctcggaacttgttccatccgtgctcttccctacgagccctcttggtctgttgttcgaaggctttggttgttgctatatttatatctctcagttcggcattctcctttcggattttcagagttgctgatttgaacctttctttgactgtttgggcttgctcgagttctgccctaagggcctgcacctcttcgtcttcctccggtgcctcaacttcctcccttttagcggttctcaaactcaggagccaatccaatccttgcacgtgggctttcaaccacttacggtagccactgatgggcccattgttaccgcccctgagttctttgtccttcttttgcaccacctcccatgccttgcggaccttctgaagtgtctccatgttggtcttattgaaa

SEQ ID NO: 284734 - DNA, 375 bp, Glycine max
ttcttccacaacatccaagcaaaacaacattcaaacagcacaagctatcatagccaagcaaaacagagcaaaggcagaaaactctgctcaacacatcaaccaaaatcacagcttttctcacttaaagaccacagtaacaattccttcgatccaatttgttaaccgttggatcgactccaaaattttactggaagtctatagtgcataagcctacattgtgaccgttgggatctactagcatacatccagaactcattttgtactactctttccacagccaaccacacacaagcatttttctgcacttgtgcaaaattctgctgcacaatttcacagcaaagattctgcataagtgcagatttcggacatcacact

SEQ ID NO: 284735 - DNA, 425 bp, Glycine max
  unsure (1)..(425): unsure at all n locations
ntgctatctcttctctcctaacatcatggttaatttccattccgattcctcaagttgtgcatacatacttgcaatttgtttgttgctcggcaaagaaaggccaacaaatcataggcacacctgcagatatactttcaagtgtagaattccaaccacaatgggttagaaaggccccaactgatggatgagaaagcactttctcttgaacacaccaacttgttatatatcccctgtccttgatctcatcaaagaactcttgtggcaaagatatagattcacccattactacatctggtctcattatccataagaaatgttgcttgctatttgctagtccccaagcaaattctttcaagtgatgctctgtcatcaccgttatacttccataattaacatatatgactgagttaggttcccatttgtct

SEQ ID NO: 284736 - DNA, 278 bp, Glycine max
  unsure (1)..(278): unsure at all n locations
atgtgcatgcnttctttcttagcataaacaacacttactagaacagcccatccgggcaccgcgttttcattaaaaatgagtaatgcaacacataattaactagaatttttattaagaaaaatcaaatactaccgtgtgagatgaacaatttataaaattgaccaaaaacatgatgaaattctgaatttattcttttggggaccacttatttgattttgaagtatgctctgccaaactcatctcattcaatttacttattagactaatatcttttttgt

SEQ ID NO: 284737 - DNA, 415 bp, Glycine max
tctttatttatttatatatatatatatatatatatatatatatatatatatattcctttggcggatcaaaataagtaaaaaatattttgagccttgtggacgagattctagagggtaatttgaagaaaaagatcattgtaaacagttgtagcatttgttgctagagaaatgattatttggactcaccaggttcactagagcagacttggctttaactttttcagacagcttcaaattaattccatttttcattatcaaattgatatgaagcacatgatcaaatctttcagtttttattatagtacagagattagtttcacatgaatggatgttctttttaatataaccaatgatttttattagatatatgtttcaaagttttaattaaaaacatcaacatgtcattatttattag

SEQ ID NO: 284738 - DNA, 368 bp, Glycine max
tgctttttgggattcatttcgaatccgagggctagcttcatcatataaattctttcgtgatcaacccatgtcatcaaactcccagcgggattaaaagacccatggcatcactctacgaccttcaatcaagaaagtttcacttggtcatataccaaagtgcaacaatccattgccatccttcaatggtgtatacgattggtcccaaggccttatatttctcttgctgtgcaaagtaatcaatgttttgaacaaaaaaaggggggaaaaccctatgatcaatatttcaatggattgattaaatgtcaaacgactccattgtagtcactctaaaatgttcaagtgactgaatcagaccgaacatacactct

SEQ ID NO: 284739 - DNA, 416 bp, Glycine max
tcaacatgaagcaaccagctcacttgggcaagcatgttacttctgaactaagccaccatctcgttgaggcgacctgagctcacctgggcgagctgggcggcaagctcctcccctattttggctataaatgggcatgagaggctgaggggaaagagttcaacacccttagtattcagatttcacttaaaattagtgaggagaagaagaaagaaggagaaaatcaaggccgaggcacttccgtaacgcttccgtgacgtttccgtgaccaattccatgaacgttctctgtcgttcttcatccattcttcatcgttcgtcgatctttaactggttagttttttatttcacagctatgaattcattctatgcatcgttaggggtccattcttgcattgtatgttttcatcttcatctcgt

SEQ ID NO: 284740 - DNA, 330 bp, Glycine max
gctacatggcatgatctaaaacccgcactcagcgacccgagccccgaagggttttccctttttcacggaaccggtcttggccacgccacattcgatctgttccgactttctaccctacagggaattttacttgatgcatcaaatgcccatcgagcataagctataacgcaatcgatgagacatatacaaagatatggcacatttaccccataggcgcctttaaaagtcaccaagcttaatctagggaagggattacttatccctaaatacagtacaattctgtccgaatacgcaagaacctatcctaaagttacatcgccaccctagttc

SEQ ID NO: 284741 - DNA, 411 bp, Glycine max
aaactcagctctgatgcccccttctctatacccactgtttatatccaatctcaggctcctcaaggtattggtaagagcaactcccccccatccaccctgcacatctgagatccaagcctctttaatcatacaatggtaccctttatgttcaagccaccagtccaccaccctaaaaggcttagggccccaatccaccatctttgtggccaagaagatcgggcaatgatccgaataatctctttgaagaacatgccgagaagcatcatgccacaaggatagccatcgatcagacaccatgaatctgcctagtctgctcttggcactgccattgggcctaaaccaagtgaaattgcctccaaaacatcgtatgtcctggagctccatctcaaatatccagacattgaactccga

SEQ ID NO: 284742 - DNA, 338 bp, Glycine max
  unsure (1)..(338): unsure at all n locations
gggatcctttaagtcagtgtgttgcacgctttcttgcaagaggaatgtggaacggtgaaacttccctactttgttcgttgaccacagagcggtacctggagatatgtcgcgggggtcaggagaccttgtggaggtcctgtggggtgcttttgcccaaaacgatcttgaccaatcccgacccttcccgggcataagcagtcggtgataacctgtgatatacctaaacaggcgagctgctggcatgtccccgttttaagaagctagacctcatggcttggatgcttgtgtggagactggccanccataagtcatgagtgagatgtgggatatggcctctg

SEQ ID NO: 284743 - DNA, 418 bp, Glycine max
tgttagaactatcatcacatgatgctttattggctctgaataagttgctttctaagcaacttgagattttaacagaaacacttggtaagttgccaactaaactgtctattggtcaaccttcacattcttctgttttgcaagttacaagttgtaccatctgtggtgaggctcatgaaataggccaatgtattcccgttgaagaaaacactcaagaaatccattatatgggaaatcaacagcgacaagggtataatcaaggaggattctcaagcttccagcagggtccttataatcaacaaggacagtggaggtcacaccctagtaattagttcaacaaagaccaaggtggaccttcaaacatgccaatccaacaagggcctaacattctttacaggactactaagctagaggagacttt

SEQ ID NO: 284744 - DNA, 370 bp, Glycine max
tgtgcatgcttgctttaaattgtctgtgggagatccttgttgataatcttcatccaaaacttgatgacgtgcccattagttggacacgtcagatgatacatgtatgaaatcacgtcataagtatcaataacattacgagtcacatggattttttatattgaatttcatttaataaactattttattaataagcattttgttgggttgcggaagatttgaaggtttctggatttgggtgctgcgaaagtacagattttgttggattttggggatagagattgacgtagcgctgcgaggggtgcggaatgatgaagagatctcgacgatggtggatgaactggtcgaggggtgtaaccgcctttacttaatc

SEQ ID NO: 284745 - DNA, 420 bp, Glycine max
tgctcgtcttgctgatatttatcatgcatacttttctgatgatgaccgacgaacaatgagggatcaacttgaaacttatgtgcttcaagagagaagaaatcttctttttccacttgtgaagatgttcaaagtttggctatgaagatggttcaaactgagaaacatttggtatttccattggtttataaacttattgagctagctttgatattgccggcgtcgacaacatccgttgaaagagctctttcagcaatgaagattatcaagtctaaattgcgcaataagatcaacgatgtgtggttcaatgacttgatggtatgtgacaccgagcgggagatattcaagtcgctcgatgatattgatattattcgaacatttaccgcaaagaagtctcggaaaggacacttgcctcgtatttta

SEQ ID NO: 284746 - DNA, 253 bp, Glycine max
tttcttccatttttccatggcgagcggctggatatttttgagcctgaatcttacctccgactcaaacgttatgacccttcgcatatctcgagagcactctggtgttcaatctacgagcgtctatatatgagatgcgccttggtcggaccccccagtgcaaacttacgtccacttgcttcactggagagcacgcgtggatccaatgccgatcgtctacacatgctatgcaagtgattcgcgccttcgagtgaaa

SEQ ID NO: 284747 - DNA, 410 bp, Glycine max
  unsure (1)..(410): unsure at all n locations
ntgcagatttggtcttcgctcagtgaaaggatcgatgtgggtctgaaaaaaggcaaatttgatcatcctactaggacgactgagaaaactggggcaaataaagagggtgaggatgagggagaaacccatgctgtgactgccattcctgtacggccaagtttcccaccaaacccaacaatgtcattactcagtcaataacaaacctcctccttacccaccacccagttatccacaaaggccatccctaaatcaaccacaaagcctatctatcgcacttccaatgacgaacaccacctttggcacaaaccataaaaacaccaacaaaaaggaattttgcagcagaaagcctgtagggttcaccccanattccgttgtcatatgctaaacttgatcccatatccactcaataa

SEQ ID NO: 284748 - DNA, 367 bp, Glycine max
tctttctttaagataaactcttttctctttgtctctctcaactgatcttcattcttctttctcttttcacttatggtcttcctttatcttgcacaaattttgcggctcttccattggtgatgatcatggaacgctaatcacttaattaatccatggatccactccaagcaaggctgaatttgagttctgatttaatactctaaatctgtgtgaatgttcatctttttcttcaatcctatatttgattttcgagattatgaatatacttacgattgaaaatacattaggttatggattcatttcctaattgcagaatttaaacacaaattgatcggatgatattctaacctaattcgtgatcacaatg

SEQ ID NO: 284749 - DNA, 409 bp, Glycine max
ttagcttctttacgaatcttcttaaggaagcttttcacggaggtgagcttagttatgagaggggtgtgtgtaactaagctctaccttctcaaggaagttttctcaaagaagcttctcaaggaagttttctcatgaaagcttctcaaggaagctacctagtctataaatagaagcatgtgtaacacttgttgtaactttgatgaatgaaagtcttatgagacacacttcaaagttctacttctccccctcttttattccttcaattacgtgctcccccctctctctttctctccctctttcttttcctccattgaagcatccttccaagcttcttatccaaggctcatcttggtggtgaagctccttcttccatggcttattccctagtggatggcgcctcccttctcct

SEQ ID NO: 284750 - DNA, 374 bp, Glycine max
gtgcttccaaattagtgtaccacactaccgcggctccggccaagctatcttgaaagaagtgtattaaaagcttctcatccttagagtgtgcgcccatcttgtggcagtacatcttgagatggtttttgggacaagtcgtccctttatacttgacgaagtccgacactttgaactttgggggaataacaacatcgggtactaagcaaagatccgtcatgtctgcgaacagatagtccccaaatccttccacggctctcaatctttcctcgaggagatcaagcttcctcttttcttcggttgccgggggcggtccttccgtggacaaaactattggttgtgtcgcgatgttgggttgaggcaacgtgctgggtgcc

SEQ ID NO: 284751 - DNA, 424 bp, Glycine max
tgcaaaatggaagcaaagatatctctctatgggtttaagaataaccctcattaattcagttttaacagcattacccatttacttgctgtctttttttagaatccctaaaaaagtggtgcaaaagatagttactattcagagaaattttctatagggaggtgattttgaggccaacaagatcccttgggtgaaatgggacacaatttgtcttcctaagaacaaaggggggttagggattaaagacttgatcaaatttaatgaggctttgcttggcaagtggggttgggagttggctaataattagaaccaactttgggcaagaattttattgtctaaatatagcggttggaatgaatagctctctggtagaaacagtagtgatttctctcattgatggaaagatctaaagattgtatttcaatac

SEQ ID NO: 284752 - DNA, 376 bp, Glycine max
tttcttacttgtattgttgaaaataagtgcaaaaatgaaggagaggtgcaggcagtgtcaattggaagcaaggtgcagagtgaatgcaaggaatggggaagaaaaatgcttaatggagagaaatggtaactacctaaggcagttacgcctctttaccttttggcagattcgatccattctcttatcacatagacttgataagcgagcctaagtgatgtttgagttttgaaaagctcatgtgcttatcgactgtactcactcagcccaattcaagaaattagaaattccagagaaacttttgggcttagcgcaaagatacatgctgagcgagttctacagatataaagtgtcttgcaactcgtgcttagcaggcatt

SEQ ID NO: 284753 - DNA, 424 bp, Glycine max
  unsure (1)..(424): unsure at all n locations
tacctcgaacacaacagcgacaatgccggcgagattgttcctcangtgaaatgtacctcagctgaccacaaacaccatgtactaccagtcaaatgtacctcaggtgaccagcaattcgccaatccttgcaccagaaaccaaaaaaggtccttatcttaaccacgagttccagaaacagacctatcacggtcatgctctttagttcaatagaacaacataggtagacgaagcgtacctgtgacggtcttcagtgtaataacagagcaacaaccttcgatgttaacaatgcaatggagaagagagcgtgaaagggttcacagagaagaagaaagcgcgagagggtaaaccgagaataacggagcgcgagcaaaatatgccgtgtcaaatacaatttaaaatgttagtttaacatcgcgtttcaata

SEQ ID NO: 284754 - DNA, 204 bp, Glycine max
ctatctacaagaaataaccgttattcttggacgcgctctactgtgcttcacacgaaccatgctctgacacaactcactccttgtattagcacaaaacttgtggctataatgtcggagatgaccatggaacgctatgaaaacgaaaaatacatggatgcacatcaggaggagatgatacaaacctatgccatattatgaatagct

SEQ ID NO: 284755 - DNA, 323 bp, Glycine max
ggcatgtggtagtgtattaacaagatttttttataaaaagggagccttaaccgaggctgttttcgtaattatcatagccggactctagtatggtgcttctttaaaaagtttgacatagcttagtctgatattgctgggtaggcttggggaacaatgtggtctattggtctttggaaaggagctagataaggtgtggaatacatatcaaaggacatggcagggaaggatctatctatgaagtctatacgatttagtcacgcagggtgtgtgaagtcatacggggcccatttttgacagaggatgggttgatctggcttatgttt

SEQ ID NO: 284756 - DNA, 377 bp, Glycine max
ttgcttgtcatttttctgagtgactcataccagccctttgagattacttcaattattgttcttcaaaaaacttgtctttctcaatacatttacacaaactcaccaataggcttaaactcggaaggtttatgatttatgtttagaaggtttttcataattaaaacacaaagaattttggactcaacaatggagtctttgctaagaaccagacatgagagctagttgagcttcctatgggaaagaggaaacctctattatcaaaaaaataaagggaaaagttcacggctcgcctactagcaaaaaggcattcaaagaagaagaggattgactatgatgagattttctccccaatcgtaagacatacttctatcagggtg

SEQ ID NO: 284757 - DNA, 415 bp, Glycine max
  unsure (1)..(415): unsure at all n locations
aaactcanggcaaacacatcctcggccatgctcttcaacctaaagttcacccttggtgagccctttttgtttctaagttccatcttcaaaggaactcgaggtacacaaggtttgtccttgacgatcttctttattcctaatttttatctgtctaggaatacgagtatatataaaacccaaggtctgcccttggtacagattcctccaaaacccaaggtccacccttggtacgtactcctgtaaaacccaaggcatcccctaggtccactcactcgcacaactatgacgaccacaatcaaaggtctaagttcaacaacacaaactaccaccaaactatttggcaaggcctttcaatcaggtggaagtcatacttgctcctcaaaaccatcagagaagaagcttcgcaagtcaaaac

SEQ ID NO: 284758 - DNA, 375 bp, Glycine max
tgttcttcgagcttatgcaaatggccataatatttgacttgggcatccgattacggcccataacatatcgagaatttcgaaaatgaacacagaatctcctagcgaattcaaaccacctaacttttgacacggatatctgattgccacccataacacatcgagactctcgaaattgaacacagaatctcctggcaaattcaaactgccgagacttttcacacgaatgtatgattgaggtcaaaaatatatctcaacgctcaaaattcgacaaagaagctttggggaaattccaattgtgatgacttttgactcgggcatccgattgaggcttgagatagaatctcctagcaaattcaaatggccataacatttgac

SEQ ID NO: 284759 - DNA, 427 bp, Glycine max
  unsure (1)..(427): unsure at all n locations
ntgagaaaattctaacgacaataactttttacgcttatgttcaattgagccccatagtatatcgagacgctcgtaattgaaaatagatgctcgtagcaaattcaaacgacaataacttttaactcggatgtccgatggagtcctgcaatatattgagacactcaaaattgaaaatagaagctctgagaaaattcaaacgacaataactttttactcgaatgtctgattgtgtcccgtagtatatcgagacgcttgaaattcagatcagaagttctgagcaaaatcaaacgacaataacttttaactcgaatgtccgattgagtcccgtaatatttctagtctcacgaaattgaaaacagaagctctgagcatattcaaatgacaataactttttaatcgtatgccgattgtgtcccgtagtatattg

SEQ ID NO: 284760 - DNA, 377 bp, Glycine max
ttgcatgcatttttattgacactattgataagtctcccatggaagcacctgatctgagtgatgctgaagcaaccaaggtttttcaaaagtacctagatgagtgccttactgctaagtgcattatcttggcatcaatgagttcaaaactccagaggcaacatcaagacatggacccatatgagatcgtcgaacatcttaagaagatgtacgatggtcaaagcaggacggctagattccagttatctaaggctctgtttagatcctcacttgctgcaaatgaaaaggttggaccccatgttcttaagatgattgatctcatagaacaacttgagaagttgggtgcactcttgggaaagagctttctcaagatttgatta

SEQ ID NO: 284761 - DNA, 415 bp, Glycine max
tccactaagattcgaacccacaacaaagtatgtttataaaccacatctaccactagatcaagtcaagctttatttaaaattgttagtttaaaatgtagattaacaattccaagacagtaaacaaaacccgcaattaaaatgacatatttagatcaaacagcggaaattaaaaatattacgagcgtatctcccgccattgcaaattaaacgggaagtttgttcttccagacccttactcactctgaatagatgatgtattttttctgaatagagaagtgggtttggtgatacaaaactgagagcacctcattctatttatagagtctgtccatcacagagctctcaagaacgtgagatatgaagggaaagggaagttaatagtacgtgagataagagatagaaaaaaggaacgtgg

SEQ ID NO: 284762 - DNA, 597 bp, Glycine max
  unsure (1)..(597): unsure at all n locations
ggaagaagtaccanattggagccccatcggagtgcattgcgaatgaccatagccgcngaagannnnacagctcgngnacncncgcgngaatcgcgtctcngacgnagcacagtcgatgctctatcncctttgtctttttactanacaacactcgcagacgcatctttgagtcgaagtagaacgtcacagtcgcgacgtctctacgtccagacactaattagacgctctagtcgtcttgtcatccgtaatctgatgacgtagaatacctgctataatagcttcgagctgagttcaacgaaccacacctggactgtactccactgtgatcttctcacacaccattcgtcgggctcgcctctcgtctaggcacagagcagattgtttatcctgacctcttcatcggtcgtcccgtcgttactgtataaactcacagatgcttaagacgacgccgcagctatgctccatcacattatcctcgaagagccgtaaattcctcgtttaacgcactggacattatctcgatcttttgatcgctaaactcgagtttcacaaacgagaactgtcaccgcgacttcgtcatcacccgcccttggaccg

SEQ ID NO: 284763 - DNA, 418 bp, Glycine max
  unsure (1)..(418): unsure at all n locations
taaaaactagctagaagttgaaaaactagttattatctagtagttggaaaactagttggaagttgaaaaattgatttattaaattataagtgtttgattaaactagttgttgaagtaactcaaaagtaaaaaatgatagaaaaataacaaaatcatgatttatttaaaaaaaggtaacaagagaaatgaataaagacttgtttatcgaataaccaatcaagctttgcaactagtaaaaaaagctaaaagcaagctgaaatgttttttcaaacatactatttgtataatgggacaaatatcacctcattatgcttatcaagtctatagggtctgtggtgctcaaccatgttaaacctttatactaaagcanattagacttgcaaaaccattttatttatttctagacttctatgtacac

SEQ ID NO: 284764 - DNA, 254 bp, Glycine max
gcaattcagctcggacccgggatcctctgagctgagctgttgcatgcttctttgcgaaagcttgacgctggagctgaactatccacttccctatctcttttagactgtagatccctaggctcttgaccttgacttgatagaacctgtttttatgagaaggcgtttgacttgatcccatgttttactttcgtgaacagacatccgcgtgattcaaaactcctacatctatcatgggtggaatggatgcatgcttg

SEQ ID NO: 284765 - DNA, 411 bp, Glycine max
  unsure (1)..(411): unsure at all n locations
tgactaatcccgacccaacccgggcatagttagttagtgagaacctgtgacgtacctaaacaggcgaactcctggcagtcaaccaataaagtccacagagcaaggaggcttgggtggcggctggccagctatggatcttgagtggtatctggaatatggcctctggtaatcgattaccaagggtttgtaatcgattacaaggcttaaaaatggaaacaggatgttaatatggcctctggtaatcgattaccaagggtgtgtaatcgattacaaagcttaaaaatggagacaggatgttaatatggcctctagtatttgattaccaagggtgtgtaatcgattacagggcttaaaaatagagacaggatgttaagatggcctctggntaatcgataccaatggtgtgtaatc

SEQ ID NO: 284766 - DNA, 352 bp, Glycine max
  unsure (1)..(352): unsure at all n locations
ttgcatgcattcttntggtgggacatgttgacttgctttccaatctgacattcgccacagatcctgccttcttctattttaagatcgggaatgcctctaacagcacctttgtcaatgattttcttcatgcctcttaagtagcacatgtccaaatctttgatgccatattctgactttatcttctatggacgatagacatgttgaggagtagctggtttcttgaggagtccataggcagcagatgtccttggacctgctgcccttgattagagcttcactcttctgcttcgttaccaagcattctgactttgagaagcttacattgaatccttcatgacactactgactgatg

SEQ ID NO: 284767 - DNA, 402 bp, Glycine max
  unsure (1)..(402): unsure at all n locations
aaccataaccggtgagagtgcaatcttttactttagtgaactactagctttgagtaatagtctttgcatcaatctttgaaatctagaatataacgtatgaatgaagacatgatgaacgccatgattgtatatacaagccaattgactaaaaagcttaccttgaatgataattgtatcctttgcaccctttgtgagctaaattacattttcaaaattgaaccctaaacttgaataaatatctctagataccttgcttacattctatgagagcatatggctcaaggaaaatttaccctaaacttangggagtggagtcgatttggatgtaaagaaaaaggtaaagcgtcaacacacacaacaaataagtggtgtgctaaacaaaatgtaatcaaagaaaatgtg

SEQ ID NO: 284768 - DNA, 334 bp, Glycine max
tgcttgagctgaaaaaactacatctctagaatcattatgaagaataagacacgcgtgcatgacgcattacatagcctacctattgagctacgcttcatatagtactattcagtcgtgcactaacctactggtacctgtattataccgattgacacatccttgtatgaatgatattacgtacttatgggacaccagtatctccgcattttccatcgatgtcacattgctggatagtgcatattcaaagcacattctcccaataatcctcaacaaccttgcttatgctgtgagcacaaccctcagattagtcatgagcatgcttgcatagacatac

SEQ ID NO: 284769 - DNA, 389 bp, Glycine max
gacactactacaaactcaagctttatactgtagttgtgcttttagtactactgtttgttatgctcttccttttgacgatggcctatgtagtgtgtatatactcaagagctacacaaacgattgcatacactagttggaggctatagcacaaagagaactaatgtggtggaagtcaagcatttgttgactgtgtcctcagtcctcttgtcaactttacaaagatcctatcatttagtatttttcattcatctaataaatactttttgaatttcgaaagatatgtgacggctatgtgcacatagttgttgtgtgacttgtggagacctggtaactgcttcagccaatgtgatttggtcttgtgctttccttatagtatgtttatgagccac

SEQ ID NO: 284770 - DNA, 287 bp, Glycine max
ttacgagcatggcgatgtatcacaggactgctcatacatccgagtgagaagtgatcgtcagaagaatatctcatatctgtgtgattcaataaccaccatcgtgatatatgacgggacttagatctaacatccgagcaaaaagttattgccgttggagtttgctgtgagcttttacattccatggcgaccgtcttaatatattacggatgtcaatcacacgtcctagtgaaaatttattgttgtttgaattaattctgaggttcacaaatcaattatgagcgtctcca

SEQ ID NO: 284771 - DNA, 348 bp, Glycine max
ttgagctaattcaaacgattataactttttactttgatgtctgaatgagtcccgtaatatatcaagacgatcgaaattgaattctgaatctctgagctaactcagacgacaataacgctctgctcggatgtctgattgcgtcccgtaatctattgagacactcgaaattgaattctgaaactcaaagcttattcacacgacaataagcgtttactcggattgtcgattgagtcccgtcatacatcgagacgctccgaaattgaatgttgaagctctcagcacattcaaacgacaataacctttttactcagatgcctgattgactcgtcgaatatatcgagacgatcg

SEQ ID NO: 284772 - DNA, 367 bp, Glycine max
ttgtcttcttgcaagatggaagcaaagaaatctatcaatggggggtagaataaccctcattaattcagtcttaacagccttacccatctatttgctgtccttcttcaagatacctaaacatgtggtgcaaaagattgtatctattcaaaggaatttcttatggggaagtcaccaagactccaacaagatcccttggggaggcgccatttgcacatgaatcactcttgaggcaaaaatcaaggatcaaatggctcatggaaggtgacagtaacacatgcttctttcataaatccataaattttagaagacattataatgcagtctaaggaatattcattgaaagtatatgggttcagcaaccaaaatt

SEQ ID NO: 284773 - DNA, 410 bp, Glycine max
  unsure (1)..(410): unsure at all n locations
tgttgacacgcggagatttatcgtcatcttccgcgtacacaagatctgtcatactgacatttgagtcacgctgacgggcggaaatacccgagtggttatccgtataaacattcttttgctgtctgtaagacaaaaagcctgatagcacgcagagactaacgtcgtcttctgcatccttcgtcaatcgcggccgacaagcccgttggcacgcggagatttacgtcatcttccgcgctcacaagatctgtcatactgacatttgagtcacgctgacggacggaaatacccgagtggttatccgtataaacattctttntgctatctgtaagatgaaaagcctgatagcatgcagagactgacatcgtcttctgcacccttttgttccccggngacaacaagtcagttgcatg

SEQ ID NO: 284774 - DNA, 375 bp, Glycine max
ttcttgctcagtgtctctatgagagtctctagttgcttggctaggagcttattctaggctagtagtgcgtcttgtgatgtgagctcgagaagactcttttttataggtgtgtaggcttaatcacgaaggatggcattgtcattggctgtcatattttcaatcaacttcatagcttcattaggtgtctttaatttgatcttcccaccagtggaggcatcaagtaactacttcgaatgggttcgcaagccatcaatgaagatattgagttgaacccgtggatgggagtcttccagagtaaaccatggaagtagtcaagagcttcactcagtgatccatcggggaattgatggaatgaagagatctcaacctttccct

SEQ ID NO: 284775 - DNA, 422 bp, Glycine max
  unsure (1)..(422): unsure at all n locations
tagacaacttanagaaaccaatttggaaagcatattgagcccaacattttacactcaagatatatctatgaaatttatttggatgaatatttgggttgaatagttaactgagcccattgcatttattatgtccgaatatattcaaaggatattgaagatatcatatgtttaacatttattattaagatttagagtttagagtttatatcattatgatatgtttttatcttgtctttggatttgtttcatttattagaactcttattttgttaagatttgttttctcttttaggatcaaaatcttattttatcatatctttagttcatataagattattgttttatcttatctttaggttagacactattaaaatttgttttccgtcacttgttntgtatttccctataaataggaagccatg

SEQ ID NO: 284776 - DNA, 379 bp, Glycine max
ttcttgccattacaccacttgaccattcaactaggctgcatcaagatgaagggaaaccatatgaagatgtagcatcctacagaagattgattgggaaacttctgtacttgaacaacactaggcctgacatcacatttgccactcaacaacttagtcaattcttaagtaaacctagtatgacacactacaatgctgcctgtagggttgttaagtacctcaaaggcagtcctggccgaggcctgttcttcccaagaaagccagaaatccagctactaggattttctgatgttgattggggtggttgcttagattcaaggaggtccatttcaggatattgcttcttcttgggagcatctttgatctcttggagagctaagaa

SEQ ID NO: 284777 - DNA, 423 bp, Glycine max
  unsure (1)..(423): unsure at all n locations
ttgaacaatatacttgtccttcatttaactgtctttgggtttggcggccacactcaacaaagtactttcgacacctactgtacgttgatttgaccaatgctgttatgggaatgttgcaacaatccttcaaaaccttattgatacattttgagaggttggttgtcatgtggccatatcgacgtccttctctatcataagccatcgtccatttttcctttgaaatgcgatcaatccatgttgctgtggctggacttagttgacgaaatttttctaaattttggtaaataaatgtgcttgcaaggagtgtaggctgcataaaatgagttatgaataacacatttaagtatatattaaataaacgtgaccatcaaatatgaaatcttacccaatttcttcaacatttctttnntgttggcattattg

SEQ ID NO: 284778 - DNA, 379 bp, Glycine max
agcttgttacttatatggtaaacctactagcaaggaaaggcggttctagccatgtggtcgtgctgaataaatgacagctcagcggcagtcaatgaaggcctgtggttacgacgggtactgtttacctgtgaaaagagcatgcaatgtatgcgtgagatgcacgcgaatggggccacgtgtgcggcagacagcaacgcggttgtggcgtctaggtcatcaaagacaggcaatgatggtctctagtaggcaccgacgaaagggcgtcgggaaggcttccaaacaaggcagagacgcagtgtggtactgttcactgcgatgagggactgcgcaagcaaaaagaagtgcgtgagaacacgccggtggttcttcaagacatgat

SEQ ID NO: 284779 - DNA, 418 bp, Glycine max
  unsure (1)..(418): unsure at all n locations
tatcttgctcaatattagcaagttcttttgattgttgtgcatatgtcaacacctaatttcaggaaaatacacaaaagtaaaatcaggtcagaattttcatgcaacaatctaggtttgagtcattgatagccaccatcatcaaatattaaagagattactttcaaagatgatcattataaaataaaactatcanagaaaacattttgtagtgtcacaatgtataaaaatgacccgttgttcatacataacattccccaaccaacagcatagaacaagcaagaaaatggtagggctatagagtcctcgtaaagatagtgcaagagatatctaagagaaaggttaaccacattttgatattaaaactcatcttacacgatagtttcctttttttccttttcaagcacgtagattgagcaac

SEQ ID NO: 284780 - DNA, 378 bp, Glycine max
atcttatgctcatacttcttcacgaacgttcacttgcacaagacattcttataactaagaaaaatgcacccatatacaatcaaggcaccttcgttacctagattatttacatgtacttccaaggtgtatttgttacctacatcacacacatttcctttgctaaattcacatacatgcatactctaagcactttgtctatcaaaaattgcatacgtgcacatcttggtatttctaatacctatacatacacaaacttcatgatgaatcttgactatctacacaataaggtgctacatttcatgctttttgcctttttttttttcaagtgtttttttttactacctagagtcgcatgcaaattcaagaatattttctttt

SEQ ID NO: 284781 - DNA, 423 bp, Glycine max
tgtaatactgaatttgtaagggaaggggtgtgttattctatgtttgattgtgcattcttgtatatagtaacttttcaccacaatttacaagtttccattcaactgtaccccattccaccatattcttgtggctatgattggggattaaatgatagtattctgagaaattaccgtacttttgaaataatacaccttaacaaaacaagaaaatgaaagaataaagcattttgtgccaaaagaaaatacagattttgcatgggccacacaatttatttacgtgattttttacaagaatgacatatggagctgctgtttcagcatatggcctattctatctatgcttatggttttgcacttcagtcaatacaataatgaaccaaaatacacagaaggccaaatggatttttcttaactagcagaaat

SEQ ID NO: 284782 - DNA, 386 bp, Glycine max
gatgtgcaagcttatttctttcctttctaaagaaatccttctcttgtcagcattcataggctcgtaacctagaccaaacctcccatggttttcagcaaacttcaccaagcctatcgtgccatcactgttcgggcacaaacctatttcgagctcataaccatctcttaacataactcgggccaccatgaaagaggcacctgataaacatggttgtaccggaggagactccatgtaagcactgctcataatttctagtgcttgaaaagatgtttccaatgactcttccacagcttccacataaggtgtagaagacggacaactcactagtatgtcctcctcgcctgacactataaccagctgaccttccactacaaacttcaatttct

SEQ ID NO: 284783 - DNA, 414 bp, Glycine max
ttggcggatcaaggagagtggacctcattcattgacatattagctttgttggtgtttgagaccatactctttccaaatgtagataggctaatgggtttagtagcgatcaacgcttttcttgcttatcatcacagtaaggaaagcccgatcgttgctattttggccgatgcatatgacacattcgacctgagatgcgaaaagagtagcacaaggatcatctgctgcacgcccgctctttatgtgtgattgctctcccacgtgctccatcatgaaggtagacctgtctgtcctctacaaggtcatcgcatgtgcgccaaaaagggaaaaacaaattgggaggaactcttgcaagtatggtaggggtgtcataccctaattttgtttgggggccttcatttactaatgttttgattc

SEQ ID NO: 284784 - DNA, 358 bp, Glycine max
tgcttctcccctatattgctataaatagggggagaagtgaagaacaaaagggttcagccccttaggcacttctctctctctcgaaatttctgaggaaaattagtttcgtgaagaaaatccaagccgaggcgcttacgtaacgtttccgtgagtaattacgcgaagattctcgaccgtttttcaagagtcatcgatcgttcttcgatctcttcagtcttcaacgggtaagtacctcacaccaagctattcaattcattctatgtacccgtggtggtccaaatttcgtttcatgtattggttattctcggtatcattcactttttataccccctcttgacgagcttatgccatttattta

SEQ ID NO: 284785 - DNA, 415 bp, Glycine max
tcaatggcaggccctctgcattcagaacttattctctgtcagggatacatagtcgggcagccaactcctgaggacctggctatagtttgcagaacctgtaatatgtgggaaggctctcccctggctctagaaccaccggagtctccaggaaggtattgagggaatcaacatcaaattttatcaagtgacctctaaccctaacctgttttggagatttatcctccgggtcatatatattagcataaaattctttcactaaagccacatccatgctcccctcggtcaagttagtcagctacatgtgctagtttctgctctcaatttctcttctagattcatcgtattcagtcacaaacagcttgaaatttctttccgaaagaatattctgaccaagaacattatctgcataatgatt

SEQ ID NO: 284786 - DNA, 369 bp, Glycine max
tttctttcacttgacagttgaactttaacctcgcattacttaattgttacggttatgtcgcgagggaagttaatgacagacataacttactgcttgccagattgtattggaatatagattatgatacagatctatgctgcgagtgcatattatgttagctctgccacaagcgtggtacgaaactatctatttttttagaaaaaaatatcagatattttttaagaaaatattatgacatatagctctactaatctatgtggaaattaaagtatgtgaaattatgaggataatctatctatctatatctacttatatgttatatcggagaattagaagctgacacatagcatctgacttattctgaaataa

SEQ ID NO: 284787 - DNA, 408 bp, Glycine max
ttcataaagataacaaatggcaaacaactcttatttaactaacatgttaatttattgtttgtttgttcgtttgtgtgaaacataacttgatggaaataaaggcttttatgaaacgtcaggaaaaaactgtttgtatgaaacatttttgcataacatttttttttcatattactttagggtacagattaaaaaataaataaataaatgtttttattgaaaatacattacaaatcatggtagacatatattagtaccattttttgatatattttttccgattctaatttcttaatcatttacttttttcattaatgcacataatttatatttgtcacaattttaaaattaaaacatttctaacgctggcttataaatgattgcaaagtatatattactatccgttcgttt

SEQ ID NO: 284788 - DNA, 377 bp, Glycine max
cgttgcatgcaatctttgttctaaaggacaatcattaaatgtgtgccacatatatgcctcgtctctagaccatatcactttgttagcgttttggaagtacggtttgtgaacaatggctatcgtggtatttttctttgtttgatggaaaaaatatcctctttgataagtaaaatcaatgacctttttcaatactcttctccaccaagatagtgaagaaaactattcaagcaaagtctgtgactccctctacccctcacattatgtactaataataaatggaataagaaatcagaattaattaaaagtttttaaaacacatttaaataagatgctctcaaaagggcacaagactcacattcacttttctaacatcataa

SEQ ID NO: 284789 - DNA, 414 bp, Glycine max
  unsure (1)..(414): unsure at all n locations
ttgaggtacatcacttcaaatttcagagtgtctctataaagtaaagatatgagctatgagttattccctaggtgccattttcaagtcatagtaatggcaagtggcagattcaattntaaaatatacaaataaaaatggacactcttcacttttctctgtgtgtgtgactcaatctaccacaacttagtaggttaagtaggttgactactataacaaagagtccaattaccaacggaaaattaccaacaaatccaaatctgtacgttggaaatatgagcattttttacggattttctttcatcgaaaatgtctatattactgacagaagtttccaacaaattttcgtctaatttttttaaaaaaaaatcaataaatatttattgatgtatttatatcaatcaaaatgtttaacat

SEQ ID NO: 284790 - DNA, 351 bp, Glycine max
tgtttttatagaaggatcgttcctaatttctctacaattgcatcacctctcaatgagctggtgaagaaaaatgtggcatttacctggggtgaaaaacaagagcaagcctttgctttgctcaaagaaaagcttactaaggcacctgttctagctcttcctgacttttgtaaaacttttgagctagaatgtgatgcctctggagtgggagttggagctgtattgctacaaggtgggcaccctattgcttattttagtgaaaaacttcatagtgccaccctcaactaccccacctatgataaagagctttatgccttaataagagcccttcaaacttgtgaacattaccttgtt

SEQ ID NO: 284791 - DNA, 420 bp, Glycine max
tgaacatgatgaaactcgttaactcaatgtcacttttattcactcaattcgctcaagtttcctttttccagtgtactaatgtttgaacccggcaagtgcactggattgtgcaagtagtttaaaacggtaagaatcgagtatcgaactctcgaggaacttgtgttacttcgtaaagctatattcagtgaataggtgtctagtatgaaaagagatgtgtcgactatgcacaagtatgtaaactaactattaaaaggaaaatcacgtgagtaatgatgtgtaaagacaagtagacaacaccttggtcttcctatttaggtgcctgatgttaaaaggatattctctacttaacaatgctcatgtgttctatggtgtctcctgaaatgctaaaccccgattcctcatgatagtctatcctaatcc

SEQ ID NO: 284792 - DNA, 386 bp, Glycine max
aagtctgctcgcatgctttctttcttcaagcttgttcagacacaattttccaaaagcattaaggctatgcggtctgataatgctaaagaattagctttgactgagtttttgcataatgcaggagtagttcaccagttttcttgcccacacagacctcaacaaaattcagtaatagagaggcgccatcaacacctattgaatgtagcacgtgctttaatgtttcaagctcagatgccaatttattttttgggagagtgtgtatccacgacagcttacatcgtcaacagaacatcaagctcaaatttgcagaaccaatcaccatatgagttgctatatggtaaagtaccagcctatgatttgataaaggtgtttgggtgcttgtgcta

SEQ ID NO: 284793 - DNA, 422 bp, Glycine max
  unsure (1)..(422): unsure at all n locations
ntaaactgttctcttactttaatcacagatcttatgctttgaattattacaaagangcttcattgctatgtggtgccacttggcttatcaccggcaaccacctggttatcctgtgtaaaactccatggtaccagagggctaaggagttatgggcttctctcatgatgcttatttggtataggggcaagcattctagatttgatggatgatggaatcattaatttacagttaaagttttcttaagctcctgagtcctgattgtttgcaaactcattaatttattgctgaggtggtcatcatactgcgatatgtatcgacaaattcataatgtatttctaaaatatttgttggatcaaaacacgttggtatacattactggcttgcattatctttgagcactgtcctatgaatgatacttctgc

SEQ ID NO: 284794 - DNA, 347 bp, Glycine max
ttcttatacaatggagggtacaaactacatgaactggatggaaaagcaattccaagaacacggaacactacccatatgaagatctactttagttgacctaatgcaagattggatgttgtactctttttcctacttaattcttttgaccctgtcagaccctaattttgtccggggactatcatttgctaacgttttgattcttgctaaccgaattgagctgcttgacaccagttgctacgcaatatgaaaggtttttcgatgtttcgcgaaagaatgtagaaaatactcaaatgggagggcaaaagggtcattttggagttattctgacccctggctcgcccaggata

SEQ ID NO: 284795 - DNA, 405 bp, Glycine max
tagattgaatccaaagctatattgttaaggcaattggacactcaaagaagatgctgagagtagtgttttaaaacccaaaccgaaccgataggtcagattggtccaagataaagcctttcgattgtagcttatcaccagaaagaattttccagtaataatttctagagaagaaaagaaggagaaggtggaatggcttggttccaattcttcatcccaaggaaccttatcatcacaaggataataggtatgacttaattccgaatctccaaaaacatatcaggaaaccaagcttcaagagatgctggaagagactaagaatttcctgagataaaatcttctaccttagcttccaacaagctacgtaattgatatggaatattacaaagattcacaacaaaatcacta

SEQ ID NO: 284796 - DNA, 496 bp, Glycine max
  unsure (1)..(496): unsure at all n locations
caaacccacgcaaaacccatgaaaccccacaacatgtatcaaaccagaagagaaatgaacatgatgatcaatgcaacannganaaaagagccgcacaaaggacagaaagaggagaactcgcggattccatgctcagcacagaaggcaacgaaaaaggtaaacaagcataaacactcaaggaacgcgcgaacaacaaagcggccatcccatggggagaacaggacaaccacggcgcaaaaccgccacgagaggagctcaaggaagcacacgaaaccaacccccctaaaagccacagcaaacaggagccaaaacgtgaggacaccagagagaaaatacgagaaggagcagcaaaaagcgccaccaccatagcgataaaccgggaaaaactaaggagcacataccacaagacccacacacaggaaaacaagcccagcgcaaaaggacgagaacaccaaccccgagaagatgcaccgagcaacaacgcaaaccaaactac

SEQ ID NO: 284797 - DNA, 262 bp, Glycine max
agaatgtcgtcatgaactgaacagacaaaatcccgtgccttagaattcttcaactttgccaccagttctgggcctccaccccagcatctgctaatctaaagactcttaggcccgctcaattaatcaagagaactcagaactctcctgaaaacctttggctatatggctccttgcaagccccacaaagaccaatagagagtacacaatcaataccgtacattgaaaaaggttgtccagatatattcaaccgattgatcgactc

SEQ ID NO: 284798 - DNA, 378 bp, Glycine max
agcttcaagaataatgacatcatccaattatttatttcccgaagggaattctataaataggcctcctatttttaatggcgtgggttaccattattggaaaacccgcatgcaaatttttatagaggtaatagatctgaatatctgggaagcaatagaaattgggccctacattcccactatggtggcaggaaatacaaccatagaaaaacctagggaagaatcgagtgaggaagaaaagagattagttcattacaatttaaaagccaaaaatataattacatctgctttaggaatggatgagtactttagggtatcaaattgtaaaagtgcaaaagatatgtgggataccctacaattaacacatgaaggtacaacaga

SEQ ID NO: 284799 - DNA, 425 bp, Glycine max
  unsure (1)..(425): unsure at all n locations
tataagaacaaaattgcctcaatcatttccaaatatgcatgtgaattatgatgcatcaacaagaatcaagccaaggctattgtgcaagcaatcaatggggcaaaacacgccaaatgattatgatgatggatggctcaaattctcacaaaggtaaactcatcactttcaaattgagctttcaaaactatcatgacatgtagaggagaatcaaggatttcaagtcacaaaatgtcaaaaacttttattttcaaaacaattacccatttcttgaacatatcctataattcaaagaaaaacatgcaaagtcgtacatgcacacaaaattgacccaaaatattaaactaacaatccgacgaaactaacaacattaacaaattaacaaaaccaacaaaactagcanaaccaaagaacactcccccccccat

SEQ ID NO: 284800 - DNA, 376 bp, Glycine max
tgcttagaattggaaatgggatattgaggtggcctctggtaatcgattaccagtgccgtgtaatcgattacacagagtaacaggccactggtaatcgattaccagttatgtgtaatcgattacacagtgcatattgcaggtttccatgttctgaagttgtgtaactcgagtttggcctatggtaatcgattaccaatgttgtgtaatcgattaccagaggagaaaacccttgaggcatactttttaacttcatgtagtggttatgggacacattgtgttgttaaccgtagttagatttctcgtgaaagagtctacccctttcttttatttcttgtagatcgcgatgacaatgcaattaatccatgaccgagtggag

SEQ ID NO: 284801 - DNA, 421 bp, Glycine max
ctaagctgcttgggagcttctatggaggtcggatcttttatctttattgaggtccttcaatggtgattttccaccatgaagatgcagcggaaggcaaaggagaaaatgagattttccaccatggggggtaggattgcatcatcctttccaccttggaaatgatttgacctcaaatcccgaggttcttcatactctgggctccttcccttgacacctataaaaagaataaaaacatatgtattagtggtgttgggtatgttagagtaggtaaggtctgaaaacccctttcatagagattttcccatgaggaaacatggttcctcaccaactcaatgagtggtgctacaagtatagaaaaatatgggacaaatcttttgtaaaagtttgttaagtcatggcagccccgaatttcccttatact

SEQ ID NO: 284802 - DNA, 376 bp, Glycine max
tagcttcttattcaatgctcatcttggtggtgaagctccttcttccatggcttattccctagtggatggcgcctcctctcacctcttctcctttgtcttccgctgcacctccatggtggaaaatcaccattaaaggacctcattgaagctcaaagatccagcctccatagaagccccacaagcaagcttccatcaagtggtatcagagcacaagagcttcaagtaggtgctccttaaacctccattaattttttgctttaccttctcttccattgttgtttcttcattttttctccatgtatcgcctcacatgtcttgtgataaatgtttttagcatgattctttagagtttccaccgattaaacttgctatagaa

SEQ ID NO: 284803 - DNA, 425 bp, Glycine max
  unsure (1)..(425): unsure at all n locations
tgaagggacactcacatttcctacttccagtatctcttctaacaaattctttcttcctacacctatactgaccactcctttcacaaccaattaacacaaatgaactccttcctctactatcagtctgtgtcagacctcataatgattacaacaaatccatttttatgagcaactgatcaagcccactgcaaaacatcatctcaggtatcaaacacctacaacgcaatccaggcaattttagttttctacaacatattcattttatgaaatcactcacaataacgaacattattacctaagaagtattaaacgcatccgaacaatcaacatgtggttcattcacaccacattcttgttcattntgatcatccatatcaacttctttaggcattatactgtcatgcatccattgatcttcgttcatc

SEQ ID NO: 284804 - DNA, 380 bp, Glycine max
agcttgtatgattatggggtacccatcacatgtggtactaggtggcggtcgggcaatggtgcacaacaagttttccacatccacaatgcgcgcataaacccaccatcccctgttgcccacctccaactgagctcacgtactcccacgtagcccatatcctcgtttctctcaacaccgggtccccatcaatcctcccaagcttccacaacatccaagcaaaacaacattcacacagcacaagctatcacagccaagcaaaacaaagcaaaggcagaaaactctgccaaaacaccaaccaaaaatcacagcttttcccactcaaagaccccagtaacaattccttcgatccaatttgttaaccgttggatcgactccaaaat

SEQ ID NO: 284805 - DNA, 421 bp, Glycine max
tgtcctgtgcttgtgcccttgtgcttttgtgctttcttctgcctgcatttcaagtcatccctgcatcattcttgctttcatcttacatcctttactccatcataatccaagtaagtagtgcttcatttccattttcattttcatgctttgaaccttaggatagacgatttcttgctttgttagcttgccttgctgtttaggttagggtttctagctttagggtttgttattttaggatttaggttgagttgtaagcccattaggggcaatgctgctaaaaggggtgaagacccctgtgtttctatttagaaattgcgatggacacgctaagtgcgcctgctacgcttagcttgtttatcacagctgttaaattttttgatttccagatgagggcgctaagtagaccatgtcgcgctaagcg

SEQ ID NO: 284806 - DNA, 358 bp, Glycine max
aacaaaagacatcctataagaacattgcgtaacgcacatgcctcaattcagccgtctcttaatcatcagggacattggactttcctcgacgtcgacaggggtccagaagtaaacatatactagattaccattcggttctcaacggaataaatcagaccctccgagaatggctcgactcagctgtacatactgcccaactgtacaatgcggactaatataagatatcagcccagttcccgttgtcgagaatgaccttgcacactatgaacgtagccacctatatcttgatgaccatcggagcattgtgacatctttcagtgaccccgcaatccttgattgtgaaaatgatagggggcat

SEQ ID NO: 284807 - DNA, 420 bp, Glycine max
  unsure (1)..(420): unsure at all n locations
tatgctctttnggaggcaataaacattttattgttatttattgttatactttaataagattatatcaaatggacataaaaagtgcattccacaatggactaatataagaggaagtctatgtagaacaaccccctgggtttgagagtaacactttccacaacatgtttttaaactcattaaagctttgtatgggctaaagaaaactccttgagctttgtatgaataccttagttcattccttttgataaatggttttgaaagaggaaaagtggatatagctctattctgcaaaaactatgactcctaatttatattagtacaaatctatatggatgtcatcatacttggtgctactaatgaacctctatgtgaggatttctctaagttaatgtacgttgaatatgaaatgagcatgatggg

SEQ ID NO: 284808 - DNA, 370 bp, Glycine max
ttcttgcgtagccgctcttggtgctcacaaaataccaaatacaaatccctcttattactagctatgtttgaatgctttagttactgaatgtacaaccttcaaattgttgctcgatcccctctttggtttctgcaaaaaagaaaaacaatatcaaagaaaacattgacagataggtcatggttattattactcgaaccaaaaggaataacatttaaacgagtcatattatttttagaatgtgaaaactctacatatctatggagaacatggggtatggaggcacgtaatcatgtgaataccacaagtcattttctgcaattcaaggactggattaattgctctaggataaaagcatacgtctcggatattg

SEQ ID NO: 284809 - DNA, 308 bp, Glycine max
  unsure (1)..(308): unsure at all n locations
gtgacgtatagaaactcagctaagctctagaagcgtctagactcttttatttgtgagtgtgctgctggaacgnnnacccgctgaagacactgcctgaatctgatgctggcctttctggacctagcttggcacgctgccggcatgtaaattgtcttcccatcacaccttgaatgctgctgtcaccgtatacacgtatcagctaaatcttgactggtattgaagccttccattgacatggcttgaatgctaaggtgcgatcccatcccactcctcctggcctatttatccacatgcattacatcaataca

SEQ ID NO: 284810 - DNA, 378 bp, Glycine max
tttgcatgctttttttattgaaaatttaagatacccctgtacttcagggaacgatcctagtcttttgttataaatgactactccatggactaacggcttgactgatttatagaataccgcgtttatctttctgaaacaaacgttcacactgttcggacttgactcttgattcccttgaccatagtgaagcccctaaaactaaaaacagaacattcagaaaaagagtactactttcaaccgacgatattttgggaacgtaattgaattctctcttcgaaaattctaatgaatgcaaaatatgcccaaaaacagagtgtcttttttagttcaattctagtatattatcaatataaaaaattatattattaattgattaga

SEQ ID NO: 284811 - DNA, 415 bp, Glycine max
tattttcaagaatacatttatgatgatatgtgatttcaaatattaagggaatttttaccttttatcttcaagacattattttctcttagcatattaattagtggtcaaccttccccatttgttttgctttattcaaacgaatttaatagcctccagagaagcatgacctgcatgtatccgtaactcatcaaaggagattaggcatgtacttcttccgtttcatgtcaagtactggtgtcatagatcttttcacatatcagaaaagttaataaatcactaaataataataatcttataaaattaaccttatttatattaaaaagtaaattttaaaacttatcttttattacactacagttattatatgacagaaagtatatagcatgcaaacttgtattttcaggttcaagtttat

SEQ ID NO: 284812 - DNA, 363 bp, Glycine max
  unsure (1)..(363): unsure at all n locations
attcacataggatacgcgacacaagataacaggcagtcaattatacataccaagaaccaggaatagtcaggtgtagcgacagacaaccagcatatagatagccatgagaatgcgaaaataaatgcacacaaagaggctagaggaaaggtgattgacgccctcagcaacaggcagcgcgcgaacggaccggcttgctattaccagaacggcaggcaagatattgcacgntcggaaacaaggccaaggcagatggaagacacccactccacccaccaagaaattcaagggcttctcggctattgtcgacacaagataaactcactggaccacattatggaaaggttggatggaaacacagatgcn

SEQ ID NO: 284813 - DNA, 367 bp, Glycine max
gaggaaattcaaacgacaataccgtttttatttttgtcggattgagtcacgcaatatcgggagacgctggaaattgaagaccgaagctctgagcaaattctaacgacaataactttgtactctgatgtccgattgagtcacggaatatgtcgagacgctagaattgggataccgaagctctgagcatattcatacgacaatgcctaatgactcggatgtgggattgagtcacgtaatatctcgagacgctcgaaattgaataccgaggctatgagcgaattcaaacgacgaataactttttactcaggtgtgcgattgagtcccataatatgacgagaccctcggaattgaataccgaagctatgag

SEQ ID NO: 284814 - DNA, 354 bp, Glycine max
ttcttcatgcacaaagtaggctaaaaaaactctatgtctgacctacacaaatttgtactcttccatctgatggacgagacccctttcgaccttccacacattgtctacatcaatattttaaggaacatgaagccctcgggagaagtggatgacatctactatgccaccctcatcagcaaactcctctgggaacaccaagtattccatgtctttgaaagattggacgaggactccaagcagtccatcatcagtaaaagaactttcggtgccacacagtaacactttagtcaacaagcttgttgactgtaagcaacaccaggtaagacttatctattagtgggcaccttgtctact

SEQ ID NO: 284815 - DNA, 334 bp, Glycine max
ccccaatttaatggatttttaaggtttgagaagtgaaattgagaatgaggtaaatttggagcaaactctcaccgcttacaaaaattccgggtagaaatttccaggatgtcacacaaacaaacatcaaaagaggatccatatacagtgaaatcatccataaacacctcgatgcaattttctaaaaaatcactaaaaatactaatcatgcaccactagaagataccaggggcattgcacatgccgaaaggcatcctcctgtaagcaaaagtgccaaagggacatgtgaatatggtcttttcttgatccttatgaacaatagtgatttgcatataac

SEQ ID NO: 284816 - DNA, 331 bp, Glycine max
tttctttactaatagtggcacatttggagaaggggttctgtttactacccttgacaaaacaacacctttctatgctagggcttgttaacgaggtgtaccattccattgctatattgttttgtagcaccccagtgtggtctagtaagatcactaaaaatagtatcaaaattggaccactttgtatttaattattcatttatgtgagatatctatggggcacatctactttaccacatgaaagttgaaatgaacctgtgacgcgaggaggattccaatgagttcaagaaagatgaagaacattcgtgaaaccacgacctagttgggagttaat

SEQ ID NO: 284817 - DNA, 403 bp, Glycine max
  unsure (1)..(403): unsure at all n locations
nggctcctctgtaattgttttctgtttgcttccctagctcttcgcatagtgacattttatgctacgcagcttcctggtccaaactaccattgccgagaggtatacttatttgagaatgtgtgctttttaaacaaacatcacgtctcttaaaattaactgtttcttctttctggtgactgtgagtggtaaactatgcaagctggattcttttcaaataatcttttgatttaactccacttcatgtatcgtgcaggggtctaaacttgctacactgcctcatccagatagtgacgttgaagtcctcttgattaattgctagtatactattgttcttgagttctttagctttgactcctttgtggtgttatggtgctcatttgcgtttcatcatgcagttccacgt

SEQ ID NO: 284818 - DNA, 365 bp, Glycine max
tgcttgtctcagcgtttatgcgagacggagaccaacatgctagctatcatcgccaagtaccaagaagagttaggtctagcgacggcccacgagcatagaatcgcggatgagtatgctcaagtatatgcggaaaaagaggctagaggaagggtgatcgactctttacaccaagaggcaacgatgtggatggaccggtttgctcttaccttgaacgggagtcaagaacttccccgcttgttagccaaggccaaggcgatggcagacacctactccacccccgaagagattcatgggcttctcggctattgtcagcatatgatagacttaatggcccacataattagaaatcgataggaaacttgtat

SEQ ID NO: 284819 - DNA, 406 bp, Glycine max
taaagtatgcccgagtcattcatccctatgagatgttgttgaagtattggcgatcagaattgccatttcttggattatagggttgaaccaagctcatgcttttacaaaaaggttcatcaagtcaagttgaaatatggaagtaaccgtcttgcaaaattggggcaaaagacgaatcacatcactgcttcgtctactgccaaacatatttaggattgttgatgtccttgttacttccagtttcaccttgacaaagatgtcatggaccatgttgaaaatctaaattgattcaaccccatatcctgcgtaaaaattcgcaatacttcgactgtacatcattcgcatgcatccatgcttttcattggttgcattgctcattgcattctttccttgaaaaataaaataaaat

SEQ ID NO: 284820 - DNA, 366 bp, Glycine max
tgcttaacattaggcatgtgaagcgggcggaattcctagaggaactcccttatgttatcagacataaatagggaaaaggaaatgttgtagccgatgctctctctcggagtcatgcattactttctatgctcgaaacataatagagcgcccatgaatgttagcaccgcatgtctgaacatgatgaggcttttggagaaatttttaaagcttgagataaggcatcagaaaatggctactttagacatgaatgcttactttccaaagaaaacacatggtggatgcctaaatgtgctacaagaaaatggcacggctgtgaagcacatgaatgagggttaatgcggcatttggtggtacataagagtctaa

SEQ ID NO: 284821 - DNA, 331 bp, Glycine max
tactaaggcacctattctagctgttcctgacgtttctaatcttctgagctagaatgtgacgcctatggagtgagacctaaagctgtattgaataccaagtgggcactctattgcttattttagtgaaaaacttcacggtgccacactcatctaccccacctatgataaaaagctttatgccttaacacgagccatgcctacttgggagcatcaccttgattcccacgaatctgtcattcatagcgatcatgaatcacttatgcacattcgacggcaacagcaagttaagccaaaagcatgctagatggctacagccctatagcacttccat

SEQ ID NO: 284822 - DNA, 378 bp, Glycine max
ttcttctcgaccaattaggttatggataacattcagtaactttatcatcctctcggtgctacccgtggctacagctgtttgcaagaagtgacttcttccagcaagtctagcaatattcaaaggagaatattatgcaataaccacattattattgtttcacaatattttggattattgacttttacacattttttggaagaaaaaataatcacgtgaagaacttttacaatccactttgctttgcaaattattacaaatatccatgaacatctttaacgacttttatatatttggattctggaatggagcttgcatgagaaaatatagcagataaagttcacaagtaatgttaaggattaaataagtttttaatatcta

SEQ ID NO: 284823 - DNA, 426 bp, Glycine max
tgtgtttgtgctctgcatcagaataggttggtttcatgaacatattttaattccttttctgagctgactctttaaaatctctagcctgtttttaccggtcctttttatgttggacactaaaactgacgcccttttaaaatattggttatgctgttaagggttttgtcctgttcatgttgcattggttctattgtattttgttttatgtcttttttatatactaaatcacatgctatttgtcttttttttatatactaaattggtgtgaattgaccaagactgataaggagtgtttggccatgttcctagccattgtggggcatcttagcattctatttctatttgtcggtaatgatgagaaatacaagtgaccaaaaatgtcatatatgaaggtcactagataaatagtgcttcatccctcctgtg

SEQ ID NO: 284824 - DNA, 380 bp, Glycine max
  unsure (1)..(380): unsure at all n locations
tgcttcttaataaactcatcatcagagtcatcaaaatcatatgagagatgaatagggctacttgggggcgtaggaggactaggaggtttccagccagtgatcttatagaagtagtccctaatcatgaaccatctgcaagcctcctttttagcatgagcatgatccttcaaggcttgagcaagagcttttcttgttctggcaagttcagcttcaagcaaactaacataagtgcgagaggatggaggatcatacacttggacaaccatggaatcagaagcagcttcagcctcaacattagatttgacttcttcaatgataggatccatgtgatgtgtgaagaagaatttggagaagggaaggaatgccatanacaaaaaggg

SEQ ID NO: 284825 - DNA, 428 bp, Glycine max
tgtatattgtcttattcaaaacaggaccactttcatattcttcccttgcattggcataatgttcaattactgtcaaggcttttggagcatctataacttgttcaactatattttgtgcaacatttcggttgataagctgcatcaaatctctctttttcctctgtattctttcagcacgaaagtattttttggttttcaattgcttggcaactttagtttgtatctctcctttgacaatcttcttccgtatcgcatccagagaagcccccttctcaagctcttctaacaattcttttcttgcttcctcaaattccatctaattcaattaagcagtgagtgccaaaaagtattgttagagaaaatgaaatatgattgacaatctaagtaattaatatttaatactcagcagaaaaaagaagaaatcagaa

SEQ ID NO: 284826 - DNA, 363 bp, Glycine max
tgcttgcttgtggggcttctatggaggctggatctttgagcttcaatgaggtcctttaatggtgattttccaccatggagatgtagcggaagacaaaggagaataggtgagaggaggcgccatccactagagaataagccatggaagaaggagcttcaccaccaagataagccttggataataaacttggagaggatgcttcaatggaggaaaataaagagggagagaaagagagaggggggagcacaaaattgaagggaaaaaaaagagagaagttgaacttcgagttgtgtctcacaagactctcattcatcaaagttacaataagtgttacacatgcttctatttatagactaggtagct

SEQ ID NO: 284827 - DNA, 417 bp, Glycine max
  unsure (1)..(417): unsure at all n locations
tcaatgctacctctaacgctttaacactgacattttcaaccacacaacaattgacacaaacttgtcgaaccctcatttaccaagttttctatctactttgtataacgatgaacctcctaccttaaccctcttagaaatgggaccagtgcttccttcatcctcagtggtaaaagccttgtcaccagtatcgcactcatcatccatcatcaattcatgcattaacattcaattatatgaaatcttcctctattttggaaagcatatgttccttagatttcatagattcaatgaacaatgcactaccactaaaagtccacaatgtctttcttgaacctaattacgacaataacaaacaaaagaatctaatgatttagcaatactctcttttctccactacaaaatgaanagaaaaaagag

SEQ ID NO: 284828 - DNA, 415 bp, Glycine max
ggcaatcagctcgacccgggatccttaagtcgacctgttgcatgcatgctttctgaagttttctggttttccaaaccttgaaaacttgtgctattcatctttccattctcttctccctttgccaaaaagaattcgccaaggactaaccgcctgaaatctttttgtgtctctcttctcccttttccaaaagaacgaaggactaactgctgaattcgtttgtgtctcccttctcccttgtcaaaaaattcaaaacgacacagtctaagaattcttttgattcttccctttccctaatacaaaagtgttcaaaggactaaccgcctgagaattcttttgtatccccattcacaaagtatcaaaggtttaacagcctgagatctttgtctcaacacattggagggtacatcctttgtgg

SEQ ID NO: 284829 - DNA, 408 bp, Glycine max
  unsure (1)..(408): unsure at all n locations
tctgggagggacatatataatgcatacacttcatatcatattcatttcttactagtttagtaatttctaaccgagagtatttatttctccagtaccattattcacgttcaatatcgtatcaatattattgaaaattctagggatatgatgagttgacatcaatgtcaattttagatctggggtatccaggtcagcatacaccatcatcatgcatgcacttgaactttctttaatttccctttgcaacatggcaatccttaacattntgtactacttatttttcccctttgcaatgtgggaattcatgacatttttttgctttggttgaaaaatgattcgttntctttacctaaccaagagacatggtacgtcaagggcttcttgcctagaatacgatggatacacatg

SEQ ID NO: 284830 - DNA, 367 bp, Glycine max
ttcttatagattgtccaatccataagtggttcaaataattgtttttttatttttttttcaaaaatgttgtacaaattaatttaaaattaatgacccatacaagaatcaaaccttcgagatttgtgttattagcacaacactctaaccaactaaactaataaatgaattatattatacaataattaatgtcactatatgtaatactaaaatttttaatatttaatgcgcatgaaaatttagataataaattttgcaacaattaattttgatctaacaattaatttgtttacacatgttcgtagaaaaacaaccactagaccacatgtcattcacatattggataattgaacactgcagaagttgagtg

SEQ ID NO: 284831 - DNA, 404 bp, Glycine max
  unsure (1)..(404): unsure at all n locations
tgaacatctgaacctaagtagcatttttttgtttatttttaaatgtaattnttggtgattaaaaacaatcataaattacaaaataaaaattaaaaaatcaaatcacaatttgtggctgtacaacaaccaccacacacgtccaaggcaagagattcagattgagggcccaattggtggctagaacaacggtgttgctggcaaagttcaatgtaatcactgacaacaccatcatagtcacccaacgcatcatcaagaagcttncaatagggacaaatttcaggctcacaaattgcaagtccacccccgcaaagcctccaccctacaccctcacagatctggttgtcgatgtagaggcatccatcggaagaagaggcaatggtgcacaatgtcaaggttgagccaat

SEQ ID NO: 284832 - DNA, 371 bp, Glycine max
tcattcttctttgagaaaacttccttgagaagctaaagcttagctacacacacccctctcataactaagctcacctccttgagaggcttccttaagaagattcttaaagaagctagagcttaactacacatacctctctaatagctaagcttacctccttgagttgagaagctagagcttagctacacaccccctataatagctaagctcacccatgacaaaaaacatgaaaatacaaaaaaaaagtccttactacgaagactactcaatagaatggccaaaatacaaggcccagacaaaggaaaaacctattctaatatttacaaagataagtgggctcatacttagcccatgggctcgaaatctaccct

SEQ ID NO: 284833 - DNA, 397 bp, Glycine max
  unsure (1)..(397): unsure at all n locations
tgttcttcactcatcttctccttgaagtggcatcttcaatcacctttcctccttctctattctactatcattgatcttcaagaagaaaaggactccattgatgaagaagtttcaaggcgtacaagctccacatggggctacatcagacagcgtcgactgcgtcacgtcaccagaaaccaccaagtcctcggcagcatccaggtggaacctcccattcgtcggcgagaacgagtgtgctagcatccccaagctcccgtcgaacggctccccctggctgtggtcaccactgaagaacccgatcctaatgtcggtgcttgtttataaataagtgcaacaagtttttctttcattgtgnctctcttgtgtgccttttccatctgcaacaaagcttgttcta

SEQ ID NO: 284834 - DNA, 232 bp, Glycine max
cttgtctatacagtgcactgaatgaacaggcgaatacaaggccatacagaatctgaggaattgataccgctcacggttccccgacgcgtactacccgcaaacatggagtgtcactcctgaggtgcccattgaatgaacttactttcattgattgcgttgagcttactgaccgctctccagtcgtaactgctgacaggcccacttgcttattgagaactgcaacccgaacccg

SEQ ID NO: 284835 - DNA, 408 bp, Glycine max
  unsure (1)..(408): unsure at all n locations
ttcatgacttgcaatctttctatataatggtgatctatacgaaaatgccacaaatctatagggatgacattacattntggatgggtaatggcggagcatatggttcttgaatgtgatggtttcaaggtaagctgataaagcccatgactcacttcaactgtaccaatcttcactttggtgttgatatcctgcaaaacacaagtattagaggagaagattaactcggagctgtttgcggaaatgagtttggatatggatatgagattaaagctaaaagaaggtatgtatagaacatctttcaatgtaattgaagaggtgagatggacggttcccgagtgggtggcatgaacttcgtgtccatttggtaacttaactagaatgggtttaatttggtgatatgaatcaaaa

SEQ ID NO: 284836 - DNA, 164 bp, Glycine max
gtgaattctagctccgcgcgccgggatcctatgagtcgatctgctgctttcttcttcttggtgattcctagggtgtgtggctataacgcggtcgtaagagacctccgagtgaaataggtttacgatcacaattgctcacgagctaccattgtgcaagctttagc

SEQ ID NO: 284837 - DNA, 130 bp, Glycine max
tttgagcaattcaaatggttataatgtttcactttgaggtccgacctaggcgcataatatatggagacgctcgaaagtgaacaatcgaagcttttgaccaattaacctggtcataactcctaactaagat

SEQ ID NO: 284838 - DNA, 419 bp, Glycine max
  unsure (1)..(419): unsure at all n locations
tctttccctgtgctgtgctctttattntgaaccccataatatgaaatccaaatgcatctggcaagcacgacctgctgcacttgcacatacatcgtcatcgtattcatccccttgcttttcctttgcaaatgctgctcaattgttcatacaaaaatatgctcctcacggaataaagaaagaaaaaataattgttataataagttttttcctgtttataatctttttttttttttaagtttataaggagttttgcctgtggaagtaaaccatcatttgacatttaaatgtcaatttttgctatatagaaaaatgtcatttttaaattaattatgtagaaaatatgaagccgttttggtaaaacattcatcgataacattgtaattataaacaagtttttctttacagatatttaccccttt

SEQ ID NO: 284839 - DNA, 161 bp, Glycine max
  unsure (1)..(161): unsure at all n locations
ccttacgcatctgtgcggtatttcacaccgcatatggtgcactctcagtacaatctgctctgatgccgcatagttaagccagccccgacacccgccaacacccgctgacgcgaaccccttgcggncngattgaatttaccttgttataatgattgctatcg

SEQ ID NO: 284840 - DNA, 408 bp, Glycine max
tgtgtaatccagagagagtatctttttattaattttctgcaccaaagcaagaagatcattgatttcagcagatgttaaattatttgacacaaatcacattagtcaaagtaataaaacacaaaacacttggacttatgcacccaaataaacttagatagccatgacctttggcagttaaaaaaagaattggtagacacatgatttcaaatgcttcaaagaattaatgttaactactctttggagtcataaaagaggaaaatctgtaaaattaaaaagtgggctaggggtggtaattagttacactcaccaaagaatgttgtctgttgactgtgcatgctattaataattaataatatactaaaaaaaaatcaaaatatggcaccacccttctcatgaagagcacaggat

SEQ ID NO: 284841 - DNA, 413 bp, Glycine max
tcagtggcttagtgaagatgaaaaggtaaaagtgactcaacaggttgaggtgagtctcaccattgggagatataatgatagggtgttgtgtgatatggtcccaatggaagcgacccatgtgctgttaggaagaccgtggcagtatgataccaaggcagtgcatgatggcttcaccaacaaaatctctttcaagcaagatgacaacaaaattgttctcaaaccgttatctccgagagaggtttgtgtggatcagataaaaatgagagaaaagaaaaggagtgagacacttgagaggaaaaagagtgaaacacttgagaaggaaaagaggggaaagaaaaagagtgaaacacttgacagggaaaagagagaaaacatatagagtgaaacactcgagagggaaaagagagaaaaca

SEQ ID NO: 284842 - DNA, 373 bp, Glycine max
ttaaaccactttcctattatgcttttcactagagcaatctactttgggtgaatattgatctattcctgataatgatcttttggtataataatatcgttcaacactcgtgatgcatacaaataggttaaattaggaagtttctttgaaaatcgatattaacacggctttttacactatctataaataatggcatttttatcgacatcgtgatacctacgatccgttatgttgcggaactcgctttaaaaaagtgatgcgcgtggcacctattgtcatctttgcgtaataaatcgcattttacacccactttctttggcggttattgaaaacctcctagaatctatgcttaataaatttacgccggtcttataaa

SEQ ID NO: 284843 - DNA, 379 bp, Glycine max
taaaggaagtgaaagaattagcatgggcagaaatgtcttcgcattgattggtaaatttgatccccaaatcccttataaatgtaaagatccaggtacattcaacataccttgtattatagggaacaaggagtttgacaatgccatgctagatttaggagcttctattagtgttatgcctttgtctatttttaattctctatctcttggtcctttgtagtcaactaatgtggtgattcatttagctaatagaagtgttgcctatcctgctggtttcatagaggatgtcttagttagagttggtgaactaattttccctggtgattcttatatttagaatatggaggaaggattttctcatggatcacttcccatcattcta

SEQ ID NO: 284844 - DNA, 398 bp, Glycine max
tggtgcatatgatttatatgctccagcttgatgggtgagtgttgaatatcttgctttacttgatgtatgactgatgtaatatcttgcttatctgagaaattagcagagatatgcctgagagtaggctgtctctctcttccatcttttctctatatattttgtaatcttaccaagttatgaataagcttagtgagagacattttttcctcactcaaatttcaagcttcaactgtttcattaatgctgggagtaatttttggaaaaatacataactttaggacaaacttaatgttactatattaactaatttccttgtgaatcagttaattgggtcttcctaaaaggaccatagtaaatattactgggattcatgtataaaccagagtgaatattatgta

SEQ ID NO: 284845 - DNA, 328 bp, Glycine max
tcagcctgaatgctaagcttcagcctgaacgctattcgatagcttatctgtggctaagtgcgagcataaatcatacaccatgcaagtaagtcccttgattctatttctctttcttatgtcataactatagggtagaagacattaactgtagcttgagatttctatggtttatatgcttagttagaataaaattaagattacggctatgtaagcttgtatactgtattgattatggcgcacacatagtatgtatgatatgccttttacaggcttgaatagtgcgagaaaatgagatatgttccctgcattttctggaaaacgcaatgaa

SEQ ID NO: 284846 - DNA, 410 bp, Glycine max
tcttgttctagatcactactactagacattcttctatttagctgatgatgcataacctaatgcttgacatgggtagggatgttgtttctccataattgagaacctaatcaaagaaggttggggttttgtgaatatattctcgaactaccagttcaagatgtacaaggaccataactgttttcttaaattctgttgttttggcaacataacatttatgccattaattttcattacgtatgtaaacatattgcttgtgtttcataaaattacaattacttcttcttgtatagtccctccccctaaataaatgtatattgcattttaatctattataacataaatgagtttattaataatgatgaacaagctataaacgaacttttcaaatatgcatttttcctttcaactcc

SEQ ID NO: 284847 - DNA, 312 bp, Glycine max
caccttgctaggattcgtcccaactattggtgataccatcatcaagatcatgctctatacgccaggcatttccgaacttgaaagatctggtgacaaacctcctaattattgcgtccaattggatcattatacgagaatggtcggactttgaagtgacactactacatatattgcaagttatgacatattaactctgaagtggcatggttttaatcttaatgactacatacgacgatagttaatgactaattctcatagaatgcttgcttaaattttatgaatgattacaatgaggggcttagaaagaccgtc

SEQ ID NO: 284848 - DNA, 405 bp, Glycine max
tgtaatactgaatttgtaagggaaggggtgtgttatgctatgtttgattgcgcattcttgtatatagtaacttttcaccacaatttacaagtttccattcaactgtaccccattccaccatattcttgtggctatgattgtggattagatgatagtattctgagaaattaccgtacttttgaaataatacaccttaacaaaacaagaaaatgaaagaataaagcattttgtgccaaaagaaaatacagattttgcatgggccacacaatttatttacgtgattttttacaagaatgacatatggagctgctgtttcagcatatggcctattctatctatgcttatgggtttgcacttcagtcaatacaataatgaaccataatacacagaatgccaaatggattt

SEQ ID NO: 284849 - DNA, 531 bp, Glycine max
  unsure (1)..(531): unsure at all n locations
tactcctacacaagagtacacatacgacactttgaagtgataagtaataatagtaaancacaaaaaaagagggtattgatgcgtcgttgacatgcacactatanaatacacaagctcgacangtataatgactctcgcaaatgaatcaccctttgttgagccataacaccaaaatacacgagcggtaaccagtgcacacataccaagtatagacaacaaatgacataaagtgattatcattagattaaacatgcactgattcaaactcaaggcacacaaatagcacacacttagaactaaattatacctgtgctccccaaccaccaacatgaatagtacagatgacacattccacatgcgaaaattcacgccgcgagcaaaagaatcaccagtaatcggagatctcaggcggccaacgaagcatcccgatcgcacaacaagagaggagaaacgagggaacaccctcgcgacggaagacgcggcaccagcaacagaaaccatcgactacatccctggaagctctcgagagaa

SEQ ID NO: 284850 - DNA, 414 bp, Glycine max
  unsure (1)..(414): unsure at all n locations
taagcagttaggtgaagacacatgaatacatttatattacatcatttctagcatgcttcctcctgcaagcaatgttgtcaaaattgccagaccacccccctccggaatttttgcttctctcattcatgtgctactctctcagtctctccctctttgtactcttgaatctctcttgctccctcacttattgatctttctctctactctctgctttctgttttcatgttctgactttggccttctctgttcttacccgactacattctggtctctgccttggattctgacctcggtcttcgcagtatctaccttgtgttctgacttcagtcacctgagacttcattctggactatctntctgctctctgtggttcaatactttcagtatttattatgacttgtatgtgaacttatc

SEQ ID NO: 284851 - DNA, 416 bp, Glycine max
tatgattccatttcctgggaattcttggattggatgtttaagtccattggcttccccagcccagttctgtacttggatcatggagtgtgtttcttccacttcctttagtgtggcagtcaatggatccatttatggtcacttcaaaggacagcggggtcttagacaagaggatcctctctccccttatctgtttgtgctctgtttggagtacttttccagagatatgagcagcctcaaggatgatgccaattttaaatttcatcccaactatgcaggtattcagctatctcatttggcttttgcagatgatattatgcttctatctagatgagatatccattctgtgttaactatgtttgccaagcttcagcacttctgtagggtttcagggctttccatcagctctgataaatctg

SEQ ID NO: 284852 - DNA, 410 bp, Glycine max
tctaaatatccgaaacatgatattattgggggccttaggcataaggtgtctagttatgcatatttgtcaagtgtgtggtaaattattttttttaaccattatattggtataaaattgtttctactaaaaaatggtgacaatttttcattggaaaccttaaatgcatataagatgagtatctttcttttaatatgatttattctatacataagtgcgatcatcatttagatgcctaaaaatatgtatttctttgattgcacttaacaaatccagatactagtgggtgttatttacgatgatcacttgattctttgctaaacacataagatgttgatgagtgttccataataatagggatcgaaaacaaattttcaactttttgaggaatgaaagtcatattctgttttata

SEQ ID NO: 284853 - DNA, 413 bp, Glycine max
taataagaggcatgctaagtgggtagagtttttatagcaatttccatatgtcatcaaacatacaaaggggaaagggaatgtagtggctgatgcactgtctatgagacatgctttacttgctatgcttgaaactaaactgtttggactcgagtctttgaaagacatgtatgtgcatgatgtggactttgctgatatttttgctgcatgtgaaaagttttctgaatatggttactatatgcataatggattcttgttaaagcaaataaattgagtgtgcctaagtgttccattatagagttgcttgtgagtgaatcacatgagggggggttgatgggacactttggggttcaaaagaccctggaaattctgcatgagcattttctttggcctcatatgaggcgtgatgtgcataa

SEQ ID NO: 284854 - DNA, 415 bp, Glycine max
tgaacgaatataagatacatcttcttcgaccttggtgattcttgactccatctcattgaagcgcatgtccacttgtaactccaaagtatcaaacctttcactaacaaaggtttgaagaccatcgaacctgtccaaaatctttgaaagaagagatgaatcttctccatcatgtccttcttcaccaacatgtcgagcaccctttttcacccaagagccatcatgctctttttgataaccaaaggatgcaatgactgaagcgcctattagaaaggatctcttgattggaacatagggtttagaatcaagagggatgctaaagtggttaaggaagagggtgactatgtgtggatatggcaatggagcattcaatcgcaatgccttatgcatgagatatctaacaagatgtgcctaatca

SEQ ID NO: 284855 - DNA, 410 bp, Glycine max
tgaagggacacccacatttcctactcccagtatcttttctaacaatcttttttcctagacctatactaaccactcttttcacaaccaattaacacaaatgaagtctttcctttattaccagtgtttgtgtcagatctcataatgaccaccacatatccattttcatgagcaacggatcaagcccactgcaaaacatcatttcgggtaccaaacacctacaacgcaatccatacaattttagtcttctaagggacattgattttatgaaattaataacaataatcaacattattacttgagaagtattgaacgcatccgaacaatcaacatgttgatcagcctttgctagtagtgaaggatcaaataccatgcagctttagccgaaagacatataggtgattattatcttt

SEQ ID NO: 284856 - DNA, 406 bp, Glycine max
ttgagccaaaatcctgactcaccatagaccttgactccagggtgagaatgccaatccttaccctcagaagcaaaaaaagaagagaaggaaaacttccaatcaaaggaaaaaggagaaggaaaattaccaatcagagaggaagcaaaaaaaggagagaaggaaaatttccaatcaaaggaaaggaaattcccaatcaaagagtgggagaaagcaaaaagaaaagaaagataattcccaatcaaagaatgggagaaagaaaaaaaggagaagtaaaaaagaagaaagctcctgttcaaagaaaccataagaaatgtgcagagaggtctttagaccggacaatatctgaacaatatataattgtcaccaaatgaacaaaaggaaggaaaggaaaccacgacctaaaatg

SEQ ID NO: 284857 - DNA, 407 bp, Glycine max
tccagctcccagaataaaaccaattgctttacaatttgttttaaaaaaatcatttggtcatatttaaataaatttgtttataagtatttataagaaaagaatctcatatactaagattaacttgtgcgtaagtaaaagtgacttttttttaatagaaaataaatgattttttcataaatgattgtaaatataaattaatttaaactttttttctcccttattatatagtataagagagtttacattactcttatacttatatataaaaacttatccaaacaaaatctaaataactcatgtatgattttaacacaaacctcagtccattacaaaaaaactagacactctgtgtcgttaaggaaaaaagttgaacgatcatctaatctatttagtaatgaaaacggttc

SEQ ID NO: 284858 - DNA, 408 bp, Glycine max
  unsure (1)..(408): unsure at all n locations
tgttaaagtaattgacatgtgattntgttatatattgattcagttgtgcaacagaaaactaaatttccctttaattcttcaatttaatttgtaggggccaactcgagcacttttggctgcaacaattgggaacatcctaggatattcttcaagtgctagtggaaagtggaacaagtgagactttgcttatatcttgtgcttatttcatatttttgtacatagctatatatgtaaagtccattctgcatatgttttttcctttaattctgttgatttggcacatcaacaaagacacacgaggagctatgagctatctctatttcccatagacatgtgcttctaaggtctataaattacaatttccatgaagaacgtttcaattttgatctaattaaacttttctataca

SEQ ID NO: 284859 - DNA, 417 bp, Glycine max
tcctcgggccattcctgcgaaggcaaacatttggaaagttagtttacaagaaatataacaatcattacaaacaagggccaaacaacacttctcatggcacgagtgtcaacatgcactttataaaataatcatattggggtcgtgctattttatgacacatacgtatttgcacacataaaaattttgtgtgaagcattttacgacacctattcatgtacatattttttgacaaaccttttcatgctacatcctatatatatatacacacattttttggaaggcttcttttgttacctactcacaaatacacacattttgaaaaacacttttacgctacccatccaacactttgtaaggcacttcatgctatatatattcatattatgcaaggcattttcatgctatatatgttcatat

SEQ ID NO: 284860 - DNA, 416 bp, Glycine max
  unsure (1)..(416): unsure at all n locations
tcgaattgctcaagtatctcttctcctttcaacattttcaactgccaataaattcagcacttctgtgtcagtgctacctatctcaaccattaaaaacattcaatacataccattaatattaaaataaagttttaaggaagattgacaaactatgcatataataaacaaacaccatatgcaagaataaaatttgaaactagtttttgcatatgagcatatcaatatgcatgaattgcaaatatacctgagagacagagagaaggtgggaaagagcgtgttggtattgagcatcattgttatggagggattcttggactttgttggtgttgtcgtgtacaagcttctgaattgcgtggtcgatgagctcanaccttcgatcttgttccatgcttgtatattgtttggacttcaataat

SEQ ID NO: 284861 - DNA, 412 bp, Glycine max
tttctcagtcgtctgtaaggatgattgggtgtcataaagcggcgatgcctactgtagactgtttttctgtcatgtttaagttgtatgtaacttgtattttcttcacagatggggcatgcatgatgacccttaacactgtaaccgttgagattcccatatgctggaaagtcattaatggtacaaaaaagcattgcacgcatttcaaaggtctccttgcgaaacgcatcaaacactactaccccctcgtcccacaactttctcagatcttcaaccaacggacttagataaacatcaatgtcatttcttggctgtcttgagcccgatatcatcatagacaacatcatgtattatcgcttcatgccaatcaaggaggcaaattgtaaattactatcagaactggccatgaactgtg

SEQ ID NO: 284862 - DNA, 412 bp, Glycine max
tgctttatttaggtgggggcatgcaatcagtttaatatgttgctggggatggatatccagcctttttactgaaatagatattatagagaagcatatcaacaaaaagaactgaaaaaaaattaaaattgttgattttcatgtattttcctttttgttgtttatctatttcacctgtcccccttaaaatatattttcttaatatatcttactgtttccacttttgatttttgtgaccctcatttgaaccactttgttgttctttacaggacaaaattgaattaagggaaggatcttggtttgaaccattaaaagatatggaaggaaagctagtgggtcttggtagtaacccaccttatataccaagtaaagacatctctggtctacaagctgaagttggtaggcatgaacctag

SEQ ID NO: 284863 - DNA, 392 bp, Glycine max
tggataaatataagccacgtttgattgttgatgggaatatggaatcttcccaaacaaaatcatgattatttctggcaatctatcaaaattatgtgtagtataaactctcaaatttgataatatatgattggtttattacgggaagaaagatgcgggatcgaataccttttgtttttggagaaaattccaatacctttgtgattgacactaaatattgatttgttgttttaattgtacgcattggtccgtttaacgtctaaatctatttcggctgagatatcgagggtgtgattggttggacattagcacgggaccccaagttgatgaaagttgacaatgagtgaaaatcagaaatggtagttacgtctgcatctttattaagattggccttt

SEQ ID NO: 284864 - DNA, 410 bp, Glycine max
  unsure (1)..(410): unsure at all n locations
ntgacttgagtcatcaaaagattataaatatgtgactcatggcatgaattttaagaagagatgaatcgtctatctttcaatcttctctcaacatcattcaatatctttcaactctttctagagaattttctgattctttttcttttcatctttctaaaagtttttgttcaaaactttctcttccaagaaaagctctttgttcaaaaacttgtgctattcatctttttcattctcttctctctttgccaaaagaacaaaggactaaccgcctaaattcttttgtgtctctcttctcctttacaaaagattcaaaggactaaccgcctgagaattcttttggttcttaccttccccttaagcaaaagatttcataggactaaccgcctaagatatcttttgttccccttaca

SEQ ID NO: 284865 - DNA, 417 bp, Glycine max
  unsure (1)..(417): unsure at all n locations
ntgccgatttagttttcgccagtgaaaggatcgaagtgggtctgagaagaggcaaatttgattatcctgctttgataaataggaagcctagggaaaatggagagaataagaagggggtagaaacccgtgttgtgactgtcattcctacatggccaaatttcccactggctcaacaatatcaatactcagccaatatcagtccttcttattacccaccaccctaccagccaagaacacccaatcatccataaaggccgcccctaaatcagccacagaacctgcctgctgcacatccgaggccagacaccacccttaatacgaacaaaaacaccaacgagaggaggaattttccagaaaataagcttgtagaattcaccccacttctagtgttgtatgctaacttactcccatatatac

SEQ ID NO: 284866 - DNA, 404 bp, Glycine max
  unsure (1)..(404): unsure at all n locations
nttctgccagcaagattgggagagtcttcgccaaattcatggtttaacaagttatattgagctgtctagttgggcacaccaatacaaggctgggacaaagagggaccttcttggcaagctcagcaaacatagaagggagcatgatacattaaataccaaacatgccagtaaggcttcacaatgaatccaatcaactcaattagtttgaaacttgactggttaatttgttgaagttggtggatgaattaaagtaactcaatttgagttgaaaattcagctcattaaacaaatgggctgatcttgaatcatgtatagttagtttggtttgattgttatatgaaaaaaatatttattctaattttgcttatgttgaatctatattattaattcttaaactacactcg

SEQ ID NO: 284867 - DNA, 411 bp, Glycine max
  unsure (1)..(411): unsure at all n locations
ttcaacaagagtcctcacaaataattatcatgaaacagaaaactagcaagactacccatcatatctcccaaaaccccatacccacgaaaatcaagagggaaagaagtccacccaaacctgaaatttcgaagtcccactcgtagacacgcacttcacgaccccgaaaatgccctcctttcacgatttggggcagaaatgatggccaaaggttgaagctttgtgtggagcttcaatggtggatgaggaagagagaaagctacgtgagagagggagagaaaaggcttctgaatttttttggggctgagtgaggagagagaacatagctttttggttttaaataaaagggttctctctttttctattattntatctaagcaatgccacatgtctccatttgagtgggatccaaag

SEQ ID NO: 284868 - DNA, 410 bp, Glycine max
tcttatccaaggcacatgcttggtggtgaagctccttcttccatggcttattctctattggatggtgcctcccgtctcctcttctcctttgccttccgctgcatctccatggtgaaaaatcgccattgaaggatctcattgaagctcaaagatccagcctccatagaagctccacaagcaagcttccatcaggctccaacatatatgttattgaattttgtgtctggtttaaaacaagaccaattttatgaaaatatcaatgggtagactgtgagaaaagttcaaaacattgaggctggtctacaaaacccataattattgcaagcatcttcaccattgtggttcaaaatttcctaataaacactcgtataaaaattatggaaaacatattgcgtagattcacctttata

SEQ ID NO: 284869 - DNA, 405 bp, Glycine max
  unsure (1)..(405): unsure at all n locations
tctagagaaagctacatgaagatacctcggttatttcgctgcccagccttcgttaaccgttggtgcttctcgaaattnggtctgcaacttcacaagacactcgtccatgatctgactgttgggatctttgataagttgtctggagtgtgctagaagcctcttaatgaagcttctggaggaagcctcttaatgaagcttctatagaaagctacatgaagctgcctcgtgaaaaacgcttcccagccttcgttaattgttggatattctcaaaatacggtctgcaacttcacaagacacttgtccatgatctgaccgttgggatctttgagaagatgtctggagtgtgctataagcttccgttcccgaaagcatctcgtattcaagcacttcagcctttgctttagt

SEQ ID NO: 284870 - DNA, 390 bp, Glycine max
tcttcttaaacaaggttccagtgtaatattgatgtgctataatgatctataaatagctaatactaattaataagcatagtttaataaactatattgtccttgaaatatttctttattaaattataagataattattataaaaacaaataattttacaagatatagggacttataattgtatgatcatataataacctgtacactccaatatttctattggttagtcttaaaaagataaaaccaaatttacaatgaatttatattttcaaaattaaaatcatgaaataaaagtttatctgatgaataaacaactagttgactttacacaaatataacgatggcatattaataattgtttaaatctctattagcacaaactttttgttttaa

SEQ ID NO: 284871 - DNA, 412 bp, Glycine max
  unsure (1)..(412): unsure at all n locations
tattgataaactcctctagttctatatggtggaggtatttatatatgctagataaagactattaaaaaatgtgtagaacctttcattttctcaaagtgttataagaaatgttaattagtaatggagaacaaatttgtttttggcatgatgtttggattgaaaatgatagtctaatntattttttcctcggttatttcaaatcttttggcataaatgagagatctctctcatgtttttatttttctccatttctcaatagatctttttaagttaaatcaacttacgatattttatcacattcttagttgtagtcaaaggacttcaaatccttctaattcttttatccttaattatttttagaagttttgcacccttcaaggtgcttgtgttttcttggcacgttatcatgaat

SEQ ID NO: 284872 - DNA, 418 bp, Glycine max
  unsure (1)..(418): unsure at all n locations
nttcctgattaaaagaatagaagatacaaaatacattcccattatctcagacaaaaacagaactacattgcttgaagatccacttccaactcttgaaacagcaaaaaagaactgcatgcaaccccaaaaatggaagttaggctttataacaagtcaacaatacaaactgtatctcttaccgtatttagtgaagccaaactgtacctggacacatgatataggactagatataatcatagccgaactcttaaatacacaagataaatctcaaatcaaccacaaaagaagaaactttcttgaagttacactcaaaactgaaagaagacgtttcatggtttacaccaaataataaagcttgtccaagcacagatccttctaaactaacagtaactcatgacatatagtaactngctataat

SEQ ID NO: 284873 - DNA, 413 bp, Glycine max
  unsure (1)..(413): unsure at all n locations
ttgcctanaacaaatggttaccagaagataattttgaaaaaaaatcttttagaagggttttgaaatttgaattttaaagctgtaattgattaccattgatgtgtaatcgattaccaacaacgaaactcttgaaattcaatttgaaaagtcatgatccttcaaaatataattgtgtaatcgattaccagaaacctataatcaattactagtgaagaatttcagaataagctttttgaaaagacacatctcttcaaaccattttgaaaaggcacgaagggcctatatatatgtgtgtctgacttcaaaaagtaagagagagatattctaagagaacttcattgccaaattctctctcaacaactcttgggcaaacacttgtaaatctattgagacttcatccaggaatttcaaat

SEQ ID NO: 284874 - DNA, 414 bp, Glycine max
  unsure (1)..(414): unsure at all n locations
tatgcgcatatttccctacgaacgttcacttgcactagacatcctattaactaagaaaaatgcacccatatacaatcaaggtagcttcattacctagattatttacatgtacttccaaggtgtatttgttattacatcacacacgcctccttggctaaatttacatacatgcatactcaaagcatttcggggtaccaaaaattgcacatgcgctcatcttggtatttctaatacctatacatatacaaacttcatgatgaatcttgactacctacgcaataaggtgctacatttcatgcttttttttctttttttttttttcaagtttttgctacctaaagccacatgcaaattcaagcatactttcctttgctgactaagattgtattcaaattagaaagtatatattntttt

SEQ ID NO: 284875 - DNA, 401 bp, Glycine max
tgtctcgtggtttcgatagagaacgaagcccaatctgaccttcgcgattttcatcaaggtaaccgtgattctacgcttgttccttgttagtttcagcttgtctttgcatcttttcttactttagaaccaccattgtatgtttttgcgcttcctttgaaaaaccctagagaaagagactttataaaagttatctttttatgaaatgggtgttattttcgtgaccttcgctgaacctcgatcacattggcgtgatcggaattttaaaatgatgttccttctgtagaatctgaaacgcccttagccttttcatgtaaagacatgagtagttgactcagaatattattgttaaccttatttctgatatccatagtactttccttcattttggcgcatagagactt

SEQ ID NO: 284876 - DNA, 184 bp, Glycine max
  unsure (1)..(184): unsure at all n locations
ntcataagtgaaatcaggtgtagccatctccctaagtgtccttgatcgaggccgtacccgaatcaaataaacattaaaaatgcagtatctaggaagtgatccaaggtcgtctcccaacgagcaatggttaaccaaacgttcataacagatagtaataaaatagtaacgaattgggggggggggg

SEQ ID NO: 284877 - DNA, 373 bp, Glycine max
  unsure (1)..(373): unsure at all n locations
nttatgctagcttatttaattagtgttgagtaactttagtcttcaaaacagctgaacgatgtataatgacagaactcgacacatttataagatactttatcataaatctaaattttattttgtgaataaacacatatctcgaggtgttataatcatagtatttaaatgaattttaaactcttataatttttgatctaaattgtaattttggtcctaccttgttacccaaatacatgattctggtccatatatatttttgatgtgacatatggtccacatagatatataaattggcgattttggtccacttagaacatgataactaatgacttcaaataataaagttattatatgattctataattaattaaac

SEQ ID NO: 284878 - DNA, 390 bp, Glycine max
tatgaaatcaatggaatccaagatttcatttaacacaagtcgttcaattttgttcttagaaatgtgacctaagtgcttatgccataatgctcctgagtttgtattatcaattttacgcttagtaccacgtaattccgcattaaaggattcaccataagaagctacaatatcaagtaaatatatattatcataagccaagagtgaaccagttccaacaatatctgaattaaaagacaacctaatcacgttgttttcaaatgaacacaaataacccaatttgtccaaataagaaattgaaatcaaattccttctaaatgacggtacaacaaaagtatctttcatatccaaatgagaatcagtacataataataatctaagatgccctataac

SEQ ID NO: 284879 - DNA, 404 bp, Glycine max
  unsure (1)..(404): unsure at all n locations
tgcctcaaagaggtccaggaaggacatggcagcctatagaactagttccgctccggagtatgatagtcaccgctttaggagtgctgtacaccagcagcgcttctaggccatcaagggatggtcgtttctccgggagcgacgcgtccagctcagggacgacgagtatgctgatttccaggaggaaatagggcgccggcggtgggcatcactggttactcccatggccaagtttgatccagaaatagttcttgagttttatgccaatgcttggccaacagaggagggcgtgcgtgacatgagatcctgngtaaggggtcagtggatcccgtttgatgccgacgctatcggccaactcctaggatatccattggtgttggaagagggccaggaatgttagtatggcc

SEQ ID NO: 284880 - DNA, 403 bp, Glycine max
tgaatctgaagctgaacacaggcagctgacttgcttagaaaatatgaaaaggaagaagctgcagcaagatctttggtcagcagcccaagctcacgagtctttattgaggcagaaggcgagatcgcgttggattaatgagggggttagatatctcgatattttcacctggtgattaactcccatcgaagtttatagctttttccaacagagatttcaagaaactatgagcagcagaccagttttgaatgacacctcttttcaagaaacatgttctttggggaggctactatgaaaaatgtcaagactatcaaattgattttgagagcttttgaattgtcatcaggacttaaaatatattatgggaagagcggctttgtggtgttgggccaatctgaacaatgga

SEQ ID NO: 284881 - DNA, 415 bp, Glycine max
cttcactcggagatctgattcaggcgcataatatatcgagacgcttgaaaatgaacaacgaaagctctcgagaaattccaatgctcattatctttaactcggaggtctgatttaggcgcataatatatcaagacgctcgaaattgaacaacggaagctctctagaaattgaaatggtcataacttttcactccgaggttcgattcaagtgcatgatatatccagacgctcgaaattgaacaatagaagctctcgagaaattcaaatggtcataacctttaactcggaggtccgatttatgcgcataatatatcgagacgctcgaaatttaacaatggaagctcttgtgcaattccaatggacataacttttatctcggaggtccgattcgagtgaataatatatcgagacgatcg

SEQ ID NO: 284882 - DNA, 409 bp, Glycine max
caaatgcggaaagtttacgcctccatttcccggtatgcttacactcaaagtcataagggagccatggagtggaccttccctcctagtaatattcttgcagctctaagatttgatttggcttgtgtgccttagtttctttgcttctgttcattttgtttttcttcatttcatatgtacaaaaaaaaaattggtcaaactaatttataaactaattaaataaacttataaactttctcattacttataagctagttagttaaatgggtttacaagctttccgagtgtgtcttaccaaactcaccaatacataatcattttaaaaatatacagataggaactgatatataatactttagattttaaaattaaaactttttcgataacttgtgcattacaaattatataatat

SEQ ID NO: 284883 - DNA, 415 bp, Glycine max
tcaagcaatatcaaacatttgaaacaacttcctcactgcatatgagcttcctaagtaatgaaataattttcctaataattacaagcacaattccaatggtaagatacagatcacaattaatttaaatgataaatgaatcagtaagaaatcatttcctcgctgtttgtgaaagtgagtatgaacacatcatataaatattattgaaaacataaagatctaatacagacctccatggccgtcataaacaccaaagtatgacgtagactcgtccaaatatggatgagctgcatgctggcatgtaatgtaaaagaattaaaacttgtatacaccatcaaacagattgtaatataataatgggctactgaagatttaagtacaaagcatcaaggtacaccaagcattgacatcaaatata

SEQ ID NO: 284884 - DNA, 415 bp, Glycine max
  unsure (1)..(415): unsure at all n locations
ctcccagtttttaagttcttcctcaaaactgccctactcttatttcccaaagncctattaacaacattgcgtttgcccatcggtttgagggtgacaagaggatgaaaataacaatttagtgcccaacttgctccacaaagtcctccaaaaatggcttatgaacttagagtccctatcactaacaatgctacttggcaaaccatggagtctcacaatctccttgaaaaacaaatcaaccacatgggaagcatcaatcaactgtcttacatggaataaaatgagccattttagaaaacctatcaacaaccacagaaatggaaattctaccattgcttgtttttgacagccccaaaacaaaattcatggataaatcactccaaggaatactacggaattgacaatggagtatacaatt

SEQ ID NO: 284885 - DNA, 237 bp, Glycine max
cggcaccttcgcctagtttgtgtgctttgtgtacctgtattatatcctttgttctggaagacggtgtatgatcgattcgtgcttggcatcgcagtgactatctctagatgatagtcgtctttgcgtaaagggcacgccggccgaaatctgtgttctatctgtgctgtactcttatatggtaagagaggcatgaaaacaggggcaactcgtaatgcgctaatatcatccggtgatgat

SEQ ID NO: 284886 - DNA, 411 bp, Glycine max
  unsure (1)..(411): unsure at all n locations
tgtctcagcgtttatgcgagacggagaccatctatgctagctatcatcgccaagtaccaagaagagttaggtctagccacggcctacgagcatagaatcgcggacgagtatgctcaagtatacgcggaaaaggaggctagaggaagggtgatcgactctttacaccaagaggcaaccatgtggatggatcggtttgctcttaccttgaatgggagtcaagaacttccccgcttgttagccaaggccaaagcgatggcagacacctactccgcccccgaagagattcatgggcttctcggctattgtcagcatatgatagacttaatggcccacataattagaaatcgttaggaaacttgtatggtctctcataccttgactagatacgactttttntttgaataaaatgag

SEQ ID NO: 284887 - DNA, 399 bp, Glycine max
  unsure (1)..(399): unsure at all n locations
ntgagccaaaatcctgactcaccataaaccttgacccatggtgagaatgtcaatccttaccctcggaagcaaaaaagaatagaagggaaatttccaatcaaaaaagaatagaaggaaaatttccaatgaaagcaaaaaaagaaaagaaggaaaattccccaatcaaagagtgggagaaagcaaaaagaaaagaaaggaaattcccaatcaaagaatgggagaaagtaaaaaaggaagaagaagaaggaaagaaagctcctgatcagggatcgaaggaaaaacagaagaaatgtgcagagaggtctttagaccggacaatatctgaacaatacagaattgtcaccaaatgaacaaaaagaaggaaaggaaaccacgacctanaatggtcttctccctttg

SEQ ID NO: 284888 - DNA, 350 bp, Glycine max
gagcaagactacttcagactgatcaaagttatttattttatgaaaacctatcataacaactagaatgtattgcttgccatcaaccatgacattattacaaagactatcctatctagaccaatatgcttactaaagaagcataactgataaaaagctgtatgatgaacctcatccccatagtgatgtaatctccattggagcttgtatgcctaggatcctcttcattaatggattcctttgcttcttggaagatgaatggcagtggaatggataaggaagagagagaggagatgccacttcagggagaatatgagactagaagaagctcaccaccataggatgccatggat

SEQ ID NO: 284889 - DNA, 404 bp, Glycine max
tcttatccaaggcacattcttggtggtgaaacttcttcttccatggcttattcccttgtggatggtgcctcccctctactcttctcctttgccttccgctgcatctccatggtggaaaatcaccattgaagctcaaagatccagcctccatagaagcttcacatgcaagcttccatcagagatagtgcaactcgatgtcaaaacaacctttctccatggaagattggaggaagacattatgatgcaacaacctgaaggttttgaaatggtagggaagaaaaattatgtatgtacgttgaaaaggtttatatatgggttgaaacaatctccaacgaagtggtaccagagagtcgatgagttcatattactcatgggtcaacaaaagtgccaatgatcatgtatca

SEQ ID NO: 284890 - DNA, 404 bp, Glycine max
tgccaattaaattgattcggatccatatgacttgttacaaatgaaactagaatttaaaattggaattggagaatatgacaatgataatggaaataagaatgaaaatgtgaaattgtatgcaaattgcttcctataatgaccaatttataagacccaatagggatttgttatgttattgttctcgattgtgacatatctattgttgttgtggttcattgatttcttcttcttctatccgatttgtttcttcccacaagaattagttaaggagagagacaataaaaaatgatttttttaaatgcgcatttcttcaaggtttttctacaagaactcaatctccaacgtgaagaccttgagagtgtctttagtagctagatcttagaagaacatatcttcaacttaaa

SEQ ID NO: 284891 - DNA, 408 bp, Glycine max
tctcccccaattttctataaatagggggagaagtgtagtgaaaaagggttcagccccttaggcacttctctctctttcgaatttgcttagaaaaattgtttccgtgaagaaaatccaagccgaggcacttccgtaacgtttccgtgagtgatttcgcgaaggttttcgactgttcttcatttgttcttcatcgttcttcggtcttcaacgggtaagtacctcgaaccaagcttttcgattcattctatgtacccgtggtggtccacattgagtttcgtgtattttccttctcgttttcatttactttccgtaccccttttgacgtgcttaagccattttatttaagtcatttctcgctaaacctacaataaaatatatttccaccgattgttagaattgtattatccg

SEQ ID NO: 284892 - DNA, 412 bp, Glycine max
  unsure (1)..(412): unsure at all n locations
tcatgatgaatcaagattgattcaaagagtttcgatgataacaaagatgatgacaaaaagctcaaaagtcaagaacacttcatgttaacaaagatgatgacttcaagaatcaaagaatgaattcaagattgaatcaaaaacacttcaaggatcaaaaggaaatttgatttcaagaatcaagaatcaagtttcaagattcaagttccaagaatcaagatcaagattcaagactcaagattcaagaatcaagagaagattcaatcaagataagtattaaaaagttttttcaaaatctgtgtagcacattaattnttctcaaaaaccttttaccaaagaagttttactctctggtaatcgattaccagattgttgtaatcgattaccagtagcataatgtttttcanaaagcttt

SEQ ID NO: 284893 - DNA, 418 bp, Glycine max
tctaagcctattacagtagtgtacaaccgaatactttcttcaaataaaagaaagaaggataaagggaaggtagtggttgttcctttaaaaattaccttttagtggagtatttataatgtatatgatcttacatggtatttatttgctctagtgagtgtagacagaacatagagttagttgagcaattaagttcaccacctccaaactccagagttttgtattttccatctcattttccacaaaatggttgggaacagtttaaagcatgcttgtggaaacaacatttgttctattggagaattccttcatacaacttgatgcgcatcatatttgtgcgtgtctcatctcttttgtttgggatattgttttggaagcaaggatagacaatgttagtgatcataattttattctacttatg

SEQ ID NO: 284894 - DNA, 415 bp, Glycine max
tgcatttggacttgcgaaagccccactccatcattatgattattacctgccatctcaaacaaacaaatcaaacgtaacaagacaattatagtcgttgtttgaatacctcacccactcaagtgtagcacacaattatggattttctctaatgacaacactcttgccttttaccactctaattccccttgagttcttaggaaattcaagagattatggccacaacaaagaacaattcaccaatatgtgtaaggtaaggctatagagacaaggaaaaggttaaccaagaaaaaggctaacaatgtttttaggcacaatttaaggaaataaaattcagaatttaggaattcaagtaacaatccttcatacaaccaatatatttccttaaagatatatttttttttaagttcttcaagca

SEQ ID NO: 284895 - DNA, 416 bp, Glycine max
  unsure (1)..(416): unsure at all n locations
nttaataatggtgatgtcttatttatttgtatttatgtggatgaccttatctttatcggcaataacccaaatttgtttaaagacttcaaggagtccatgtctcgtgaatttgagatgacagatatgggactcatgtcatattacttaggaagggaagtgaagcaaatggaaaatggtatctttgtctcacaagaaagctacacaaaagaagtgttgaagaaatttaatatgcttgattgcaatcccgtgaacacacctatggaaggtggcttgaagttatcaaagtttgatgaaggagagaaggtagaccccacggtcttcaagagtcttgtggggagtttgaggtatctaaccaatacaaggcccgatattctatatgcggtgggagttgtgtgtcgctttatggaggctcctac

SEQ ID NO: 284896 - DNA, 408 bp, Glycine max
tcaggctgttcaattgcttcagattgttgcacagattggcaaaggtctgtgtggtgatcggcagaggagcatataccacagagtctggcgacaagtgtagatttttgattcatggccagttggattaccaggttaaccaaggcatctagtttaccttcaagcttcttagtctcgactgatgaagatgaatttgtggctacttcatgcactcctctaatgacaatagcatcacttctagcactaaattgctgggagtttgaagccatcttctcaattaaatttcttgcttcaacaggggtcatgtctccaagggctccaccactggcaacatctatcatacttctctccatgttactgagtccttcataaaaatattggaggagaaactgctctgaaatctggtggtga

SEQ ID NO: 284897 - DNA, 415 bp, Glycine max
tgcctttcgttaatcttgctccttctacgttgctctgtttctgaatgctttgaacgctgtgggttcaccctcttccccgtgctgggttcatccaccttcactgccaagtcacaacgtaataataaataattgtgttaaaaattgcaaattgaattgcggaatgcaattgaagaggtaaaaagataagaactttgagacacccatcaatgaatcaatcgataaaccctggtgggtgttgcacaaccaaaccaaacacagagagagagagagagaaacctttgaaagaggtgttattagcagttaagagttcttcttcatcatcgtcgtcgaattcatcttgatgccctttcgcagacctagccatttgtttctccagatgaagagaagtgtaatgtaatctgtacaacctacctag

SEQ ID NO: 284898 - DNA, 412 bp, Glycine max
tatggcccataggcaaagctatgacaggttgataatataagtgaagtgctatgttaacctagtttatgttataggaaaaatatattttgacactcaaatgtttataaacacttattgagaaaggagaaaaaaagagaaaaatataagtatgatagaaaatataatgtgataggcaaatagagataaaaaaaaatgaaaattgctagtgggtgtttaaaatattacccttcgtattttaattgtaaagaatgaaaatgtaagttaatgaaaaaaatgataattaatgcaataaaagaacaagtggatatttttcgtactgttggaaagtttccgatcccctggctcaatttttgggatgcagttgatacatatatctgttgagcagctgatgtaataccatttggtggacata

SEQ ID NO: 284899 - DNA, 405 bp, Glycine max
  unsure (1)..(405): unsure at all n locations
ttntatgccactccactttctctacccctctgtattttccacttctactgaccacacaccataaaggaatggtaacaatatactcttttccaattctctactctacaagtgttatgttgcaattaaataatgtatatgaattgtgatagagggaagcttgctgattattcttcaaatttaaaactgagacaatttaagtcataatgagttataagttattgtcctttcacaggaggtgctattctatgaggatggagagcccataattgatggggaatctggagatttaagggttagtaacttgtcactttcagtatccatgctattatgtatgcagtatgcctgacatttcatacggttgaacagtttcgtatccgaactgcacctcatgacgtcttcagaaga

SEQ ID NO: 284900 - DNA, 410 bp, Glycine max
tgttcgaaggggttgataaatgtgtctgaatatattaagatacaagatttgtgtttattacgtaatttaatattgatttcatcaaattacagagcctgtttccaaagaacatgttaaattaatccttgggttcattaaattaatcatttgattcctataagtagtacttaagatttagtccatatacatccttattagtacacatcggtacctggtattactatgttccttaagttttatccttatatcgatgtataaggaccaaatcttaactatgcttttcatacaatgactaattcttaaatgaatatcaccgataaggactaactaatttaaacttctgatttgtaaactccttcctattgttatgggacatttctttcaatgtcttctcaaaattcttttgcatc

SEQ ID NO: 284901 - DNA, 404 bp, Glycine max
tccttaagaaactttcttgagaagcttccttgagaagattcctagagaagctagagcttagctatacacacctctctaataactaagctcacctcctttagatgagaagctaaagcttagctacatgttagtcgatgaatacgactaactcttgtgtataaaacctatgtaaattggatcaaactcctccaatttatggatattttgtatggatgaaattactttttgttaaagataggaaataaatacttagtactcccattttgtgtgtttaataaccatttcctctcagttctaggttaattaggcaagtttgtgaagcgctgattatcatccgctcgctaaggcaatcttctggcttagcgagccatccactgagcacaatactcctcgactgagcgcga

SEQ ID NO: 284902 - DNA, 349 bp, Glycine max
atggctgcgcacgagctcatatttggcgagttatatattttatgacgcattgaaatggattacttgtattggtaatctactacaggcccaataagccttctggtaatcgattactggatgtcgtaatcgattacaggctgcctgttcatgtgtaatctattacactggatggtaatctattaccagagcctaccctaggctagtttgtaagagaatatctatttttatgcttaaatacatactatatgtctaattctcctactaatacacttaattcaaccattcaattactatgtgcacaatagcccgtaattgacatcgttaaaaccataattactacatgatcatc

SEQ ID NO: 284903 - DNA, 408 bp, Glycine max
tgtgcaaattaaatcactcctacattttatctctatcatgcattgtatgttggtctcgtcctttgtcacgggaagccggaaggtccatatcaccttcttaattgtacacatggggcactgcgcccccaaatgcacaagtaagaagagataattttccgggctctcgtgtccgtaaaatgcattcatatcatgcaccgcataaacatctcttcagcatcataatgaacatatcgttcctgcatttgtccgttatcacattcccattttgcatgagtcattgcatcatcatatgcgttcaacatactttttgtttgcttatacatgatccttgtattttcctctacaaaacaaaaacaaaaaataggggaagtacgaaaattcacgctgcattcttagttgcatatattc

SEQ ID NO: 284904 - DNA, 279 bp, Glycine max
ttgacttgagccatcaagagatatatttatgttttcatggcatgaatttaactgatgatttctctctcaatcttttttcatcatctctcaacatctttgagctccttttacagaattttatgattcattattcttcatcttacttaaagtttttgaacaatacttttatctgtgaagaaaagctcttagatcaaaaacttgtgttatgcatcttttacattctcttctccctttgccataagaacatagtgactaaccgcctaggttctattgcgtttc

SEQ ID NO: 284905 - DNA, 417 bp, Glycine max
tgtatcatctactaactacaaattgattttttcatcaaatatttgtattctacaggataccaataccaaggtgaggattggtacaattgaagtgaatcgcggcctctatcaattcacccccgaagcaccaaaaacacataccatatgttctatcattacacacccaaagtgtctaatcctccctgtaaatctatggcattttcgtatgggtcacccctttcccgaaagattacaagccatgcaaacatactatcctttcttaaataataacaagagtttcatttgtaatacttgccattatgccaaacataagaaattaccttttcattctagcacatctcatgcattaaatcaattcgagcttttacatgttgatatttgggggtcgtgctccaaaacatccatgcatgggcaccg

SEQ ID NO: 284906 - DNA, 413 bp, Glycine max
tcttatccaaggcaattattggtggtgaagctccttcttccttggcttattccctagtggatggtgcctcccctctcctcttctcctttgccttccgttgcatctccatggtgaaaaatcaccattgaaggacctcattgaagctcaaagatccagcctccatagaagccccacaagcaagcttccatcagaagccattccataagagaactgaaccggatttgcaagaaagttgttgatgtctggaagaaattggatttaggcaaccagataggactaagacatgtaaggtggtgtattgattattaagaaaaaattgagacaattgtttcagtttgctgaacctttcatgttatgatcaatagaattagacttgcataatatgtatttgagaatttttgtatctgattctc

SEQ ID NO: 284907 - DNA, 401 bp, Glycine max
tctctctgagttcctcgttgaaccaatctcagacttatcaagtttgaacccttatggcgtctacccttaacttatcttccatctctggaagtggcgtcatccaaattctatgacctgtaccaagcgatccactcctataaggatcacgtcattaggtgtatcaaaaagagatatcattgactcaatcatgtggttgaagtctggtcttttggtggattctccttttcaaggctttaagtgtgatccctcgctttgacgtaaagaacactaggttggagcattcaaatgtatccccttcatttgatttgattatttgaccattgtagtgcactaactaatggacaaatgaggaaaacatgtcatgtattatatttgtagagttagaaataattaattgagaa

SEQ ID NO: 284908 - DNA, 391 bp, Glycine max
  unsure (1)..(391): unsure at all n locations
tagctttgggaagaatatgttcttgataatgagcttgataaatctttgcacttgtccttgatatcaacaaaaaagatttcaagagagaatcaaatatggaactcaacactttaaggaaaaatcgccaactaagattacatttttcacggatactattggggatttttataatgcttagtcaaaatataacaataaaatcacaataggaagaaaagataagaatttaacagtttcaggcttgtaacatctatcatcttcaccttattactctttgctttggttcacattatggacttatatcaatatatccatcaaaacaccaccaaattagtttcacaaatgaaacatgatgagacanaaattaatcttctttatgcttcggacatgatgc

SEQ ID NO: 284909 - DNA, 407 bp, Glycine max
tctcaaggaagctacctagtctataaatagaagcatgtgtaacacttgttgtaactttgatgaatgagagtcttgtgagacatacttcaaagttccacttctctccctcttttattccttcaatttcatgctcccccctctctctttctctccctctttcttttcctgcattgaagcatcctttcaagcttcttatccaaggctcatcttggtggtgaagctctttcttccatggcttattccctagtggatagcgcctcctctcacctcttctcatttgtcttccgctgcatctccatggtggaaaatcaccattaaaggacctcattgaagctcaaagatccagcctccatagaagccccacaagcaagcttccatcagcctcagattttgacttgtttttggga

SEQ ID NO: 284910 - DNA, 408 bp, Glycine max
tgtatgtttgggttgtgatatcttattacttgcacttgatcaatagtatgatattggccgacaagttctcgactcacttccatgttgcctacctctagtaccttgacaacttaggtgcttgccacaagtatgcatggggagtagctgcactgacatacctctacgaccatctctcatatgcgagtaagtataacagcaagtcatgtggaggttatgtgacattactcatggtaagtaaacatttttagtcttgtaattattttttattactataattaatatttgtattggtattttttatagtcttgggtgctggcgcatctgccaatgtttgctacttatagtgagaggattatgttttggaggacctagaagccaccagatataacccattgagaggtaccgagc

SEQ ID NO: 284911 - DNA, 414 bp, Glycine max
  unsure (1)..(414): unsure at all n locations
tgtccgcaaaaaaatcactaaaaaggattttaaggttcgatacctcaatttttctcaccaagtaaaaatggatccttttaaggtccaatgccttaaaaggaccaccttccaagtaaaaagaatcgcttgattcgccctttagaaagaactacgtaggtctgatttcctcttcgatggagggtacgtaggagcaagagccccgcttttgtcgacctcaaaaattaaaaaagaaagaagagtttagatacacaatttcacacaattctaatttaaggctattgtcctttgggacaaacgtgagaggtgctaataccttcctcaaacgtaaatacaactcccgaatctagaatattcttcatgaacgatttctttcgngttttctgacgttntacacaaataaacgttagtggcgac

SEQ ID NO: 284912 - DNA, 405 bp, Glycine max
tctcttagtatcttttgtattttgggtactgtaatttgatatttatacactttgaaaaatccttgaaaatgagacgttgtaaaagttttcattttataaaattgattttattttcatgacctttgctgaaccccggtcacattggcatgatcaaaatttcaaaatgacgcctcgttgtagtagaacccaaaacaccctttagcccttttttattttgataggggcatttgactccaaatgttattattaaccttgtttttgaaatctatactaatttgccttcaatttggtatatagaactatgtgtttggatcaaagaacgtgaacgagagaggtctctgagcgacgcatagaggagttgacggagagctcacgataagtgaagggagtttattttggtttacc

SEQ ID NO: 284913 - DNA, 183 bp, Glycine max
acatcatcttcgttaacatgaagtgtacttgactttggagctgtccgtgatcatcggtggaatcatcaaaactcctagaatcaatcgggattcatcacgatgctggctactccaaagacaaactaacaatgatatcgcccagtccaggggacataacaattggctgccccttaacctaaacac

SEQ ID NO: 284914 - DNA, 406 bp, Glycine max
tcaagttgttcattgactctagattgctgcaaagtataaaaaagatctgtatggtgatctgcagatttctgattcatgacaagctgagttactaggttaaccaaggcatcaagtttttcctcaagctttttattttcagtagatgaagatgaattcgtggccacctcatggactcctctaaggacaatagcatcatttcttgcactgaattattgggattggaagccatcttctcaatcaaattcctagcctcggcaggagtcatatcaccaagggctccaccactggcaacatcaatcatactcatttccatgttgctaagtccctcatagaaatattgcagaaggagttgctcagaaatttggtggtgaggacagattgcacacaatttcttgaatctttccca

SEQ ID NO: 284915 - DNA, 365 bp, Glycine max
tctacttcaccagattcctagaaaatgtgatcattatggcctatggggcatctttggagagtagggactagttcgagagatattcatccctacgcgtaggaacaaagaaagaagaaggctcggcttccagagatttaacggggtgatcgccgtaaacaggctatagcggcaacttgacaaccttgtgatcggaggcctgatgctacacatcaacgtaccaatgtacgaacgtcttaacgagtcacgaccacaattaagactagggctcgaaactaggagaggcggtggaacacaggtaaacattgcactcatgtcagaatcacatggtatcttcgatgttctataataatgccctactcacaacg

SEQ ID NO: 284916 - DNA, 408 bp, Glycine max
ttgcttggtcatcctttactggcgatgcattacttgctcattctttgggggtaacttggcggatccagaaatttgtttagtgggggcaaaaaagtagtccataatattttcatacaaaagtttttacaaaatacataatttcatgacaaaaaaatctaaattatccaagtttctttaaattacagctaccttctacacatatcaatgtattttctcttttatctcttataacttgttaccttcatttaaaaaaaaaaacaattgtcttgtctcttgtgggggcaacactattttttttgtgggggcattttttttattaaagatgttttaagtaaaaaaattgcttatggtggcaattgcccccataatgctgtccgccactgttgtagcccagaaaaggttcgtgct

SEQ ID NO: 284917 - DNA, 369 bp, Glycine max
tcatgaagatgaatcatgtatgaatcaagtcgctttgatgatgacacacagcacaaaagaatgatttgaagattgattcagcacgttcaagatcatgattaatttccagattcattagaagaaatcagcaatattcaagattcaggagacgttgactccaagattcgcgaaaagacatcaagaggaatcaagattcaggagacgatgacttctggatgctagagacgagatcaagaagcacgcagtcacgacatcacatgggaagtatcgaaaaggacttctgacaagccaaacatagcacagttttgttctacaaaagagtgctcgtagattgttctaagtgaccagattatgcactctctggtcatc

SEQ ID NO: 284918 - DNA, 408 bp, Glycine max
tctgggagggacatatataatgcatacacatcatatcatattcatttcttactagtttagtaatttctaaccgagagtatttatttctccagtaccattattcacgttcaatatcgtatcaatattattgaaaattctagggatatgatgagttgacatcaatgtcaattttagatctggggtatccaggtcagcatacaccatcatcatgcatgcacttgaactttctttaatttccctttgcaacatggcaatccttaacattttgtactacttatttttcccctttgcaatgtgggaattcatgacatttttttgctttggttgaaaaatgattcgttttctttacctaaccaagagacatggtacgtcaagggcttcttgcctagaaaacgatggatacacatg

SEQ ID NO: 284919 - DNA, 414 bp, Glycine max
tatctgggccctcatcaacagggttttcatagagatatattgcatgtccaagtaggcacagtagcaggaggaaggccagcagtagctagccgcagatacaccgccaccacctctacggcagccgccatccctggagtctatctctgctcacctgcgaaggatagagcttcagatgcacacgtatgtgcagcatgtgactggccaataggtggctaatcataggggtcaggtgtagctaaatgagaccttctatcagtacaccctgcactagcaaagctaggaccctggtcctttttcgtggcttacccccgagcagttcggggccacaattgcgtggccgggagatgagcccaattttcagacaagggcaggactcgcaagcccccagagacaaggatggagctcaggaggatg

SEQ ID NO: 284920 - DNA, 272 bp, Glycine max
  unsure (1)..(272): unsure at all n locations
tctagccaaatggacttaccttgaattaattcctttgatagcccttttgagccttgtttccctttccttgttttgaagctcactacaagccttaagtgaaaaaccatgatattaccatatccttaaggaattttggagctttggaattgttttgggaataagtggggggggtttttgtttnattgnacaacttgttttgttggntatgcttnatgatgtattttgggccatactagatgtacatgtgatcttggttaaatgttggacatgct

SEQ ID NO: 284921 - DNA, 405 bp, Glycine max
  unsure (1)..(405): unsure at all n locations
tgcgcatgctctcatcagtggccagcctgtagaaccaggtccacaaccccctgacctccttgataagcaaataagcttattaacaccagttgtgatggatgcaacccctattggtgtaaagtttggggattgtagctctgatgttcccaagaactcgacctttaagagagctgacatggtgtctgttactttctggtctgcgtgccctcgtaatgaccttatgactgaaggtacattttccctggtggaatttctccaaggaaaggatatgtgggttcctgcttatgatgatgatgatttctgcctgcgcttcaagtggtcaagacctttcanactcagttctcatagtaaagctaccatagaatggagaatcccaaaggatgttactcctggtgtatacagaat

SEQ ID NO: 284922 - DNA, 396 bp, Glycine max
  unsure (1)..(396): unsure at all n locations
tgagctgaggaagtgttgaagggtgaaacttcctgcttttattgttgaccaatcccgacccaacccgggcatagtcggtcagtgagaacctgtgatgtacctaaacaggcgagctcctggcagtcaacagataaaaggaacaaagaccacaaagcaaggaggcttgtggtggctggccagctgtgaaacttgattgatatgtgagatatggtctctggtaatcgattaccaagggtgggtaatcgattacaaggcttaaaattgaagacaggaggctaagatggtctctggtaatcgattaccacggngtgtaatcgattaccaggcttgaaaacgaggtcagaaagccatgagggcttctggtaatcgattacaaagggggctgtaattattacc

SEQ ID NO: 284923 - DNA, 406 bp, Glycine max
gtagacccacttttgtgagttcgtgaatgtcttatatgtgttctatattaatggatgactcactgcatatgtggataatggcgattcccatggttgggataatctcagtacaaggggtgtttgaagaggccatttcatagagtcgagagctagggtatgaattctcagagaagaagttgaagtgtctcatagagtgtgctatgccaagagttttgatgcaacatgatcttattgtgtgctctccggctttttcaataactatcattacgcccactttcccaaaatgagttagcacagagtatatatatatatatatccagataacaacgaattatcgagtgttgtaaagtccagtggaccatatgtctttcgatgccacagcggatgacatatagatatacaatct

SEQ ID NO: 284924 - DNA, 397 bp, Glycine max
ggttcatgtgaaatctcaacactaagttgtttatgtcttcacaaagcccttaatgcttctaactttctcttactttatccacaagttgggactcattaacattgactctccaacttgaggggggattaaagttgtatgaagaaatggagttaattacttcagttagagggtagttagactagtcggtaattagttagaatgaagttagttactaagattgttaagctggatataaaatagtgtgtatgcaaccttatattcaataatcatcaataatattttacagatttccttggtgcacaaagctctctatcaataaattcccctttcccaagtccacattgaagaatctatcgcaactttagaatgtctgaaaacatattatgtacatacaaat

SEQ ID NO: 284925 - DNA, 407 bp, Glycine max
tccacaacatccaagtaaaacaacattcaaacagctcaagctatcacagccaagcaaaagcagagcaaagtcagaaaactctgctcaaacaccaaccaaaatcacagcttttctcacttaaagaccacagtaacaattccttcgatccaattcgttaaccgttggatcgactccaaaattttactggaagtctatagtgcataagcctacattgtgaccgttgggatctactagcaaacatcaagaactcattctgtactactctttccacagccaaccacacacaagcattttctgcaccaagctaaaatcctgctgcacctattttgacagcaaaaattctgcataagtgcagatttcgaagatcacacttcccctcatccaatcttgctcaaatcaatcctaca

SEQ ID NO: 284926 - DNA, 408 bp, Glycine max
  unsure (1)..(408): unsure at all n locations
ntaactgaatttgcaacattccaaatgatttttaattggtgtaatcgattacaatatattggtaatcgattaccagtgcatctgaacgttgaaattcaaattcaagtgtgaagagtcacatcttttcataaaatgctttgtgtaatcgattacatggttatggtaatcgattaccagtgacaagttctgaataaaaagtcaagagatgtaactcttccaatggttttctcaagattttctcaaggttataactcttcaaatggttttcttaaccagacatgaagagtctataaaagcaagaccttgacttgcattcaaataacttttacaacttttgagaaatcttgaaacctttccttctcatctttcttcttcttcctttgccagaaagctttctatgttttctgt

SEQ ID NO: 284927 - DNA, 400 bp, Glycine max
ttgccaagagactattaactactctgtattgatcattggtgattatgtcgaagctattacccctaagagaggactaagacagggtgacctactgtcaccttacctgttcattctacgccccgagggtctatctaattaaaaccctaacaaagacaacaataagagaaggaactcatggtattaaggtttgtagaaggactccaatcctcccacacctcttatttgctaatgattttttattttttttataggagtctattattcttatggaggttcttacttctttatggcaaaatctctggtcaaatgattaattatcaaaagtctgagattttcttcatcgacaacactgaacacacaattagacaccacgtagcatctgtacttggtgttaacaaac

SEQ ID NO: 284928 - DNA, 409 bp, Glycine max
  unsure (1)..(409): unsure at all n locations
tgcatcatcttagcatagaaaaagggcaggtccatttggtcaattacccatttcatacggttgggttagaaattttggtgtttgaaaataatagaattggtgctttctgattttagtagaacttggtcattactctactgcagaatttctcccttaaactaaaatgtataaatatgcccttattggccacatgaggcttcagctttgtgtttccaagtagaagcacttttatttaatagccacccttttgtgtacttgaagttgaatccacaagtagataaactcaaggagccagtcagaaaattcactgcttangtaaccaaaaccatccatttcatttctataacgctgcttatgcataaaaaaaactagaaacttatccaaccacgcatcaataatcaaaccccag

SEQ ID NO: 284929 - DNA, 389 bp, Glycine max
agcttgttatattctttaaattcaaaatcttttttttttttggtttaatgatttatttcatgttgataattgattaacgtcatgtactaattcaagcttagcaagaaaagtaaaatctaatagtgccttccaagtgttcacaagttaactagtaataggattaaaaggggcctttttctcaaatggattgcacttacttttagccccacagaaaggcggttgatttggtctaagttaaaactgcacttttatccaagacagtcaaattaaaattcataaactgtagtaaaaaccaatcaagtaatttgttgtcttctgaaaatgttggagcttactatcccttaatgaacacacatgaaattgaattcaaattctgtcatttttggatg

SEQ ID NO: 284930 - DNA, 302 bp, Glycine max
agagcactcactacatcgtcatgagtcgtgcctgacacgtgactgatatctttcagacgtcactggacaattattattgctgaacgcttacctgaccatctcgtgcgtttaccacaatgaaggcttttctgtaatgaagcactctagcctttgacacactgtaagtccgctaggttcttatgccaatctcagacgatggtcagcttcaggagacaactggcacatatccgtttatgcaggctagaaatacttagcccaagttagccaagaaatatgctcacactgttttgatgcacaaatga

SEQ ID NO: 284931 - DNA, 424 bp, Glycine max
  unsure (1)..(424): unsure at all n locations
tcgccggatgatgccgatcgaacatttcccaatcgatattatccaattgttgttcagggattgactatagaataaacaatggccgggtgtcggttgctatatggcctcgactgatatccttcagccgacattgcgcaatttcttttacaaacgttggtcgataatgtttttttacggtagaggaagttttttgttttgctgttgcttaaaaaatttacaatgtaggttagctaggtatttccgtgcgagctcaaccgaagttgngtttcggccgacactggcatgttctcatttagtcgaccaagataacgttagcccaccctggcacaaaaaaaacatcattcacgaaaattgatcgaacaaatgatagctgacgtcggcgtggagagatgatgtgaatcttacgaggcagatcgcttgatac

SEQ ID NO: 284932 - DNA, 355 bp, Glycine max
agcttacttctatttactaccctcattctttgatgtatataatataggggaacttattgcaaggattaccaaatgaggacccctatgaacatttggcaacattcattgaaatctgaaacactgcaaatattgcgcgtgatccagatgaagccattatactcgatctatattcaatgtgcttaatcagagaagcctaaaggaggctacactcatttaaagggaacaatctgaaaacctgtgaatgatgttattgaacagtttgtgaggaaacatttcccacagacaaagactgagaaagggaaagctacaatctcttcgatttgtcagttccctgacgtaaccttgaattaagcgc

SEQ ID NO: 284933 - DNA, 427 bp, Glycine max
tggttcaactgagtagccatctgccccatctaatttgtcaaactcttaatggaggctcttgtctcttgctgaaattgcatattctggatggtcatttgcctcactaactcctctaaggaaggttgagaaggggcctgacttgcttgttgtctttgtcgctattgctgcattggaggaggaacatatggcctgcttagactagcaacattctagaaatgagggacaaattgttgttgctgctgttgttgttgtggaggatttgcccatctcagatttggatgattcctccaacctggattgtatttgttgcttgaaagattataattattctgctgttgctggtttttttgttgagggggtctattataaatgtttgcagcataggcttcaggttgctcattgactccaggttgctgcaaagaaagat

SEQ ID NO: 284934 - DNA, 334 bp, Glycine max
agcttctctatatacaatagggcttaatcggacatccgagttaaaagatattgtcgtgagatttttctcagagcttccattttcaattacgagcgcctcgatattcaacgggactcaatcggacatccgagtccaaagctattgtcgcgcgaatttacttagagctcctgttttcaattgcgagcgtatcgatatattatagggctcaatctgacatccgaattagaagttattgtcgcttgaatatactcagagcttctgtgttcaatcacgaccgtctcgatatcctacaggacacattcggacatccgattcaaaagttattgctcgtaga

SEQ ID NO: 284935 - DNA, 428 bp, Glycine max
  unsure (1)..(428): unsure at all n locations
ntacagcagattttagtaatgacccactaacctagatttaaaataatttaatgccattaacctagggaattaaaaaaaacttaatggctgagtgtaactgaaattgtggcaaccaaaagtcacccccaacagccaacttcagccaccatttggtctcccaaaaggctgatgcctaggttgccaattgggcccttattacaacttgaactaaacctaactaaagcccttttagttgattaacccaaaacatattttggtcagccaactttacaaggattgggccattatttagacaaactaaacactctaaaattgagacaaagtggtgtcattcagtcctcctccatttgggccatgatacaactcacaaccttggacttttctccttgaaacttgngcttgtattcaaatagtatggacagcacttg

SEQ ID NO: 284936 - DNA, 394 bp, Glycine max
agcttctgcttgtctagatatttctagagagagaaaggtccaagttccaaagagttttgagattttgctgtgcaaagacctgcagagaaccgagcttgaagaagaagtcgtcctgagagcatgagatgagtttgtgagtgattgcgaggttctagaggtggaggagacatcctcaccgcttgtatttcttcaatccttcatttttattttctctttgttgtaaaggaagcttcctagctattgagagttaaatcctttgttggttcttccttgtaagcacttgatgtagatacctgtttatttatttaatgatgttttgtgtgctatcagaacttcattctaccatgcttgttccttgatcacatagatgcatgtgttgttagaatcattcaac

SEQ ID NO: 284937 - DNA, 433 bp, Glycine max
tcaatctttataaaaaaaaaaaatcaaatttgtacattttcagtttaaaaaatgaaaatgaaagaaaaaaaaaaagagagaatctaagatgtgaaaaaaaaaatggaaagggacaagtaatggagcaaacacactaccattaccctctcttttttccagttttccagcaccacaagtctccaactccaacaaaaataaaaggcataacgtacaccaagagagaagaaatagagtggggaaataacaaaaaaaagggaaaaaatgacgtttgcaccgccgtccataccactactctcagagtttatttcgtagacaagtcaaatctagttgctcattctctagctcaggcatctagatttcctgctaacatatatctttaatagtattccgagttgtattctagttattattattaatgaaatgatatgagtat

SEQ ID NO: 284938 - DNA, 379 bp, Glycine max
ctaacaatggatttcaaaatctttgttttttatgggtcaatgaattattgcatgttgataattgattaacgacatgtactaattcaagcttagcaagaaaagtaaaatctaatagtgccttccaagtgttcacaagttaactagtaataggattaaaaggggactttttctcaaatggattgcacttacttttagccccacagaaaggcggctgatttggtctaagttaaaactgcacttttatccaagacagtcaaattaaaattcataaactgtagtaaaaaccgatcacaaggtttgttgtcttctgaaaatggtggagcttactattccttaatgaacacacatgaaattggattcaaattctgtatttttggat

SEQ ID NO: 284939 - DNA, 420 bp, Glycine max
  unsure (1)..(420): unsure at all n locations
ttgcaatttggcatctaaattctgagagctctggacttataagtctgctaaagttggaagtggggctgaagtacaggatgcacggatgccgactattagtgcaaaggaagagggaacatcaaccgctctgagcatggtcttccttgcctcttgaaatttaactgtttggttattcacattccaacatttccttatgatataagctaagtcaatggccgaccttaagttttcatagaaggtaagggcatcagatcctactcccctcgatctacacaaggcagtgattaaagctgggaagcctaagcgagaagagttagactgagccatcatggtcattnttccagagatcaaactgccaatgttcatgtccatccttgtgactaagccatagaacaacctagctctgtctgtgtcaaatct

SEQ ID NO: 284940 - DNA, 390 bp, Glycine max
tgcttctatctatttcaggatcaaaggggtgtaaatcacctggattgctcctagtcatgcactatatgcagcaaataatgtgttcctcaacaagcacctaacaaggggttaaaactacagctatactcaaacgatatcaagatgagctgaaattttgtgaggaacaccctacaatcatgaaaagatagcacaacaattttcaaacaaaaattcaaagtctaactatgaaaactacctacgcaaagtttagaaaaataagacaataatacttaaaaaataaaaaagaaacttagtaaacgactgatttttggagtttgggagaccccaaccggctttcgcggagtgccaaagtatggaaaaaaaatttctatcccaaatgcatatataata

SEQ ID NO: 284941 - DNA, 413 bp, Glycine max
tctgctcgcgcatgtcctccaagagctcctcatactcccttgcggcttctgcccacgcctccgtctccgattttatctgcctcctcttaagcaacttgtacttgtagctgctactgctgctgctgttgtccactttgtgttctgccttcgccatttgctgcaacaatttctgaacctcgtcgtagtcatcttcggtgtccgtggactcaatagcctcggcaacgctagaaaagccttcgtaaaaaagaaacttggaccggctcaccccggctttagggaaagcctgaaatgggtatgggtttatcgttttacttgtttggggcttacagaatctcggatataaagaagaaacgcggaaggtgttccttaaagttgaggaagctcgcttggctacgttggtccacattttgtac

SEQ ID NO: 284942 - DNA, 385 bp, Glycine max
ttcttgttgctggagctgacccatcaactggtgatccctaagctcttgaccttgacttgatagaacctctttttaagcgaaggcgtttgacttgatcccatgttttactaaagtgaaacaaaatctagtgcgaatcaaaactccgacatctatcatgggtggaatgcatgaatgcatgaagaaatgcatatgatacagatgcaatttatgaatacgggagcccgggaaattgtctccttcttagatacaacgtcttgaggtagcacagtgcccgacgtatgtatttaagaaggtgacacggacccttcgttagcttgccaaaaagagaggatcaagacagaactcgtgcatgatgcgtatgtgaaaggcacaatacgtggatgta

SEQ ID NO: 284943 - DNA, 426 bp, Glycine max
  unsure (1)..(426): unsure at all n locations
tggttntgggcaatagcaccccacctgacgtcttcatgtctcctgacccccgcgacatatctccaggtaccactctgtggtcaacaataaaagcaggaagtttcacccttcaacacttcctcatctcaagcttgtaggattatggggtacccatcacatgtggtactaggtggcggtcgggcgatggtgcacaacaagttttccacatccacaatgcgcgcataaacccaccatcccctgttgcccacctccatccgagctcacgtactcccacgtagcccatatccccgtttcgctcaacaccaggtccccatcaatcctcccaagcttccaaaacatccaagcaaaacaacattcaaacagcacaaactaccacagccaagataacagggcagaggcagaaaactctgcccaaaacaccaacca

SEQ ID NO: 284944 - DNA, 391 bp, Glycine max
ttttcttataccaaagcgacacaaaatctaggtatccaatacccctcaatttaatggattttcaaggttagagaagcgaaattgagaatgacgtaaatttggagcaaactctcacctcacacaagtctataacatcaatttaaacttgctcatactggatttacacctaaaattccaccgaatcaaaatttgactcctcaacacccaatttttaccctagaaatgactctttgtccacttggtcatttgtttttctcacttgcacagcccaagctttctcataagtcctaaatgacatttcaaactatgattaactcactttaacctccaaataccactaaatccagatttggccttccaactctcataaactcactctgtttccactcat

SEQ ID NO: 284945 - DNA, 419 bp, Glycine max
tatagaatatataatataagaacactgacaatataatagtctatacatgtttcctttgatgagtctaatgccattcttccaaggaaggattttttagatgatatttcagattccgtagaagatacacatattcatggaaatgattctaaagaaaaagatgaaggaagcaatgaggattctcaagataatggggctagaggaaataatgaacttccaagagaatggaaagcctcaagagatcatcccctcgacaacattattggtgatatatcaaaaggggtaacaactagacattctcttacagatttatgcaataatatggcttttgtatctatgattgaacctaaaaatataaaagaagccataggagatgataactggatcattgccatgcaagaagaactgaatcaatttgaaag

SEQ ID NO: 284946 - DNA, 389 bp, Glycine max
tgcttgagatgaggaagtgtataagggtgaaacttcctgcttttactcgttgaccacagagtggtacctggagatatgtcgcgggggtcaggagaccttggggacgtcaggtggggtgctattgcccaaaaccaagcttgaccaatcctgacccaacccgggcatagtcagtcagtgagaacctgtgatgtacctaaacaggcgagctcctggcagtcaacagataaaaggaacaaaggccacaaagcatgggggcttgtggtggctggccagctgtgaaatttgattgatatgtgagatatggcctctggtaatcgattaccatgggtgggtaatcgattacaatgcttacaaatgaagacaggaggctaagatggtctctggtaatc

SEQ ID NO: 284947 - DNA, 416 bp, Glycine max
tgccacccagcttgcccaggtgagctagattgttttctccataagcaactgccttctaaaggaatattttggaaggccaagtgggtctggttgctatttgaacccccatttttactaaatacacccccttgctctttattggagattctttttccgtaacgttatgaaattttacgaatttcgaaacgatgcttggtttctttccataatgttacgaaaccttacggattacgtaatcatcccttttttgccttccggaacgttacggaactttacggattgcacactaacacttccttttaatttctggcatgtcacggaacttcagggattgtgctacaatgccttcttttgacttccggcatgtcacggaacttcacgaattgcctaatgatgggtgccaagtacctcgaagt

SEQ ID NO: 284948 - DNA, 362 bp, Glycine max
agcttgtatagatccccaatttatggatattttttattgagacgctaactcagacttgatgtatggctaacgatgtctctagaacatttccattagatttaaagatgaaatctgtgcattttcaggtgaaaacaaaggctaagttttgaattgcaaagagtagtagttgggctaagctcaatagtttggctaagcacatatccatcactaagcgcagcttcaacacacttagcgcaaaggagaatctggcaaagcatcagcatcaaagccgcgcgctaagcacagcaggtgccttcagccatgctaagctcgggacatgcgttaagcccgaatccacttactcgcgctaagcgcagcatcgc

SEQ ID NO: 284949 - DNA, 411 bp, Glycine max
  unsure (1)..(411): unsure at all n locations
tgaaattgcatgtgggtacctattttgaatctcctatgctgtctctactgacataaaatagtcccaccatcccaatttttgcaaaaccatattcatatatcattggagcatttcaccgagcacttggtgggcgcacgttgggacataaattgcaagagaatgggggcaatgcggcatgccccattgcttcaaaatacaacataggcctaaggccttctcattcaaatcctcaactcaagaaatcaagcataaaaacaaacaaaaactgccccacaaatataagcacgttctcacaattaaaagcaccaaaagatgaagaaaatactccaatgggaagcaaaaaactcaaggattgaatacttacttgttggagtgagtagaaacaccaaatatgacagcanaatgcaacca

SEQ ID NO: 284950 - DNA, 387 bp, Glycine max
tgcttagtaaagctaggcactaacaatctccccctttggcaaattttgtctaaaacatacttagacacttcctgagcaggtacgagcagttatgcatgtgggatcagcaactttcattatcagagtaatcaagcacagcggaaattctgcaagttgcaagtcgtttccaggatgtcaagacatctcacatgacatcagctttctgcttctgctccccctgtctccatgctcttactgcagcatcttctatcagctactagtcttttccaggatgtcaagacatctcatgtgacatcagctttcccttgtctccatgctcttactgcagcatcttctatcagctactattagcttacatcagtcatcatcagcagcagcagtcttccc

SEQ ID NO: 284951 - DNA, 422 bp, Glycine max
  unsure (1)..(422): unsure at all n locations
tgactaggcgagttgattttagccttagtttcactttagttattagtcaattcaattaagaatgagaaatcccaaagagaaaacgtccgattgatttttcgctttattttactaaaaggtattttttattattatattattattttacctcttttttgatttccaacgtagttacggcacgaccgaacggtcggaattcattttaaccgaaattaacggatgatacaattcaaatgatcggtggaaatttattttatttttagattaggcgagaaatgacttaaataaatgactgaagcacgtcaaaaggggatatagaaagcgaatgaaaatgagaataaaaatacatgatataaaatgtggaccaccacgggtacatagaatgaattgaanagctcggcttgaggtacttacccgttgaa

SEQ ID NO: 284952 - DNA, 390 bp, Glycine max
agcttgccgagtccggagactcggtgaaaaacgattctggagtttgtgacactaacgctgagttaatgtctttcaaaacaacgtcgttgacgacgttgttgttgttgttattgtcttcctcattgttaattttggtggtggtgactctaaaagagagggttttgggttggtggcaggatggccaggcccttgatgaagaagaggaggaggatctgacatgtctgcttttcagaagattaaaaaacttcatttttaattagaaaaaagaaggtaatgagaggaaacaaaatggatatattcaaatgagttttggaggttctgatatggcagttaagtccatagaggaggaattaatggttggtcagaaaaatggactgtgtggggggatga

SEQ ID NO: 284953 - DNA, 430 bp, Glycine max
  unsure (1)..(430): unsure at all n locations
ntgctagtgaaggtcttgaacgaggctcatgtggcccaagatatctctgtagaaggttttggaggactagtcaataacatcaccgccaacaactatctcgccttcaccgaagaagatatccctgtcgaggggagagggcataacagggctttgcatgtatcagtcaaatacatggaccacgtcgtggccaaggtgctcatcgataacggttccagtttaaacgtaatgcccaaaagcacgttggagaaattaccgtttaatgcttcccatctaaagccaagttccatggtggtccgtgccttcgacggcacccgccgagaagttaggggagagatcgacctccctgtatagataggccctcatacctgtcaggttaccttccaagtaattgatattaacccggcttacagctgtcttttaggacgcccgt

SEQ ID NO: 284954 - DNA, 395 bp, Glycine max
agcttgatggcgtgtaactcaccattttccataatataacactttatgtctactatcattgttattatttctttcttcgtcattgagggaaacacttgggttgccagatccctccacctttgggtgtattctttgaaagatctgtgccccctttttgcacatgttctgtagttgcatcctatccgaagccattatactgacactgcctaacgaaggcaaccattaggtccttccaagaatagactcgggaaggttccaagttagtgtaccaggtaacagctaccccagtaagactttcttggaaggaatgtatcagcaattcctcatcttttgcgtatgcccccatcttccgacaatgcatctttagatggttcttggggcaagtattccccttg

SEQ ID NO: 284955 - DNA, 430 bp, Glycine max
tgtaggattatggggtacccatcacatgtggtactatgtttcggtcgggcgatggtgcacaacaagttttccacatccacaatgcgcgcataaacccaccatcccctgttgcccacctccaactgagctcacgtactcccacgtagcccatatcctcgtttctctcaacaccgggtccccatcaatcctctcaagcttccacaacatccaagcagaacaacattcaaacagcacaagctatcacagccaagcaaaatagagcaaaggcagaaaactctgctcaaacaccaaccaaaatcacagctttttctcgcttaaagaccccagtaacaattccttcgatccaattcgttaaccgttggatcgactcgaaaattttactagaagtctctagtacataagcctacattgtgaccgttgggatctacta

SEQ ID NO: 284956 - DNA, 395 bp, Glycine max
agcttatataaatatgaaacaactaaaatagaagtggaatatcgtgttataagtatagacaaacaaaattaacaagagaaaagtaaaaacttaaagttaaatataaaccaataaaatgagtagaaataggatttataattaaatataaaagaataaagtatatagaaatagaaatagaaatagagtaataacgggtatcactggccggggcatactcaatttcttcgaccacacatatttctctcgcttggcttactgactcatgggatgtcaaggggcatactctaccactcccttttatagcctataaatggtgccattttccacatatgacacacatttatcatttaaaaaaaaaaaaaaacatatccactctcttttatagccaatcaatg

SEQ ID NO: 284957 - DNA, 425 bp, Glycine max
  unsure (1)..(425): unsure at all n locations
ntagtgcttctttactgagtcaaaagaaagtttggatatggttttgttcatgtgaattcattatcttcacatgataccactgcgagctaactcaacatgaaatgcgagctattacaactcagactatatgattaagtaccccacatatttgacaagaatattataattcctgaacctattacaactacaacaagtatggtattttgattgttagagtacaagtgtgaggtgaagtactacatcgggtaaaagtgaaaaagttaagcaccatacaagtgagtagaagacccataaacctgagccttaaggttttgggttaaagtgtgagtcaagtacccttatgtgattgctcatggctcattggtgtaaatctccctggtgtttactcccctcgaattccccaacaactggtatcagagtcgatg

SEQ ID NO: 284958 - DNA, 396 bp, Glycine max
agcttattcgcgagttaacctaggcttaagtgataagatcagaacatgtaaggtgattttgtgatgtattggggcttaagtgcaaagtaattgaggattaagtgcagcgcttaagcatggattgactggtgcttaagcctgacagtgatgcttaagcacaactggactagcgtttaagtgtgactctttaccatatctgttgtgaatgaattccaaatggatttgaattggatttttcttatattagaaggctttgaaatgacataaataggtttgaatgttatgttggaagaatttacctttactaagcatagataattagaaattgaatcaaattgggtatgaattccttgtacattaagttgttgttgatgaattgttattgaaatgagtctt

SEQ ID NO: 284959 - DNA, 428 bp, Glycine max
  unsure (1)..(428): unsure at all n locations
ntgctcctaattcctaaaaaattccctctgcctagcatgatgtacggtacaggtaatgcacctctgattattgtagtggtgaacgaggtttatttagttgttaatcattccatgaacccttttccttacatcctctttgtagttgcagaggttcaatatctaagccaggaaaaaaaacttattagtcatctaaaatcttcacaaatgtaacctaatggtgccaaatagccacatgtttacctgctcaggagcacctttgctagatcgatgccaatttccatcagaatcaatgtaagttagaggagtcctcttgtccacaagattgaatggaagaaagtggacctccctaataccagctcgtgcctgatcagttcataggaaaagtgaatttatttatcaccattcatcccacatcataaaagataatc

SEQ ID NO: 284960 - DNA, 378 bp, Glycine max
agcttgttgagcttggaagactctctgcatcaatgaagaagttagagaaagatctcaagaacaagaataaatacgatgtatgttatccattcttgtggataaattcttcaaactttctgttatgggtttctttggactgtgattgccttacttttgtatgtgtattggttacctatatatggctgcaggatgagcaataccgcgccaaactaaacaagtcaaatgagaggactctatcacttatcaaagcatgaattgatactgtggtagcagtaagactgcttcaatcggcacccaagacagctactcctcgcgtaactggggcttttggatttgattcgtctctaatatcttgctatcaggtacctgctagtataa

SEQ ID NO: 284961 - DNA, 418 bp, Glycine max
  unsure (1)..(418): unsure at all n locations
tgacctaagtgaccccaaaacgaaaaaatggttggtgtattgttttcgagttgttctacttagtcgatgatctctgcgccaaggctgctctgctttcaaagcagaggaagatgatgccattgttccctacgtgcaaccttaaaccactgctccaactcaggaaaatcgaaaagcagctggcacgggaagtggcaccaatgaagaatgtcaaaatgttgccaatccgggatgtagaggaggaaaaagaagcagaaaccgtggtgcgaggttatgtcaaggaaaaaattatgaaaagcatcttggacaggaagaaaggtgttgttcgagcggctgtgattnttgggattacagggttagagaagggaaaagttactgaatatgtttgcgaagatgagaatgtgaaaagtggctttgacgt

SEQ ID NO: 284962 - DNA, 368 bp, Glycine max
tttctttcaatctcagtcaattggcattcagatggttacttttcatgctttagaggtgtgagataaggggaccccatttctccccgtatattttgtcttgctgaggagcaaggttcttagcagaggcatatcagacttgggtcacaagggcaaattagcccccatggttggtcccacctccttctcacatgctctatgcaaatgacatcattatcttctgcagaggcactaaaaagaatgttcacaatattctgaatctgatgaatatgtatgcataagcctccggtcatgaggttaaccatagaaagtctacttaatattctggtgggctctctaataatcggatgtatgaaagctcctttatactt

SEQ ID NO: 284963 - DNA, 423 bp, Glycine max
  unsure (1)..(423): unsure at all n locations
agtcgagcccgtcacagcactggaggtgtttgtatttcaagggtggttccaatgcccctttttctcacaaaaacaacattcgacgcaacagcaatggtgtttgcaaacccaaagaacgaactaaagcggataaagaaacaaaaacggctcctcctaagatcaccaaccacgcaaatgcagacatttcagttcaatcatgaccgaaatagccttcacatcacttgattttcatggggactgacttttgtgacttgcggagtatatgttatgtaacttataatattgctacacggcatctcttactgttatataatgaaagttattgatgtaatatgtgaggatgtttccccagactagtccctggattntaaatttaaattaaatgctttcagcacgactagtagcattaggggtcttattata

SEQ ID NO: 284964 - DNA, 387 bp, Glycine max
  unsure (1)..(387): unsure at all n locations
ttgcttattaagtccgtctatggattgaaacaagcctcccgccagtggtatataaaatttcatgaggtcatttcttcattcagctttgaagagaatgccatgtatcactgtatataccagaaggtcagtgagagtaggatttgtttccttgtattatacgtagatcatattttgcttgcgactaatgataagggtatgctatatgaggtgaatcaatttctctcaaagaactttgatatgaaggatatgggagaggcatcttatgtcatangcataaagatccatagagaaagatctcgaggcattttaggcttgtcccaagaaacctatatcaacaaagctttagagagaattaacatgaaagattgttcaccaagtgtagctccc

SEQ ID NO: 284965 - DNA, 421 bp, Glycine max
  unsure (1)..(421): unsure at all n locations
ntaagagcaattcccttcttcttcttatcagtttcttttgttgatttagtctttgcaactccatctcatgttcctgtaattttcaaaataaagtagcaagagacataatagacaaatctctagattctataatggttgttacttttggttgcctcattttgaaaagttcttcctaatgaagcaagatggttaactatatgtgtgaatcttttctgcatatcttgtatactttcatttgtcttcatcctaaataattcatactcatgagttagagtatttatcctagatcttttgacatcagttgttccctcatgtgtaacttgtagagtgtcccacatatccttagcactcttacaatttgacaccctanaatattcatccattcctagggcagaagtaatgatattnttagcctttaaat

SEQ ID NO: 284966 - DNA, 395 bp, Glycine max
tagctttgatgatatggtcttcaccgacgaaaggatcaaagtgggtctaagaaaaggcaaatctaatcatcatgctttgataaatgcccaaaagataactatggcaaatgaaaagggtgagaatgagggagaagcccatgctgtgactgccattcctatacagccatgtttcccaccaacccaacaatgccattactcatccaataacaaaccttctccttacccaccgcccagttatccacaaaggcaatccctaaatcaaccacaaagtctgtgtactgcttgcaatgacgatcaccacctttagcacaaaccaaatacaccaaccaagacatgaattgtgcagcgagaaagcctgtaaaattcaccccaattccattgtcctatgctgactt

SEQ ID NO: 284967 - DNA, 444 bp, Glycine max
gacctatgaatctcagcttctatataagctgaaccattttatcaataaacttttgttgagttttattcagaaaattagaggttatctcttttatcttagtgagagtgattctcctaaattcttgagtgattcaagaacaccttggctgtatcaaaggacttccacaacctttgtgtgttgacctcgctggaaagagtgattctttccttcctttcatcatcacccttgttctttcaaaccacaattccagaaaatccacctctgcccagaattatctcgtggccataactcccattttacgcactcaaattaagtgattcttgagcctaaattgaatttcaaaacgagacctttcacctcgttttggaatcatctcatttggagccctgtagattcagttattgccatttctatatttctgtccagccaccacttaacctacgt

SEQ ID NO: 284968 - DNA, 391 bp, Glycine max
agtctttcctttttgtcctcctcatagttgttgcatgagaatacatgctctattttcatctcccactccaagtaggcctccggatcattcttgcctttaagcggaggaatgtcgagtttaataccatgaattcggttttgtctaagaacaccatcattccctcttgtcctactttcttcttcattatgacctctattctccatttgatccaacctctcatggagcgcatcatctcgttgtttcattagcctctccaaatgatgcatcgaagcttgcatttggaagtgcgaaacccccactccgtcattaggattagtacctgacatgtcaaaccggcaaatcaaacgtaacacgacaattcttgctgctggtggaacacctgacccactca

SEQ ID NO: 284969 - DNA, 422 bp, Glycine max
tgcatttggaattgcgaaagccccactccatcattattattagtacctgacatctcaaacaaacaaatcaaacgtaacaagacaattatagttgctgtttgaatacctcacccactcaagtgtatcacacaattatggcttttctctaatgaaacactcttgccttttaccactctaattccccttgagttcttaggcaattcaagagattatggccacaacaaagaacaattcaccaatatgtgtaaggtaaggctagacaaggaaaaggttaaccaagaaaaaggctaacaatgtttttaggcacatatgaaggaaataaaattcagaatttaggaattcaagtaacaatccttcatgcaaccaatatattaccttaaagagttttttttttttaagttcttcaagcatgaagcattcag

SEQ ID NO: 284970 - DNA, 388 bp, Glycine max
tatcttattcaggatatgggatgtcactctgcaaatgtttgggaatggaagcttgaatggagaagacacctttttgacaatgaggtgcaagcggcaaccagtttcttggatgatatctcgcggggtcatattgatcgttggacatcagactgctgggtttggaaaccagaacctaatggcaagttttctacaaggagtgcatactgtatgctactagaaggagcagcatatcagactatggatgaggctttagaggacctatggcagctcaaaatacctttaaaaccaacaacatttgcttggtgattgatcaaagatagaatcccaactaaagggaatttgtggagaagacagctggagaaacgctgtgcccagccctacaactatt

SEQ ID NO: 284971 - DNA, 432 bp, Glycine max
taagaaactccgcttcttgaccggtgatgttcaacaacctcaccttatttctctgtttccatcttgcgaattctacttctcctctaggaaattgcagctgcgcaagttcaacaagctcatcgtcggacattgcgtcttattcttctcctataacaaatttttggagagatttgtgtggttgagtaatgggttttggtgtatcgtttcatgcatcacttcatagtacattatgtattatttgaaaagtattttcttgtctatcgtctcatggtttattttaaagttagattaatggcatttgtcaagcatttctcaaccatttttgtcatgctctgcttcaagcataaactattattaaaactttgaaacatttagctgaaacacaaaaggagaagaataatgaatataacaaggcatacaaaacattaatgg

SEQ ID NO: 284972 - DNA, 348 bp, Glycine max
agcttcccggatccattcttggaaggacttgatggctgctttcatcaggaagtatcaatacaacactgacatggctcccgatagaacccaattgcaaatcatgtgcaagaaggagcatgagtctttcaaggagtacgcctagaggtgaagggatttggtagcccaagtagcaccccccatgatggagagagagatgataaccatgatagcagacacattgtcagtcttctactatgagaaaatggtaggttatatgccctctagttttgcagatttggtatttgcgggtgagagaattgaagtatgcttaagaaaggggaagttcgattacaccacttcagcaagtat

SEQ ID NO: 284973 - DNA, 416 bp, Glycine max
  unsure (1)..(416): unsure at all n locations
tggcattcccattggtggaaggaccttagttttctttataatcagtctgatttccacagtatccagtagaatatggtatggaaggttggttgtggggacaaaatcaaattttggcaagattcttgactgagtgagggctgtaagcatttcaaaaaaagattcttggcaatatggaaggaaggttagtttattaataatattcaaagaaagattctcagagtagaacccgtgcagaccaaccctggatgggattcagttttcttctcttggccaagggcagaaggaaagccttgctgctagattctctgaagtggaaattaagtctgcagtttgggcttgtagtggagataaaagccctggcccgtatggtttgaacttcaactttatcaagtagttntgggaaattctaaaacctg

SEQ ID NO: 284974 - DNA, 391 bp, Glycine max
tagcttaacatgccccctgccaaattctgagaagtacctaactcctactaagagcataaacatttacagagggatttccaaaaccagatgcacttattgccgaaaaatcacgaagtccaaagtcctatatatgttacgtctcaaaaattggatgcaatctcatgttgtaacaaagtcatttacaaatcccccagtccccacataaaagatcatacttgtgccattactttgcaaattaaaatctgtctccttgatatgaatatattgaagaatttctttacaggtgaattacatgataactgatcagcggataagtaggcagtatggaaagctggtaaataaaaagacaatatgattcacataccagaagtggcccactggtccaacgaaa

SEQ ID NO: 284975 - DNA, 423 bp, Glycine max
tctagtatttataggctttcttcttcaagtgttcattgtctttaaacaaatagatttcttcacttaaactcacgtatgaagatgtgactgttgcattaaatgcacatcctcctcatgctggaaaaccattatctttagctaccttgaaaaatacttcagcaggaaaccacttgctttcactcagagcaagtttgtcatagcatagcacattgtttgatactatttgaacttcaaggtgttgaatgttcctttatgcttcttaggattttgatagattctaagagaatgtcgtgtaaaacagttcttgcaaaatgaatctcagacacaaagtattaaatgaaaattttaaatgcattcttaaatgttgtatcaaatcataactaatgtttactttcatttgaaacttcaaaagcatattcaatg

SEQ ID NO: 284976 - DNA, 390 bp, Glycine max
agcttgtatggttaaagtctcacgattgtcacgtgctcatgcaacaattgttagccatggctatgcgagacatcttgccaaacaaagtcaggttaacgataactcgcctgtgctttttcttccatgctatatgtagcaaagtcattgatccagtaatgtttgatgagttggaaaatgaggccacaattatactgtgcctgttggagatgtattttccccctgctttctttgacatcatgattcacttgattgtgcatctggtcagagaaatcaaatgttgtggtcctgtttatctacggtggatgtacccggttgagcgatacatgaagatcttaaaagggtatacaaagaatctatatcgtacagaagcatctattattgagaggtaca

SEQ ID NO: 284977 - DNA, 429 bp, Glycine max
  unsure (1)..(429): unsure at all n locations
cttgcagatcagagtgaaatgtattctgatcccgatatatatagaagacttgtgggaaaactcatctatctcaccattacaagacctgatatttcctttgttgttggagtggtgagccaatttatgcaaaatcctcgtgttgatcattggaatgctgttatgcgtattcttagatacattaaaagagctccaggtcaaggattactttatgaagacaaaggtaatacacaagtatctggatattgtgatgcagattgggctggttgtcctatggataggaaatccacatccggatattgtgtctctattggagggaatgttatttcttggaaaagtaagaagcaaactgttgttgctagatctagtgcagaggctgaatatagatctatggctgtagttacatgtgaacttatgtgggtcaaacaaatn

SEQ ID NO: 284978 - DNA, 395 bp, Glycine max
agcttcctttacaacaaagagaagagaatgaaagatttcagaaatacaagtagtggggatgtctcctccacctctaggacctcacaatcgctcacaaactcatcgcaagctctcaagacagcttcctcttccagctctagtctttgtagatcttcacacaacaaattctctcaaactctctggaacttggacctttctctctctagaactctccaattatgtagaagcttcaagaaaaggctaaactcctcttcaaaatcagatttcaggcttaaataggtggctttgtttgtgctcgtgcgcttagcgcaattctgaaccgcttagcgtgcattagtgaatttcggcttatcgcggcttttctcactcagcggatggactgaagcagtgtgctt

SEQ ID NO: 284979 - DNA, 427 bp, Glycine max
  unsure (1)..(427): unsure at all n locations
tgtaatcgattacatatatactgtaatcgattaccttagttgattttcagaaaatactctcaacagtcacatgtttttacttggttcttgaatggccatcaaaggcttatatatatgtgacttgagacacgaatttgctaagagtttttcagaacaaaaaggtcttatcctcttaaaaagcaaaatcgttttatcctcttacaaattccttggccaaaacacttgtgattcaataaggatttatttgagtgctcaaattgttcaatctatctctttcaagagagattacttcttttcttcttctttattctgaaaaaggattaagagaccgagggtctcttgttgtaaagaaatctgaacacaaaggaagggttgtccttgtgtagttcagatcttgtaataggctnttacaagatagtggaactct

SEQ ID NO: 284980 - DNA, 393 bp, Glycine max
agcttctcaatcttgattttaagaagatcagaacttgctttgaaccttctgagtctgatgtgttttcttgctctctcttttttaagcaatattccccaatttcaccaagatttctgacttgtcttcaaaatattggtttgaaacttcccaatgttggttttaagaaagttggaatttgcttttctttggttatggatattccaactctctctttctagcaatattctccgaattcaccaacatccctgagtggtctttcaaactattgtctttttcagtggaactgagttttatgttttttattgggaatgaaattatcttgtaataagctgagagtttagtaagcttcagcttgaggtgggagtgttaagaatctgacagatattctagatg

SEQ ID NO: 284981 - DNA, 428 bp, Glycine max
  unsure (1)..(428): unsure at all n locations
tgcttctatagccaaaagtacatattcgattgtaagattaataaagaagagtcaaatcacatctaaacagtgttttgttgtttcatattgctgaaattgataagaaagacaaaggttgcagttctcaatgggaaatgaatcaatcagccataagacaacaatataggacaactatcttattttaattaatttatttcatcaatttgtctatttttacacttctagcgtctattcaagcataagacagtaaattggccataataggcatggcactaatatttaaaaaataaaacattgaaattttgacaataaaattgtcataagacagtaaattgcccataataggcaaggcactaatatttaaaaaataaaacattgaaattntgacagtaaaattgtcactttttactatgagatgttgataaaag

SEQ ID NO: 284982 - DNA, 147 bp, Glycine max
  unsure (1)..(147): unsure at all n locations
gtgcggtccgtatgccatttcttctgatgagacagcttattcaccatggtgctgcatactttgatttattattatgcattctcgtggcagaaccacacactttgagacatgcctcattgactgaatcaaaatgccccgagccctgcn

SEQ ID NO: 284983 - DNA, 381 bp, Glycine max
agcttcttaccatttgaaagcacttgaattctcctaaacatgtcatccatatattctccttctttcatggagaaactttcataatgttgtgtcagagtggcaacctttcttagttgaacatcttatgttccttcatagttgatgcttaatgagtctcaaatctctttggttgtctttagtctgcatatcttgttgtactcattcttggatagagagcatgtcaaagtataacgattttttgtgtttagctccattattgcaaggtctgcatttatccattctgtttcaggtttgggaatgggtatctctctatttgtgatgatcaaccaaagtctctagtggttggacttgatgtacatcttcattattgctttacagtaa

SEQ ID NO: 284984 - DNA, 428 bp, Glycine max
  unsure (1)..(428): unsure at all n locations
tcatttcctctaatagaaattntttggtgactttgatttacataaatcacattcaatccatttgctgtaggaattttcacatagtattttgcttagtattatttaggtcttgcctttgatattgtctaaagctatgcacatttaattaataatagggaatattattggcaaaatattcattctcttattgtttattaatctcagaatcagaaatatgccaagattgtaagatcaaaatttggttttctatggcttttctagtgagtgttattggatctagtaatagggggtactgaatcaaaacttgtaagttgaaacttaagggtacatagcttgtcctgccacatctggaggttctggtttgagtgcatttgtaggaatataaatggcttctcaatttagtttctcatttgcatatcacacatact

SEQ ID NO: 284985 - DNA, 390 bp, Glycine max
tatcttttggagacagagttaagcaactgattaattgaaagaagctctgaatggggtcactgtcgatgtaagtttccccttgacttgttatattgcctggcaaaaatatagttgcgagtttccctttagtttgttatatgactggtaaatagtttgcagctaaaagaaaaccgagagccaagttgcctttactttttttttgatagttacattcactatctcattgcattcatagcttcctttgccatttccattaatagaatagagaattcttaggcatatgagcatttaatgcatctctgtcactgactctgctcaatagctttcaataattacaatgacatctttttttttggttgtggaagataggcagagtcatagagatataaa

SEQ ID NO: 284986 - DNA, 418 bp, Glycine max
  unsure (1)..(418): unsure at all n locations
ttctacgctgccagttaacaaggtatgagctctatctattttgntgttcttcttagtaagttcttaatcaatgcggtggcattgtctgaaggttcttatcaaattattgggtcattttgtccacttggctaaccatataaaagtatcaataagaatggtaatgtggggtttcattttgttgtggcagttgattgtgctttacgtggttttcaagcttgacgagagttacacgccgagcaaagtttccatccgtgccggtgatggttttcacaacttgaaggtaaatttttattttattggtttgggtttgattgggatgattatgcttaattatttggtgttgactttgggaacatttttaggagattaagaccgtggaactcgtgaaggcaactgggtgggtttatctatccttgtc

SEQ ID NO: 284987 - DNA, 385 bp, Glycine max
tgcttgtatgcacacaaggatggatttttgctcctctgttccatcctccttccaggtcagtctgtgtagattgattggacaaagacttccttttatgatttttaggttgttttttcccactgcagtaaatttgcaaaaccatctaatataggaggatgatagaaactggttcagatttagcacaccaagaatatactgttactgattaacagaaagaatgcacaatttccctggatattcagagatccaagactctccctagtcacaatactaactcaccaattgactaactcctcctttcaatctctctttctatatataggcagcatgccttatttcttctaccaactaacctaattagctaactaatgtaactaggtatcta

SEQ ID NO: 284988 - DNA, 424 bp, Glycine max
tgcttgcatacaaaagaagacaatccacaccaacatttataagaaaaagaagcctctgtcttcctcttcaccttaccccataaagtaaagatgatgccctatttcgaggaccatttttcattgcttgacatatcctttttttttactgtacggtcgcaaaaaattactgcacattatagaatatcagtgtcatttgtaccaatcaaatatagtttagttcaatgtgaactactaaataaagatcaaaaggcacaccttctctaactatgccgagtgtgttagttttttagtgatcatacgtgaatatattcatatctttagtgttaaatcataatacttataatgtctatatttttctcacttttatcattttcttattaatgagctcagatcccataagttcatcggtctggatatttcaatg

SEQ ID NO: 284989 - DNA, 385 bp, Glycine max
ttgcttctaaactttatacaagaatgaagctctgataccacttgttagacaagtggcctcaaatatcttaagaagggggggggggttgaattcagatattccaaactacttccccaattaaaaatctattacactttttaatcaagttatgaattcccttaatgataatcttcttaaatattaattcaaataaaacaatttgaatatgaatataaaacaataatatataaaggacgattaatggaagcgagaatgcaaactcggttttatactggttcggccacacccttgtgcctacgtccagtccccaagcaacccgcttgagagttccactatcttgtacattgcttttacaagttctaaacacacaatgacaatccttcca

SEQ ID NO: 284990 - DNA, 426 bp, Glycine max
tatgcgcatatttccttacaaacgttctcttgtttaagacatttaaccgaaaaaaaatgcacccatatacaatcaagggagcttcgttacctagattatttacacgtacctccaaggtgtatttgttacttacatcacacacatctccttggctaaattcacatacatgcatactcaaagcattttggggtaccaaaaattgcacacgtgcacatcttagcatttctaatacctatacatacgcaaacttcatgatgaatcttgactatctacacaataaggtgctacatttcatgctctttttttcaagtttttgctgcctaaagccgcatgcaaattcaagcatattttcctttgctgactaaaattgaattcaaattaaaaggtatatcttttgtaatatgttttcttcacataacatgcaac

SEQ ID NO: 284991 - DNA, 392 bp, Glycine max
ttgtttggtgcatatgattatacacttcagcttaaggtggaatattagaaataacgtaattataataacaatgtaaataggacagattatttgttatgtaattatgttaagggaaactatatattcttgtatttatgactcttaatataaatatatgctctggtgtgtaattttacacagaattcatcacatgccattttctctcgttctcaacactcttttttaggttcatttatggggaggaataactatgttcgttttgagtgttccctattttcctgataattgtttcaatgtgcagtcaacttctatgatggagagtcttatgaagcttgccaagtcaaacactgataaaaatttagagacttgtggaatccttgctggtttgcttg

SEQ ID NO: 284992 - DNA, 411 bp, Glycine max
  unsure (1)..(411): unsure at all n locations
ntnttttctctattttttgtgagctacttagttgatattgttttgttgattcactatcacatgaattatgaagccaggaacattctatgccttgccacaaagtcctcagctatttaagcaaatgctaatggtagctggttttgacaaatattatcagattgcaaggtaatattttcgtcttatgtttgagtctttatttgtagcttggcttcttttacgagaatatgttattgtcccctatgtagtgctttttcctttttctcttttaagttttttccctatattaatatgcattttgtttaagtgactttcataaactaagaatatagaatgcttgtttttgtaagctatactaaacttaaaattgaaacaattatgatgcaagtgacttttctttttggataaaatgca

SEQ ID NO: 284993 - DNA, 377 bp, Glycine max
ttgctttcaaaattgccccatgtgtggcatctcttgtcaatgtcaggatttacacgtgattctcctcaaatttcagccagcttgcatcaattagaccttgcaccttacgcttcaagcccctacaatgctcaatggaatgccccggggcttctccatgacaagcaccacgttgcgttcgagtcgtattctcggagaaatggaggttgatgaaccttggttagggttatggctaccattgaattatcaagtagatatgggagcaactcagcataggacactggaattggggtgaattctaaggctttctcgttgcaaaattcatttcttcggtggtgttttggtttacgctaaaggtggtgtttgtcattggaagtgcg

SEQ ID NO: 284994 - DNA, 426 bp, Glycine max
tgaaatgaggaagtgtggaagggtgagacttctttcttttattcgttgaccacagagtggtacctggagatatgtcgcgggggttaggagaccttggggacgtcaggtggggtgctattgcccaaaaccaagcttgaccaatcccgacccaacccgggcatagtcagtcagtgagaacctgtgatgtacctaaacaggcgagctcctggcagtcaaccgataaaagaacaaagaccacaaagcaaagaggcttgtgtggtggctggccagctgtgaatcttgagtgatatctgtgatatggcctctggtaatcgattaccaagggtgggtaatcgattacaaggcttaaaagtgaaggcaggaagctaagatggcctctggtaatcgattaccaagggagtgtaatcgattaccaggctttaaaac

SEQ ID NO: 284995 - DNA, 344 bp, Glycine max
tagtttttctttcacaatcaatttgtctactaactaacaattctactgtgagttcacactcttgttctttcttctttcaacatgcatattcgttcaaattcatgaatagaaacacaaatctcatcttcaacatgcattcaatttaaagcaaggcatacatccatttttcaaaataaataaactattttactgcaacaccaacaaaagttaagttaaactgttccagatgcttcagaatgagcaactacactactcatgcacaaaactaacaagaagtaaataatgtactataaccataattatactaatagatcaaaaagcacaaaaaaatcaataggaattta

SEQ ID NO: 284996 - DNA, 420 bp, Glycine max
  unsure (1)..(420): unsure at all n locations
tgaatctctntcaacttcttcttcttcttctttgtatcaaaagttttctgaagttttctggttttccaaaccttgaaaacttgtgctattcatcttttcattctcttctccctttgccaaaaagaattcgccaaggactaaccgcctgaattcttgttgtgtctctcttctcctttttccaaaagaacaaaggactaaccgcctgaattcttttgtgtctcccttatcccttgtcaaagaattcaaaacgacacagtctgagaattcttttgattcttcccattccctaatacaaaagtgttcaaaggactagccgcttgagaattcttttgtatccccattcacaaagtatcaaaggtttaaccgcctgagacctgtgtcttaacacattggagggtacatcctttgtggtacaagtag

SEQ ID NO: 284997 - DNA, 386 bp, Glycine max
tagctttggagtttccaagtgccaattcgtcctcttctttagtccagtcttcttctggcttcaattcatcagtgggctttccttctgtgtccagcatcttgggatgttcccagcctttgatgacagctttccaggttctgctatccagtgatttgaggaaggccaccattattgctttccagtattcatagttgcttccatcaagaattggtggtctgttcactggtcctccttctttctccatgttcatcagaatttatctccccagatctcactctgtgatttcgagtgttggctctgataccaattgaaattctgataccaggggacagatgtcgtacaggatgtcacgacatcacgcttcagaacatgcagattgtatgtgt

SEQ ID NO: 284998 - DNA, 415 bp, Glycine max
tggaggggttgatggggacccggtgctaagatgaactaggttaagggctatgtgggagtgcgtgagctcagttgaaaggtgggcaactggggatggtgtgtttatgtttgacttgtggaactgggagagttgatttgcaccatcgcccgatcgccacctagtaccacatatgacgggtgccccataatccaacaagcttgatgtgagaaagcgtggaagagttagtcttcctacttttgtttgttgaccacaaagtggtacctggagatatgtcgcgggggtcaggagaccttggggacgtcaggtggggtgctatttcccaaaaccaatcttgaccaatcccgacccaacccggccatagtcagtcagtgagaacctttgacgtacctaaacaggcgagctcctggcaatcaac

SEQ ID NO: 284999 - DNA, 391 bp, Glycine max
  unsure (1)..(391): unsure at all n locations
agctttttcctcgttggaaggcaacgacaaagggatctcagatagtttcaggcaagcttgccaagcggttctatggacccttccaagtcatagaatgcattgggctcgttgcatataagttacaattgccataggaagttaaaatacaccccgtattccactattccaagctgaagtctttttgcggttcaccagaaaatatggcgggaattgcctggcacaaggagttactcaacgaccaacccctcgtgtttccattaggtatcttggattaccgtagagcatccaccgaggatccctgngaggtgctagtgcaatggaatggtctctcacctgatgatacctagtgggaggattggaatcagctgtgtgaaaactaccaccttgagga

SEQ ID NO: 285000 - DNA, 417 bp, Glycine max
tgatgagaaataaatgttttgcttggtacaacatctatgttatttaatgagatcattacattatttgtgtcttaataggaagtgaaggacatacattagaggaagccaaatctatcaatctatccttgagtgcattggggaagtgtattaacgcacttgcagagaatagtgcacatgtgccatttcgtgactcagcttactagattgctacgtgattcatttggaggtaagattcagtgagtataataattcatattttgtctttgttcatttatacaaagcagtaagatttggcaaaatactcttcctaactttcaggacgtgagacagatgaagtcgagcccataccggatgctctgcctaatctggaacagtaagctgcctaatgtgtctttgatgcattttagaagtctaatc

SEQ ID NO: 285001 - DNA, 393 bp, Glycine max
agcttgttcaaatcaagtcactcccgcattttatctctagcatgcattgtatgttggtctcgtcctttgtcacgggaagccggaaggtccatatcaccttcttaattgtacacatggggcactgcgcccccaaatgcgcaagtaagaagagataattttccgggctctcgtgtccgtaaaatgcattcatatcatgcatcgcataagcatctcttcataacatcataatggacatatcctgcatttgtccgttatcatattccggcctcacattttgcatgagtcatggcatcatcatgcatatgcgttcaacaaactttttgatctacaaaattgcataccatttgttttcatgtttgttcatccttgcgttttcctctacaaaacaaaaac

SEQ ID NO: 285002 - DNA, 425 bp, Glycine max
  unsure (1)..(425): unsure at all n locations
taagaatggccttattgtttatgccttgacggcttgtgctatttcctgaatttccggtgttacgaatatgacatgatgtcgtttacggggtattcaagttcgtgatataatacccgcagaaagcttgaaggaccaagctttcatttgtcctggttctcatcactcgatcatctggcctgtagaagatccaagtccgagaagcaaagcaaagttggtagccactgctaagttggttcactttgacaaaagctagaagttgcagtatgggttcccacccacctgttgtaaattgagcccgtagggtacaaaatcaaggtcatggatgtccgtgtggctatttttctcattattttttacaaattttttttactcattgtccctaggttattggtttttttttttttttcattntatatttttaaatc

SEQ ID NO: 285003 - DNA, 396 bp, Glycine max
agatatttaaattaaaaaagccacttttaaattttgagactttttttggtacatgaaattttgagactaaaaataactttaaatttaaaggattaaaaaatcatttttaaatttggagaagaatattttttatctaagtttgaagaaccaaaaagacatttaagtcacaaaattaaatactttgacctgacatataaatatatgataacatggacttcattagtcatattaacaacaactacaacattgtttatgatgaggagttaaaaggagctatttccaaattttggagaagaaaaaatcatttttttttaatttgaggaacaaaaagctaacttgttccaaatttaagtaactataattatatttaagaaaaaaaacactaaaagatttgaa

SEQ ID NO: 285004 - DNA, 428 bp, Glycine max
tcagacaatgtgtggaaccagtcatcgttggtgtttgttctgccgaagaggacggtggcgtctacggtggctgttgatttgcttcgagctgtgtcatcctttgcaggagatcatctatcttcgtgttcattgctagctgagatgctgatagttttgcaatggcgtcttccaatcggtctgtggaaaccctagagcgtgtagcttccgccattgatgctcaatgaaagcaccaatgttatgacttggacttcgaggaccaagggcctcggttagtagagagaagaaaggaaggagagaaaagaaatcgtgtttagttgcttgttatttcatgtatgaacatttacaaggttttatacttcctgcagttgagatctaacagaattagctaactacaatcacattctaactgaatctagaatattccagat

SEQ ID NO: 285005 - DNA, 397 bp, Glycine max
agcttcatgaaaaagatggcctcagcaaattccttatttccagaaggaaattctatcaacagacctccaatctttaatggagagggttaccactactggaaaacccgaatgcaaatttttatcgaggcaatagatctaaatatctgggaagccatagaaatagggccttatatacccaccacagtagaaagagtttcaatagatggtagttcatcaagtgaaagcataaccatagaaaaacctagagatagatggtctgaagaggatagaaaacgagtacaatacaacctaaaagccaaaaacataataacatctgccctaggaatgggtgaatatttcagagtttcaaattgtaagagtgctaaggaaatgtgggacactcttcgattaacacatg

SEQ ID NO: 285006 - DNA, 426 bp, Glycine max
tgtgggatggctttgaagattgatatcaataaggcctttgatagggttgattggaattatttgttggttgttatgatcaagatgtggtttcatcagaaatgggtggattcgatgaaactttgccttgggtctacgcaattctcagtaatggttaatgaggattctttgggacctatttctcctaggagagggctaaggcagggtgaccaattgtcaccttacctgttcattatttgcactgaaggtctttcttcccttctaaaaaaatctgagaggagtggtgagttacatggtatcaaggtgtgtaaaggagtccctgtcctctcacaccttttacttgttgatgattgtttttgttttgcagggtaaatgatattgagcatattgctttgaaagctattctagattcctatggtgaaaattctg

SEQ ID NO: 285007 - DNA, 384 bp, Glycine max
agctttaaaagattggctaagattttgttaaaacataagcacttagacaatgaaggaaagctggagttgctgcacatgatgtccaacgttatgtcaaagaataagatcgggctgcacaatgcataagtcaagataaaatgtcaaatgaagcattgaagctgcaggatccacgatgtcggatacgatgtcctgacatcttgcccgaaaatactggacacatgaatctgttatatctttaacagattattgtgcagttagcaagagataagaagatctatctttatgaacgaattaaaagataattaaagttcgaatttcaaagtagaagagttcgttcagggattaaagattatagataaaaactaaaagatcaaactgtatctt

SEQ ID NO: 285008 - DNA, 430 bp, Glycine max
tcctcgaggccatttcctgcgaaggcaaacatttggtaagttagttttaccaagaaatgctactcttaaaacaaaatggcgtacaacctcctccaataaacacaaatatcaatgtaaatttagagcaaactcatgcacatacttccttacgagtattcactcgcacaagatattcttctaactaagaaaaatgcacccatgcacaatcaaagcaccttcgttacccagatcatttatatgtacttccaaggtgtatttgctacctacatcacatgaacttccttggctaaatttacatgcacgcatactcaaagcatcttggctaccaaaaattgcagacatgcacattctggtatttctaatacctatgcatatacaaactttgtgatgaatcttggctatctacacaataaggtgctacatttcatgc

SEQ ID NO: 285009 - DNA, 360 bp, Glycine max
gacaacaatagcccaagagaatggattttcaagaatggattcacacatagttcatagaatcaagtatatcatagatagattcacagaatcacagatgaagattggatttcatagattcaacgagatgatgatattcaagaattcagagtgaagataatcaacgaagacttcacaagggaagtattgaaaagatttttcaaaaaacaaactctcatctcacacaagtctataacattaatctaaactcgctcaaactggttttacgatgaaaactccatcgaatcaaaatttgactcctcaacacccaatttaccctagaaatggctcttgccttcactttggtcactcatcttcctcctt

SEQ ID NO: 285010 - DNA, 333 bp, Glycine max
tttggcttttaaatgccattaagaggttcaactaccccattcatcttgggcctgcatgggggggaattatggcggtggaatcttgaaacctcacacaattcctttatcattttggtggtcaaaatggtggcattatttggataatcttcttgggccacccataccggcagaatatctctttcttaatgaacttgaccaccacacttcctttgtacaactggcatatgaagcagcttcaacccatttggtgaagtaaccgatctgcaccaaaatgaagcgacgtctattcggagcccttggctcaataggcccaatcacatctattccccacat

SEQ ID NO: 285011 - DNA, 144 bp, Glycine max
  unsure (1)..(144): unsure at all n locations
tgtttgttcttttagcgctctagttatgaaagactagcttgcgtagnaaggggatcccatccttcgaccccgaaagcctgaaggtccgtactcccttcttaatatggcacatggggcactgctcccccggacgcgcatgtccca

SEQ ID NO: 285012 - DNA, 82 bp, Glycine max
tctaaggtagaacaacaattgaaaagaaagagtgtttttgtgaggagttcatctaactctcactgtcttggttgcaaggacc

SEQ ID NO: 285013 - DNA, 392 bp, Glycine max
tgcttgaaacattgaccacccaagagcgaggtctctctgaaagatatcaacactctgcaaacacattacattaggaagcatggcataaagccctacatgaacaatattcaacaacctagctaagcctcataaagggtgcgaaaacagaatctcgatgaaaccttgtttgcatcgaacactattattagccttggcgacaatgtgaacctttaaagggtacgatatgaatatgtaacccccatagataggagaataatcaaagagctagttaagagctgaggagagcaggaggtcacagggagatttaactctttcatgttagcgccatcagtactcataacatttcatacaaggtactgaatctaccaaaacctttcatcttatcgccgatt

SEQ ID NO: 285014 - DNA, 412 bp, Glycine max
tatctgctggccacaatacatccccgaagcaactggtattggaaaggactgggtcccctggctataaccttgctcttgctgcatacccaccaccatcaccagcctatagatcacatcaagcatggcatagacagtcctcattcacaaactggaaatgattcaatagaatagacatgggccagatactctcatgcatgacaacgccactactcgaactttggccctaaggtgaggccaaatgtgttgacaacctccagctcaattaattatctatgaaggcccagtgattcttgctatgatgacctcaagtatccttccaacattggcggaaccattgacgctgccaactcgtaacgaggctgacacacccattatggcttcatgaagcaagagcccttgaaacatggttcta

SEQ ID NO: 285015 - DNA, 271 bp, Glycine max
ctgcttctttttttgagtggctaactaatgaacgatgtggagagggcttgtttatacacaaccctgcccattcctaccgtaatgcataccactcctggataacgcgattgcgaagtcctatcgggccataaatctcgctatggagtagaaccttctttaaacgatcttaggctcctgacacttaagacgtagctgaatggatgcaccgtagcattgagaccataggcgctgaaatattggataccttggtcagctacgatagaaactgcta

SEQ ID NO: 285016 - DNA, 377 bp, Glycine max
tgatgaaagcatagattggttgttatgatcaagatgtggtttcatcagaaatgggtggattcgatgaaactctgcctagacaataatatgagtaatagagaacaaaatattagtcgagtgaaacgccgttcacaaaagcgatagatagggaaacagcgaaagggtaggcaatactttgtggttaggataatgagggtggttgtagaagctttggagaacaacagctgtggtgtgttgaggaataattaattactcataaaacacacacttgatttccgcccaacaaatttattgatgattggtgacacaataactggaagctcaatcttcatttatggccaattatagcttgctacagctgagtttgtgacaggatc

SEQ ID NO: 285017 - DNA, 252 bp, Glycine max
  unsure (1)..(252): unsure at all n locations
agctttacagcagattttagtaatgacccactaacttagaattaaaataacttaatgccattaatctagggaattaaaaaaacttaatggctgagtgtaactgaaattgtggcaaccaaaagtcacccccaacagccaacaagtcagccaccatttggtctcccaaaaggctgatgcctaggttgccaattgggcccttattacaacttgaactaaacctactaaagccctttcaagncattcacccaaaac

SEQ ID NO: 285018 - DNA, 287 bp, Glycine max
  unsure (1)..(287): unsure at all n locations
tatagaaactcaagcttctcgagaaattcgaatggttataacgttttcactcaatangtcctgatgcggcggacatcaactcatgtagacgctcgaagattgaacaacgcacgctctcgagaaactcgaatggtcataacatttcgcacacatgtccaaatctgtgacctaacatttctagacactccgcactggctggataaagatcttgtcatatccaaactgcagtaacatcgcgcgcgccatgcctatataagctcgcgagcaacggcactcccccccaacat

SEQ ID NO: 285019 - DNA, 382 bp, Glycine max
agcttcaagaaaaagatggcctcagcaaattccttatttccagaagggaattctatcaatagacctccaatctttaatggagagggccaccactactggaaaacccgaatgcacatttttatcgaggcaatagatctaaatatctgtgaagccattgacatagggccttatatacccaccacagtacaaagagtttcaatagatggtagttcatcaagtgaaagcataaccatagaaaaacctagagacagacggtctgaagaggatagaaaacgagtacaatacaacctataagccaaaaacataatatcatctgccctaggaatggatgtaatattcagagcttcaaattgcgagagtgctaaggaaatgtgggacactc

SEQ ID NO: 285020 - DNA, 388 bp, Glycine max
tgtagggttaaagtctcacgattgtgacgtgtttattcaacaattgttagtcgtggctatacgagacatcttgccaaacaaagtcaggttagcgataactcgcttgcgctttttcttccatgctatatgtagcaaagccattgatccagtcaagtttgatgagttggaaaatgaggccgcaattatactgtgccagttggagatgtattttccccctgctttctttgacatcatgatttacttgattgtgcatctggtcagagaaatcaaatgttgtggtcctgtttatctacaatggatgtacccggttgagcgatacatgaagatcttaaaagggtatacaaagaatctatatcatccagaagcatctattgtagagaggcacatt

SEQ ID NO: 285021 - DNA, 210 bp, Glycine max
agtctgtggtttcagcataagattagcaagatgatgcaaccaattttaaggaaaccctccgaagtcctaacggtttcactgttgaagcaagtaaaacaaaatatgccagaaataaatgagcgaagcagctggaaaatctactagtggatttggcattttctccaaagagtgtcatctatagttcagtccactacagaagttatgcacatc

SEQ ID NO: 285022 - DNA, 253 bp, Glycine max
  unsure (1)..(253): unsure at all n locations
tttccagagctacttggatgagcatatattttttnctttctcactatattcttttttaatatatatgaaccagcaagtcagaaacctgttaagaattaagcttctgtaatgcattactaaccaattcttttaacagaacgttccttctgtataaaatgctccaacttcaataactaagctagaaccaatttgatagtcccactacaatatttgtggacgaaacagcgacacaactgcgcccattcatgcaagt

SEQ ID NO: 285023 - DNA, 395 bp, Glycine max
agctttgagcaaattcaaacgacaataaccttttactcggatgtctgattgagtcccgtaatatatcgagacgctcaaaattgaatgttgaacctctgagcaaattcaaacgacaataactttttactcggatgtctgattgagttccgtcatatatcgagacgctcgaaattgaatgttgaagctctgagccaattcaaacgacaataactttttactcggatgtctgattgagtcccgtagtatatcgagacgctcaaaattgaatgttcaacctatgagccaattcaaacgacaataactttttactcggatgtctgattgagtcccataatatatcgagaggctcgaaattgaatgttgaacctctgaaccaattcaaaagacaatatctt

SEQ ID NO: 285024 - DNA, 429 bp, Glycine max
taaacattcaatttcgagcgtctcgatatattacgggtctcaatcagacatccgagtaaaaatttattgtcgtttgaattggctcagaggttcaacattcaatttcgagcgtctcgatatattacgggactcaataagacatccgagtaaaaagttattgtcgtttgaattggctcagagctttaacattcaatttcgagcgtctcgatatattacgggactcaatcagacatccgagtaaaaagatattgtcttttgaattggctcagaggttcaacattcaatttcgagcgtctcgatatattatgggactcaatcagacatccgagtaaaaagttaatgccgtttgaattggctcagaggttcaaaattgaatttcgagcgtctcgatatattacgggactcaatcagacatccgagtaaaaagtt

SEQ ID NO: 285025 - DNA, 382 bp, Glycine max
agcttgtttttggtttaaacatgatttatgacttgtaggatccaatttgagaaaaattggatgtgggcaagatggatttaggacttgtaggatccaatttatgcagaaaaatgttgttgaattgtgcagcagatttttgattgtgtgcagaaaaatgcttgtgcattgctggttttatgggaaaaggtagtacatattgggttctagacattttctagcagatcccaacggtcaagatgtatacttatgtactaggaacctccagtaaaattttcaagtcaatccaatggttaacgaatcggaatgaagaaaatgttactgggatatatgagtaatgaaagctgtaatacgtgaatgtgttttgggcagagatttctgtctc

SEQ ID NO: 285026 - DNA, 423 bp, Glycine max
tgtaaggttaaagtctcacgattgtcatgtgctcatgctacaattgttagccgtggctatacgagacatcttgccaaacaaagtcaggttcacaataactcgtctgtgctttttcttccatgctatatgtagcaaagtgattgatccagtaatgtttgatgagttggaaaatgaggccgcaattatactgtgccagttggagatgtattttccccctgctttctttgacatcatgattcacttgattgtgcatctggtcagagaaatcaaatgttgcggtcctgtttatctacggtggatgtacccgattgagcgatacatgaagatcttaaaatggtatacaaagaatctatatcgtccggaagcatctattgttgagaggtacattgcagaagaagccattgaattttgttcagaatactt

SEQ ID NO: 285027 - DNA, 392 bp, Glycine max
agcttctaatgtatgtaagatgtgtattgcctctaaatgagctacaggtgcataagtttctttgtagtctattccttcttgttgagagtattctttagcaactaaccttgctttgtttttcacaacctttcaattttcattcagtttggtttgaaagactcatttctctccaatagctttctttctttttggaaattcgactgactttcaaacatcattcctctgaaactgatcaagctacttttgcattgctttaacccaattgtcatcctgcattacatcatcaatgtgtttgggtttcatttcagaaatcaatgcaataggtccttatgttctgagtgatgatcttgtttgaacatgatcaactagatcaccaataatttgactttttg

SEQ ID NO: 285028 - DNA, 430 bp, Glycine max
  unsure (1)..(430): unsure at all n locations
tgtaggattatggggtacccgtcatatgtgtactatgtggcgttcgggcgatggtgcaagtcgactctccacatccacaaatcacacataaatccaccatcctcagttgcccaccttccactgagctcacgtactcccacgtagccccttatcctcgttcctctcaacaccgggttcccatcaatccctccaagcttccacaacatccaagaaattcaacatccaaacatcatgaactatccaaaaccaagaaaacagggcagaggcagaaaactctgcccaaaacacattccaataccacaactttccttactcaaatacccagtaacatcctcttcgtttcggttcattaactgtttgatcgattcgagaatntttaagccttgtaatcgattacacacccttggtaatcgattgccagaggtcatat

SEQ ID NO: 285029 - DNA, 379 bp, Glycine max
agcttgtttcaaagaggtccaagaaggataaggcggccgaagggactagttccgctcctgagtatgacagtcaccgctttaagagcgctgtacaccagtagcgcttcgaggccatcaagggatggtcgtttcgacgggagcgacgcgtccaactcagggacgacgagtatactgatttccaggaggagatagggcaccggcggtggacatcactggttacccccatggccaagttcgatccagaaatagtccttgagttatatgccaatgcttggccaacagaggatggcgtgcgtgacatgaggtcctgcgtaaggggtcagtggatcccgttcgatgccgacgctatcggccagctcctaagatattctgtggtgtt

SEQ ID NO: 285030 - DNA, 429 bp, Glycine max
  unsure (1)..(429): unsure at all n locations
tgccgccacggagttttccgactatgctcttgtgtgtgtggaacaagctacaaaaagagagagcaagaattgtggtttgaaagaacaagggtgatgatgaaaggaaggaaagaatcactctttccagcgagggcaacacacaaaggttgagaaagtcctttgatacagccaaggtgttcttgaatcactcaagaatttaggagaatcactctcactaagataaaagagataaactctaattttctgaataaaactcaacttgtgtttattgataaaatggttcagcttatatagaagctttacagcagattttagtaatgacccactaacctagaattaaaataacttaatgccattaacctagggaattaaaaaaaacttaatggctgagtgtaactganattgtggcaaccaaaagtcacccccaac

SEQ ID NO: 285031 - DNA, 389 bp, Glycine max
  unsure (1)..(389): unsure at all n locations
agcttgtataacggctggacatgatatatgtcagggtgttggtttatccagcggttcatggataaaggaatatcccacattatttccatgacacgcgtgcaacaatgatgattcataaattttatgcaaaacttgtcatgcatgcacctatgtggacactcaagcatcaagttctgtggtcatgtgacactanggctcaagattcatttttcctatttaagtcaatccagtgtttccaaaacatgctcttttatcaattcatgcattcatccgagtccattttgggtgttcgggaaaattttacagcattcacccttcaggtgtatacatattttttcaacaaacacttctgtgtttgatcagcgaatctttttaaagaaagagttgga

SEQ ID NO: 285032 - DNA, 424 bp, Glycine max
  unsure (1)..(424): unsure at all n locations
tgtccttggtttagacatgattggtacatgatttgttacttgtaggattcaatttgggcaaaattggatgagggaaagagtggttttcgaaatctgcactttatgcagaattttgctgttgaaatgtgcagcagaaatttgcataagtgcagaaaaatactatgtatttgctggttgtggaaagagtagtacagaatgagttcttgatgtttgctagtagatcccaacggtcaaaatgtagacttatgtactagagacttccagtaaaattttcgagtcgatccaacggttaacggattggaacgaaggaaatgttactgaggtctttaagtgagaaaaagctgtgattntggtttgagttttgggcagagttntctgcctttgccctgttttgcttggtttgttagtttgtgatgatttggat

SEQ ID NO: 285033 - DNA, 327 bp, Glycine max
atcttacgctccttcaactgcacaagactcttaatatttgaagagtatacatgtggaaccttcacctgacgaagacactgacagaaactcatcttatcctttttggacaaagtatgacaagctgctggcaggttgattgtattcccatcagaccttggatgcaactgtgatcgtatccccatcttagatacatcttgacggagattcaatccatacttcatcttgccttgaatgtcaaagagcattccagtcactctgtcacgtacatttttcttctgatgcatatcatccgaccaatgccttacgcttagatgacaccatgactgc

SEQ ID NO: 285034 - DNA, 233 bp, Glycine max
ttttcaacgacacactgacaggagcagagcagggagacccaaaacaccagaagaaccccagcgacagatcaaagaacatggcccaaaaccaaaaccaaagaagagaaaagaaccagattccaaaaacatccgaaggccagcagcctgctgggaaacgacactagaaacagggaaaaaacccaaccatgccagaacgaacagaaacacgcaaaaaaggcaagaattgcaaagaa

SEQ ID NO: 285035 - DNA, 393 bp, Glycine max
ctgccgtccagctcttacatacgagcagaggtgcttcctctaaacacatcaactcttaggacgaatatgtggtaggacctacttagagcattcttgcgactagtcacgtgtttttactaaacgcacccctgtatatttttaaggaaactctccacgcaacctacgagactatgcgaatctctgaacgctaactattattctatatgtatgacacataatgcattgcagagaactgatgaacgcattcttagctcgctaagaagatcaatgggagctcacttaattgtgccactgctaccgctttctaataatctgtccatatcatgatattccggattgtgctcaatcatctatcgttagagtcctgagatctctttgctctcatatattgcg

SEQ ID NO: 285036 - DNA, 276 bp, Glycine max
tgcttctacatctataggcggactgcccttgattgttaactaaggattcatggcgatcctctaggacgaggatggaatgatcttaacagcgcccttatgaagaggcacattccctcctactatgaaagggaacttactgacaacctccaagggcttagataaggacatatgagtgcgaagaatatagaccacaaatgggactactctttttacaagctggacttacggaggacacaagccttcttcatttgatgagctaaatcttgcactgtcatc

SEQ ID NO: 285037 - DNA, 388 bp, Glycine max
tgtttctacttatgtggcagggcgggctgccttcactttcttgtccccaacacgagctttgaccaccgctctttcttcccgcgatgcttctctttatatccacctgagtgggcttatagcctaaaccatacttgccacgatttcctttggcatttatcaagctagttatgctgccgttgtctttgcctaaacccattccgggttcgtaaccgttccccaacataactcgggccatcattactgctgcaacggacaggcaaggctgcctagagaatgagtacacggaggaaatgctgaccacctcaaaagactggatagcggtatctaacgattcttctgcggcttccacataatgcatagatgatgggcagctcaccaagatgtcttc

SEQ ID NO: 285038 - DNA, 427 bp, Glycine max
tgtccgcataaaatcactaaaaagagattctaaggttttatacctcagatcttctcaccaagtaaaatggatcactttaaggtccaacgccttaaaaggaccaccttccaagtaaaaagaatcatttgattcgccctttagaaagaactgcgtaagtctgatttcctcttcgatggagggtacgtatgagcaagagccccgcttttgaggacctcaaaaataataaaaaaaaagaaataaagcttagatacataatttcacacaattctaatctaaggttgttgttctttgggacaaacgtgataggtgctaataccttcctcatacgtaaatacaactcccgaatctggaatattcttcatgaccggtttccttcggtttgtccgacgtgttccacaaaataacgttggtggagactctgcgcatt

SEQ ID NO: 285039 - DNA, 392 bp, Glycine max
tgtttgtgcaaatcaaatcactcctacgtctcatctctagcatgcattttctttctttacccactcctcacgtttggatttttagggaaaacaccataactaaacgcgccgcaagggatccctatcgcaccagatccaaatctagaacgatgggtgatcaagaggagacacaggaacagatgaaagccgacatgttggctctgaaagaacaaatggcctccatgatggaggccatgttaggtatgaagcagctcatggagaagaacgcggccgctgccgccgctgtcagttctgctgccgaagcagacccgactctcttggcaactacgcaccatgctccctctaacatagtaggacggggaaaggacgcactgtggcacgatggtagccct

SEQ ID NO: 285040 - DNA, 425 bp, Glycine max
gtgagggtgcgtagcccaccatcttttcatagtttagtaccgataatgtgtctaccatcacgattatcgtctccctttttgcacatgttctgtagttgcatcctatccggaaccatatcagaatagtaccgatactgcctaacgaaggcaaccattaggtccttccaagtatggactcgggaaggttccaagttagtgtaccaggtaacagctaccccaataagactttcttggaagaaatgtattagcagttcctcatctttgcgtatgcccttatcttccgacaatacatctttggatggttcttggggcaagtagtccccttctacttgtcaaagtctagcaccttgaacttgggaggggtgatgatattgggtactacgaacaactcttctaggttagcaaaggcataatctttacctcct

SEQ ID NO: 285041 - DNA, 372 bp, Glycine max
tgcttttgagaaattcaaatggtcataacttttcacacggatgttagattaaggcgcatcgcatatagagacgctcgaaaatgaacaacggaagctctcgagaaattcaaatggtcataacttttcacactgacgtccgattcaggcttataatatattgatatgctcaaaaataaacatcggaagttctagagatattcaaatggtcataatttttcacatggatgtccgattccggcgcataatatgtcgagaggctcaaaattgaacatcggaaggtcttgagaaattcaaatgtgcataacttttcacacgaatgtccgattaaggcttataatatatcgatacgctcgaaattaaacaacggaactc

SEQ ID NO: 285042 - DNA, 293 bp, Glycine max
tcgctagaatcggacctccgtgtgaagagatacgagcgttttgttttgtccagagctaccgctggagagtttccaacgtctaagacataagaggctcccgattcggacatcctggtgaggagatatgagcgttaggatatgaccataggaatcgctggagagcttccagcgtatagatatgagctacccctgaatcgaacctccttgtgacaagatctgaccattaggatatgaccagagcaatctgtgaagaatttccaatgttactatatgagctgcgccacatattggac

SEQ ID NO: 285043 - DNA, 353 bp, Glycine max
tgcttttgatcctttttataaaaagagaagttctgaaactcatcacgttgtctaaaaaggccttgaagtggatccaagtgctctgatcattcattagcatattcatgttttgatggcatactcaccactgtttgtttctttatggaactcaccataactaaaaaagcgcagaggcacccctataacactcgatccagaagtaagatggataacgaagagggagtgcaagaacagatgaaggccaacctatcggcctgaaaagatcaaatggcttctatcacagaggccatgctaaagcttcaaacaaactatagaagataatgctactgcggccgcttccaatacagctaggg

SEQ ID NO: 285044 - DNA, 410 bp, Glycine max
tgtagggttaaagtctcacgattgtcacgtgctcatgcaacaattgttagtcgtggctatacgagacatcttgccaaacaaagttaggttagccataactcgcctgtgttttttcttccatgctatatgtagcaaagtcattgatcctgttaagtttgatgagctggaaaatgaggcctcaattatactgtgccagttggagatgtattttccccgtgctttctttgacatcatgattcacttgattgtgcatcacgttagagaaatcaaatgttgtggtcctgtttatctacggtggatgtacccggttgagcgatacatgaagatcttaaaagggtatacaaagaatctatatcatccagaagcatctattgttgagcggtacattgtagaagaagccattgaatttt

SEQ ID NO: 285045 - DNA, 387 bp, Glycine max
agctttatagaaacctttgctttttttgctagacttgaagctataagaatcatgctttcctttgctactcataaaaatataaagttatttcaaatggacgttaaaagtgctttcttaaatggctttattgaagaggaaatatatgtcaaacaacctcttgggtttgaagatcatactcttccagaccatgctttcaaacttaaaaaagctttgtatggtctaaaacaggaaccacatgcttggtgtgacagactgagttcatttctcttagaaatggttttattaaagtcaaagtggatacaactctttctaaatgagaagttggcaaagatttcattatagttcatatgtatgttgatgatagtatttttgaagctactaatgaat

SEQ ID NO: 285046 - DNA, 421 bp, Glycine max
tgaatgaatataagacacatcttcttcaatcttggtgattcttgactccatctaatggaagtgcatgtccacttgtaattccaaagtgtcaaacctttcaccaacaaaggtttgaagaccatcaaacctgtccaaaatctttgaaagaagagatgaatcttctccatcatgtccttcttcaccaatatgtcgagcaccctttttcaaccaagagccatcatgctctttttgataaccaaaggatgcaatgactgaagcgcctataaggaaggatctcttgattggaacatagggttcagaatcaagagggatgttaaagtgttgaaggaaaagagtgactagatgaggatatggcaaaggagcattcaatcgcaatgccttatgcctgcgatatctaacaagaagtgcccaatcaatttgt

SEQ ID NO: 285047 - DNA, 396 bp, Glycine max
agcttcatgatgaatcaaaagtgattcaaagatgttttgatgataacaatgatgacaacaaaagatgatgacaaaggtgatgaacaatcagctcaagtgaatcaaataacatttcaagtgaatcaagaacaagtcaagagttcaagaatcaagaagaattcaagactcaagaagaaagcctacaatcaagaatcaagaatcaagattcaagatcttacgaatcaagatcaagattcaagactcaagattcaagaatgaagaaaagactcaatcaagataagtattaaaaagttttttcaaaactttgaatagcacatgagtttttgacaaaacctttaccaaagagtttttactctctggtaatcgattaccatattgttgtaatcgattaccagt

SEQ ID NO: 285048 - DNA, 424 bp, Glycine max
tgatttacattctccccctttctcaagaaaattcttaattcttcttgacatcatcaaaatcttcatgatttacaaaaaattttagaaagcttttggcaaaggaagaagaagttcaaagagattcaaggattgtaaaggattgtaataattgttcttaaaatgcaagttaaggtcttgcttttatagactcttcatgtctggtcaagagaaccattacaagagttataacctttacaaaaacttgaaaaccattggaaaagttataacttttagaaaaacttaaaaaccattggaagagttacatcttttgattttttgttcacaacttatcactagtaatcgattaccaaatcattgtaatcgattacacaaagcttttttgcgacaggatgtgactcttaacaattggatttgaatttcaaca

SEQ ID NO: 285049 - DNA, 396 bp, Glycine max
  unsure (1)..(396): unsure at all n locations
agcttgtctcagcgtttatgcgagacagagaccaacatgttagtcatcatcagcaagtaccaagaagaattaaatctagccatggcccacgagcacaaagtggcggacgagtatgctcgagtgtacgcggaaaaggaggctagaggaaaggtgatcgacttgttacatcaagaggcaacaatgtggatggaccgatttgttcttactttgaacgagagtgaagaacttccccgattgctggccaaggcaaaagcaatggtggacacctactccgcccccgaggagatccacaaacttctcagctattgtcagcatatgatagatctaatcgcccatataattaggaaccgctaggaagtttgtattatcactcanatcttgactagttataacttt

SEQ ID NO: 285050 - DNA, 426 bp, Glycine max
  unsure (1)..(426): unsure at all n locations
tgtagccattagaagagaatgagcatgtgattggaattattactgaaaatgttagtcaatttgtcagattgattgtgaaggaatgcattaacagtatcccggtgagagtgtggtccttaaattttgagataaatgactatcatttagtactgatttttgtgtgaatctctgaagtatggactgaatgcatgaaattgaggatgatgaaggccatgtttgattgtgataggaacttagccaaaaagctgaccacgtgcgtgaatgatgtatcctttgcacctagtttgagcttaatgaattattgattgattgaagcctgagcctacagtgttatctcctgctaccttgacttangttgtaggagagcatcatccacaggaagcgcgattcanagcaaatttgtcccaaattttggggagtaattat

SEQ ID NO: 285051 - DNA, 388 bp, Glycine max
agctttctgtaatcttttgcaggtttttataagattttgaaagaatagatgagttcgaataaagttcattataggcttgttttggagattcacagtcattgcaatctacctcatcctcttgatctaatttagattctttaaaggctgtgtccgccatcatacatatgttgtttacaacttttgatatcatggttggggtcagggaacccaattatggggatgtatgttttgccctgtgcatgctggttttcaagaaaaactgtgttcttaactaatgggatgtgatatatttgttattgatgtgcatgctggttttcaagaaaaactcatgttttaactaatgggatgtgataggtttggtattgatgattgaaattgtcaatgatgt

SEQ ID NO: 285052 - DNA, 334 bp, Glycine max
tccaagaatcaagatcaagattcaagacttacgattttagaatctagagatgactcaatcaagagaagggttaaaaagttttttcaaaaactgagtagcacatgaatttttcttgtcgcaacatgcccttttgcgggcgagcgaggcgaggctcatgggtgtgctttccaaaggaggaaagatgcgcagagtcaccaccaacgtttatttgtgggaaacgtcagaaaaaccgaaggaaaccggtcaaaatgaaaattctaagttccggagttggattcacgtttgaggaaggtattagcacctctcacgtttgtctcaaaggacaacaacctat

SEQ ID NO: 285053 - DNA, 393 bp, Glycine max
agcttttacctttcattttaacccttagaacttctcggccaacaatgtcatagataaagaaatgttgatgttcaaaggacactttaaatccctttttaatcaactgacctacacttagcaagttttggtcaatgttaggtacataaagaacatctgatattagtttgatacctgaacacgttgaaattgcaacaattccttttccttttactggaatatagccaccattcccaattttgacctttgagacattagttggcttcaaatccttgaatagagtcttatcatatgtcatgtggttcgtacaaccactaccaatcaaccaactttcacttgattcactactcaagaagcatgtggccacaaacagttggtcctcctcgtcttgattag

SEQ ID NO: 285054 - DNA, 427 bp, Glycine max
tgatttgtgagttgattttagctttagtttcactttggttattagttaattcattcaaggaaactttcaaagaaaaaatgtccgattaatttttcttgattattttattattttttttcaagatattttaattattttattattattttgctttttttggtttaactgaggttatagcgtgaacgatcggttagattttgttttaacagtgattaaacgagattacaacacaaatgatcggttgaaattcattttatcatttattaggtgagaaaatggcttaaataaacggtcaaaagctcgtgaaagcagaagaaaagaaaactgaaagtaagcaaaattaaagtgaaagtacacaaaacaagtagggaccactaagggtgcatagaatgaattgaaagattcgatttcgggaacttaccgattg

SEQ ID NO: 285055 - DNA, 384 bp, Glycine max
agcttcttgatagggcccaaactccactccaaaatctgacttcaggcttaaataggtcgctttgtttgtgcttgtgtgcttagcgcaattttgaaccgcttagcgctcattaatggattttagcttagcgtgtgcttttctcgcttatcggatggactgaagcggtgcgcttcgctggatgaccctttgcttagcacaaatgcacaactcatccttcttctagattcttcctcgcgcttagtcgaggagtgttgtgctcagtggatggctcgctaagcctgcaaattggcttaaccatagggtgaaaataagcacttcacaaacttgcctaattaacctgatattgagaaaaaatgattattaaacacactgaatggacatact

SEQ ID NO: 285056 - DNA, 432 bp, Glycine max
ctcacgcttcatgcttaactatgtatggcaaaacttcattattgttgttcatgacatacaagtgagcttgtaacagatcttctacacttggagtgatcacatgcagtccttttgaacccttaccacccactttgtcatcatgccgagactcaggaagcccaacaggtttagccttctctaagtattctgaacaaaattcaatggcttcttctgcaatgtacctctcaacaatagatgcttctggacgatatagattctttgtatacccttttaagatcttcatgtatcgctcaatcgggtacatccaccgtagataaacaggaccacaacatttgatttctctgaccagatgcacaatcaagtgaatcatgatgtcaaagaaagcagggggaaaatacatctccaactgacacattataattgcggcctcat

SEQ ID NO: 285057 - DNA, 394 bp, Glycine max
tatctttgcagatttggtcttcgccagtgaaaggatcgatgtgggtccgaaaagaggcaaatttgatcatcctactaggacgactgagaaaactggggcaaatgaagagggtgagaaagagggagaaacccatgctgtgactgccattcctatacggccaagtttcccaccaaacccaacaatgtcattactcagtcaataacaaacctcctccttacccaccacccagttatccacgaaggccatccctaaatcaaccacaaagcctgtctaccgcacttccaatgacgaagaccacctttagcacaaaccaaaaaaaaaacaccaaccatgaactgaattgtgcagcgagaaagcctgtagaattcaccccaattccagtggcctatgctga

SEQ ID NO: 285058 - DNA, 422 bp, Glycine max
gcttgagatgaggaagtgttgaagggtgaaacttcctgcttttattgttgaccacatagtggtacctggagatatgtcacgggggtcaggagaccttggggacgtcaggtggggtgctattgcccaaaaccaagcttgaccaatcccgacccaccccgagcatagtcggtcagtgagaacctgtgatgtacctaaacaggcgagctcctggcagtcaacagataaaaggaacaaagaccacaaagcaaggaggtttgtggtggctggccagctctgaaacttgattgatatgtgagatatggtctctggtaatcgattaccaagggtgggtaatcgattacaaggcttaacaatgaagataggaggctaagatggtctctggtaatcgattaccacggggtgtaatccattaccaggcttga

SEQ ID NO: 285059 - DNA, 393 bp, Glycine max
ttgctttttccttattcctcaaagaaaaggccaacgtatttgcatggaagccggtggatatgttgagcatagatccaaactttttctgtcataagttgatagtaaaccctttagtgaaacctgtgtgtcaaagaaggaggaaaatgactctcgaatgcctagaggaaattgaaaggcaagtgaaggagttgctaaggaaattgaaaggcaagtcaacccttcagcgaaacctttcatacgacttggctggccaagatcatcctagttaacaagcataacggaaaatggagaatgtgcattaactacttgatctaaacaaacattgtctgaaagactcatatccgcttcccgacatagataaaatggcggatagatctttcgactactgatatt

SEQ ID NO: 285060 - DNA, 422 bp, Glycine max
tatcgtaatcgattacacaattgtttttgagacaattattgatttattcaggagtctctgctttaatcgattaccatgtgatattatcgattacttctcttttaaaagtgttttagaagtaatcaagaacactttaatcaattacttctcttttaaaagtgtttcaaaagtaatcaataacactttaatcaattacattgaggatctagtcgattacattattcttgagaggtttccaatttttgggaagaacactaatcgattgaaatgataattaatcaattactttgttgaaataatcgattataggtggttataaatattttctctataaatatccaccttgtgttctctcttataacaacttaacgaacttctaacagtgcaaaactatttctgaatgagctagaatcacgagttga

SEQ ID NO: 285061 - DNA, 394 bp, Glycine max
ttgcttgtggttcaggtcaatggaacatgattgtacgataagtacaaggggaccctccttgtggcagttgcacaagatgacaacaataaaatccttccaatagcttttgttgttgtcgaaagtgaatcaacaagagcatgactcttctttctacaaaatttaaaaaggcatgttactccacaacatggtctatgtttgatttgaaagagaacaagtcaataaatagtggctactcaagacgtgatagtgggtggacgacacagaattctatgcatgtgttctgcatttgacacattgcacataattacatgaggagatacaagaacaatgccatcaaaaaatcaatatgagtgagtgtcaaacttctttctcttcctattaaatatcacttcat

SEQ ID NO: 285062 - DNA, 426 bp, Glycine max
taagctctttcaattgcacaaggctcttaatatttgtagagtatccttgtggaacctttacccgacgaagacactgacaaaaacttatcttctcctttttggacaaagtatggcaggctgggggcaactaaattttcttcccatcagaccttggatgcaattgtgatcgtatgcccatatcagcgagatcttgacgggtattcaagccatccttcgtcttgccttgaatgttaagaagcgtcccaatcacactgtcacaaacatttttctccacatgcataacatcaatacaatgtgtaacgtcaagatcagaccagtacggaagatcaaagaaaatggacctcttcttccatatgcaactcttacttttatccttcttttgggtctttccaaatacaatattcaggtgttgaacccgctcatata

SEQ ID NO: 285063 - DNA, 392 bp, Glycine max
tgcttgttttttagcaggaaattaaaaactgaaattatagtgggagaaaaaatactagttcccaacgtttcaactttttttggtgtacataatggctaaagtccacccgattcacctgatagactggtaatctttgtattttaaacatgtgccaattagaaaaataaaaatgacacatgatgttagcttagcaagcgaatacgagtgaataggaatagagatttgatattatgaggggaacgaagcaaagttttccagaacaaaaacatttcttcaccaatcacaaggatcacctttcctatttattgtgattgtgaacatcatgatcctaagcatcagcgtttcgctgtggctagaatattgagtaattgtcctctaatacgcacctgatt

SEQ ID NO: 285064 - DNA, 425 bp, Glycine max
tccatcaagcaaaatcatcaaaaaggtcatttgacatatagctcaaatcattaatccaagaaactatcaaaacttaaccaccaagcagaaactatacctcaaagtttaaccactcgataaaagcaacgaggcttaaccattaagagcagaaacaaaacaacgattcaatgcttaaccatccatgtcaaaaacttaaacaatgtttaatcaccgcggacagaagcttaccaggacttttcacaaacattttgtgaatcaacaataatcaaagcttaatcactcatgatagaagctaacaaatgaacaatgcttaaccaccacacatgacagaagctaaaatcatcagaacaagtcgaaaaactttagaagtatttaatcaaacaccttgtagacaaacaaaatctgaacactagacatgaagaaac

SEQ ID NO: 285065 - DNA, 381 bp, Glycine max
ttgttttttatgcattagcctgagcaatctttgaatctcaagccaatttgaattgcatgtgaaagttatgaacaaattaggaaacccaataaccccacaaattgtcattcaatcaaaatatagttgatccatatatctttgatttcgaacaaaagttaagggtagaatgactcttttccctttatttgacccctgattttgggtctgatcataacattactgcaatttgttggattcatcaactcttaattattttttgtgagtcctgatgaaatacaatctttcggactccatcatgcaatatctgtcatctacaaattgttgaaaaagtttcctagatctcaacattgtccttcatcttttctggtatgaatacaaaaa

SEQ ID NO: 285066 - DNA, 367 bp, Glycine max
actcagcttcaaggcatgctgctcaagtgcaaagcacatttaatcaactggcctcagtctttagagaacttttgtgagaggtcctcgtaattcatatcccaccgctcacttctcagatactgtggcccacaccaagtgggttactaactatgagttgaacttgtccggagatgatagatattatcctaagcatataggatataaacatctttatctctaaaaaatatcacactgtgtgatgcatagacagctatcaaaaggcctgacctttttattaacacttcatagggatcgccaaaataaaagatggtgctattgtgcgggataccgcctacggttagtattatcctctacgtgaggctcacct

SEQ ID NO: 285067 - DNA, 380 bp, Glycine max
ttgtttcaatattgcaatccaacacttgtattttcagctttagcatttttgggtccaatttgtaattagtggcccagttacacatttatgtagatttttggacagtgtatcagtgagatttatgaaaatatattcgaagatatcgtgatgtatgtagtattgattattgagatttagagttaatatcattaggatatgtgatcttatcttgtcttatctttagaatcgttgctttattaagatgaggattccatcttattaagattttgttcctctattagaatcaagattgtatataatcttatctttatgttatataagattatgaattgtttaggatttatatattttctttcttatcctatatattggaacccatg

SEQ ID NO: 285068 - DNA, 417 bp, Glycine max
  unsure (1)..(417): unsure at all n locations
tgtcaagccccccagcctggacaagttntgcccggtctgcttctgttaaagtgtttgggggtggacatacttttagttttgcaggcgaggtctaacatgttaggtgaggatagtctctgtatttggcaactctgtccttttctgacaattggagatcgcattgaagacatacgttatgttttgtcctttgatcaagcgtgtgcgacacatgtgcagcactcttgcatacaagttactcgaggagtgggcacgtactggagacgtgatgcgtgagcgagtggggctgtatcgtggtgcgaaaagctagtgcaccacttcatctcccgcaagttaccaaagagcttgtctcctctataaatgcagtggatgtttgatttgtagccaccattactatgagattattgtctctttctcttg

SEQ ID NO: 285069 - DNA, 387 bp, Glycine max
agcttcaaatatattgacttaaaatttgaagccataaatgagtaataatttttttttggaatcatttaacttgccctcaaatttatttcaacaggttcttttagtgttagttaatcgctttagtatgtgatgtattgattgtttctttaggatctgatctcgtgttacaagtatgatgttggtttgtacgttcaaaatttaaaatatttatcgtattgtgtaactataattaaatgcttatttattaattaggaaatgtctactcctatgttattaagtattgtgtcattaattttagtataaaaaaaaagtatattgtgtcatgaatatgcaaaagttgaattgttatccttcaagtaaaattggatgaatgatagagtttattat

SEQ ID NO: 285070 - DNA, 423 bp, Glycine max
tcatgctttagatgtctaatccctagcatgaggaggtgtatgttggaaatctcatattgactagtgatgtgaccaaaatagtatatataactgatctcttgagttagcttttggagttgagttaggctaagctcaaaatttcaagaggtttgatgatacgttctgtatcaatggtacttgcaaatcacaaaaggagaagacagcaagaaagggaagagatgttagccaagagccgaggctctccaagcaagagggagggtctctctgctacccaaattccactaaggatcccaatggatgatcctgaatcatcattacagaattttatataacagaatgtcagaatgtgcacacacacacacacacactccactaactaactgtccgaggggcgtttcctaatctgtcctccctattcacact

SEQ ID NO: 285071 - DNA, 384 bp, Glycine max
  unsure (1)..(384): unsure at all n locations
agcttaatagtcttctagtaaagaaatcactggtagcagtaaaattattaatcagctatatatcacgggtgatattaaataaactgcctagttataaattatttcatgcattgggctgataatagcttgtcattaagatctctatacacaaaacagaggccttcaagttcaatgaagttaactacttcagtacttcatatatgggacgcagtatatataaaatggatacttctttgccaaaaagattaattagtataaatattttaaacattttatatttaaaatggatactttttaattaacaatatatatatactcatttcttcttttaaatgaatactttttaattntatttgattacatttaattaacttggtgacagat

SEQ ID NO: 285072 - DNA, 318 bp, Glycine max
tgtgccacccacatagcataggttcttcatggttgatcatatctaggctgtggttgcaaatttgagaatctctccaataacaaaatatgaaccaagtagtaaaagggtgaccaccgatcttcctcttatcttcaccctcactaactattgtgtccttcacaggacctatatcattctatctgtgggcttaaaatattgctcgctaagtcgtttatctacatcaaggatatcatatttgttcaccaagccattgggagagaaatcaatctcttcttaccgtgttgcatcgaatgtttctctgctcatttccttcccttt

SEQ ID NO: 285073 - DNA, 394 bp, Glycine max
agcttgataatcatcaacagatttccaccagtgatatgtgagattctgtctttggatttggatccaatatgtattttagccaccctggcatcctcatttgtgaaactcgtggttttagtgtgcaacacatcattctacatgtcacatctcattgctcaaaccaaattttgcttctttatatatatatagttactacccttccgtttcaattggagttagatgatttggcctctagcttaactaaaaaatatactctcgcatgttgttagggtgtggatgcatgtcatttagaaataagcttccttgtggtggatgaaactacgattatctttggtaaaattagctgaaaagttaattgataggtgaaagttaaaaaattaatttattaaattat

SEQ ID NO: 285074 - DNA, 423 bp, Glycine max
  unsure (1)..(423): unsure at all n locations
tccaagtcanaatcaatgccaccaatgaagaggaaagattctgatcaactaattgcccacactgttaggcaagcaatgaaagcctctccattcccctttaagatattttaattttaatatttcataatagttgtgaatgaactgtgacaagataaattacaaaagctgtgttctggttacttgcaatgtaccttttaaatttgattaagtctaatttataacataattaagatagtttgttaaaatgctcactactataaaagaaatacgtatcattaagtttaaaacctaacaggaaccagtcaaccgtggctctaagtatacactatttgcaatgacattcaaattcttgtcgtcacttataaaaaccacagccactagcccggaaataaatatcataactatgatgaaatattttgtcat

SEQ ID NO: 285075 - DNA, 393 bp, Glycine max
agctttattcttgacaaagaaattaaagatattcaagatggatgatcaagacagtctctagagtcttaggaagggtatattaaataggaagggaattcctaattgaaatagcaaaaggtttggccaagaaatttaagttaaaaagtctttttcaagagatttactctctggtaatcgattaccagaggatgtaatcgattatcagtggccaaaaatgatttacaacagctattaaaatttgaattcaaaatttgcactgtgtaatcgattacacatatatggttctcgattaccagcagttattgaactttttaattcacattttaaaggttgtaatggattacacacatactgtaatcgattaccagaggagattttcagaaaatattctca

SEQ ID NO: 285076 - DNA, 429 bp, Glycine max
gtagcctgatcgctaagcgacaacttatccttggctaagcatgacctattggcaccaagctaaataccttatgaccataactgaggttcatgaagctaagcgccagtcatggcagctaagctgaattccttgcagcaatgtgagcgctaagcaagtccttattagctatgcgcatgctcctctatacttaagatgcatcattttagctaagctggtcagagcctggcttagcgagagttgcagcttttcggatctgcaaacctcactaagcggccttatcctcgcgctaagccaagcttgtgtgaaatattaaaaaaaaacttattttgaatttgaaacgttggctaagcgcgtgggtccactaagcaagccttgctgagaaaccaaatgtctctctggctcgcttagcgcaacagtccgctaagcaaa

SEQ ID NO: 285077 - DNA, 264 bp, Glycine max
agtcttttgctgatcaggacgatacggatgcagaatgcgaatgaactactaccgcatgcttcacgtcagattaccgttttaggagctctgatcaccatttgcgcattaaggccattaatggatggcagtttctacaggagcgacactctcaattcaaggacgaagtatatactgatattcaggaagagatagggcacatggggaggacatcactggttacccccatggtcatgtatttatcagaaataagcctagaggttatgc

SEQ ID NO: 285078 - DNA, 425 bp, Glycine max
tgcagcgctatccgcagactcatcagaagtcgggtgttttataaatcagactatgtgcatgactcttacacccagtgggttattgataggaccaaaagctttggcctaccctaccgcttacctaaatacctatcgtccaccatcccaccatcatccttgcctatcccctttgatactaatgaatagtttcatgaacaattaacccactactggcaagataaagaaacttggatgaggagatgccaggagctctaccatgagaatgatactttgaaggggaagatagcccaacagacccgagagctttttatccagaaccagaggatgattgagaaggacgacttgcttcgtcggaaagactctgtgctccaccgagatgctagaatgaagaggacgtttatggattcgttctcccgtgcacattc

SEQ ID NO: 285079 - DNA, 389 bp, Glycine max
agcttttatccaattaagacgacaatatctttttactcggatgactgattgagtcccgtcatatatcgagacgctcgaaattgaatgttgatgctctgagcaaattcaaacgacaataatattttactcggatgtttgattgagtcccgtaatatatcgagacgctcgaaattgaatgttgatgctctgagcaaattcaaacgacaataactttttactcggatgtctgattcagtcccgtcacatattgagatgctcgaaattgaatgttgaagctctcggccacttcaaacgacaacaacattttactcggatgtctgcttgagtcccgtaacatatcgagacgctcgaaattgaatgttgaagctctcagccaattcaagcgacaa

SEQ ID NO: 285080 - DNA, 426 bp, Glycine max
tagtaaagctaggcactaacagaatttgctcaatgcatcaacattcaatttcgagcttctcgatatattacgggactcaatcatacatccgagtaaaaagttattgtcgcttgaattggctaagagcttcaacattcaatttcgagcatctcgatatgtgacgggactgaatcagacatccgagtaaaaagtcattgtcgtttgaatttgctcagagcttcaacattcaatttcgagcgtctcgatatgttacgagactcaatcagacatccgagtaaaaagatattgtcgtttgaattggctcagagcttcaacattcaatttcgagcatctcgatatatgacaggactcaatcagacatccgagtaaaaagttattgtcgtctgaattggctcagagcttcaacattcaatttcgagcgtctcg

SEQ ID NO: 285081 - DNA, 374 bp, Glycine max
tgcttattgtatatgagtgcatgtccaatggatctctcttatgatgacctacactctagtgataagagaaaggaaccactaacatggaaacagaggctaaagatctacataaaagtagcacatgaccacactactttgacacaggtcccaagtgaaccatcttatatcatgacgtaacaccttataaaactgttttcgatagcaacatggtggccaaactcttagacttccaactttccttataaggactgcattatgcatcaaagcaaaaaccatagacaatgtgtgtgtgtgtgtgtacttatggtgatgagggtgtgtgtgtgtgtgtgattacggtgtgtgtgagcagattacgatttgagtgtgtgaga

SEQ ID NO: 285082 - DNA, 422 bp, Glycine max
  unsure (1)..(422): unsure at all n locations
tgtaaaaagggaagcaagttaaaaactcctttcattttaaaaacgttgtttctactacaaaaccccttgaactacttcacatcgatttatttggtccctctagaactatgagtttaggtggaaattactatggcttagtaatagtggatgattactcaaggttcacttggactttgtttttgaaaaccaaaaaaagaagcttttgatgcttttcgcaaacttgccatggtgattcaaaatgaaaaaggtctcaacattgtttcaattagaagtgatcatggaagtgaatttcaaaatgattcttttgaaaacttttgtgaagaaaatggaatttaccacaaattntatgccccaagaacacctcaatagaatggtgttgtggaaaggaaaaatagatcccttaaagaaggtgcaagaaccct

SEQ ID NO: 285083 - DNA, 386 bp, Glycine max
  unsure (1)..(386): unsure at all n locations
ttgcttttaccaaagagattttactctctggtaatcgattaccagtggcatgttttgttttcaaaaagctttcaactaaatttacaacattccaatcaatttcaaaatggtgtaatcgattacaatatattggtaatcgattaccagtgagtttgaacgttgaaattcaaattcaaatgtgaagagtcacatcctttcacaaaaatgctttgtgtaatcgcttacaatgatttggtaattgattaccagtgataagttntaaacaaaaatcaaaagatgtaactcttccaatggttttcaagtttttctaaaggttataactcttctaatggttntcttgaccagacatgaagagtctataaaagcaagtccttaacttgcatttt

SEQ ID NO: 285084 - DNA, 426 bp, Glycine max
  unsure (1)..(426): unsure at all n locations
tagttcctagcttagccgataaggttttccaaaagtgtgctaaggaacttaacatttctatctgacacaatggtcctaggaaaaccatggagtctcacaacttcccttaaaaagagttttaagatgtgggaagcatcatccatcttgtggcatggtataaagtgtgccatcttgctaaacctatccaccaccacaaagatagagtctacacctctttgggttctagaaagcccaaggacaaagtccatactaatgtctacccaaggtgcagatgggatgggtaagggtgtgtatagcccatgaggcatcaccctagacttggcttgtaaacaagccacacacctagtgcaaagcttatggatatctttcttcacacggngccaataaaacttgtctctgagtatgacaagggtcttgtctatccca

SEQ ID NO: 285085 - DNA, 389 bp, Glycine max
ttgcttggttcgaggtacttacccgttgaagatcgaagaacgatgaagaacgaatgaagaacgtcgaagaacggttgaaacctttgcgaaattcttcacggaaaacgttacggaaacgtttcggaagcgcctcggcttagattttcttcacggaaacgatttttccaagcaaattcgaaagagagagaagtgccaaaggggctgaaccccttccttcttcacttcctcccctatttatagcaaaataggggaggtggttgccgcccagctcgcccaggcgagccaggttgcttcctccagaagcaacagccttctggaggaatcttctggagggcccaagtgggcctgggtgctatttgcacccccatttttactaagtacacccccct

SEQ ID NO: 285086 - DNA, 425 bp, Glycine max
  unsure (1)..(425): unsure at all n locations
ntatatagactntagagctttgatccattgagatatcccaacaagtcgtagtctaatagattgggcccttttacatgtggcatgctactatgcaaagagagaaagagggtgtggtgccacaaacatcttctacaatgtatcttgagagaaatacatcttaccagtgtcgacttgtgctcagaggtgacttttagtcaacaattcaaatacaatgttagtagcacatgaaaaaaggaataaagaatgtcaagacaacacaatttaaaaactccatgttgtgcactatggcatgtatgagttactaaaccatggatgttacttttggatgataacttctcaattcttggggattgagtagttgttccatttcctttggactgcgacccaaatgctaaagcactntgtcataccctaatttcgtctgg

SEQ ID NO: 285087 - DNA, 391 bp, Glycine max
tgcttcttgagatgcctttcagttatctcattagaggctttggtaaagtctacaatctcattagaaatatcgatagtgaaataatcaatgaatcttgaggtcaagactgcatatggaaattcataatccaccagtcaatagcttttcaacatgatatcttcaatcaacagtacccaattcatttgaatacttgatttcatcccatatataatctacaagtcgtcgttcgtgacttgagtatgactgttggatcttggtgctagaatatatgtaataatgtataccaacattttgtcttccgctatcagaccaccaatacccaatctgttccttaacaatcttgtcgggtcaagaagcatacctctgtatgtggccattttgctatagtcat

SEQ ID NO: 285088 - DNA, 423 bp, Glycine max
  unsure (1)..(423): unsure at all n locations
taacaagctntntttatagtttgactgtgacctttttatttaaaaaagctttttaaaaagcttgagcttgacctttatagtaaacaaaccaagccgagccgagccttaaataggccgagccattggcccttgacaagcggctcggctcatttccatccctacttgcactcctcacctccttgagggctagaatgcatccattgcctcaactcaccatcacttaaactagcatgcttagcgcaggtgattcaactgatttcgcatgttttataagtaggcaagtaaataattacatatccaatttattaaggtcattgtttttttttttttactgaaaggagcttatctaatttcattaataatcaactactcaatacatgacaaaggatgattgaaggtatagaggttagggaagaatgaagc

SEQ ID NO: 285089 - DNA, 375 bp, Glycine max
  unsure (1)..(375): unsure at all n locations
ttagcttctcattttcttgcttcagttagttcagctcttcttgtgttaaagacaatccattgacatgcaattttagttcacttttcaaattgttgttcaaaacagaaagcctttgagcttgctcatgcatctcattaaatgcttctaaaagttctccaaagtcagaatttacctcaattttttcacttgctgacagatcatttatggattntgccataaagcacacgctancaatttcttcatcatttgaagagttggaagttgttgatgcactatcttcccatgctatgtaagcttacttttgttttttatccttcttccctttcttttcaccaccatgttntctaatgtagataagacactcatgattaatat

SEQ ID NO: 285090 - DNA, 435 bp, Glycine max
gacctatgaaactcagctattggaatatcgctaaagcctgggattgtgttctggtgttttggtatgctttgagttttatatcattgataatgattctgactagtaagccttgaatctttgagactaaagtaatttttcctgaagagattatttgtctaatgattatgacaagcaatcaaatgctggataaagaatatattttatccaaacttcagtaagagcgtgcgcaacatgtgtatataagcttgtgtgcatggttactttcgtgaaacatcaattattaactttttattgtttaaagacaaataagagcaagggtagacaacatgcaaaccattttgaccttttattgaaatttaacttatgagtaattgaggaagcaaagatcaaacacttaattacttagccataaagattatattttctttttaataa

SEQ ID NO: 285091 - DNA, 392 bp, Glycine max
gagatttctacctcgggaccctgtgaagctcaacatgctacctgcaagcttcttattgtaatacatcgcaagcgactgacttaataaatgtgacttgcaaaaattcacctaatcgatcgagaaaaatataagagcattcatcgtacgcaaaaaaagcatgctaccccccagaattaatacatgtgaataccataattagacatggcgatggtgaaaataataaaaccctatggttattacggcttcacattaaacttacaaattgcatctgatcatgcaatagaaatagcgagctcaatatggaacttgcagacatctgacaaataatacatagatgatcttatctctatcattcgcacaagagaacaatggtggaaacacactgcttacaa

SEQ ID NO: 285092 - DNA, 246 bp, Glycine max
tccatacctgatgatcagcgaaacattgctcttctcatacggaacaatgaacataatcaccttggattttgactaatttttgctcaaattaaatcgtaattcatcttggtacgaactgattaattttcttcactttatttcgatttcagttccaagcaatgacaacgaggtccatgcatgcattatgcatcacatctcatgggaatcttatatcacaaagtgcttatgattatctggaaagccgca

SEQ ID NO: 285093 - DNA, 388 bp, Glycine max
agcttgtgttagttgtatggccttagccaaggaaaacaagaacaaccaaacactttcataaaagagtaatcaggttgtttgttgaatagtttctgataaggaacttcattatttatagcatatgagggcaatctgttgatgaggtaaatgcttgagacaaaggcatggtcccaataatgaaaaggtaacttggcttgagatagaaaagtgagacccaactccacaacatgtctgcgcttgctttctactactccattttggtgatgagtatgatgacatattagtttgtgctgaataccatgctctgtcaagaattttgtgaaaggtctgaactcccctccccaatcaaactgaatagccttgatagacatattaaacttatttgaaa

SEQ ID NO: 285094 - DNA, 424 bp, Glycine max
  unsure (1)..(424): unsure at all n locations
atagagttttccaacctcatataaggaaaattctattaagtagggacgtgtacttcatggagaatgagaaatggagatggaatgatactgaaaagatgtcgatagctgaccctttgcaaaaacaatatgagttacttgatgatgcacccgtgagaggcactagattgctctcagatatttatgaaagatgcaatgtagcagttctagaacctgcatgatattggtatgcaaaggaggatccaaaatggagtgctgcaatgcaggaggagcttgtcatgattgataaaaatcaaacttgggaactcgttgaaaggtctgaacacagaaaagtcataggtgtgaagtgggtgtttagaacaaagctgaatgcagatggctcaatcaacaaacataaagcaaggttagtagtaaaggggtatgctcn

SEQ ID NO: 285095 - DNA, 397 bp, Glycine max
agcttgtcatcgtgagacatcagaggctagtattttaataaatgtgggtaggaaaaattcaccaaattgatagagaaaaatctaaaatcatacatcttaggcaaataaggcatgctagcccccaacattattgcattttgattccatctttggacattgtgattttgaaaattagaaaacccaaagtttattagggcatttcatcaaacatacaactcccaactgatctggcaaaagaaatagtgagtagaaaatggaacttgcagacaaaaaacaaataaaagaaagatgattttctctttatcattcgcagaaaagaaaaattgaggaaacacactgcaaacaaatgtttagatttccttatgtgacattatactaactagtgaaaatttagcag

SEQ ID NO: 285096 - DNA, 419 bp, Glycine max
  unsure (1)..(419): unsure at all n locations
tgtggattntagggattgagggctgttttggtttgtgtttatgtttgagtttgtgtttgaggtttgtgttttggaagaaaaactcgaagaaaaaggtttgagtttaggtgtatatttctcttcatagagtttggccaacgaaattgttctgagaagtgatgtaggtgattgtgcaatgacatccattctgatattaggttttaatcctcctacaaagcaatccaatagagcttcttgtgtaattccttgtactcgattagctaaagacgtgaactgcacgtaatatgactgaactgaaccaatttgagtgagtttaaacaactgagatctangacattcacacggtgatgggccaaattctgtctctaaggctcgcgtaaaagcaatccatgttgtgaatgaattttcatgagtcatca

SEQ ID NO: 285097 - DNA, 397 bp, Glycine max
agcttgttataaagtttgaattaaggagttaaaagtgactgtgataaacacttgtaacttgttaaagttagtaaaacttagtggtttgtcaagaaatggacatagtctcggtagttgagacgaaccaatataatttcatgtgtcttattttgtttattttctcttatgtgctttaaactgattcaaggttcaaatttgatttttgtaattaaaaatctctatttatttgcaagatttgaaactatcttctaaatcgttttgcaaaaatatgatgtatgctttctttcataattcactattagacaataatattgttgttttagaaaaatgttttaaattttctaaaaatcataattcaatccctttcttgtgatatatgtctctacaaaggttcatg

SEQ ID NO: 285098 - DNA, 422 bp, Glycine max
  unsure (1)..(422): unsure at all n locations
ntaacaaatgatctatntcttatcagtactttaattattttgtaactgccaaatataaaggcattagaacctgataatgataatggaatgatatagttagttagtttcaatcacatttttgttgaagttatttgggggcaaagaattaagagctttctatcaaacttcttcagaatgacaaagcctatatcagtaccctaagcacgtaatcaaaagggtcccaaggaagacttaacgcagcatggtgccaatattaaaaaaacgcattaatgatagcctaattatattattaatttgtgggatcacgttacgtcaccatttacatccataaatccaccaaccaatcgtgctataccaagatgcatcgaataagttacattttacacaccaccatacatacatacaaaatgctagatcgcaat

SEQ ID NO: 285099 - DNA, 394 bp, Glycine max
agcttatacacaggaaaagaacgacagagataggagaagagaacgaaatagcattggggaatttgaatttgcacatttttatttgttagtcttaacttagcaattaagctacgttcctgttttttgttctcccgtcctatttcggtggtatatatggattctgacacttgggcagtcgatctgttattatatgcaaatgcaattcatcccaagtttgcaacacaagtcaaccaaggaacaatatacaaataagtttccttttgtggaatgttcttagagtttgtgtaaagtaagccacacaatttttataaatcgtcgaataaagttgcacatccttcgactaaatttgtattaaacgttattttactggcatattctgtttaatttgagtcct

SEQ ID NO: 285100 - DNA, 428 bp, Glycine max
  unsure (1)..(428): unsure at all n locations
ntaatatataagagacatctcaaaacaaatatttttttttattaaaaactcaaaacaaaattctgtaatttataaaaaaattaaacatatttgcatcataattttatcaatcactagttgtaacttgaccaaatccatttaggtcaatattgatattcattctttcacaccaatatcctccttttcaagattatatatgtaattactgtttataattaaattagttatgttttaaacatattttcttatataattacattttttgtgtcagatgccgtggctttcaacttatgtgatgaattcttgcttgtaacttatgtggtcatgattataataaataaattttaataagaaaaagtaacgtccattatttatttttcataaattctttgtcccatcctttctcttcattnttcttatgacctttc

SEQ ID NO: 285101 - DNA, 395 bp, Glycine max
agcttgcataaccaccaaattagttttgcatcccgattattgaaaagtgacctctagcaagcacaagaacccttctaagggccattacttaagtcttggtcttacgcgtatcccggtcaaagtatgtcgagctcacttcaacatagatttttgtctaaggtagatccactatcggcaccatcaccatccaaatcgacatggatgagatgaagcttcctttattctccttcctcaatagttaaaaacctagatatgaagcaaacatcttgcattaagcatcacttgtcaacttctcaaaccatggcgctcataatgcattaaatgtgattcattactagatcccggatttgatttcgccacgaacaacctaagacttgacatatggtttggtagag

SEQ ID NO: 285102 - DNA, 426 bp, Glycine max
  unsure (1)..(426): unsure at all n locations
nttggagtaagtaggggcactttctagctgtcaagatgttataggagacaaaaccattatgaggttccattctgaggttctcattttgaagatcctttataatggacattttgaagaaccatcagaataatcattctaatgtttgctgagaatgaatccatactttgatgaattcccttgatgaagttcacattgatatttcattttgatgtagtgcagcttcaacactcttaacacttctcacaacatcaaagcattctaaagttgattacttcagacaaatttaatagaagttatgttgttggtgtgttagtattatgtccaaggtcagattgagtagtattcttcagtcttccattttgatgtttgtcatcagtgtttctcatggacaacttcattcaataatctagcacttcttatgcagct

SEQ ID NO: 285103 - DNA, 385 bp, Glycine max
agcttctcaatctaccaaaggaaaaaggggcaattactagacaactttagaattcctagaaaaagatattaaggtctacttatatgcaagaaagtttctaagcaatccaacaaaagttatatttttaagaaagaagcaacaaatgtttttaagaaaaaaagaattgcaactatgaggaatgctggaaaggttaagacctaggctagttatttttagtcaatttaattacataaccaaaaattagtaatatagtaatttttcaattttgtcctttctttctaattattttaaaatattgaatttttttttggaaattaccaaaatgcaaccaaactaggataatccctttataatattataattataaccatggcatgtaaatgag

SEQ ID NO: 285104 - DNA, 419 bp, Glycine max
tgctcgagctaagcgcaaatacccctaattgattggttgaatggttcaactaagcacacatcgctgcgctaagcccaacaccttcactgtaagttgcaccttaagcagtgggcttagcgtggatgatgcgctaagtgccacttccttgcaaagacaatccaagtaagttagcatttctacttttactttcatcctccaaaccttaggatagttgatttatagttttagtgactagtattgttgtaggttaggttacttagttttagggttaggtattttaggactttaggtagtttagaagcccattaggggcaatgtgattaaaaaggggtgaaaacccctgtgtatctttctgagattcgcgatgaacgcgctaagcatgcctgctacacttagcttgttcatcacaactgttaaat

SEQ ID NO: 285105 - DNA, 395 bp, Glycine max
agcttataagaacaaaattgcctcaatcatttccaaatatgcatgtgaattaggacgcatcaacaagaatcaagccaaggctattgtgcaagcaatcaatggggcaaaacacaccaaatgattatgatgatggatggctcaaattctcgcaaaggtaaactcatcactttcaaattgagctttcaaaactatcatgacatgtagagaagaatcaaggatttcaagtcacaaaatgtcaagaacttttattttcaaaacaattacccatttcttgaacatatcctataattcaaagaaaaacatgcaaattcgtacgtgcacacaaaattgatccaaaatattaaactgaaaatccgacgaaactaacaacattaacaaattaacacaactaacaa

SEQ ID NO: 285106 - DNA, 413 bp, Glycine max
  unsure (1)..(413): unsure at all n locations
nttcgcanagcttacggtaaaatctgggacctagttttggtagaagtctctacagaggccattgcctccctcgtccagtattatgatcagtcgttgaggtgcttcacctttggggacttccagctatcagccatggtggaagaatctgaagagatcctaggatgccttctagggggaagaagaccatacctcttctcaaggttctatccctcattagctagaatttctaagatagtccaaatctcagcgcaggaattagaccacagaaagcaaattgaaaatggngtggttggaataccgagaaaatgtttggaggcaaaagtgagaatcttggcaggtaaaggcgaataggccccgttcatagacattctcgcactggtgatcttcggaggagtcctctttccgaatgtgga

SEQ ID NO: 285107 - DNA, 306 bp, Glycine max
  unsure (1)..(306): unsure at all n locations
tgtttctctctaccatcgagtctggagccccatgactttattggctagcactgatcgtgtatactccaccctcaaatgttatccagaggcccatgaatcgattatgattcctgcaccctccaccattgactcttgatccggacaaattgactgcctagcactgttggcctattgtccgccctcaagtcttaatcggagcctcgtgaacagaatgccatnaanggatgctncaccataaagtatgtagccccacgaattgatggactatggcttttcgtctatcctgcaccctccaatcttacccac

SEQ ID NO: 285108 - DNA, 478 bp, Glycine max
  unsure (1)..(478): unsure at all n locations
agcncncccgcgcgnaattgatgcctcgatacagacggccctatgaaactcagcttgaggaagagggctcaagaacactgaaaattttttttggagcggaaatgttgtctcctttcctcttgaccagcttgcgaaaatggaggaagaatgagctactttggtgagttttggagtttaaatggacttgtagaagaagcttagagcatgatccattggtaaatcttatcctaatcttctagattagcgtgctaacttctattgggatatgagtactcagagtgaaccttgtacattgcgactcaatgcacagngcaattcttgcacatatggaaatctagctcaaataatttctgtatctctgtcaagctttactaaaccaatcacatacacacacacacacacacacacacacacacacacacacacacataacatgataatcaataattaaaagcatattaattgctgcagctacacn

SEQ ID NO: 285109 - DNA, 381 bp, Glycine max
ttgcttataatatatcgatacgctcaaaattaaacatcgaaaactctcgagaaattcaaatggccgcaacttttcacacggatgtccgattcggtcgcataatatgtcgagaggctcgaaattgaacaacggaagctcttgagaaatttagacggacataactcctcacacggatcgacgacccacgcaaaccacatgaatagacgctcacaatcgtacatcggctgctcctgagaaattcaaacgatcataacatctaacatggatggtcaatcaaggctcgtcacatattgagacactggaacttgtactgcgtgagctgtggtgcaattctagaggccatatctgtttacaccgcgagccgactaagacttatcatat

SEQ ID NO: 285110 - DNA, 355 bp, Glycine max
  unsure (1)..(355): unsure at all n locations
gaaactcagctgaatcggacatccgtgtgaaaagtatgaccttttaatttctcaagagcttccgttggtaaatttcgagcctctcgacatattatgcgcccgaatcggacatacgtgtgaaaattcatgatcatttgaatttctcgagagcttccgatgtttaatttcgagcgtatcgatatattacaaccctgaatcggacctcagtgtgacaagttatgaccatttgaatttgacgagagcttccgctgctcaacnnccaacatcactataccngacgcgcccaaatcggacattcgagtgaaatgttatgaccatttggatttctcaagagattccgttgtttatttttgag

SEQ ID NO: 285111 - DNA, 390 bp, Glycine max
tgcttgtcaagacaatgcacgcatcctcttttttcaggtccttagacttttgaatatatatcatttgcctaattagtagaatcttgggtgctttgtaaattttgtgaactctctgcttcaaccattttcttttttagttcatcctacgtaaatacaccttataaattattaccatacatcaatatcctcaatacttcaatttcactaaacaaaactcatctccacaatagttactcctcctcaccccataaccttctattagaaaattaagcaaaacaaagaaaaagtattgaaattaaaattaaaattcttacaattacaatagaagccttttcagtaacaatgcttccatcttttcgagttcgagtgacaatataaatgtatgcccta

SEQ ID NO: 285112 - DNA, 414 bp, Glycine max
ttacatcccatgttgtgataaaatcttttatataattagttatgttgaggttatgaaatgatgattcaaactgtgagtatgtgataaattgaacatgtgacggatgatgaaatacatgtgtattgagatgagatgtgtgtattgagttgtgaactataaactatgcaatcacacaattgtaagaccctttaagggcgacgagtattgtgatgggatccactgtgggaatccgacgagttaaaatgattttgaaaacaattgagtaaatgtgtgtatttcatagttcatagataaagtgtatatgattcatgaggtgtgataacatgttaaattgtgattataccattgcgattaagattaagtgtatgtgataaattgagtatgtatatgattgagatatatatgtacattgaa

SEQ ID NO: 285113 - DNA, 384 bp, Glycine max
  unsure (1)..(384): unsure at all n locations
agcttcaacattcaattttgagcgtctcgatatatgacgagactacatcatacatccgagtaaaaagttatagtcgtttgaatttgctcagagcttcaacattcaatttcgagcatctcgctatattacgggactcaatcagacatccgagtaaaaagtttgttgtttgaattggctgagagcctcaacattcaatttcgagcgtctcgatatattaagggactcaatcaaacatccgagnaaaaagaaatgggcgctggaagttgctcagagcatcgacactgaattgcgagcgtctcgatatattacgggactcaatcagacatccgagtaaatagttattgtcgccggaatatgctcagaggttcaacattcaatttcgag

SEQ ID NO: 285114 - DNA, 423 bp, Glycine max
  unsure (1)..(423): unsure at all n locations
ttgaatgcactattcaatggagttgacatgaacattttcagactgatcaacacttgcacagtggccaaagatgcatgggagatcctgaaaatcactcatgaaggaacctccaaagtgaagatttccagattgcaactcttggctacaaaattcgaaaatctgaagatgaaggaggaagagtgtattcatgacttccacatgaacattcttgaaattgccaatgcctgcactgccttgggagagaggataacagatgaaaagctggtgagaaagatcctcagatccttgcctaagagatttgacatgaaagtcactgcaatagaggaggcccaagacatttgcaacatgagagtagatgaactcattggttctcttcanacctttgagctaggactctcggatagggctganaagaagagcaag

SEQ ID NO: 285115 - DNA, 373 bp, Glycine max
tagtttgtttgaaggacagattctcattatacaaagcttgcaggaactagttcagcaaaggccagttatgagtgtagatcagttcattgacaatgtggcctggcctggagcctgaccttcttttgtgggagataatgaaagttttacagcccagtcacctcaacaacatgagccagaaccagaaacgatcactcatttgaagccaccatccctcgagctgttgatttcgcaaaaagaagattagagacgagatctaatgaggctgctcatcctagaccagtgccagcatcagctgaggcaccatttccaggagtggatccatcttcaccttagcatgcatcagactcttccactcctatcttagagatacatg

SEQ ID NO: 285116 - DNA, 416 bp, Glycine max
  unsure (1)..(416): unsure at all n locations
tctatggaggttggatctttgagcttcaatggtgattttccaccatggagatgcagcggaaggcaaaggagaagaggagaggggagacaccatccacaagggaataagccatggaagaaggagcttcaccaccaagaatgtgccttggataagaagcttgaagatgatgctttaatggaggaaaagaaagagggaaggggggagcacgaaattgaaggaataaaagagggagagaagtggaactttgaagtgtgtctcataagactttaatgcatcaaagntacaacaaggggtacacatgcttctatttatagactaggtagcttccttgagaagctttcttgagaaaacttccttgagaaacttctttgagaaaacttccttgagaagctagagcttagctacacacaccactc

SEQ ID NO: 285117 - DNA, 95 bp, Glycine max
agcttcaggttgctcattgactccaaatttttgcaaagaaggacaaagatctgtatgctgatctgcagaagaacatagatgacagactcttgcaa

SEQ ID NO: 285118 - DNA, 98 bp, Glycine max
tgacacatcttcctctgtttccttccccatggtagttctatcatcccgagtgatctctttccattttctaaaatccaaaccctttttcctcctccttt

SEQ ID NO: 285119 - DNA, 390 bp, Glycine max
atctttacagcacattttagtaatgacccactaacctagaattaaaataactcaatgccattaacctacggaattaaaaaaaacataatggctgagtgtaactgaaattgtggcaaccaaaattcacccccaacagccaacatgtcagccaccatttggtctcccaaaaggctgatgcctacgatgccaattgggcccttattacaacttgaactaaacctaactaacgcccttttagttgattaacccaaaacatatttttggtcaggcaactttacaaggatcgggccattatttagacaaactaaacactcttaaattgaaacatagtggtgtcatttagtcctcctccattggggccatgatacaactcacaagcttggacttttc

SEQ ID NO: 285120 - DNA, 384 bp, Glycine max
tggtgatgagcttcattgtaagagacaaaattggttctgaataatagctgtcattctgtgaagctagtggaatttggcgttaaccaagaactggatgtaatcccaatgatagaaatgaatcagtataaatctttgagtctgatgtttattctatttatctcatgctttagacttacttatgttttgaatttgattttggctggaaaacatattctattctgcacaatagatttctatggactgaacttgttgtgaaaattaggtgagagctttgaaaacttatacttcaaacggtgactttgtttctcccaaaataaggttttaaaatttataaaatcacaatccactcctctgcttatgatatatgactttatagattggtat

SEQ ID NO: 285121 - DNA, 372 bp, Glycine max
atgcttctttccaccaaggcgttagttaagactcatttaatttaactcctcacaatttacagtaccctcttcctcccaattaagtctcacatttcattaattgcgctagtaactggcgtcagttaagtttacccccccagagataaaatgataaagaagctatagagagatatataggtggatactagaaacttgagctaactatgctgatatatatatggcaattatagtactagaactactatctttggttttatttctaacctcatttgttcgaatcaccaataacgagaggctcttataccttgtcacaggtgcaaaggtatgttcaccacgatgtgattcgattacatgatctggaagactcattga

SEQ ID NO: 285122 - DNA, 412 bp, Glycine max
taaaggaacattcaaatcgggtgtatttacccgtatgtctagactccaaagagttcatcagggtctctccttcctgatttaggtccaatcccgaaaatattttagcacacagactatctataaactgtacaaaacacatgactccttaattgttgtcaaaataattttaacttgtcgcatctcaaagtgattaaactcgtcaggttcccacagtggatcacatcacaatacttgtcgcgcattaacccgttgaccttaaagagtcttacagttgtgtgattatacgggtcatagctcacaactcaatgcacaataatatgtcaatacacatgtatctcacaattcatgacatattcaatttatcacttacacacaatctcaatcacaatgtcatgatccatcccaatataac

SEQ ID NO: 285123 - DNA, 224 bp, Glycine max
  unsure (1)..(224): unsure at all n locations
caatgactaacaccatattgtcttacaaacgaataagcaaattatatgcatagtctcttttctcaagatgaataaagtgttgtgagagcttttctaaactttacaagaatatacacatgagagattttacacagaatgatataatgagtgcttcanatcatgctacatatcttcaaagcttctgggatatatagggccttnttaatcaagtaattggtatatct

SEQ ID NO: 285124 - DNA, 420 bp, Glycine max
ttgaagtaccaatcaaagcccttaccatcagaatcttgacaggttcaacataattggcttgaacttggaaaggattagtatccacttgcataggcttttcttcaaacttcaacatttcttcatcaatagtcttttgtatcatatctctgaaaggtaaacaactataagtccaatgtccatagacatatttaaatttgcaatatctatttccttttctttgctcaaatgttgtaattttatgatcatcactaagtgcaatttgtttatcctttaattatacatcaaaaattttatcagacttagtaacgtcaaaactatattttgagtttacaaattctttttcttctggttttaacaattgacaaatataaggaggaccatattgtaattttgctaaataaacttcattctcctaattat

SEQ ID NO: 285125 - DNA, 294 bp, Glycine max
  unsure (1)..(294): unsure at all n locations
tgtctttttgctagacctcgatcggtcatctttccaggccgaggtcgaccgtcattnntttcgatccatttcggtgaatgatatttttttgccgagatgggctaatgttttcctggccgaataaatgggaaaatgccagtttccgccgaaacgaaaagtcggatgggctcgcacaaaaaaacctagccgacctacattataaattttttatgcaacaccaaaacaagaaaacttcctgtgccgtataaaaataaaaaacattacatgacagcgagcgctttgaaaaacaaaatt

SEQ ID NO: 285126 - DNA, 422 bp, Glycine max
tcaccggatgacgccgatcgaacatttcctaacctacgttatgcaaatttcgttcagggattgaattgaaaactcgttaggcgacatctgtcgtgaagtagcgaccgatatttttcagccgacattgcacaattctttttagaaaagctcgctggtcgataatggtctttttacggcagagtaagttttcttgttttggtgttgcataaaaaagttacaatgtacttcggctaggtttttcgtgcgagttcaaccgacattttgtttcggccaggaaaacattagcccacctctgcaaaaaaaatatttgctaaccgtcttcatgcatatttcattcaacgattgaatagaaaactcaatagccgacaacggtcgtgaaatagtcccgactgatatttttcagccggcattgcgcatttctt

SEQ ID NO: 285127 - DNA, 388 bp, Glycine max
  unsure (1)..(388): unsure at all n locations
agcttgcttgtggggcttctatggaggctggatcttagagcttcaatgaggtcctttaatggtgattttccaccatggagatgcagcggaagacaaaggagaagaggtgagaggaggcgccatccactagggaataagccatggaagaaggagattcaccaccaagatgagccttggataagaagcttggaaggatgcttcaatggaggaaaagaaagagggagcgaaagagagaggggggagcacgaaattgaaggagaaaaagggagagaagttgaactttgagttgtgtctcacaagactctcattcatcatagttacaactagtgttacgcatgattctatttatagactangtagcttccttgagaagcttccttgagaaaac

SEQ ID NO: 285128 - DNA, 387 bp, Glycine max
tgagtgagccaccatagactgagacaattttgtatacacatccttgtaaccatactatcactttgtatagtggaagaatctccatattggaaaattataatcgtgtgctcccattactacctttaattactaagtgcctatcttaacttcacgaagcgggaaagtccgagttttcccaacagtggtatcagagccagatggttcgacttggtgaccggctcagacgagtaaaatggcggtgatggatctcagccttggggatcccttgtatcgaaagtcttccaagcagtgagtccaggcagcgtgtcccgcagatggagcggcggtgcaagtaccgcaggtagctagagcatgaaggctctaatggttatactcgtggatgatgac

SEQ ID NO: 285129 - DNA, 395 bp, Glycine max
ggtcttgctttcttgaggaagttcatgatgaagttgttaaatcactagagaatcatcttgagtcaaatcaaacaaagtgttgtaacactgttagcttagttggacgaaataaacttgagcgaattgagtgaaccctagctctactaagttagcaagtttccattgtatttgaacttactatctaaaaaatccttgagtgattagaatacatattctatgaaacatttattgtttgggaaagctagaaatggcttcatgacaaaaaatacttgattcttaatctcaaagagagattaagggtagtgccaaaagtggcttagagaatacttcttgtagagagaagtggaataaagaatactaggttataatcaaagttttgattagtggagcccttc

SEQ ID NO: 285130 - DNA, 406 bp, Glycine max
tggttgtttattacttgcaggtacttacgtatggatgcaagtggggatggagtcacgaccgactgatcgttgccccttctctgcgctaaacaaacagagaacgtcgctgcaagacagccccgtatcctttgtattcgcagttttcttttactatttgtttgtcttaaaaagaaaataataataaataataagtcgacgcctaaattctaacttaagtaagttcaagttaggcaagacgctaacccatgagaaaggaggggacatggctaatgttcccctcaagaaaaaaaaatgcaggttagctcgcctgggcaagctgagctcgcccgggcgagccacccctgcaccaaaatataagaatgacgaaagggtgggacgttttgcattcaaaaacttcttttccccc

SEQ ID NO: 285131 - DNA, 376 bp, Glycine max
ttgcttgttatgctaaagatcatttaaattggtatcaatattttgtccttagaacaaagcactcaaaaagacacacatctccggttctctcttgtttctgtagcatctgccaaataataatacataaaataaaaaattcccctgtaactcaagctatatcgtgcgatgtcctggttgtgttgtgcttaatgtgcatgaaatgcaccctcgttttattaattttgaagactaatataatttcaaggaccattaagatgacgatttacgcgttaagaaagtgattcagtcctcacattaaaaattaattggagacatatataatacaatagcagccatctccgcacttcattaatatggaataaaacaaaggagttaa

SEQ ID NO: 285132 - DNA, 397 bp, Glycine max
tggtcatagcaaaccactttgcatgccaaacatgtgttctcagcctcttggttacatccctagaagtgcaaaaaccattctctaggtttttctttagttcatatctccgatgaacacatcgaggaagcttcttttggtgattctcctccaaacctgatttggcaagggctttatcaattattcccagtttctgcctctttcttctgcacccttttcttgcaatttggttatcaaacacaattgtccttcttctcttgttcttttgagacctataatcattgcttactctattttctatgatagattgaagactatggagttcgagagcacgggattcagcatatttctgcaaattgattttccaaggtggtggtggtggtgtatgtactgaaacttg

SEQ ID NO: 285133 - DNA, 386 bp, Glycine max
  unsure (1)..(386): unsure at all n locations
tttcttgaaagaaatctcaagaaccgntggttgcttggggactggatgtaggcacgggttattgccaaaccagtataaatcttgtgtttgtcttcttcttccctacactctttaaattatgttgtgtacttttaatggccgcttttacttttggttaagtttttgtttctgttcttcactttcttaacttagtagtaaaagcctagttgaatctagtaacattaagaaggataaatttttaattagtcaagacacattaataattaattcaacccctcttcttaattattccgaggccacttgatccaacaaccatgagtcctacaattcttaaagggacaaggtaagctaaacaaaaggcatgccacatgggtggaatttcttga

SEQ ID NO: 285134 - DNA, 419 bp, Glycine max
tatactgtagctgtcaaaaaccctctagtattcttttacaacctattgtaatcaattacaggggcgtgttctatgacaattgattacagggggtggtaattgattaccagaccctaaaacatggattttcaagtaaaataagcattaaaactaactattttacacccacaaaagtacacattcaatataagtaagcaaaatatataataataaaaaacaatcatcaaaagcaatcaacaatcatcataactttcaaacacaatcatcaaagacaatcaaaactcaataaaaaacaatcatcaaaagcaatcaataatcatcataactatcaaacacaatcatcaaagacaatcaaaactcaagcaaaaacgaataataaaaactcaatcaaaaacaatcatcacaaagcaatcaataat

SEQ ID NO: 285135 - DNA, 380 bp, Glycine max
  unsure (1)..(380): unsure at all n locations
agctttgatggtgcgtagcccaccatcttttcatagtagagtatcgataatgtgtctaccatcacgatcatcgtctccctttccatcattgggggtaccacctgggccgccagatccctccaccttttgggcgtgttctttgaaagatccgtccccctttttgcaaatgttctgtagttgcatcctatccggaaccatatcaaaattgtactaatactgcctaacaaaggcaaccattangtccttccaagaatggactcgggaagattccaagttagtgtaccaggtaatagctaccccagtaagactctcttggaaggaatgtatcagcaattcctcatcttttgcgtattcccccatcttctgacaatacatcttta

SEQ ID NO: 285136 - DNA, 407 bp, Glycine max
  unsure (1)..(407): unsure at all n locations
taggaaccccaacgttntagcttcaatgcatgatttcatactcatgactaggaacccaaaatttggttttaaaattagaaaagcatgaaaatagggacttgcttgtaagaattcgggctgccccatgattggtgctttgcacctaagtaacatgggaaatgcttttcaatggtatgtagatatatgtataaatataagggccataaaattcctcgccaagtatgaataattgttttcttaaatgaatgtatgatagtgtggaatgcttttttgaatgcaaatatgtgcaggatgtaattagctttccaatatgcatataaataaatatgagtgaaacagtaaaaatttgtatggtgtacttcaaatgtatgtaagtagtttgtgatagcaaatgtttaggatataaa

SEQ ID NO: 285137 - DNA, 391 bp, Glycine max
tttgcatttttgcatttggaattgcgaaagccccactccatcattatgattagtacctgacatctcaaacaaacaaatcaaacgtaacaagacaattatagttgttgtttgaatacctcacccactcaagtgtatcacacaattatggcttttctctaatgaaacactcttgccttttaccactctaattccccttgagttcttaggcaattcaagagattatggccacaacaaagaacaattcaccaatatgtgtaaggtaaggctagagagacaaggaaaaggttaaccaagaaaaggctaacaatgtttttaggcacaaatgaaggaaataaaattcagaatttacgaattcaagtaacaatccttcatgcaaccaatatattacctt

SEQ ID NO: 285138 - DNA, 555 bp, Glycine max
  unsure (1)..(555): unsure at all n locations
tagcgctaccgcancntcatgcatcacattgttaacattacatacttgatcnggncgncgacntcccccccccccccagcaagaggcattgatgcgtacgatagccacgcgagcgacacaatacacacncaagccgacagcacatagtactaacagacccacggattatacactccaagaaactcaacgccatgaacctaaggagagaaaacacacacaatggctgattgtaactgaaactggcgcaaccaaaagttacccccaacagccaacaagtcagccaccaaacagggcacccaacaagctgacgcctaaggtgccaattaggcccacaaaacaacctgaacaacagccctacacaaggaaaaacccaaaaaagaatctcagcctaccaactttacaaagaccggaccattacagacacaaactacacaccccgaaaccgaataaagagcggccatgcaacgctccggcatgtaggaaacgagacaacccacaaccttagacttacctacgagaaacaacggccggaaggcaaacacaccaacaacaccg

SEQ ID NO: 285139 - DNA, 378 bp, Glycine max
  unsure (1)..(378): unsure at all n locations
ttgcttggttacctccttcttgactacatcaagaattaccgggttgagtcttctctgtggctgtcttactggtttagccccatcctctaaatttatttgatgcatacatgtggatgggctaataccaggaatgtccgccagggtccagcctataaccttcttatgcttcttgagaactgataacagcttctcctcttgctcattagcaagggaggaagatataattactggaaaactattgctatcatccaagtaagcatattttaaatttgatggtagaggctncaattctggtgtgggcgattagataatggtagaaagagatggtttctcagcctgtacctcatacagaaagtcagaggtatgtgtacttcctga

SEQ ID NO: 285140 - DNA, 409 bp, Glycine max
tcatcatctactcaagaaggaagtgatatggaggactcaattgaaatagacgaagatgatgatcctagtttatttgtaaaaagattcaacaaattcttgagagtaagaggaaatcatagaagatcaaattttaaatcaaagaaaaggacagaagattcatcctctactccaaaatgttatcaatgcaatcaacctggacatctgagggttgattatccaatgttcaagacaagaatagagaaatctgaaaagaaagtttttaatgaaaagaaggcaaagaaggcctacattacatgggatgacaatgatatgaactcatatgaagattcagaaaatgaagtagtaaacctgagtctaatggccaagagttatgaaagcgatgaagaggtaacatcttccaataacaact

SEQ ID NO: 285141 - DNA, 375 bp, Glycine max
  unsure (1)..(375): unsure at all n locations
tgcttacttggattgttgaaaataagtgcaaaaaggaaggagaggtgcaggcagtgtcaattggaagcaaggtgcagagtgaatgcaaggaatggggaagaaaaatgcttaaaggagagaaatggtaactacctaaggcagttacgcctctttaccttttggcagtttcgatccattcgcttagcacatagacttgataagcgagcctaagtgatgtttgagttttgaaaagctcatgtgcttagcgactgtactcactcagcccaattcaagaaatttgaaattccagagaaacttttgggcttagcgcanagatacatgctgagcgagttctacagatataaagtgtcttgcaactcgtgcttagcgggcatt

SEQ ID NO: 285142 - DNA, 409 bp, Glycine max
taaagtatgtccgagtcatttatttctatgagatgttgttgaagtattggcgatcagaattgccattccttggattatagggttgaaccaagctcatgcttttacaaaaaggttcatcaagtcaagttgaaatatggaagtaaccgtcttgcaaaattggggcaaaagatgaatcgagtcacatcactgcttcgtctactgccaaacatatttaggattgttgatgtccttgttacttccagtttcaccttgacaaagatgtcatggaccatgttgaaaatctaaattgattcaaccccatatcctgcgtaaaaattcgcaatacttcaactgtacatcattcacatacatccatgcttttaattggttgcattgctcattgcattctttccttgaaaaataaaataaa

SEQ ID NO: 285143 - DNA, 326 bp, Glycine max
  unsure (1)..(326): unsure at all n locations
atgctntgatgcaaattcaaatgacaataacttttgagtcggatgttcgattgtgtctcgtaggatatcgagacgatcaaacgacaataacttttaattcgaatgtctgattgagccctttaatatatcgagacgctcgaaattgaaaacagaagctctatgaaaagtcaaatggacaaaactttcaattcggatatctgattgagtcccgtaatatatcgagacgctcgtaattgaaaactgaagctttgaggaaattcaaacgacaataacttttgaatctgatgtgcgattgtgtcccatacgatatcgagatgctcgttatt

SEQ ID NO: 285144 - DNA, 419 bp, Glycine max
tcaacatcagaccacttccagggtgctggaactacttcacatggacttgatggggcctatgcaagttgaaagccttggaggaaagaggtatgcctatgttgttgtggatgatttctccagatttacctgggtcaactttatcagagagaaatcagaaacctttgaagtattcaaagagttgagtctaagacttcaaagagaaaaggattgtgtcatcaagagaatcaggagtgaccatggcagagaatttgaaaacagcaggttcactgaattctgcacatctgaaggcatcactcatgagttctctgcagccattacaccacaacagaatggcatagttgaaaggaaaaacaggactctgcaagaggctgctagggtcatgcttcatgccaaagaacttccctataatctctgggctg

SEQ ID NO: 285145 - DNA, 395 bp, Glycine max
  unsure (1)..(395): unsure at all n locations
tttcttgtctttttcagggtatacgaaagaaggcccaggaaattcaaaaatttaatgactgccctcacgtactgtctcgtggggggtatgaactgcttgacaagaaacttatggaggagaagagcaagcgtggacatgaggaacattcgtgtactgaaagcccaacactcaacgtcgacccaccatccctagttgcaagacacttgaagtggaagatcgcccgcactaagcggcatggccaaatgacgtctgaagtggcacaagaaattgcagacaaaattgtcagttcatatatttttttggttactatcattggcaaataatggttagctaacctagtcaaatttgttttattcanattcaacaattgtatatgcatgcaggattcattacag

SEQ ID NO: 285146 - DNA, 418 bp, Glycine max
tgcatcatgtgatatcaagagcatcttcatctatgtgatgttcttttgcttcctctatctttttgttcggtgaattctctttaattccttgttcttcatcttatcctccatgtatatcctccattgtcttgtggtttggtgctgtttagagtagattccaaaaaaaaaaaataaaccgattaaatcttagatctatacttgttcttgcatttctatggttcaaattttgtagatctactcttgaatcatgtttttgtgttgatttcaggttctatcatttttcattcataatattcttgtgctgaaccttagatctaaattttcttccaaaatattgattagaaaaaaaaacacaaaaatctaagtgtaaatcacttaatccatgttgtcttagagtcatgtttagtcatagtaattg
